United States Patent Application Publication US 2006/0150283 A1 - sequence listing, part 3

SEQ ID NO: 7401 - DNA, 2161 bp, Zea mays subsp. mays
  misc_feature (1)..(2161): Ceres Seq. ID no. 13494407
  misc_feature (1)..(2161): Ortholog of  Ceres SEQ ID NO 15177969 as cited in SEQ ID NO 58823
  misc_feature (1)..(2161): Ortholog of  Ceres SEQ ID NO 15177963 as cited in SEQ ID NO 59105
  misc_feature (1)..(2161): Ortholog of  Ceres SEQ ID NO 14302746 as cited in SEQ ID NO 66646
  misc_feature (1873)..(1873): n is a, c, t, g, unknown, or other
  misc_feature (1914)..(1914): n is a, c, t, g, unknown, or other
  misc_feature (1981)..(1981): n is a, c, t, g, unknown, or other
agaagaggcctccccgctccgcgttccccagcgccagcggtaacccaacccaactcctctgagctgtgacacagctgtcctcctccccccactccaggcgctcacacaccctccacttccctccacaggaatccgccgccataatctcctccgctccgctccactccgcattgcaggattgcgccgagcacgagcaccctcctccccgaagcctcttctttgctctgctttcggtggtatggtgggatgatgagcagggcggcagtgctgctgtgtctcctctgctgcctcgccgccgtcggcgaggcggcgtcagtggtgggcgagggcgaggcggcggagctggccgtgtcggtggacccgtcgtggcggttccctagccagcggctgcgggacgcgtacgtcgcgctgcagacctggaagcagcaggccatcttctccgaccccaggggtttcaccgccgactgggtgggcccgggggtatgcaactacaccggggtcttctgcgcgccgctgccgcgcggggtgccgggcgccggggagctcgccgtcgcgggcctcgacctcaaccacggcgacatcgcgggctacctcccgccggagctcggcctgctcgctgacctctcgctgctccacctcaactccaaccgcttctgcggcctcgtccccgccactctgcgccgcctccagcttctcgtcgagctcgacctcagcaacaaccgcctcgtcggggcattcccggccgtcgtgctggagctcccggcgctcaagttcctcgacctccgcttcaacgacttcgagggcgccatcccgccggagctcttcgaccgcccgctcgacgccatcttcctcaaccacaaccgcctccgctccccgctccccgacaacttcggcaactccccggcctccgttatcgtactcgccgacaacagcttcggcggatgcctcccggccagcctcggcaacatgtccggcacactcaacgagatcctcctcatcaacaacggcctcgactcctgcgtcccgccggaggtcggcttgctccgggaggtgaccgtcttcgacgtcagcttcaactcgctcgtcggcccgctgccgcagcaggtggccgggatgcgcaaggtggagcagctggacgtcgcgcacaaccgcctgtccggggccgtcccggaggccatctgcgccctcccgcggctcaagaacctgaccatctcctacaacttcttcaccggcgagccgccgtcctgcgcgcgcgtcgtgccttcggacggtgacaggaggaactgcctgcccaaccgccccacacagcgcacgccgcagcagtgcgccgcgttctactcgcagccgcccgtcgactgcgccgcgttccagtgcaagccgtttgtccctgttccgccgccgccgccgccatcataccccggcccgttgccaccggtataccctatgccgtacgcatcgcctccgccacctgcgcagtaccgatgattcgtcgaggagggagaagcactatcactttcaccttaattcaccaccaccgctgctgcgctggatgaagacagcaaagtttcaccgtcacaattgtacgtggtcagtcattgttgtgcttagattagtagtgttcttgattgatagctaccggcatatagaagattatattattataaggtgcatatatcgctcttgcttttgcattggtcgttctctgtttttcgcgttgatcggggtttgcgtcacggtgatggtgaaatagatggtcagatggaggtgaaaaggattggaaggaacnatttgagtttggattgattgctaattggctgactgcttgagagagagatcaggatgacgaggaggattggttggtgacttggcgccnccttgggcctcggatgtatagggggaattaagcttaagttnttcagttaagctactgctttcagttgggagcccggagataagttttcagaccaaggaatgtaccccncttaactattctttttgcatttttatgtcacagctacttactgttaatcgattgttatgatatatctgttttgattcttagaaggttttggtcctttgcttgctactcaatgttgtttagttcacatatttgtaacgcaatattcgtttaagtctaaccgtaatcagataccttaccgtg

SEQ ID NO: 7402 - protein, 412 aa, Zea mays subsp. mays
  peptide (1)..(412): Ceres Seq. ID no. 13494408
MMSRAAVLLCLLCCLAAVGEAASVVGEGEAAELAVSVDPSWRFPSQRLRDAYVALQTWKQQAIFSDPRGFTADWVGPGVCNYTGVFCAPLPRGVPGAGELAVAGLDLNHGDIAGYLPPELGLLADLSLLHLNSNRFCGLVPATLRRLQLLVELDLSNNRLVGAFPAVVLELPALKFLDLRFNDFEGAIPPELFDRPLDAIFLNHNRLRSPLPDNFGNSPASVIVLADNSFGGCLPASLGNMSGTLNEILLINNGLDSCVPPEVGLLREVTVFDVSFNSLVGPLPQQVAGMRKVEQLDVAHNRLSGAVPEAICALPRLKNLTISYNFFTGEPPSCARVVPSDGDRRNCLPNRPTQRTPQQCAAFYSQPPVDCAAFQCKPFVPVPPPPPPSYPGPLPPVYPMPYASPPPPAQYR

SEQ ID NO: 7403 - protein, 411 aa, Zea mays subsp. mays
  peptide (1)..(411): Ceres Seq. ID no. 13494409
MSRAAVLLCLLCCLAAVGEAASVVGEGEAAELAVSVDPSWRFPSQRLRDAYVALQTWKQQAIFSDPRGFTADWVGPGVCNYTGVFCAPLPRGVPGAGELAVAGLDLNHGDIAGYLPPELGLLADLSLLHLNSNRFCGLVPATLRRLQLLVELDLSNNRLVGAFPAVVLELPALKFLDLRFNDFEGAIPPELFDRPLDAIFLNHNRLRSPLPDNFGNSPASVIVLADNSFGGCLPASLGNMSGTLNEILLINNGLDSCVPPEVGLLREVTVFDVSFNSLVGPLPQQVAGMRKVEQLDVAHNRLSGAVPEAICALPRLKNLTISYNFFTGEPPSCARVVPSDGDRRNCLPNRPTQRTPQQCAAFYSQPPVDCAAFQCKPFVPVPPPPPPSYPGPLPPVYPMPYASPPPPAQYR

SEQ ID NO: 7404 - DNA, 789 bp, Zea mays subsp. mays
  misc_feature (1)..(789): Ceres Seq. ID no. 14312670
  misc_feature (1)..(789): Ortholog of  Ceres SEQ ID NO 14306355 as cited in SEQ ID NO 1268
tcgaaaaactccaaccgccgagccagaggcacccggagcagcgcacagcaagtcagcaacagagcgcacaccgtcgccgcatccgcctccgcagcagcagcaatggcgcgcgccggcgctctctgcctggtgctgctctgcctcgtggccgcgcactcagccgcagcgcagaagtccacgacggccccggccgccgcgccggccgccgccaccaccccgccggcgaccccgaccaagaagacgcccgcgcccgccgccgcgccgcccaccaccccggccaccctggccccggccgccgccccgcccaccacgccggccacccccgcgcccgtcgctgcggcgcccactaccccggccaccctggcacccgccgcggcgccgtgatggcggtggcggctacggcggtggcggcggctacggtggcggcggcggctacggtggtggtggcggcggctacggcggtggcaaccgtggcggcggctacggcaactccgacgggaactggaggaactgagcggtggggcccgcgcggccaagttatcctgttcgctaccgtgatgtttaccctagtccagagggtttatcttcgttcgtgtcgtgtttgttgttgcccatctgtgtttttgattgcaaggtcgctctgtgtcagttgttagtgctgtgttcatcctcggtttcagcagacccatgcatcaaacagcatggactgcggatcgatggatgctgttacccccgtcaggctttattctaagttaatcttaaggaaaaaatggtgcttcttggtgctgc

SEQ ID NO: 7405 - protein, 217 aa, Zea mays subsp. mays
  peptide (1)..(217): Ceres Seq. ID no. 14312671
EKLQPPSQRHPEQRTASQQQSAHRRRIRLRSSSNGARRRSLPGAALPRGRALSRSAEVHDGPGRRAGRRHHPAGDPDQEDARARRRAAHHPGHPGPGRRPAHHAGHPRARRCGAHYPGHPGTRRGAVMAVAATAVAAATVAAAATVVVAAATAVATVAAATATPTGTGGTERWGPRGQVILFATVMFTLVQRVYLRSCRVCCCPSVFLIARSLCVSC

SEQ ID NO: 7406 - protein, 170 aa, Zea mays subsp. mays
  peptide (1)..(170): Ceres Seq. ID no. 14312672
RKTPTAEPEAPGAAHSKSATERTPSPHPPPQQQQWRAPALSAWCCSASWPRTQPQRRSPRRPRPPRRPPPPPRRRPRPRRRPRPPPRRPPPRPPWPRPPPRPPRRPPPRPSLRRPLPRPPWHPPRRRDGGGGYGGGGGYGGGGGYGGGGGGYGGGNRGGGYGNSDGNWRN

SEQ ID NO: 7407 - protein, 127 aa, Zea mays subsp. mays
  peptide (1)..(127): Ceres Seq. ID no. 14312673
SKNSNRRARGTRSSAQQVSNRAHTVAASASAAAAMARAGALCLVLLCLVAAHSAAAQKSTTAPAAAPAAATTPPATPTKKTPAPAAAPPTTPATLAPAAAPPTTPATPAPVAAAPTTPATLAPAAAP

SEQ ID NO: 7408 - DNA, 895 bp, Zea mays subsp. mays
  misc_feature (1)..(895): Ceres Seq. ID no. 12343628
  misc_feature (1)..(895): Ortholog of  Ceres SEQ ID NO 14304811 as cited in SEQ ID NO 53097
aaattgtatctgcagtcgcccacctccatgccaacggtattatgcatagagatttgaagcctgagaacatcttactggatgctgatggtcatgctatgctgactgactttggtgtggcaaaagaatttgatgaaaacactagatcaaactcaatgtgtggtactgttgaatacatggccccagaaattgttcagggccgaggtcatgataaggctgcagactggtggagtgtgggagtccttctttttgaaatgcttacaggaaagccaccgtttgttggtggaaacagagacaagattcagcagaagatagtaaaggagaagataaagctgccaacatatttatctagtgaagttcactcaatgttgaaaggattattgcacaaagaagctggcagacggctgggaagcggaccaggcggcagtgacgaaatcaagaaccacaagtggttcaagtctgtaaactggaagaggctggaggcccggcagatcgagccaagcttccggccgaatgttgctggcaagacctgcattgcgaactttgacgagtgctggacgaacatgcccgtgcttgattctccggtggccagccctgttgcggccaacagcaactttgtggggttcagttatgtgaggcccgcaccgttcctccagaagccgagtccacttggctaaagaactacttccgtgatctgatatctaacccggagttcaaataactatctttgagtctgaatcctatgtatttcttcaagacattagtgatgggaatctaaccttattgttgtgttgtgggtaggccagccaagcgcctattgcttgagaacaacagcttggcaagtgacaatgtgcaatattgccagaagttcttattgaagcgccataataattctcct

SEQ ID NO: 7409 - protein, 223 aa, Zea mays subsp. mays
  peptide (1)..(223): Ceres Seq. ID no. 12343629
IVSAVAHLHANGIMHRDLKPENILLDADGHAMLTDFGVAKEFDENTRSNSMCGTVEYMAPEIVQGRGHDKAADWWSVGVLLFEMLTGKPPFVGGNRDKIQQKIVKEKIKLPTYLSSEVHSMLKGLLHKEAGRRLGSGPGGSDEIKNHKWFKSVNWKRLEARQIEPSFRPNVAGKTCIANFDECWTNMPVLDSPVASPVAANSNFVGFSYVRPAPFLQKPSPLG

SEQ ID NO: 7410 - protein, 210 aa, Zea mays subsp. mays
  peptide (1)..(210): Ceres Seq. ID no. 12343630
MHRDLKPENILLDADGHAMLTDFGVAKEFDENTRSNSMCGTVEYMAPEIVQGRGHDKAADWWSVGVLLFEMLTGKPPFVGGNRDKIQQKIVKEKIKLPTYLSSEVHSMLKGLLHKEAGRRLGSGPGGSDEIKNHKWFKSVNWKRLEARQIEPSFRPNVAGKTCIANFDECWTNMPVLDSPVASPVAANSNFVGFSYVRPAPFLQKPSPLG

SEQ ID NO: 7411 - protein, 192 aa, Zea mays subsp. mays
  peptide (1)..(192): Ceres Seq. ID no. 12343631
MLTDFGVAKEFDENTRSNSMCGTVEYMAPEIVQGRGHDKAADWWSVGVLLFEMLTGKPPFVGGNRDKIQQKIVKEKIKLPTYLSSEVHSMLKGLLHKEAGRRLGSGPGGSDEIKNHKWFKSVNWKRLEARQIEPSFRPNVAGKTCIANFDECWTNMPVLDSPVASPVAANSNFVGFSYVRPAPFLQKPSPLG

SEQ ID NO: 7412 - DNA, 1109 bp, Zea mays subsp. mays
  misc_feature (1)..(1109): Ceres Seq. ID no. 12353933
  misc_feature (1)..(1109): Ortholog of  Ceres SEQ ID NO 15169195 as cited in SEQ ID NO 55200
  misc_feature (1)..(1109): Ortholog of  Ceres SEQ ID NO 15226540 as cited in SEQ ID NO 58479
  misc_feature (1)..(1109): Ortholog of  Ceres SEQ ID NO 13581611 as cited in SEQ ID NO 59028
  misc_feature (1)..(1109): Ortholog of  Ceres SEQ ID NO 14301693 as cited in SEQ ID NO 69246
gcacagtgccactgaccactgcgagctctccctccagtttcacacaccctgatctgttcgcatcagtctcccggtcgcaagcgcctccgaaaccctagactcgcctcgcgagttgcttcgcttctcctgcccccgatggagccgtccccggcggtcgctgcggagctctggtgctcaccgcacctcgccgcgggcggcggccgcccgttggaggcgacctcggccgtcacggagaagagcagcggcggccgcggaggaggcggcgccgtccggaggaggccgagggagaccccggtgtccgaggatgactcgtcccggatcgtctccacttccggcggtggcggcggccaggatttgactgatctagaagcaaagcgttccaaaacaaataagtccagtaataataaaggcagtctaagaacagaggttgaaactgactcaagaagtgctggcaaggctgttagtaaaaacattccagcagcagagccaccaaaacaagattatatccatgtcagggcaaggaggggtcaagcaactgatagtcatagtcttgcagagagggcacgtcgtgagaaaataagtgaacgaatgaaagttctccaagatcttgtgcctggatgcaacaaggttattggcaaagcatcagtacttgatgagataattaattacatccagtcgttgcaatgtcaagttgagttcctgtccatgaaactagaggcagtgaatgcccaggcaaaccagggagttgaagtatttccagccaaagattacggttctcagacatacaacacagctcctgggctgacatttgatacgcaaaccagtagagaatacgcccagggcacgtcgacctcggaatggcttcacatgcagattggcagtggctatgaaagggtttcatgaacgagatgaatccaggcagccgctaaataaagtgaaccatgatcaatcatggccgtgcttgtagatcattctttttcattttttttgaaaccatcatgttccagacgcattttttattcatgcttggagctgtaattccagccggaacatgtatttttgatgaggcgctcatttgtttccccatctgaatctcaagactgtttctg

SEQ ID NO: 7413 - protein, 255 aa, Zea mays subsp. mays
  peptide (1)..(255): Ceres Seq. ID no. 12353934
MEPSPAVAAELWCSPHLAAGGGRPLEATSAVTEKSSGGRGGGGAVRRRPRETPVSEDDSSRIVSTSGGGGGQDLTDLEAKRSKTNKSSNNKGSLRTEVETDSRSAGKAVSKNIPAAEPPKQDYIHVRARRGQATDSHSLAERARREKISERMKVLQDLVPGCNKVIGKASVLDEIINYIQSLQCQVEFLSMKLEAVNAQANQGVEVFPAKDYGSQTYNTAPGLTFDTQTSREYAQGTSTSEWLHMQIGSGYERVS

SEQ ID NO: 7414 - DNA, 1657 bp, Zea mays subsp. mays
  misc_feature (1)..(1657): Ceres Seq. ID no. 12548275
  misc_feature (1)..(1657): Ortholog of  Ceres SEQ ID NO 14308813 as cited in SEQ ID NO 55485
  misc_feature (1)..(1657): Ortholog of  Ceres SEQ ID NO 13655744 as cited in SEQ ID NO 64032
  misc_feature (1)..(1657): Ortholog of  Ceres SEQ ID NO 13590394 as cited in SEQ ID NO 66581
cttctagataagcagcgcaaacccctactctctcgcctctccctatccatccccaaataatccccacctcccgctcatcctccgcctccgccgcccgccatggcctccctcacctcggcctccacctcactcctcttcccgcaggcctcctcatccaggagccgcgtccggctctccacctccctgggcttctccgcgcagccggcgcggctgcggagccgggcggcggcaggagggcagcggcgcgggagcctgctggtggtgcgcgcggcgaggggaaagttcgagcgcaccaagccgcacgtaaacatcggcaccatcggtcacgtcgaccacggcaagaccaccctcaccgccgcgctcaccatggtgctcgcctccgtcggcggcagcgcgcccaagaagtacgacgagatcgatgccgcccccgaggagcgtgcccgcggtatcaccatcaacaccgccaccgtcgagtacgagaccgagacccgccactacgcgcacgtcgactgccccggccacgccgactatgtcaagaacatgatcaccggcgctgcgcagatggacggcgccatcctcgtcgtctctggcgccgacggtcccatgccgcagaccaaagagcacattctcctcgccaagcaggtcggcgttcccaagatcgttgtcttcctcaacaagaaggacatggtcgacgacgaggagctgctcgagctcgtcgagctggaagtccgcgagctgctcagcaactatgagtacgacggcgacgaggtgccaatcgtcgctggctccgccctcaaggcgctcgaggccctcatgggcaaccctaccctgaagcgcggcgacgatgagtgggtggactgcatcttcaagctggttgattctgtggattcctacattccagtgccacagcggcagaccgacctcccgttcttactcgctgttgaagatgtcttctccatcaccggtcgtggtacagttgccactggccgtatcgagcgtggcaccgtcaagattggtgacacagtcgatatcgttggaatccgggacacccggaactgcaccgtgactggcgttgagatgttccagaagaccatggacgatgccatggctggagacaatgtcggactgctgctccgtggtatgcagaaggatgacattgagagaggcatggtgctggcaaagcccggctctatcacaccgcacaccaagtttgaggctgttgtgtatgtgcttaagaaggaagagggtggccggcactcacctttcttccctggttaccgcccgcagttctacatgaggacaaccgatgtgacagggaatgtgactgtgattatgaatgacaaagatgaggaggcgaagatgtgcatgcctggtgaccgtatcaagatggttgttcagctcatccagcctgttgcttgtgagcagggtatgaggtttgctatccgtgagggtggtaagactgttggtgctggtgtcatcaacaaaatcattgagtaaactggatatatcacatccaccacgagaattttccttgtttactcaaagcgaaatgctctgtagttgttattatgtgttgagttttaggggttgttcatgtgaaattgtagtatgacactctttcgccaagtgaatttgcataatttatgacattcacggc

SEQ ID NO: 7415 - protein, 465 aa, Zea mays subsp. mays
  peptide (1)..(465): Ceres Seq. ID no. 12548276
MASLTSASTSLLFPQASSSRSRVRLSTSLGFSAQPARLRSRAAAGGQRRGSLLVVRAARGKFERTKPHVNIGTIGHVDHGKTTLTAALTMVLASVGGSAPKKYDEIDAAPEERARGITINTATVEYETETRHYAHVDCPGHADYVKNMITGAAQMDGAILVVSGADGPMPQTKEHILLAKQVGVPKIVVFLNKKDMVDDEELLELVELEVRELLSNYEYDGDEVPIVAGSALKALEALMGNPTLKRGDDEWVDCIFKLVDSVDSYIPVPQRQTDLPFLLAVEDVFSITGRGTVATGRIERGTVKIGDTVDIVGIRDTRNCTVTGVEMFQKTMDDAMAGDNVGLLLRGMQKDDIERGMVLAKPGSITPHTKFEAVVYVLKKEEGGRHSPFFPGYRPQFYMRTTDVTGNVTVIMNDKDEEAKMCMPGDRIKMVVQLIQPVACEQGMRFAIREGGKTVGAGVINKIIE

SEQ ID NO: 7416 - protein, 376 aa, Zea mays subsp. mays
  peptide (1)..(376): Ceres Seq. ID no. 12548277
MVLASVGGSAPKKYDEIDAAPEERARGITINTATVEYETETRHYAHVDCPGHADYVKNMITGAAQMDGAILVVSGADGPMPQTKEHILLAKQVGVPKIVVFLNKKDMVDDEELLELVELEVRELLSNYEYDGDEVPIVAGSALKALEALMGNPTLKRGDDEWVDCIFKLVDSVDSYIPVPQRQTDLPFLLAVEDVFSITGRGTVATGRIERGTVKIGDTVDIVGIRDTRNCTVTGVEMFQKTMDDAMAGDNVGLLLRGMQKDDIERGMVLAKPGSITPHTKFEAVVYVLKKEEGGRHSPFFPGYRPQFYMRTTDVTGNVTVIMNDKDEEAKMCMPGDRIKMVVQLIQPVACEQGMRFAIREGGKTVGAGVINKIIE

SEQ ID NO: 7417 - protein, 318 aa, Zea mays subsp. mays
  peptide (1)..(318): Ceres Seq. ID no. 12548278
MITGAAQMDGAILVVSGADGPMPQTKEHILLAKQVGVPKIVVFLNKKDMVDDEELLELVELEVRELLSNYEYDGDEVPIVAGSALKALEALMGNPTLKRGDDEWVDCIFKLVDSVDSYIPVPQRQTDLPFLLAVEDVFSITGRGTVATGRIERGTVKIGDTVDIVGIRDTRNCTVTGVEMFQKTMDDAMAGDNVGLLLRGMQKDDIERGMVLAKPGSITPHTKFEAVVYVLKKEEGGRHSPFFPGYRPQFYMRTTDVTGNVTVIMNDKDEEAKMCMPGDRIKMVVQLIQPVACEQGMRFAIREGGKTVGAGVINKIIE

SEQ ID NO: 7418 - DNA, 1197 bp, Zea mays subsp. mays
  misc_feature (1)..(1197): Ceres Seq. ID no. 12408810
  misc_feature (1)..(1197): Ortholog of  Ceres SEQ ID NO 14304650 as cited in SEQ ID NO 53817
tagaacatcctaatcgaaaaaggcgggcccaaggtcgtgactaggcacagtcgcacagaccactagaccagcacacggccacagtaccacacagaacagtagcaccgggctccgggcaccagggcaggcgaattcctaggttcgctggagcctggagcgagggatggccgccgcctcgctcgcgttggcgagtcctttccggcttctcctccgcgcccctcacccgcgcggagccatccccgtcccgtgctactttatctcgcgaggacggtatagcaccgccattgccgtcgcagcagcgagggattcggcggtgaaaggaagcgtggacaggaattcagcggaggaagtcaggaacattctgaatatggcagaaagggcttcccaacgaagagatgtttttcacaccaattttcttactccacctatagtgaaagagactatgctggcacttgaaaagtttgcagataccaaagcagtagctcagggtggctaccctcaggctgagaggtgccgaatatctgttgggcacccggacgtcatgacaagtaacccagatgtggttgctgctttgagcatctcagggaatttccggttggaatcttgttctcatggtgactttcttggtgctattcttgggacaggaataacaagggagaaagttggagatattcttttgcagggggaacgaggtgcccaggtccttgttgacccagaacttgttgactatctgatttctacccttgaaaaggtggggaaagttggtgtttcatgcactcagattcctttgcttgctctagaatatgaaccgccaaggaccaattcatttaaaactgtagaatcatcgctcagggttgatgcccttgccagtgcaggatttaaaatctcacgcacgaagcttgctagcttgataagttctggtgatgttcgtgtgaattggacaccaacaacaaaaaatggagttaccctcaaatctagagatgttgtttctgttagtgggatgggaaggttaaagattggggaaattgtgactacgaggaaaggaaaatatgcggtttgagttgattcgctatttgtaatcatgggactggtctactttcatgtctgaaactctgaatttaacggtacacattttctcctatatgtgatgagaatcatgtattaagtattacttctcagtgaagttgaaagtgatgc

SEQ ID NO: 7419 - protein, 298 aa, Zea mays subsp. mays
  peptide (1)..(298): Ceres Seq. ID no. 12408811
MAAASLALASPFRLLLRAPHPRGAIPVPCYFISRGRYSTAIAVAAARDSAVKGSVDRNSAEEVRNILNMAERASQRRDVFHTNFLTPPIVKETMLALEKFADTKAVAQGGYPQAERCRISVGHPDVMTSNPDVVAALSISGNFRLESCSHGDFLGAILGTGITREKVGDILLQGERGAQVLVDPELVDYLISTLEKVGKVGVSCTQIPLLALEYEPPRTNSFKTVESSLRVDALASAGFKISRTKLASLISSGDVRVNWTPTTKNGVTLKSRDVVSVSGMGRLKIGEIVTTRKGKYAV

SEQ ID NO: 7420 - protein, 230 aa, Zea mays subsp. mays
  peptide (1)..(230): Ceres Seq. ID no. 12408812
MAERASQRRDVFHTNFLTPPIVKETMLALEKFADTKAVAQGGYPQAERCRISVGHPDVMTSNPDVVAALSISGNFRLESCSHGDFLGAILGTGITREKVGDILLQGERGAQVLVDPELVDYLISTLEKVGKVGVSCTQIPLLALEYEPPRTNSFKTVESSLRVDALASAGFKISRTKLASLISSGDVRVNWTPTTKNGVTLKSRDVVSVSGMGRLKIGEIVTTRKGKYAV

SEQ ID NO: 7421 - protein, 205 aa, Zea mays subsp. mays
  peptide (1)..(205): Ceres Seq. ID no. 12408813
MLALEKFADTKAVAQGGYPQAERCRISVGHPDVMTSNPDVVAALSISGNFRLESCSHGDFLGAILGTGITREKVGDILLQGERGAQVLVDPELVDYLISTLEKVGKVGVSCTQIPLLALEYEPPRTNSFKTVESSLRVDALASAGFKISRTKLASLISSGDVRVNWTPTTKNGVTLKSRDVVSVSGMGRLKIGEIVTTRKGKYAV

SEQ ID NO: 7422 - DNA, 1057 bp, Zea mays subsp. mays
  misc_feature (1)..(1057): Ceres Seq. ID no. 12340862
  misc_feature (1)..(1057): Ortholog of  Ceres SEQ ID NO 14313014 as cited in SEQ ID NO 54841
  misc_feature (1)..(1057): Ortholog of  Ceres SEQ ID NO 14316091 as cited in SEQ ID NO 57622
  misc_feature (1)..(1057): Ortholog of  Ceres SEQ ID NO 13639317 as cited in SEQ ID NO 59781
  misc_feature (1)..(1057): Ortholog of  Ceres SEQ ID NO 13654578 as cited in SEQ ID NO 68583
aaaatttccacaaccgaaacctgcagtcgggtcatctcgtccacgaaacgtacggacttcgggcatcggccccaacgccagcggcaccgcacccgcaccaccaagctcgtcggcgacatgaatccgcccgcagcagccgcgtccaccggcgcaggaggccacgccgcggcgcctgcggcagccccggagtacgtgcactacccgaggctctcgccagaggaggtggccccgcccccgccttatgcacgccgccaccgccgcgccgtccgcctacggaggcaacccctacatctactcccccgccggcggcgccgccacctccccgaagaatacgatggactccgtgaaggacgtgctcggcaagatggggaagaggtttggcgaggcggcccgcaagaccgagaccatcaccggcaatttctggcagcacttgaaaactggaccaagcattactgatgcagcaatgagcaggatctcacaggtcaccaaagtcattgcagaaggtggatatgacaaaattttccatcaaacttttgaggtcgcccctggtgaaaagctcaagaagccatatgcatgttatctgtcaacctcggctggtcctgttatgggtgtgctttacctgtccaatgtaaaactggcattttgtagtgataacccacttgcataccaggttggagacaaaactgagtggagttactacaaggtggtcatcccccttgctcaactgcgatcaattaattcatcaacaagcagaacaaatgcagcagagaaatacattcaggtggtttctgttgataaccatgggttttggtttatgggcttcgtttactatgacagtgcggtgaagaatctgcaggaagcacttcaggaggctcagaatttacgtgcttagtgatgttcatggattggaactagcatgtcttatacattacagctgtgatatactgtttttccgtcagtttcgactgtttgtccagatttagtttgcgtaggtatcagctgtttctgtcttttgtactgacttaaaccaatgttcaatatgtgacgtgcatccttt

SEQ ID NO: 7423 - protein, 216 aa, Zea mays subsp. mays
  peptide (1)..(216): Ceres Seq. ID no. 12340863
MHAATAAPSAYGGNPYIYSPAGGAATSPKNTMDSVKDVLGKMGKRFGEAARKTETITGNFWQHLKTGPSITDAAMSRISQVTKVIAEGGYDKIFHQTFEVAPGEKLKKPYACYLSTSAGPVMGVLYLSNVKLAFCSDNPLAYQVGDKTEWSYYKVVIPLAQLRSINSSTSRTNAAEKYIQVVSVDNHGFWFMGFVYYDSAVKNLQEALQEAQNLRA

SEQ ID NO: 7424 - protein, 185 aa, Zea mays subsp. mays
  peptide (1)..(185): Ceres Seq. ID no. 12340864
MDSVKDVLGKMGKRFGEAARKTETITGNFWQHLKTGPSITDAAMSRISQVTKVIAEGGYDKIFHQTFEVAPGEKLKKPYACYLSTSAGPVMGVLYLSNVKLAFCSDNPLAYQVGDKTEWSYYKVVIPLAQLRSINSSTSRTNAAEKYIQVVSVDNHGFWFMGFVYYDSAVKNLQEALQEAQNLRA

SEQ ID NO: 7425 - protein, 175 aa, Zea mays subsp. mays
  peptide (1)..(175): Ceres Seq. ID no. 12340865
MGKRFGEAARKTETITGNFWQHLKTGPSITDAAMSRISQVTKVIAEGGYDKIFHQTFEVAPGEKLKKPYACYLSTSAGPVMGVLYLSNVKLAFCSDNPLAYQVGDKTEWSYYKVVIPLAQLRSINSSTSRTNAAEKYIQVVSVDNHGFWFMGFVYYDSAVKNLQEALQEAQNLRA

SEQ ID NO: 7426 - DNA, 1352 bp, Zea mays subsp. mays
  misc_feature (1)..(1352): Ceres Seq. ID no. 12556765
  misc_feature (1)..(1352): Ortholog of  Ceres SEQ ID NO 15177104 as cited in SEQ ID NO 56048
gcacgagaccattacctagaacatcctaatcgaaaagagaaaataataattaaaaaaaagcagtgaaccttctcgcgctcggcagttggcagtcctgtcctgtggaccgtatgacgtgtttatttatgggcggcgccttcgtctccactccccaccggaggaaggaagcgagaagaccagaagggatggcaaccggtagtgaagcctcgaaggcagctgaggctgtggttgactggcataaacacgacagcaagaggatgctccatgcggtttaccgtgttggggatctggaccgcacaatcaagtactacacggaatgctttgggatgaaactgctgaggaaaagggatgttcctgatgagaagtacaccaatgccttccttggctttgggccagagaacaccaactttgcagttgaattgacatacaactatggcgttgacaagtatgacattggaacgggctttgggcatttcgcaattgctaatgatgatgtgtacaagttagctgagaatatcaaatccaagggtggtaagatcacccgcgaacctggtcctgtcaagggaggatccactgttattgccttcgcacaggatcctgatggctacatgtttgagcttatccagagggctgacacacctgagcctctttgccaggtcatgcttcgtgttggtgaccttgagcgttctatcaagttttatgagaaggccctagggatgaagctcctaaggaagaaggatgtacctgattacaagtataccattgccatgttgggctatgctgatgaggacaagacaactgttctggagctgacgtacaactatggagtcacagaatacagcaagggcaatgcatatgctcaggttgccattggcaccaatgatgtgtacaagagcgccgaggcggttgatctggcgaccaaagaactaggtggcaagattttgcggcagccagggcctctacctgggatcaacactaagatcgcctcttttgttgatccagatggctggaaagtggttctggttgacaacaccgacttcctcaaggaactccactgaaggctcgggatacccaggtgctgtgctaggatgtagtaatgcttgtctgtggtgtaataagatgtgggtggtttgtttctgccctgatgaacttataatactgaatgttgctacagaggttgtgcttctgccagtgaggtttgggatttgctatgtaactgtgcctgcgggctccgattctggcgctgttcgtacactgtagaagccagtgaatcccaataaacccagcttcacaggctcctcttatcccgtagaccctagttgtttttgggtggagctggagccactgacccc

SEQ ID NO: 7427 - protein, 315 aa, Zea mays subsp. mays
  peptide (1)..(315): Ceres Seq. ID no. 12556766
MTCLFMGGAFVSTPHRRKEARRPEGMATGSEASKAAEAVVDWHKHDSKRMLHAVYRVGDLDRTIKYYTECFGMKLLRKRDVPDEKYTNAFLGFGPENTNFAVELTYNYGVDKYDIGTGFGHFAIANDDVYKLAENIKSKGGKITREPGPVKGGSTVIAFAQDPDGYMFELIQRADTPEPLCQVMLRVGDLERSIKFYEKALGMKLLRKKDVPDYKYTIAMLGYADEDKTTVLELTYNYGVTEYSKGNAYAQVAIGTNDVYKSAEAVDLATKELGGKILRQPGPLPGINTKIASFVDPDGWKVVLVDNTDFLKELH

SEQ ID NO: 7428 - protein, 310 aa, Zea mays subsp. mays
  peptide (1)..(310): Ceres Seq. ID no. 12556767
MGGAFVSTPHRRKEARRPEGMATGSEASKAAEAVVDWHKHDSKRMLHAVYRVGDLDRTIKYYTECFGMKLLRKRDVPDEKYTNAFLGFGPENTNFAVELTYNYGVDKYDIGTGFGHFAIANDDVYKLAENIKSKGGKITREPGPVKGGSTVIAFAQDPDGYMFELIQRADTPEPLCQVMLRVGDLERSIKFYEKALGMKLLRKKDVPDYKYTIAMLGYADEDKTTVLELTYNYGVTEYSKGNAYAQVAIGTNDVYKSAEAVDLATKELGGKILRQPGPLPGINTKIASFVDPDGWKVVLVDNTDFLKELH

SEQ ID NO: 7429 - protein, 290 aa, Zea mays subsp. mays
  peptide (1)..(290): Ceres Seq. ID no. 12556768
MATGSEASKAAEAVVDWHKHDSKRMLHAVYRVGDLDRTIKYYTECFGMKLLRKRDVPDEKYTNAFLGFGPENTNFAVELTYNYGVDKYDIGTGFGHFAIANDDVYKLAENIKSKGGKITREPGPVKGGSTVIAFAQDPDGYMFELIQRADTPEPLCQVMLRVGDLERSIKFYEKALGMKLLRKKDVPDYKYTIAMLGYADEDKTTVLELTYNYGVTEYSKGNAYAQVAIGTNDVYKSAEAVDLATKELGGKILRQPGPLPGINTKIASFVDPDGWKVVLVDNTDFLKELH

SEQ ID NO: 7430 - DNA, 1423 bp, Zea mays subsp. mays
  misc_feature (1)..(1423): Ceres Seq. ID no. 12408806
  misc_feature (1)..(1423): Ortholog of  Ceres SEQ ID NO 14302396 as cited in SEQ ID NO 66907
  misc_feature (1)..(1423): Ortholog of  Ceres SEQ ID NO 13496281 as cited in SEQ ID NO 69175
aaattctcgaagataacgaccaagagattaaaaaagtatcttcatgggttcgctctcacagcccacgcaggaggcaccgaacattctagccctctgtggtgtcaacggcaaggcaaagcgaacgcatcaagttcgccgtccaaaccagcagcagcctccatcggacggcagagagcagccgctcgccacttggattcaaacgccccgtcactctaatcgcgtagaaactaccaaattacccctagccccctccctcagtctccctgcagctgctccgtcggaacggacaaccgcggccatcccccagccccccctcttgctgcacactcgcactgctagggttcgctcgcaatccagcctctacgccatggcgaagacaaagcaagggaagcgggacgtcgacgcctacaccatcaagggcaccaacaaggtggtccgagtgggggactgcgtgctgatgcggccggcggacacggacaagccgccgtacgtggcgcgggtggagcggatggagtcggacgggcgcggcggcgtgcgggtgagggtgcgctggtactaccgcccggaggaggccaagggcggccgccgcccgttccacggctccaaggagctcttcctctccgaccacttggacacgcagagcgcgcacaccattgagggcaagtgcatcgttcactccttcaagagctacaccaagctcgacaacgtcggcccggaggacttctactgccgatttgactacaaggccgccaccggtgcattcacccccgaccgtgtcgccgtgtattgcaagtgtgagatgccgtacaacccagacgacctcatggtgcagtgtgaaggctgcaaggactggttccatccgtcttgtatgggaatgaccattgagcaagccaaaaagatagatcattacatgtgctcggattgtgctgaaaaaaatggtgcaaagagaccctcaaattcatacccagtttcaccaaactctgattctaagatcgaatcaaagaggcgcaagagataaattctggcaaaggagatcgatatggcgtctgctcctcattactgatgcatattgagatgtacactgcgagagaagagccaagccaattgtaggacaaaacttgcttaacttatcattcttctgtgtattctggggacgtttcctgcagcttagacatttagtgtgatgagtaggtcagtcagtccccccccccgctgcagcgcgcgcatgatcagctgctggtggcgggataagtcgggaaatgctagagcgctgatgattctgtcgatgtaactttatcgggttgtgtgtgtgtgttttaacatatgcactggctggaaacattcccatgtgtgaatgggcgatgctgatgatagcttgactgctgtttcataattcagttagatgttgccaagcaaagacttg

SEQ ID NO: 7431 - protein, 324 aa, Zea mays subsp. mays
  peptide (1)..(324): Ceres Seq. ID no. 12408807
MGSLSQPTQEAPNILALCGVNGKAKRTHQVRRPNQQQPPSDGREQPLATWIQTPRHSNRVETTKLPLAPSLSLPAAAPSERTTAAIPQPPLLLHTRTARVRSQSSLYAMAKTKQGKRDVDAYTIKGTNKVVRVGDCVLMRPADTDKPPYVARVERMESDGRGGVRVRVRWYYRPEEAKGGRRPFHGSKELFLSDHLDTQSAHTIEGKCIVHSFKSYTKLDNVGPEDFYCRFDYKAATGAFTPDRVAVYCKCEMPYNPDDLMVQCEGCKDWFHPSCMGMTIEQAKKIDHYMCSDCAEKNGAKRPSNSYPVSPNSDSKIESKRRKR

SEQ ID NO: 7432 - protein, 216 aa, Zea mays subsp. mays
  peptide (1)..(216): Ceres Seq. ID no. 12408808
MAKTKQGKRDVDAYTIKGTNKVVRVGDCVLMRPADTDKPPYVARVERMESDGRGGVRVRVRWYYRPEEAKGGRRPFHGSKELFLSDHLDTQSAHTIEGKCIVHSFKSYTKLDNVGPEDFYCRFDYKAATGAFTPDRVAVYCKCEMPYNPDDLMVQCEGCKDWFHPSCMGMTIEQAKKIDHYMCSDCAEKNGAKRPSNSYPVSPNSDSKIESKRRKR

SEQ ID NO: 7433 - protein, 186 aa, Zea mays subsp. mays
  peptide (1)..(186): Ceres Seq. ID no. 12408809
MRPADTDKPPYVARVERMESDGRGGVRVRVRWYYRPEEAKGGRRPFHGSKELFLSDHLDTQSAHTIEGKCIVHSFKSYTKLDNVGPEDFYCRFDYKAATGAFTPDRVAVYCKCEMPYNPDDLMVQCEGCKDWFHPSCMGMTIEQAKKIDHYMCSDCAEKNGAKRPSNSYPVSPNSDSKIESKRRKR

SEQ ID NO: 7434 - DNA, 1648 bp, Zea mays subsp. mays
  misc_feature (1)..(1648): Ceres Seq. ID no. 12567042
  misc_feature (1)..(1648): Ortholog of  Ceres SEQ ID NO 14315275 as cited in SEQ ID NO 52556
aaaacggtcacccgttctacgcttggcttggctgcgctgcgcacaccgaacccctcgccgtcgcggctcgcctcggctccgccccgaccgaccgatcgatccggccggcggtgggcgccatggcctcccccaaccccgaggccgcggggctgcaggccgtggctgtggcgggggcaggggagggcggctcgtcctcgtcgctcagcgccgttgcgggagcggctgcgttgtccggggagctggtgcccaggagggcgttggcgctgcgcaaggagcgcgtgtgcacggccaaggagcgcatcagccgcatgcctccctgtgcggcggggaagcggagctccatctaccgcggggtcacccggcataggtggacaggtcgatatgaggctcacctttgggacaaaagcacgtggaatcagaatcagaacaaaaagggcaaacaggtatatctaggtgcatatgatgatgaagaggctgcagcaagggccctatgaccttgctgcattaaaatactggggagctggaacacaaataaatttcccagtatctgactatgcaagagaccttgaagagatgcagatgatatccaaggaggattatctcgtgtctcttaggagaaagagcagtgccttctacagggggttaccaaaatatcgtgggcttcttaggcaacttcataattccagatgggatacatctttgggactcggcaatgactacatgagccttagttgtggcaaggatatcatgttggatgggaaatttgcaggaagctttggtctagagaggaaaattgatcttacaaattacatccggtggtggctaccaaagaagacaaggcagtcagatacatctaaaacagaagaaattgctgatgaaattcgagctattgaaagttcaatgcaacagactgaaccctataagttgccttctcttggcttcagttctccatcaaagccctcttcaatgggcttatcagcatgcagcatattatctcagtctgatgcctttaaaagcttcttggagaagtctacaaaattatctgaagaatgtagtcttagcaaagaaattgttgaaggaaagactgttgcctcggtacctgctactggatatgatacaggggcaattaatattaacatgaatgagttgctagtacaaagatctacttactcaatggcccctgttatgcctacaccaatgaagagtacctggagccctgctgatccttccgtggatccacttttttggagcaactttgttttgccatcgagtcaacctgttacaatggcgacaataacaacaacaacgtttgcaaagaatgaggtaagttcaagtgatccattccagagccaagagtgactgcacgagcttactgaagcaggatattttagattggtcaaagacagcatcccgtgcgtcaactagattctttttgtcaagcttttgatgtcgcaacttgtgagcaatactccttgtttatccatacttcataggacatgaatagaaggtatgacaagtgcaagcatagttatgtaatatacagtggctagttgccagaaaatgagatttagttgtgtagagctgtttgtacatattgagatggttgtttcagttcaatctcaacaggtttgaggaaaatatccaacgg

SEQ ID NO: 7435 - protein, 299 aa, Zea mays subsp. mays
  peptide (1)..(299): Ceres Seq. ID no. 12567043
MMMKRLQQGPYDLAALKYWGAGTQINFPVSDYARDLEEMQMISKEDYLVSLRRKSSAFYRGLPKYRGLLRQLHNSRWDTSLGLGNDYMSLSCGKDIMLDGKFAGSFGLERKIDLTNYIRWWLPKKTRQSDTSKTEEIADEIRAIESSMQQTEPYKLPSLGFSSPSKPSSMGLSACSILSQSDAFKSFLEKSTKLSEECSLSKEIVEGKTVASVPATGYDTGAININMNELLVQRSTYSMAPVMPTPMKSTWSPADPSVDPLFWSNFVLPSSQPVTMATITTTTFAKNEVSSSDPFQSQE

SEQ ID NO: 7436 - protein, 298 aa, Zea mays subsp. mays
  peptide (1)..(298): Ceres Seq. ID no. 12567044
MMKRLQQGPYDLAALKYWGAGTQINFPVSDYARDLEEMQMISKEDYLVSLRRKSSAFYRGLPKYRGLLRQLHNSRWDTSLGLGNDYMSLSCGKDIMLDGKFAGSFGLERKIDLTNYIRWWLPKKTRQSDTSKTEEIADEIRAIESSMQQTEPYKLPSLGFSSPSKPSSMGLSACSILSQSDAFKSFLEKSTKLSEECSLSKEIVEGKTVASVPATGYDTGAININMNELLVQRSTYSMAPVMPTPMKSTWSPADPSVDPLFWSNFVLPSSQPVTMATITTTTFAKNEVSSSDPFQSQE

SEQ ID NO: 7437 - protein, 297 aa, Zea mays subsp. mays
  peptide (1)..(297): Ceres Seq. ID no. 12567045
MKRLQQGPYDLAALKYWGAGTQINFPVSDYARDLEEMQMISKEDYLVSLRRKSSAFYRGLPKYRGLLRQLHNSRWDTSLGLGNDYMSLSCGKDIMLDGKFAGSFGLERKIDLTNYIRWWLPKKTRQSDTSKTEEIADEIRAIESSMQQTEPYKLPSLGFSSPSKPSSMGLSACSILSQSDAFKSFLEKSTKLSEECSLSKEIVEGKTVASVPATGYDTGAININMNELLVQRSTYSMAPVMPTPMKSTWSPADPSVDPLFWSNFVLPSSQPVTMATITTTTFAKNEVSSSDPFQSQE

SEQ ID NO: 7438 - DNA, 1442 bp, Zea mays subsp. mays
  misc_feature (1)..(1442): Ceres Seq. ID no. 12408799
  misc_feature (1)..(1442): Ortholog of  Ceres SEQ ID NO 13596993 as cited in SEQ ID NO 68937
gatccctagctctgcccctctcctccagcgccgctcgccagctctctgcccccgccgcgcccagagatgcagatcccccaccgccgttaccgctgggtgaaggagtgggtctcgcaagaactggtcgtcgccggaggcccctgcgtgctgtacaagtgggtgcgagaggacagactagcagctttgaaggctaaggacaagaagcatggggcagaatctgcaactcctgaacccaactctgaggttctcttcctgtgcagctacgaaggatgtgggaagacattttttgatgcaggggctcttaggaagcatgctcacgtccatggggagaggcaatatatctgtcactatgagaactgtggcaagaaattcttagatagttctaagttgaagagacattttcttattcatacaggagaaaagaattttgtgtgcccacatgaaggttgtgggaaggctttttcgttggattttaatttaaaggcacacatgaaaacacattctgcagataactatcatgtgtgccagtacccagaatgtggccgaagatttacacaagaatcaaaactaagagctcatatcagggcacaacatgagaaagctgtttgcctgcagaatccaggtgcttcggctatgaaccatagtgcaattggagaacagcatcagccccctaagccagcaaaggtctcagcaacgcctccagctccctcagctgagcgcccttacgtctgcccctacgatggttgcgacaaggcatacatccacgagtacaagctgaacctccatttgaaaaaggagcatcccaaccactaccaggatggtggtccacaaggcgctgccccttcaaagcgcagcatctcgaagagttcccataggagcagaccggacatcactgctagaatgccaccagccaaggtctccaagcgcaaaggagggtacgcagcgccatcgccagctgtgaacctccctgaggagcaccttcccgaggagcagcagtggccaaggaaagtgatgtacgaggatgacagcgaggagaccgaggaagaagaggggggcaacaatgtcgaggatagatggaactacaacagagctgctagtagcgatgatgaggaaaccgaagacgaacaatgagcttctagcaggcgtccatctgttctgtagttgtgcatataccataaattttaaactttgagggttatagtttttgcatacatgtaaaattttaaaataaggcggacttgttgtagacagcataggttgtaggtggtctgccccttctcaatcagacatgccatgagttcagaaaggataatggatcattgttctcgtttcgcttgtttttgtgtttgtgtttgtgccttttggttcgttatcacagatgagttattactgtaaccctgatttcagtgtttggcaatcaatctcgtcagccttacatttgt

SEQ ID NO: 7439 - protein, 354 aa, Zea mays subsp. mays
  peptide (1)..(354): Ceres Seq. ID no. 12408800
MQIPHRRYRWVKEWVSQELVVAGGPCVLYKWVREDRLAALKAKDKKHGAESATPEPNSEVLFLCSYEGCGKTFFDAGALRKHAHVHGERQYICHYENCGKKFLDSSKLKRHFLIHTGEKNFVCPHEGCGKAFSLDFNLKAHMKTHSADNYHVCQYPECGRRFTQESKLRAHIRAQHEKAVCLQNPGASAMNHSAIGEQHQPPKPAKVSATPPAPSAERPYVCPYDGCDKAYIHEYKLNLHLKKEHPNHYQDGGPQGAAPSKRSISKSSHRSRPDITARMPPAKVSKRKGGYAAPSPAVNLPEEHLPEEQQWPRKVMYEDDSEETEEEEGGNNVEDRWNYNRAASSDDEETEDEQ

SEQ ID NO: 7440 - protein, 213 aa, Zea mays subsp. mays
  peptide (1)..(213): Ceres Seq. ID no. 12408801
MKTHSADNYHVCQYPECGRRFTQESKLRAHIRAQHEKAVCLQNPGASAMNHSAIGEQHQPPKPAKVSATPPAPSAERPYVCPYDGCDKAYIHEYKLNLHLKKEHPNHYQDGGPQGAAPSKRSISKSSHRSRPDITARMPPAKVSKRKGGYAAPSPAVNLPEEHLPEEQQWPRKVMYEDDSEETEEEEGGNNVEDRWNYNRAASSDDEETEDEQ

SEQ ID NO: 7441 - DNA, 1833 bp, Zea mays subsp. mays
  misc_feature (1)..(1833): Ceres Seq. ID no. 12405464
  misc_feature (1)..(1833): Ortholog of  Ceres SEQ ID NO 14310655 as cited in SEQ ID NO 53681
atctcccatcccatccagccatcctccgctttcccttcccctcgccgccccccaccccccagatcggcaaatccgcccgcacctaccccgcgcgcgtcgcgcgtcccggatggccatcgtctcctccgcccgactcgtggttccgtagcatgggccactccccctcttccctttccaaatccggcccctcctctccaccgcgccgcagcaggtcgttctcccccatggcgccgccgcagcagctgcggctgaccgcgccgttgcaggtcgctgcggggggcagcggcagcgactcgtcctcctcgttcgtgccccccgctcgggactacacccaagacctgcccgacgagatcctcgcgctggtattcgcgtcgctctcgcccaccgaccgcaacgcctgctccctcacctgctcccgatggatggaggtcgacgccaccacgcgccaccggctctccctcgacgcccgcgccgcgctgggcaacgcggccaccgcgctgttctcgcggttcacggctgtcacgaagctcgcgctccgctgcgcgcgcgactcaggattggacagcctctccgaccacggcgctgcggcgctggccgccgcgcttccctcggagcgcctcgccaggctcaagctccgcggtctaaggaagctctccgacgccgggctagcctccctcgctgccggcgcgccagcgatccgcaagctctctattgcgtcctgcaccttcggacccagggcattcgtcgccgtgctccagtcgtgccccctcctcgaggacctctccgtcaagcgcctccgcagcgtagcagacacgtccggtgccgccagttccattgctgaggagatcaagtttccaccggctttgtccctgcgttcggtttgcgtcaaggatctatataacgctctgtgctttgtgccgcttgtggcgtcctcaccgaacctccgctccctcaagatactgcggtgctccggcgcctgggacctgccattggaggtcatcgctgcacgtgctcctggccttgttgagcttcaccttgagaagctacaggttggcgaccgtgggcttgcggcgctttccgcctgtgccaatctggaagttctgttccttgtcaagacccctgagtgcactgattcaggcatcatcagtgttgccgagaagtgccacaaactccgcaaactgcatgtggatgggtggcgcacaaacaggattggagatttcggactcatggctgtggcacgaggatgtccagatctgcaggagctcgttttgataggggtcaaccccaccgtgctgagccttcggatgcttggtgagcactgccggttgctggaacggctggcactttgtgggtgtgaaactgtgggggatgctgagatcatttgcttggctgagcgatgggctgcgctcaagaagctctgcatcaagggttgccccgtgtcagatcgtgggatggaagcactaaatggggggtgccccggtttagtcaaggtgaagctgaagagatgtcgtggagtgtcatacgagtgcattgagaacctgaaggttactaggggggagtcattttccatcagcttggatgttgtattggagcatgatgccgggagcactagtgaaaatggtgcacaagagaatggacaggcacaaattacagagctggccggtcaaatgacaggcatggacctcctgaccaatgccgctggcacacaatcatcgattcataccattaacaggatgaggagtgtcatgtcagcgatccggcgtaggtttggcaatcctctgccaccatgatgtgagatggaaactaatgaactgttatttacatcctttatct

SEQ ID NO: 7442 - protein, 595 aa, Zea mays subsp. mays
  peptide (1)..(595): Ceres Seq. ID no. 12405465
LPSHPAILRFPFPSPPPTPQIGKSARTYPARVARPGWPSSPPPDSWFRSMGHSPSSLSKSGPSSPPRRSRSFSPMAPPQQLRLTAPLQVAAGGSGSDSSSSFVPPARDYTQDLPDEILALVFASLSPTDRNACSLTCSRWMEVDATTRHRLSLDARAALGNAATALFSRFTAVTKLALRCARDSGLDSLSDHGAAALAAALPSERLARLKLRGLRKLSDAGLASLAAGAPAIRKLSIASCTFGPRAFVAVLQSCPLLEDLSVKRLRSVADTSGAASSIAEEIKFPPALSLRSVCVKDLYNALCFVPLVASSPNLRSLKILRCSGAWDLPLEVIAARAPGLVELHLEKLQVGDRGLAALSACANLEVLFLVKTPECTDSGIISVAEKCHKLRKLHVDGWRTNRIGDFGLMAVARGCPDLQELVLIGVNPTVLSLRMLGEHCRLLERLALCGCETVGDAEIICLAERWAALKKLCIKGCPVSDRGMEALNGGCPGLVKVKLKRCRGVSYECIENLKVTRGESFSISLDVVLEHDAGSTSENGAQENGQAQITELAGQMTGMDLLTNAAGTQSSIHTINRMRSVMSAIRRRFGNPLPP

SEQ ID NO: 7443 - protein, 546 aa, Zea mays subsp. mays
  peptide (1)..(546): Ceres Seq. ID no. 12405466
MGHSPSSLSKSGPSSPPRRSRSFSPMAPPQQLRLTAPLQVAAGGSGSDSSSSFVPPARDYTQDLPDEILALVFASLSPTDRNACSLTCSRWMEVDATTRHRLSLDARAALGNAATALFSRFTAVTKLALRCARDSGLDSLSDHGAAALAAALPSERLARLKLRGLRKLSDAGLASLAAGAPAIRKLSIASCTFGPRAFVAVLQSCPLLEDLSVKRLRSVADTSGAASSIAEEIKFPPALSLRSVCVKDLYNALCFVPLVASSPNLRSLKILRCSGAWDLPLEVIAARAPGLVELHLEKLQVGDRGLAALSACANLEVLFLVKTPECTDSGIISVAEKCHKLRKLHVDGWRTNRIGDFGLMAVARGCPDLQELVLIGVNPTVLSLRMLGEHCRLLERLALCGCETVGDAEIICLAERWAALKKLCIKGCPVSDRGMEALNGGCPGLVKVKLKRCRGVSYECIENLKVTRGESFSISLDVVLEHDAGSTSENGAQENGQAQITELAGQMTGMDLLTNAAGTQSSIHTINRMRSVMSAIRRRFGNPLPP

SEQ ID NO: 7444 - protein, 521 aa, Zea mays subsp. mays
  peptide (1)..(521): Ceres Seq. ID no. 12405467
MAPPQQLRLTAPLQVAAGGSGSDSSSSFVPPARDYTQDLPDEILALVFASLSPTDRNACSLTCSRWMEVDATTRHRLSLDARAALGNAATALFSRFTAVTKLALRCARDSGLDSLSDHGAAALAAALPSERLARLKLRGLRKLSDAGLASLAAGAPAIRKLSIASCTFGPRAFVAVLQSCPLLEDLSVKRLRSVADTSGAASSIAEEIKFPPALSLRSVCVKDLYNALCFVPLVASSPNLRSLKILRCSGAWDLPLEVIAARAPGLVELHLEKLQVGDRGLAALSACANLEVLFLVKTPECTDSGIISVAEKCHKLRKLHVDGWRTNRIGDFGLMAVARGCPDLQELVLIGVNPTVLSLRMLGEHCRLLERLALCGCETVGDAEIICLAERWAALKKLCIKGCPVSDRGMEALNGGCPGLVKVKLKRCRGVSYECIENLKVTRGESFSISLDVVLEHDAGSTSENGAQENGQAQITELAGQMTGMDLLTNAAGTQSSIHTINRMRSVMSAIRRRFGNPLPP

SEQ ID NO: 7445 - DNA, 775 bp, Zea mays subsp. mays
  misc_feature (1)..(775): Ceres Seq. ID no. 12413965
  misc_feature (1)..(775): Ortholog of  Ceres SEQ ID NO 14303790 as cited in SEQ ID NO 55525
gagctgaaggcgacggccaaccgctcgaaaagagcaggtcaggaagccgaggctaacggcaagctcgcgcacgacgactccagacttgaagggcgttccggtgaaatctcgtcgtttcagtcgctgtgcgcgcacatctggagggcggtgacgcgcgcgcgccggctgctggctgccgacaagacgacgacgttccgcatggccgtgaactgccggcaccgtctgcgcccggcgatctccccgctctacttcggcaacgcgatccagagcgtggcgacgacggccaccgtagccgagctggcgtccaacgacctgggctgggcggccgcccggctgaacgccaccgtggcgtcgcacaaggacggcgcgatccggcgcgccgcggcggagtgggaggccgcgccccgttgcttcccgctaggcaaccccgacggggcggccctcacgatggggagctcgcctcggttcccgatgtacgacgggaacgacttcgggtggggccgcgcgctcgccgtgcggagcggccgcgcgaacaaattcgacggcaagatgtcttcgttccccggacaggctggggacggtagcatcgacgtggaggtgtgcctcgcgccagacaccatggcgcatctcctcctcgacaaggagttcttgcagtacgtgtcctcccctgcaccgtgaggcggtgacagagtgaatgtgtggcttgttgctgcgcagctacatatagtaactggatttgtaccctttcagcagatatcaagtgcttgccaacttg

SEQ ID NO: 7446 - protein, 225 aa, Zea mays subsp. mays
  peptide (1)..(225): Ceres Seq. ID no. 12413966
ELKATANRSKRAGQEAEANGKLAHDDSRLEGRSGEISSFQSLCAHIWRAVTRARRLLAADKTTTFRMAVNCRHRLRPAISPLYFGNAIQSVATTATVAELASNDLGWAAARLNATVASHKDGAIRRAAAEWEAAPRCFPLGNPDGAALTMGSSPRFPMYDGNDFGWGRALAVRSGRANKFDGKMSSFPGQAGDGSIDVEVCLAPDTMAHLLLDKEFLQYVSSPAP

SEQ ID NO: 7447 - protein, 159 aa, Zea mays subsp. mays
  peptide (1)..(159): Ceres Seq. ID no. 12413967
MAVNCRHRLRPAISPLYFGNAIQSVATTATVAELASNDLGWAAARLNATVASHKDGAIRRAAAEWEAAPRCFPLGNPDGAALTMGSSPRFPMYDGNDFGWGRALAVRSGRANKFDGKMSSFPGQAGDGSIDVEVCLAPDTMAHLLLDKEFLQYVSSPAP

SEQ ID NO: 7448 - DNA, 1422 bp, Zea mays subsp. mays
  misc_feature (1)..(1422): Ceres Seq. ID no. 12407902
  misc_feature (1)..(1422): Ortholog of  Ceres SEQ ID NO 14302059 as cited in SEQ ID NO 68322
aacccattcttcggcggttcggcccggcctgcaccctgcagccaccaagcaaacccagtgctctgctttctgcattcccccccgccgccactccgtcgggcttgatgagcctctgctccaagctcttcgcgttgctccgcaagtcccgcgccctcgccaccagcaccgccgccgcagccgccgcgacaacctccgcgacggcgtcggccaacgggatggaggaggctgtcgccgcggcgggcccgctgcgcacgcgcgtctgcatcatcggcagcggcccagccgcgcacacggcggccgtctacgccgcgcgcgccgagctcaagcccgtcctcttcgagggctggctcgccaacgacatcgccgcgggtggacagctcaccaccaccaccgacgtcgagaacttcccgggcttccccgacggcatcctcggcgccgacctcatggatcgctgccgcgcgcagtcgctcaggttcgggaccaagatcctcaccgagaccgtcaccaccgtggacttctccgcccgccccttccgtgtcgcctccgacgacaccgttgtgcacgccgactccgtcgtcgtcgccacgggcgccgtcgcgcgcaggctgcacttcgccggctccgacgccttctggaaccggggcatctccgcctgcgccgtctgcgacggggctgcgcctatcttccggaacaagcccatcgccgtcgtcggaggcggggactccgccatggaggaggctaacttcctcaccaagtacggctcgcaagtttacatcatccaccgccgcagcgacttccgggcgtccaagatcatgcaggcgcgcacgctctccaaccccaagatcaaggtcgtctggaactccgaggtcgtcgaggcctacggcggtgcggatggcggcccgctagccggcgtcaaggtcaaggacgtcgtcaccggcgaggtctctgatctccaggtggccgggctcttctttgccatcggtcacgagccggcgacaaaatttcttggagggcagctcgagctcgactctgatgggtatgtggtgaccaagcccggttccacgcacaccagtgtgcagggggtctttgcagctggggatgtccaggacaagaagtaccgccaggccattactgcagctggatcaggttgcatggctgctctggatgcagagcactacctgcaggaggttggagcacaggaagggaagaccgattgactatgtctgggccaagctgctcttgggccaaggaaaacttctccgaaagccgctctctagtggtgtaaacagcacattattatttggttttaggcctcaaattacgttacattggaaattgatttatatgagcgtgcgcaagcttgtatacattattcgcattgtttattactcttagagtcttagtcattaatcacactttgct

SEQ ID NO: 7449 - protein, 404 aa, Zea mays subsp. mays
  peptide (1)..(404): Ceres Seq. ID no. 12407903
PILRRFGPACTLQPPSKPSALLSAFPPAATPSGLMSLCSKLFALLRKSRALATSTAAAAAATTSATASANGMEEAVAAAGPLRTRVCIIGSGPAAHTAAVYAARAELKPVLFEGWLANDIAAGGQLTTTTDVENFPGFPDGILGADLMDRCRAQSLRFGTKILTETVTTVDFSARPFRVASDDTVVHADSVVVATGAVARRLHFAGSDAFWNRGISACAVCDGAAPIFRNKPIAVVGGGDSAMEEANFLTKYGSQVYIIHRRSDFRASKIMQARTLSNPKIKVVWNSEVVEAYGGADGGPLAGVKVKDVVTGEVSDLQVAGLFFAIGHEPATKFLGGQLELDSDGYVVTKPGSTHTSVQGVFAAGDVQDKKYRQAITAAGSGCMAALDAEHYLQEVGAQEGKTD

SEQ ID NO: 7450 - protein, 370 aa, Zea mays subsp. mays
  peptide (1)..(370): Ceres Seq. ID no. 12407904
MSLCSKLFALLRKSRALATSTAAAAAATTSATASANGMEEAVAAAGPLRTRVCIIGSGPAAHTAAVYAARAELKPVLFEGWLANDIAAGGQLTTTTDVENFPGFPDGILGADLMDRCRAQSLRFGTKILTETVTTVDFSARPFRVASDDTVVHADSVVVATGAVARRLHFAGSDAFWNRGISACAVCDGAAPIFRNKPIAVVGGGDSAMEEANFLTKYGSQVYIIHRRSDFRASKIMQARTLSNPKIKVVWNSEVVEAYGGADGGPLAGVKVKDVVTGEVSDLQVAGLFFAIGHEPATKFLGGQLELDSDGYVVTKPGSTHTSVQGVFAAGDVQDKKYRQAITAAGSGCMAALDAEHYLQEVGAQEGKTD

SEQ ID NO: 7451 - protein, 333 aa, Zea mays subsp. mays
  peptide (1)..(333): Ceres Seq. ID no. 12407905
MEEAVAAAGPLRTRVCIIGSGPAAHTAAVYAARAELKPVLFEGWLANDIAAGGQLTTTTDVENFPGFPDGILGADLMDRCRAQSLRFGTKILTETVTTVDFSARPFRVASDDTVVHADSVVVATGAVARRLHFAGSDAFWNRGISACAVCDGAAPIFRNKPIAVVGGGDSAMEEANFLTKYGSQVYIIHRRSDFRASKIMQARTLSNPKIKVVWNSEVVEAYGGADGGPLAGVKVKDVVTGEVSDLQVAGLFFAIGHEPATKFLGGQLELDSDGYVVTKPGSTHTSVQGVFAAGDVQDKKYRQAITAAGSGCMAALDAEHYLQEVGAQEGKTD

SEQ ID NO: 7452 - DNA, 1287 bp, Zea mays subsp. mays
  misc_feature (1)..(1287): Ceres Seq. ID no. 12408795
  misc_feature (1)..(1287): Ortholog of  Ceres SEQ ID NO 13597399 as cited in SEQ ID NO 63760
gcgttgccgcctccttccttccttctcacgaaaaggcaggcaagggaaaggcaaaggccaacccatcccctgcctcctccgttgctctgctgctccccctccttatctaatcctctggttcctggaccccggcctgcaagctcaagcagcagcagcggcgccggcgacgagaagggagtaggaggaggattgctaccatcctatatcatatcatacatatacagagacagcaaggaggaggagaaggtgtgtagcgaggttgagatccggaggatgccttccagtgccatgagttccgggctgttcgtggagtccgcctccggcagcggcgccgagccggtgctctgcgcgcctcggccgcgcagggtccagcaggtgcacccctgcagcgccgacctcatccttggcgcaccgcccttcccgcgcaacgccaacagcaagggcagcagcagcagggaaggaggcaggacgacgaccaggccggcggcggaggacgaggacgaggactgccgctgggcggcgttcggcgggtcgccgccggcgcgcgcggacaacccgctggtgcacgacccccggttcctgcggaaccagcgccacccggcgccgctggagctcgggtcgccgaaccaccggcggccgacctacagcagcggtggcgacggcagcgggtttgcctcgtcgtcgttcgcgccggccgtgaggatccagggcttcgacgtcgccgcgtgccgcgcgtgagagcgagctccggccgggcggggctttggcttttcgatctattaaattaaattaacagcaggtgaggtcaggtcagatcagatcatagtagggaggaaggcgaggagggcgggagggatgggatgagatctcctcttcctcctcctcgcgagggaggcgatccagtcgtatgagtgaagtaaagaagagtactccagtcgtactataggttgatgttcgccgataccacaccacacagcagccggtcaaagggagtgaaaactgattttttgtttacggggttttgtcagcaaggttattaggttttgtgtttgtgctgtagcctgtaagatgtaagctactactagcacgggtctcttgttcgttgatgctgctctgctctggcctctgggtgcccctgtattgtagatataaatcagcacccagttcgggcggtcggccagcgttcgtttttcttctagttgacgaggaggaagaagatgtccgctcctcgccatgtaatgtaaccatggctgtactcctacatacatgcaatcatgtataaagatg

SEQ ID NO: 7453 - protein, 245 aa, Zea mays subsp. mays
  peptide (1)..(245): Ceres Seq. ID no. 12408796
ALPPPSFLLTKRQARERQRPTHPLPPPLLCCSPSLSNPLVPGPRPASSSSSSGAGDEKGVGGGLLPSYIISYIYRDSKEEEKVCSEVEIRRMPSSAMSSGLFVESASGSGAEPVLCAPRPRRVQQVHPCSADLILGAPPFPRNANSKGSSSREGGRTTTRPAAEDEDEDCRWAAFGGSPPARADNPLVHDPRFLRNQRHPAPLELGSPNHRRPTYSSGGDGSGFASSSFAPAVRIQGFDVAACRA

SEQ ID NO: 7454 - protein, 154 aa, Zea mays subsp. mays
  peptide (1)..(154): Ceres Seq. ID no. 12408797
MPSSAMSSGLFVESASGSGAEPVLCAPRPRRVQQVHPCSADLILGAPPFPRNANSKGSSSREGGRTTTRPAAEDEDEDCRWAAFGGSPPARADNPLVHDPRFLRNQRHPAPLELGSPNHRRPTYSSGGDGSGFASSSFAPAVRIQGFDVAACRA

SEQ ID NO: 7455 - protein, 149 aa, Zea mays subsp. mays
  peptide (1)..(149): Ceres Seq. ID no. 12408798
MSSGLFVESASGSGAEPVLCAPRPRRVQQVHPCSADLILGAPPFPRNANSKGSSSREGGRTTTRPAAEDEDEDCRWAAFGGSPPARADNPLVHDPRFLRNQRHPAPLELGSPNHRRPTYSSGGDGSGFASSSFAPAVRIQGFDVAACRA

SEQ ID NO: 7456 - DNA, 1201 bp, Zea mays subsp. mays
  misc_feature (1)..(1201): Ceres Seq. ID no. 12408788
  misc_feature (1)..(1201): Ortholog of  Ceres SEQ ID NO 12784040 as cited in SEQ ID NO 66597
aaaaacaaactaaaatcgagaaacgcgatcgtaagtagcggcggcggcggcgtggcgacagcaggagtaggattggcccagttcaatcgcacggccaatctggtaggcggtcatcgtcagaatccagactccacataccggcccatttacagcaaggaaccgcgaacgccaagctcgtcttctttcttggaagaggggccgctccactcgactgaaagcgcaatcaactctagtctctagccacaactcgaagtacgagtacctccggagtccggatggctgcagcgatggacgtcgacgaagccggcggcgaggagaggcgaccgtcggagaaggagctcttccgcgccgccgagtccggcgacgccgccgcgttcgcctccctcgcccccgccgacctctccctgcgcaacgaggacggccgctccctcctccacgtcgccgccgctgccggccatccccaggtggtgctcgcgcttgcccagtgcggtggtgacgccgcggctagcgtgctgaatgcgcaggacgaggaggggtgggcgccgatccactccgccgcgagctccggcaactctcaaatcgtcgacatcctgcttgagcgaggtgctgatgctaacctggttactgatggtggccgaactgctcttcattatgctgcgagtaaagggaggcttaacatagctgaaaaactaatagcccatggtgctaatgtcaacaagaaagacaagtttggctgcacacctttgcatagagctgcaagcactggaaacgcggagctgtgtgaattcctcattgaggaaggtgctgaagttgatgctgttgacaagacaggacaaacacctcttacgcatgctgttatatgtgagaacaaaggggctgctcttctgctaattagacatggtgctgatgttgatgtcgaggacaaggaaggctacactgcccttggccgagcatcgaacagcttcagacctgcactcatcgatgcagccaaggcaatgctcgaaggatgatctggtgctctgctcaaagacgatggaaagtgtgatacgagaaactgtgctgagtcgaggtgttaaagcttgttctggtgtgtaaacaaaggggctctacagaatcagatttgaccctgctagaattttgcccttgttgggtttatttaaccattgtgactaacatctcataagctaagctttggttctcc

SEQ ID NO: 7457 - protein, 244 aa, Zea mays subsp. mays
  peptide (1)..(244): Ceres Seq. ID no. 12408789
MAAAMDVDEAGGEERRPSEKELFRAAESGDAAAFASLAPADLSLRNEDGRSLLHVAAAAGHPQVVLALAQCGGDAAASVLNAQDEEGWAPIHSAASSGNSQIVDILLERGADANLVTDGGRTALHYAASKGRLNIAEKLIAHGANVNKKDKFGCTPLHRAASTGNAELCEFLIEEGAEVDAVDKTGQTPLTHAVICENKGAALLLIRHGADVDVEDKEGYTALGRASNSFRPALIDAAKAMLEG

SEQ ID NO: 7458 - protein, 240 aa, Zea mays subsp. mays
  peptide (1)..(240): Ceres Seq. ID no. 12408790
MDVDEAGGEERRPSEKELFRAAESGDAAAFASLAPADLSLRNEDGRSLLHVAAAAGHPQVVLALAQCGGDAAASVLNAQDEEGWAPIHSAASSGNSQIVDILLERGADANLVTDGGRTALHYAASKGRLNIAEKLIAHGANVNKKDKFGCTPLHRAASTGNAELCEFLIEEGAEVDAVDKTGQTPLTHAVICENKGAALLLIRHGADVDVEDKEGYTALGRASNSFRPALIDAAKAMLEG

SEQ ID NO: 7459 - DNA, 1848 bp, Zea mays subsp. mays
  misc_feature (1)..(1848): Ceres Seq. ID no. 12372600
  misc_feature (1)..(1848): Ortholog of  Ceres SEQ ID NO 14302935 as cited in SEQ ID NO 20442
  misc_feature (1)..(1848): Ortholog of  Ceres SEQ ID NO 15170811 as cited in SEQ ID NO 52649
  misc_feature (1)..(1848): Ortholog of  Ceres SEQ ID NO 13638331 as cited in SEQ ID NO 58047
  misc_feature (1)..(1848): Ortholog of  Ceres SEQ ID NO 15225845 as cited in SEQ ID NO 65125
  misc_feature (1)..(1848): Ortholog of  Ceres SEQ ID NO 15170135 as cited in SEQ ID NO 67647
gcacgagaccattacctagaacatcctaatcgaaaacccatccggcctcccccccgtctcgatagtcgataccaggttctaaatggcgatggcgatgatggctatgcgacgcgcggtggcgctcggcgctcgccacatccccgccgccgcagcctcttcgttccgagtcgtctccctccgccacatgagcgcggacgcgggcgccgcgatggagaagatccgcgccgccgggctgctcaggacgcaggggcttatcgctgggcagtgggtggacgcctacgacggaaagaccattgaggtgcaaaatccagcaactggtgaggtcctggcaaacgtgtcctgtatgggcagcagagaaacatctgatgctattgcttctgctcacagtacattctattcttggagtaaattcactgcaagtgagaggagcaaggcactaagaaaatggtacgatctaattatttcacacaaggaagagcttgcacttctcatgacactggagcaggggaaacctatgaaagaagcccttggtgaggtcaattatggtgcaagtttcatagaatattttgcagaggaagcaaagcgtatatatggtgacatcattcccccaactttatctgatcgcagattgttggttttgaagcagcctgttggggtagttggagctattacaccatggaattttccattagcaatgataacccgcaaggttggaccagctttggcctgtggctgtactgttgttgtcaagccatcggagttcacacctctgacagcattagctgcagcagatcttgctcttcaagcgggaataccagcgggtgcattgaatgttgtgatgggtaatgctgctgagataggtgatgcgttgctgcagagtacacaggtcagaaagattacattcactggatcaacagctgttggcaaaaaactgatggctggatctgcaaatactgtgaaaaaggtctccttggaacttggtgggaatgcaccttgcattgttttcgatgatgcggacattgatgttgctgttaaaggcagtcttgctgccaagttccgtaacagtggacagacatgtgtttgtgcaaacaggatattggtgcaagaaggtatctacgaaaagtttgcaaaagcattcatccaggctgttcagagtttgaaggtcggtaacggtctagaagagagtacatctcagggtcctctgattaacgaagctgctgttcaaaaggtggagaagttcataaatgacgcaacttcaaagggagcaaatgtcatgctaggtggtaaaagacacagcctgggaatgtcattttatgagccaactgtagtagggaatgtcagcaacgatatgcttcttttcagagaagaagtttttggtccagttgcaccccttataccgttcaaaactgaggaagaagcagtccatatggccaacgatacaaacacaggcttagctgcatacatttttaccaagagcatacctcgttcttggcgtgtatctgaatctcttgagtacggcttagttggggtaaacgaggggattatttcaacggaggtggcgccatttggcggagtaaagcagtctggtctagggagagaaggatcgaagtacggcattgacgagtacttggagctcaagtacatctgcatgggcaacttgggttgagtcctgaagtcggcctctagctcgaaacactcggcagatgatgaacggagaaaccaggcgtgcttagaagggcgtgagttgcgtttagctgcaagatcggtcatgatggctgtgggagagcagttttagaataaatcgaataagccgcggagcattaaataaaagaagtggaaatgagatgt

SEQ ID NO: 7460 - protein, 527 aa, Zea mays subsp. mays
  peptide (1)..(527): Ceres Seq. ID no. 12372601
MAMAMMAMRRAVALGARHIPAAAASSFRVVSLRHMSADAGAAMEKIRAAGLLRTQGLIAGQWVDAYDGKTIEVQNPATGEVLANVSCMGSRETSDAIASAHSTFYSWSKFTASERSKALRKWYDLIISHKEELALLMTLEQGKPMKEALGEVNYGASFIEYFAEEAKRIYGDIIPPTLSDRRLLVLKQPVGVVGAITPWNFPLAMITRKVGPALACGCTVVVKPSEFTPLTALAAADLALQAGIPAGALNVVMGNAAEIGDALLQSTQVRKITFTGSTAVGKKLMAGSANTVKKVSLELGGNAPCIVFDDADIDVAVKGSLAAKFRNSGQTCVCANRILVQEGIYEKFAKAFIQAVQSLKVGNGLEESTSQGPLINEAAVQKVEKFINDATSKGANVMLGGKRHSLGMSFYEPTVVGNVSNDMLLFREEVFGPVAPLIPFKTEEEAVHMANDTNTGLAAYIFTKSIPRSWRVSESLEYGLVGVNEGIISTEVAPFGGVKQSGLGREGSKYGIDEYLELKYICMGNLG

SEQ ID NO: 7461 - protein, 525 aa, Zea mays subsp. mays
  peptide (1)..(525): Ceres Seq. ID no. 12372602
MAMMAMRRAVALGARHIPAAAASSFRVVSLRHMSADAGAAMEKIRAAGLLRTQGLIAGQWVDAYDGKTIEVQNPATGEVLANVSCMGSRETSDAIASAHSTFYSWSKFTASERSKALRKWYDLIISHKEELALLMTLEQGKPMKEALGEVNYGASFIEYFAEEAKRIYGDIIPPTLSDRRLLVLKQPVGVVGAITPWNFPLAMITRKVGPALACGCTVVVKPSEFTPLTALAAADLALQAGIPAGALNVVMGNAAEIGDALLQSTQVRKITFTGSTAVGKKLMAGSANTVKKVSLELGGNAPCIVFDDADIDVAVKGSLAAKFRNSGQTCVCANRILVQEGIYEKFAKAFIQAVQSLKVGNGLEESTSQGPLINEAAVQKVEKFINDATSKGANVMLGGKRHSLGMSFYEPTVVGNVSNDMLLFREEVFGPVAPLIPFKTEEEAVHMANDTNTGLAAYIFTKSIPRSWRVSESLEYGLVGVNEGIISTEVAPFGGVKQSGLGREGSKYGIDEYLELKYICMGNLG

SEQ ID NO: 7462 - protein, 523 aa, Zea mays subsp. mays
  peptide (1)..(523): Ceres Seq. ID no. 12372603
MMAMRRAVALGARHIPAAAASSFRVVSLRHMSADAGAAMEKIRAAGLLRTQGLIAGQWVDAYDGKTIEVQNPATGEVLANVSCMGSRETSDAIASAHSTFYSWSKFTASERSKALRKWYDLIISHKEELALLMTLEQGKPMKEALGEVNYGASFIEYFAEEAKRIYGDIIPPTLSDRRLLVLKQPVGVVGAITPWNFPLAMITRKVGPALACGCTVVVKPSEFTPLTALAAADLALQAGIPAGALNVVMGNAAEIGDALLQSTQVRKITFTGSTAVGKKLMAGSANTVKKVSLELGGNAPCIVFDDADIDVAVKGSLAAKFRNSGQTCVCANRILVQEGIYEKFAKAFIQAVQSLKVGNGLEESTSQGPLINEAAVQKVEKFINDATSKGANVMLGGKRHSLGMSFYEPTVVGNVSNDMLLFREEVFGPVAPLIPFKTEEEAVHMANDTNTGLAAYIFTKSIPRSWRVSESLEYGLVGVNEGIISTEVAPFGGVKQSGLGREGSKYGIDEYLELKYICMGNLG

SEQ ID NO: 7463 - DNA, 1185 bp, Zea mays subsp. mays
  misc_feature (1)..(1185): Ceres Seq. ID no. 12408784
  misc_feature (1)..(1185): Ortholog of  Ceres SEQ ID NO 15171366 as cited in SEQ ID NO 51578
  misc_feature (1)..(1185): Ortholog of  Ceres SEQ ID NO 14306949 as cited in SEQ ID NO 54919
  misc_feature (1)..(1185): Ortholog of  Ceres SEQ ID NO 14308536 as cited in SEQ ID NO 55469
  misc_feature (1)..(1185): Ortholog of  Ceres SEQ ID NO 15175723 as cited in SEQ ID NO 57875
  misc_feature (1)..(1185): Ortholog of  Ceres SEQ ID NO 14314909 as cited in SEQ ID NO 58002
  misc_feature (1)..(1185): Ortholog of  Ceres SEQ ID NO 15179772 as cited in SEQ ID NO 64248
aaaccagtcaccgcctaccaccgttttataatccacccctcccactccccctgttttttcttcttccgctgttctactccggcgtgttggtcgacggcggcgcagatgacgaccctcgatctgatgggagggtacgggcgggtggacgagcaggtggccatccaggaggccgccacggcgggggctgcgcgggatggagcgtctcatcttgcagctctcccaggctggcaccggggagcggtcgtcgtccccaccggcggtacaggcgcagcgccagcagcagaagcagctggagcagatccagcagcaggttgactgccgggagctcacggacatgacggtgtccaagttcaagaaggtgatctccatcctgaaccgcacggggcacgcgcggttccggcgtggccccgtggcggcgcggtcgcagtcgcagtcgcagggacctgcctcccccgagcccgcgcaatcggcgccggctcccgccgcgaggcccctgacgctggacttcaccaagtcggtgtccggttacagcagggactccgggttcagcgtgtccggcgcgagctcgtcgttcctgtcgtcggtgacgaccggggacgggagcgtgtcgaacgggcgcgcgggaggctcgtcgttcctcatgctcccaccggcgcccggcgcggccagctgcgcgaagccgccgcccgccggtgcggcgcagaagcgcaagtgccacgaccacgcgcactcggagaacgtcgccggcggcaagtacggtgctaacggcgggcgctgccactgctcgaagcgcaggaagcaccgtgtgaagcgcacgatccgcgtgccggcgatcagccccaaagtggcggacatccccgccgacgagtactcgtggcgcaagtacggccagaaacccatcaaggggtcgccctacccacgcggctactacaagtgcagcacggtgcgcggctgccccgcccggaagcatgtggagcgcgaccccgccgacccgtcgatgctgatcgtcacctacgagggcgagcaccgccacagccccgcctccggccaggacccgccgccgccgtcgctcgcgccgctgccggagctgcccagccattgatttggcttcctgcctgctctgtcctgtcaattactagtagctgttgtcataagttataaaatcaaaatcgccagttcagtttt

SEQ ID NO: 7464 - protein, 302 aa, Zea mays subsp. mays
  peptide (1)..(302): Ceres Seq. ID no. 12408785
MERLILQLSQAGTGERSSSPPAVQAQRQQQKQLEQIQQQVDCRELTDMTVSKFKKVISILNRTGHARFRRGPVAARSQSQSQGPASPEPAQSAPAPAARPLTLDFTKSVSGYSRDSGFSVSGASSSFLSSVTTGDGSVSNGRAGGSSFLMLPPAPGAASCAKPPPAGAAQKRKCHDHAHSENVAGGKYGANGGRCHCSKRRKHRVKRTIRVPAISPKVADIPADEYSWRKYGQKPIKGSPYPRGYYKCSTVRGCPARKHVERDPADPSMLIVTYEGEHRHSPASGQDPPPPSLAPLPELPSH

SEQ ID NO: 7465 - protein, 255 aa, Zea mays subsp. mays
  peptide (1)..(255): Ceres Seq. ID no. 12408786
MTVSKFKKVISILNRTGHARFRRGPVAARSQSQSQGPASPEPAQSAPAPAARPLTLDFTKSVSGYSRDSGFSVSGASSSFLSSVTTGDGSVSNGRAGGSSFLMLPPAPGAASCAKPPPAGAAQKRKCHDHAHSENVAGGKYGANGGRCHCSKRRKHRVKRTIRVPAISPKVADIPADEYSWRKYGQKPIKGSPYPRGYYKCSTVRGCPARKHVERDPADPSMLIVTYEGEHRHSPASGQDPPPPSLAPLPELPSH

SEQ ID NO: 7466 - protein, 153 aa, Zea mays subsp. mays
  peptide (1)..(153): Ceres Seq. ID no. 12408787
MLPPAPGAASCAKPPPAGAAQKRKCHDHAHSENVAGGKYGANGGRCHCSKRRKHRVKRTIRVPAISPKVADIPADEYSWRKYGQKPIKGSPYPRGYYKCSTVRGCPARKHVERDPADPSMLIVTYEGEHRHSPASGQDPPPPSLAPLPELPSH

SEQ ID NO: 7467 - DNA, 1818 bp, Zea mays subsp. mays
  misc_feature (1)..(1818): Ceres Seq. ID no. 12406318
  misc_feature (1)..(1818): Ortholog of  Ceres SEQ ID NO 14312293 as cited in SEQ ID NO 58744
  misc_feature (1)..(1818): Ortholog of  Ceres SEQ ID NO 15177596 as cited in SEQ ID NO 59731
gcacgagaccattacctagaacatcctaatcaaaactctctctctctcattcatctcgcctttctttcttaccggccggccggccggcggctgggctctgcaattcacccaacttttctctgttttcactacgatctcagggctccggcgaccgtgcggcctcatcatcagctacaacctaccagctgctaccgtctcggtcgccgcctagctctccgcagcggctagctcatccggccggccgccccttttctcttgccgttgcgcagttgcgcccccttccccgcggcttaggaaccatcgaaaagacgcctcaccatctcctttgtgtccttgctaactaactcccccattaaatcctctccttcctcccgcgctggccgtgtggtctctcagccctccgagttgatccataagctagcgccatcatcgatcgccatatatacatagccaaggacgcacgcgcgcgcgcgcgcaaaccagcgggagcgaacaccaaccggccggaccaattaagaagcaggctagcaagtcgaagaggaaagaagagaaggggggtaccgggggtaccggccggtcatcgatcgagcttggcgaagcagcgaccgccgggtcgtcgtcgtcggtacatgcatgcagcgcggcggtgatcaagcaggagcgagcctgggcatggagatgggggtggggtacgccggcggcggcggcggcggcgagtgctcgtcgtcctcggcggctgccgcggccgcggccgcggcggagggggaggagcggcagctgctcaagggggagatcgcggtgcacccgctgtgcgagcagctagtggcggcgcacgtggggtgcctgcgcgtggccacgcccatcgaccacctccccctcatcgacgcccagctcgcgcagtccagcggcctcctccactcctacgccgcccaccaccgccccttcctctccccgcacgacaagcacgacctcgactcgttcctcgcgcagtacctgatgctgctgtgctcgttccgggagcagctgcagcagcacgtccgggtgcacgccgtggaggccgtcatggcgtgccgcgagatcgagcagtccctgcaggacctaaccggggcgacacttgaggaagggacgggggcgaccatgtcagaggacgaggacgaggcgccgatgctggaggtgggcctggatatgggctccgacgggcacgacatgatgggcttcggcccgctcatgcccaccgactcggagcgctcgctcatggagagggtcaggcaggagctcaagatggagctcaagcagggtttcaagtcgagaatagaggatgtgcgggaggagatcctgaggaaaaggagggccgggaagctgcctggggacaccaccagcatcctcaagcaatggtggcaggagcactccaagtggccataccccacggaagacgataaggctaagctcgtcgaagagaccggcctgcagctgaagcaaatcaacaactggttcatcaaccagaggaagaggaactggcacaacaactcccagacgtcaaccctcaaatcgaagcgtaaaaggtgatggaggagagctagctgcaccgtatataccgtgtatgtaacgcacacctgctgacacacatgtacacatgtataccataccaacacgctaatcaaacggagctctgcatggcgactgtactcacggaaataaagaggaccatatcgaccggttcaactgtatatctagccattagtctgaccactggcatatttgtttgctgcggctgatactttgagctgatgatgtgtggctcacagcatactttattcc

SEQ ID NO: 7468 - protein, 310 aa, Zea mays subsp. mays
  peptide (1)..(310): Ceres Seq. ID no. 12406319
MQRGGDQAGASLGMEMGVGYAGGGGGGECSSSSAAAAAAAAAEGEERQLLKGEIAVHPLCEQLVAAHVGCLRVATPIDHLPLIDAQLAQSSGLLHSYAAHHRPFLSPHDKHDLDSFLAQYLMLLCSFREQLQQHVRVHAVEAVMACREIEQSLQDLTGATLEEGTGATMSEDEDEAPMLEVGLDMGSDGHDMMGFGPLMPTDSERSLMERVRQELKMELKQGFKSRIEDVREEILRKRRAGKLPGDTTSILKQWWQEHSKWPYPTEDDKAKLVEETGLQLKQINNWFINQRKRNWHNNSQTSTLKSKRKR

SEQ ID NO: 7469 - protein, 297 aa, Zea mays subsp. mays
  peptide (1)..(297): Ceres Seq. ID no. 12406320
MEMGVGYAGGGGGGECSSSSAAAAAAAAAEGEERQLLKGEIAVHPLCEQLVAAHVGCLRVATPIDHLPLIDAQLAQSSGLLHSYAAHHRPFLSPHDKHDLDSFLAQYLMLLCSFREQLQQHVRVHAVEAVMACREIEQSLQDLTGATLEEGTGATMSEDEDEAPMLEVGLDMGSDGHDMMGFGPLMPTDSERSLMERVRQELKMELKQGFKSRIEDVREEILRKRRAGKLPGDTTSILKQWWQEHSKWPYPTEDDKAKLVEETGLQLKQINNWFINQRKRNWHNNSQTSTLKSKRKR

SEQ ID NO: 7470 - protein, 295 aa, Zea mays subsp. mays
  peptide (1)..(295): Ceres Seq. ID no. 12406321
MGVGYAGGGGGGECSSSSAAAAAAAAAEGEERQLLKGEIAVHPLCEQLVAAHVGCLRVATPIDHLPLIDAQLAQSSGLLHSYAAHHRPFLSPHDKHDLDSFLAQYLMLLCSFREQLQQHVRVHAVEAVMACREIEQSLQDLTGATLEEGTGATMSEDEDEAPMLEVGLDMGSDGHDMMGFGPLMPTDSERSLMERVRQELKMELKQGFKSRIEDVREEILRKRRAGKLPGDTTSILKQWWQEHSKWPYPTEDDKAKLVEETGLQLKQINNWFINQRKRNWHNNSQTSTLKSKRKR

SEQ ID NO: 7471 - DNA, 1215 bp, Zea mays subsp. mays
  misc_feature (1)..(1215): Ceres Seq. ID no. 12406200
  misc_feature (1)..(1215): Ortholog of  Ceres SEQ ID NO 15173936 as cited in SEQ ID NO 61736
  misc_feature (1)..(1215): Ortholog of  Ceres SEQ ID NO 13596373 as cited in SEQ ID NO 67991
atacggacacaggatatttggtcgctggagacagacacacgacacgacacagacatgcgtcgaggtcacgaggtccagagcagtaggaaagtagttttctcgaggccacgaggtcccctgtacctgtagctgtagcatgggcggtacagcagcaccaatgcaagctgcaaggcgatcgaatgatactaccccaccggcgtcggacatgcaggtacggtagcgttctgtttttgtttataaataaaaaaaaactgctccacgctttgcacacggccgatccaggcagcagcagcagcatgttcccacaggcagatgcgcatccagcccacgagcctctcgccggccgggtggccatcgtgacaggaggcgccgggggcatcggctcggcggtggccgcgcacctggcgtccctgggcgcccgcgtcgtggtcggcttcatcggcgacccggcccccgcggaccagctcgtggcggccctcaacaactcctcgccggcaggcaacagcgacccgcgcgccgtggcggtggcagcggacgtgtcggacccggcgcaggtggcgcggctgttcgacgcggcggaggcggcgttcgggccggagctgcacgtgctggtggccgcggcgggggtgcaggacgcgacgtacccgcggatcgcggacacgtcgcccgagcagtgggacctcgcgttcggcgtgaacacgcgcggcacgttcctgtgctgccgggaggcggcgcggcggctggcgcgcggcggcgcgggccgcatcgtcaccctctcgtcctccaacgtggggtcgctgcggcccgggtacggcgcgtacgctgccagcaaggcggccgtggaggccatgacaaaggtgctggccaaggagctgggcgggacggggatcacggtcaacgccgtggcgccgggccccgtggccacgcccatgttctacgcgggcaagtcggaggagcgcgtggccgccgcngcgcgcgagtgccccatggggaggctcgccgagccggcggacgtggcgcccgtggtggggttcctgtgcaccgacgccgccggctggatcaacgggcaggtcatccgagtcaacggcggctacgtgtgagtgtactgtgatgagagggaggaggcatagctagctagcttagcttggagtgtcagcgtgtcaccaaccgacaattacacgtgctccttccnttaataataataataataataat

SEQ ID NO: 7472 - protein, 306 aa, Zea mays subsp. mays
  peptide (1)..(306): Ceres Seq. ID no. 12406201
  misc_feature (264)..(264): Xaa is any aa, unknown or other
MILPHRRRTCRYGSVLFLFINKKKLLHALHTADPGSSSSMFPQADAHPAHEPLAGRVAIVTGGAGGIGSAVAAHLASLGARVVVGFIGDPAPADQLVAALNNSSPAGNSDPRAVAVAADVSDPAQVARLFDAAEAAFGPELHVLVAAAGVQDATYPRIADTSPEQWDLAFGVNTRGTFLCCREAARRLARGGAGRIVTLSSSNVGSLRPGYGAYAASKAAVEAMTKVLAKELGGTGITVNAVAPGPVATPMFYAGKSEERVAAXARECPMGRLAEPADVAPVVGFLCTDAAGWINGQVIRVNGGYV

SEQ ID NO: 7473 - protein, 267 aa, Zea mays subsp. mays
  peptide (1)..(267): Ceres Seq. ID no. 12406202
  misc_feature (225)..(225): Xaa is any aa, unknown or other
MFPQADAHPAHEPLAGRVAIVTGGAGGIGSAVAAHLASLGARVVVGFIGDPAPADQLVAALNNSSPAGNSDPRAVAVAADVSDPAQVARLFDAAEAAFGPELHVLVAAAGVQDATYPRIADTSPEQWDLAFGVNTRGTFLCCREAARRLARGGAGRIVTLSSSNVGSLRPGYGAYAASKAAVEAMTKVLAKELGGTGITVNAVAPGPVATPMFYAGKSEERVAAXARECPMGRLAEPADVAPVVGFLCTDAAGWINGQVIRVNGGYV

SEQ ID NO: 7474 - DNA, 1432 bp, Zea mays subsp. mays
  misc_feature (1)..(1432): Ceres Seq. ID no. 12407071
  misc_feature (1)..(1432): Ortholog of  Ceres SEQ ID NO 14301994 as cited in SEQ ID NO 56653
  misc_feature (1)..(1432): Ortholog of  Ceres SEQ ID NO 14304120 as cited in SEQ ID NO 58862
  misc_feature (1)..(1432): Ortholog of  Ceres SEQ ID NO 13595658 as cited in SEQ ID NO 59888
  misc_feature (1)..(1432): Ortholog of  Ceres SEQ ID NO 13661330 as cited in SEQ ID NO 61614
  misc_feature (1)..(1432): Ortholog of  Ceres SEQ ID NO 13596025 as cited in SEQ ID NO 62024
  misc_feature (1)..(1432): Ortholog of  Ceres SEQ ID NO 13662324 as cited in SEQ ID NO 62162
  misc_feature (1)..(1432): Ortholog of  Ceres SEQ ID NO 12625713 as cited in SEQ ID NO 64160
  misc_feature (1)..(1432): Ortholog of  Ceres SEQ ID NO 14303564 as cited in SEQ ID NO 65360
  misc_feature (1)..(1432): Ortholog of  Ceres SEQ ID NO 15170103 as cited in SEQ ID NO 66345
  misc_feature (1)..(1432): Ortholog of  Ceres SEQ ID NO 14301782 as cited in SEQ ID NO 66788
  misc_feature (1)..(1432): Ortholog of  Ceres SEQ ID NO 14302860 as cited in SEQ ID NO 67667
  misc_feature (1)..(1432): Ortholog of  Ceres SEQ ID NO 14313495 as cited in SEQ ID NO 0
atcttccccgtgcttgcagttgcagtgcagctgtacccacagtgccctgtcagtctcggccattgcaatgcctcaagaagcagcaatggagttgccaagaccaatgggcgtgcttctgctcgtgttcttcgtcttgtgcagagtgggggacgcggcgacgttcatgttcgtgaaccggtgcacggacacggtgtggccgggcgtcctgtccaacgccggcagcccaaggctggagccgacggggttcgagctcccgccgggcgcggcacgcgcggtgccggcgccggcgggctggtccggccgcatgtgggcgcgcacgggctgctcccaggacggcgccacggggcggctcgtctgtgccacgggcgactgcggctctggctccgccgagtgcgcgggcgcgggcgctgcgccgccggccacgctggccgagttcacgctcgacggcagtggcgggctggacttctacgacgtcagcctcgtggatggctacaacctccccgtgctggtggagacctccggcggcgcaggctccagcgggccggcgtcgtgcgcggcggccgggtgcgcagcgaacctgaaacncgatgtgccccgccgagctccgagccgggggcggcgccgcgtgccggagcgcgtgcgacgcgttcgcgcggcccgagtactgctgcagcggcgccttcgcgtccccggcggcgtgccggccgactacctactcgcaggtgttcaagagcgcgtgcccgcgctcctacagttacgccttcgacgatcccacctccacattcacctgcggcggcggcccagactacaccgtcaccttctgccccggcgccaccccaagccagaagtcgacgaccacaccgggcgcgacgccggcgacggtgccggggacaatgacgacgacggtgccggaggcaacgccgatgccgggcgcgaccccggctatgccgacggggaccatgatgccaccgggcgcgacgttcacggacgccaccccggacagcgcgatgatgccgatgggtggcctgggcatcgagggcgggggccaaggcagcgtgctcctgggcggcagcagcagcgaaggcagcgtctcttggctcgccaacatggccaccggcgacgcggccgtcccgctggtggcttcggctcggttattggtggcgccactggcaacgttgctctgcggcctccatttgctgtagtagtggtgatggagggagcagaggaatctgttggcgattcgcacggtggcgcctttgtattgccgtgtctgtagatgattttactgtccattgatcatgttgcgttagccccggtcccaggattagatacttgtggctactagtagtactagttctagaggagaaattaaagcatggatgtggacattgattaaagttaatcgctgtcgtgctagctgcgctttgttgtt

SEQ ID NO: 7475 - protein, 424 aa, Zea mays subsp. mays
  peptide (1)..(424): Ceres Seq. ID no. 12407072
  misc_feature (195)..(195): Xaa is any aa, unknown or other
SSPCLQLQCSCTHSALSVSAIAMPQEAAMELPRPMGVLLLVFFVLCRVGDAATFMFVNRCTDTVWPGVLSNAGSPRLEPTGFELPPGAARAVPAPAGWSGRMWARTGCSQDGATGRLVCATGDCGSGSAECAGAGAAPPATLAEFTLDGSGGLDFYDVSLVDGYNLPVLVETSGGAGSSGPASCAAAGCAANLKXDVPRRAPSRGRRRVPERVRRVRAARVLLQRRLRVPGGVPADYLLAGVQERVPALLQLRLRRSHLHIHLRRRPRLHRHLLPRRHPKPEVDDHTGRDAGDGAGDNDDDGAGGNADAGRDPGYADGDHDATGRDVHGRHPGQRDDADGWPGHRGRGPRQRAPGRQQQRRQRLLARQHGHRRRGRPAGGFGSVIGGATGNVALRPPFAVVVVMEGAEESVGDSHGGAFVLPCL

SEQ ID NO: 7476 - protein, 402 aa, Zea mays subsp. mays
  peptide (1)..(402): Ceres Seq. ID no. 12407073
  misc_feature (173)..(173): Xaa is any aa, unknown or other
MPQEAAMELPRPMGVLLLVFFVLCRVGDAATFMFVNRCTDTVWPGVLSNAGSPRLEPTGFELPPGAARAVPAPAGWSGRMWARTGCSQDGATGRLVCATGDCGSGSAECAGAGAAPPATLAEFTLDGSGGLDFYDVSLVDGYNLPVLVETSGGAGSSGPASCAAAGCAANLKXDVPRRAPSRGRRRVPERVRRVRAARVLLQRRLRVPGGVPADYLLAGVQERVPALLQLRLRRSHLHIHLRRRPRLHRHLLPRRHPKPEVDDHTGRDAGDGAGDNDDDGAGGNADAGRDPGYADGDHDATGRDVHGRHPGQRDDADGWPGHRGRGPRQRAPGRQQQRRQRLLARQHGHRRRGRPAGGFGSVIGGATGNVALRPPFAVVVVMEGAEESVGDSHGGAFVLPCL

SEQ ID NO: 7477 - protein, 396 aa, Zea mays subsp. mays
  peptide (1)..(396): Ceres Seq. ID no. 12407074
  misc_feature (167)..(167): Xaa is any aa, unknown or other
MELPRPMGVLLLVFFVLCRVGDAATFMFVNRCTDTVWPGVLSNAGSPRLEPTGFELPPGAARAVPAPAGWSGRMWARTGCSQDGATGRLVCATGDCGSGSAECAGAGAAPPATLAEFTLDGSGGLDFYDVSLVDGYNLPVLVETSGGAGSSGPASCAAAGCAANLKXDVPRRAPSRGRRRVPERVRRVRAARVLLQRRLRVPGGVPADYLLAGVQERVPALLQLRLRRSHLHIHLRRRPRLHRHLLPRRHPKPEVDDHTGRDAGDGAGDNDDDGAGGNADAGRDPGYADGDHDATGRDVHGRHPGQRDDADGWPGHRGRGPRQRAPGRQQQRRQRLLARQHGHRRRGRPAGGFGSVIGGATGNVALRPPFAVVVVMEGAEESVGDSHGGAFVLPCL

SEQ ID NO: 7478 - DNA, 1708 bp, Zea mays subsp. mays
  misc_feature (1)..(1708): Ceres Seq. ID no. 12408780
  misc_feature (1)..(1708): Ortholog of  Ceres SEQ ID NO 13598532 as cited in SEQ ID NO 65204
  misc_feature (1)..(1708): Ortholog of  Ceres SEQ ID NO 13656849 as cited in SEQ ID NO 65764
ccttttcccaaatcccacacctatggcgatcgtcggcggcggcgggagctggagcatccacggccgcgctgatgtcacatcccgctacgaggtcctcggccgtgcgggctccggttcctatgctgatgtctaccgcggccgccgccgatccgacggtgctgctgtcgcgctcaaggaggtccacgacgctgtcagcgctcgcagcgaggtcgaggctctcctcgccattcccccttcccccaacgttgtcgcactcatcgaccacttccccggcggcgattgcgacgacgacgtcctcgtcctcgagtggctcccgctcgacctcgccgccgttgtgcgtgacgcgaggaggcgcgcgggcgggggcgagggaggggaaggcatccccgcctcgcaactcaaacggtggatgctgcaggtgcttgagggggtcgccgcgtgccaccgcgccggcgtcgtgcaccgtgacctgaagcctgagaacctgctcatctccgaagacggggtgctcaaagtcgccgattttggtcaggctaggatacttcagcagtcagcacctacatttcaagaaatgtacccacacgagcaaagttcaggcatggaaacatgggttccacaacaacaaccagcagtgctacaagggacagaagaggaaccaacatcttatgaatcagatgctactgctggtcaggagccagagaccctaactgctgctgactacctgcgtgaactggaccaactccgagaaaaatccagcgatgttgacaaaatgagctttcaggatgaacatgcatcctgtcttgccacgtgcagcacaggagacattgaagatgatccatacccagcctcctactctgacgatatggaaggcataggtgaagattctggtgccttcacttcttgtgttggcactaggtggttcagggctcctgagcttttatatgggtcaacaaactatgggctagagattgatctctggtcgcttggatgcattttggcagaactgatgaaattggaggctttgttcccagggatatctgatattgatcagattagtagaatcatcaatgtcctgggcgatataacagaagaaacctttccaggctgttcaaacttgccagattacaacaagatttcctttaacaaagttgagaaaccgacaggccttgaagcatgtctgcctaacagatctcctactgaggttagcatcataaagcagctaatttgctatgacacagcaaagaggaccagtgctgttgatctgctgaatgatcggtactttaccgaagagcccttgccggcacctatagaaggattacatgtcccggcatcaaaggacgaggatgatgacagctcaactgaagaatggggtaattacagggatggtgtctctcgggttgactttgatgagtttggtagtatggatgccaccaaaactgagaagggtttcagcatacagttttcgtgacgaagaaagacgtagacgtacggaccatgcgtgccatgtccaaactaagaccatatcatggtatttatctacatgggagttgaattgctgtcaacatagacgaacatcagtaagcgatcaaaggttgtgcaatgttgctttgggtttaacatttttttagtttctatggaactttgtgattctttgtacggcagaaccagttttttccctggcaagaataaaactgtgtgtggtagtctg

SEQ ID NO: 7479 - protein, 488 aa, Zea mays subsp. mays
  peptide (1)..(488): Ceres Seq. ID no. 12408781
LFPNPTPMAIVGGGGSWSIHGRADVTSRYEVLGRAGSGSYADVYRGRRRSDGAAVALKEVHDAVSARSEVEALLAIPPSPNVVALIDHFPGGDCDDDVLVLEWLPLDLAAVVRDARRRAGGGEGGEGIPASQLKRWMLQVLEGVAACHRAGVVHRDLKPENLLISEDGVLKVADFGQARILQQSAPTFQEMYPHEQSSGMETWVPQQQPAVLQGTEEEPTSYESDATAGQEPETLTAADYLRELDQLREKSSDVDKMSFQDEHASCLATCSTGDIEDDPYPASYSDDMEGIGEDSGAFTSCVGTRWFRAPELLYGSTNYGLEIDLWSLGCILAELMKLEALFPGISDIDQISRIINVLGDITEETFPGCSNLPDYNKISFNKVEKPTGLEACLPNRSPTEVSIIKQLICYDTAKRTSAVDLLNDRYFTEEPLPAPIEGLHVPASKDEDDDSSTEEWGNYRDGVSRVDFDEFGSMDATKTEKGFSIQFS

SEQ ID NO: 7480 - protein, 481 aa, Zea mays subsp. mays
  peptide (1)..(481): Ceres Seq. ID no. 12408782
MAIVGGGGSWSIHGRADVTSRYEVLGRAGSGSYADVYRGRRRSDGAAVALKEVHDAVSARSEVEALLAIPPSPNVVALIDHFPGGDCDDDVLVLEWLPLDLAAVVRDARRRAGGGEGGEGIPASQLKRWMLQVLEGVAACHRAGVVHRDLKPENLLISEDGVLKVADFGQARILQQSAPTFQEMYPHEQSSGMETWVPQQQPAVLQGTEEEPTSYESDATAGQEPETLTAADYLRELDQLREKSSDVDKMSFQDEHASCLATCSTGDIEDDPYPASYSDDMEGIGEDSGAFTSCVGTRWFRAPELLYGSTNYGLEIDLWSLGCILAELMKLEALFPGISDIDQISRIINVLGDITEETFPGCSNLPDYNKISFNKVEKPTGLEACLPNRSPTEVSIIKQLICYDTAKRTSAVDLLNDRYFTEEPLPAPIEGLHVPASKDEDDDSSTEEWGNYRDGVSRVDFDEFGSMDATKTEKGFSIQFS

SEQ ID NO: 7481 - protein, 352 aa, Zea mays subsp. mays
  peptide (1)..(352): Ceres Seq. ID no. 12408783
MLQVLEGVAACHRAGVVHRDLKPENLLISEDGVLKVADFGQARILQQSAPTFQEMYPHEQSSGMETWVPQQQPAVLQGTEEEPTSYESDATAGQEPETLTAADYLRELDQLREKSSDVDKMSFQDEHASCLATCSTGDIEDDPYPASYSDDMEGIGEDSGAFTSCVGTRWFRAPELLYGSTNYGLEIDLWSLGCILAELMKLEALFPGISDIDQISRIINVLGDITEETFPGCSNLPDYNKISFNKVEKPTGLEACLPNRSPTEVSIIKQLICYDTAKRTSAVDLLNDRYFTEEPLPAPIEGLHVPASKDEDDDSSTEEWGNYRDGVSRVDFDEFGSMDATKTEKGFSIQFS

SEQ ID NO: 7482 - DNA, 1844 bp, Zea mays subsp. mays
  misc_feature (1)..(1844): Ceres Seq. ID no. 12408772
  misc_feature (1)..(1844): Ortholog of  Ceres SEQ ID NO 13596554 as cited in SEQ ID NO 62818
aaaaaaagcatgcgaattattcgaggcggctttatggtcggacggatcacccccagcaaggagccgccacccgccactccgccagagcattgcagcgccagccacctcgccccctctcgctgtcccgcaccacccgctccgagggaaggagaggtaaccggtgggggggcgcggcggcgagcggagatcccgggaactccgatcgagcgcaagcggcgggacctgcgggagcagagagcgcgcagggaggacaagtgagtagcgtggttcgatggtaagggagacgggatactacgacgtgctggaagtgagcccgacggcctccgaggccgagatcaagaaggcatactacgtcaaggcgaggcaggtccatccggacaagaacccagatgatccgcttgcggcggcgaggttccaggaattgggggaggcataccaagtgctcagtaatcccaagcagcgtgaagactatgacttacatgggaaacctggtatttcaacggaagcgataattgatcctgcagcaatttttgcgatgctgttcggtagcgagctttttgaggactacattggtcagctggcgatggcatccatggcttcacttgatggttttactgaaaacgaacagatcgatccaagaaggttgcaagagcaaatgcgagttgtacaaaaagaaagagaggagaaacttgcagaggcactaaaagataggttgcatctttatgttcaaggaaacaaagaggaatttatccagtatgctgatgctgaggttactagactctctaatgccgcatacggtgttgatatgttgagtactattggttatgtgtattcgagacaagcttctaaggagcttggaaagcaagctaaatatcttggtgttccatttattgctgaatggttcagaaacaaagggcattctattaaatcccaaataactgctgcaacaggtgcattagctcttatgcagctgcaggaagactggagaaagcatctcagtgatgagtgccactacaatgaagaggaactggaggcttacatgctgacacataagagtgttatggtggactcgttatggaagcttaatgttgctgatatagaggaaaccctgtcacatgtgtgtcaaatggtgcttcatgacagcagtgccaggaaagaggaactgcgagttcgagctaaaggattgaaaactttaggcaaaatattccatcaagccaagcttagcactgctgagggagatccagcagcaatgaataatacaataaataacttggatgagaatgatgatagttcaccggagtcatctccaagatctcccagggaccaaatgttcgatacaaacccaccttattcccagagtccatacgtggaggcccctgagttgggcgggtatttttccttcgacttcccaatgcctatcgctccgcctggcgcgcagagggaccctattccgtgaccgccgtgagtgcggcggctctgttttgtgtggatcgtcattttgtacaatattgcctgtgtaaatcatttttatttgtaacattagtagcagtagtgtgagacagcagcttggcacccattgcatcgtttcttttctttttcttcgtgtaatcaatcaatcaagcatgcgacgacggcagccttgtcttgttcgtagggcttggtctgcttctggccacgggtcagccattggtgtacatgaactaccacctctttgtttcttgtgtttatcagtttatgggtgcataattgtttagcctatgggcccatctgggcaaacaacacttgcttgtgctaagctttgctcgaacttcgtctcgtgaaatttgatcatctcctcttcctgc

SEQ ID NO: 7483 - protein, 394 aa, Zea mays subsp. mays
  peptide (1)..(394): Ceres Seq. ID no. 12408773
MVRETGYYDVLEVSPTASEAEIKKAYYVKARQVHPDKNPDDPLAAARFQELGEAYQVLSNPKQREDYDLHGKPGISTEAIIDPAAIFAMLFGSELFEDYIGQLAMASMASLDGFTENEQIDPRRLQEQMRVVQKEREEKLAEALKDRLHLYVQGNKEEFIQYADAEVTRLSNAAYGVDMLSTIGYVYSRQASKELGKQAKYLGVPFIAEWFRNKGHSIKSQITAATGALALMQLQEDWRKHLSDECHYNEEELEAYMLTHKSVMVDSLWKLNVADIEETLSHVCQMVLHDSSARKEELRVRAKGLKTLGKIFHQAKLSTAEGDPAAMNNTINNLDENDDSSPESSPRSPRDQMFDTNPPYSQSPYVEAPELGGYFSFDFPMPIAPPGAQRDPIP

SEQ ID NO: 7484 - protein, 306 aa, Zea mays subsp. mays
  peptide (1)..(306): Ceres Seq. ID no. 12408774
MLFGSELFEDYIGQLAMASMASLDGFTENEQIDPRRLQEQMRVVQKEREEKLAEALKDRLHLYVQGNKEEFIQYADAEVTRLSNAAYGVDMLSTIGYVYSRQASKELGKQAKYLGVPFIAEWFRNKGHSIKSQITAATGALALMQLQEDWRKHLSDECHYNEEELEAYMLTHKSVMVDSLWKLNVADIEETLSHVCQMVLHDSSARKEELRVRAKGLKTLGKIFHQAKLSTAEGDPAAMNNTINNLDENDDSSPESSPRSPRDQMFDTNPPYSQSPYVEAPELGGYFSFDFPMPIAPPGAQRDPIP

SEQ ID NO: 7485 - protein, 290 aa, Zea mays subsp. mays
  peptide (1)..(290): Ceres Seq. ID no. 12408775
MASMASLDGFTENEQIDPRRLQEQMRVVQKEREEKLAEALKDRLHLYVQGNKEEFIQYADAEVTRLSNAAYGVDMLSTIGYVYSRQASKELGKQAKYLGVPFIAEWFRNKGHSIKSQITAATGALALMQLQEDWRKHLSDECHYNEEELEAYMLTHKSVMVDSLWKLNVADIEETLSHVCQMVLHDSSARKEELRVRAKGLKTLGKIFHQAKLSTAEGDPAAMNNTINNLDENDDSSPESSPRSPRDQMFDTNPPYSQSPYVEAPELGGYFSFDFPMPIAPPGAQRDPIP

SEQ ID NO: 7486 - DNA, 1334 bp, Zea mays subsp. mays
  misc_feature (1)..(1334): Ceres Seq. ID no. 12408768
  misc_feature (1)..(1334): Ortholog of  Ceres SEQ ID NO 14312416 as cited in SEQ ID NO 55270
  misc_feature (1)..(1334): Ortholog of  Ceres SEQ ID NO 15225352 as cited in SEQ ID NO 67888
gccgccatctctctctctctctctctctctctcttcatcgccgcagtgcgcgctcctacaacccatcgctcaccaccacctgctcctccagcggcggcgtccagggtgaacccgaatccccaacaccatggcggggggcaagatccagaagaagcgccacggcgcggcgggaggcgcccggctgcagggcggtatcccgttcgagaagtccaaggggcagcacatcctgcggaacccggcgctggtggactccatcgtcgccaaggccggtctcaagcccaccgacaccgtcctggagatcgggccgggcacaggaaacctcaccaagcgcctcctcgaggctggtgtcaaggccgtcgtcgccgtcgagctcgacccgcgcatggtgctcgagctcaaccggcggttccaggggcacccgctctcctcgcgcctcaaggttatccaaggagatgtcctcaaatgtgatctcccatactttgatatttgtgtggcaaacatcccgtaccagatctcatctccccttactttcaagcttctgtcacaccgtccaatctttaggtgtgctgtgattatgtttcaacgtgaatttgccatgagacttgtggcacaaccgggagatagcctctactgtcgtctctccgtgaatgtgcagctcctgtcacgagtgtcgcatctcctgaaggtggggaggaacaactttaggcctccacccaaagttgattcatcagttgtgcgaatagagcccaggaagcccctccctcctgtcagcttcaaggagtgggatgggcttgtgaggatttgtttcaaccggaagaacaagaccctgggctccctctttaaacagaaacgtgttctggaattgctagagaagaactacaagactatgcagtctctccaaactgtgcaagatgcagaaatgggtgaggagaagatgtccgcagacgatgtcgcgttgctggctaatatggttgaagatatgagcatggagactggctatgataaggaagatgatgaaatggaaatggatgatgcagacatggctggagatggtgctgcaagctttaaagaaaagattatgggtatattgcagcagggcgattttgcagaaaagagaggttccaagctgagccaagttgatttcttatacctgctgtccctcttcaacaaagctggtatacatttctcgtgattggtggtccagcttctcttcagtagtagtctgtttctttctgttttatttgtcgtgctgttaatgtacttattagttactgaaaaaacctctaagcttgtgctcgtagaaattttttacaggctccgtcctagtttgagct

SEQ ID NO: 7487 - protein, 354 aa, Zea mays subsp. mays
  peptide (1)..(354): Ceres Seq. ID no. 12408769
MAGGKIQKKRHGAAGGARLQGGIPFEKSKGQHILRNPALVDSIVAKAGLKPTDTVLEIGPGTGNLTKRLLEAGVKAVVAVELDPRMVLELNRRFQGHPLSSRLKVIQGDVLKCDLPYFDICVANIPYQISSPLTFKLLSHRPIFRCAVIMFQREFAMRLVAQPGDSLYCRLSVNVQLLSRVSHLLKVGRNNFRPPPKVDSSVVRIEPRKPLPPVSFKEWDGLVRICFNRKNKTLGSLFKQKRVLELLEKNYKTMQSLQTVQDAEMGEEKMSADDVALLANMVEDMSMETGYDKEDDEMEMDDADMAGDGAASFKEKIMGILQQGDFAEKRGSKLSQVDFLYLLSLFNKAGIHFS

SEQ ID NO: 7488 - protein, 269 aa, Zea mays subsp. mays
  peptide (1)..(269): Ceres Seq. ID no. 12408770
MVLELNRRFQGHPLSSRLKVIQGDVLKCDLPYFDICVANIPYQISSPLTFKLLSHRPIFRCAVIMFQREFAMRLVAQPGDSLYCRLSVNVQLLSRVSHLLKVGRNNFRPPPKVDSSVVRIEPRKPLPPVSFKEWDGLVRICFNRKNKTLGSLFKQKRVLELLEKNYKTMQSLQTVQDAEMGEEKMSADDVALLANMVEDMSMETGYDKEDDEMEMDDADMAGDGAASFKEKIMGILQQGDFAEKRGSKLSQVDFLYLLSLFNKAGIHFS

SEQ ID NO: 7489 - protein, 205 aa, Zea mays subsp. mays
  peptide (1)..(205): Ceres Seq. ID no. 12408771
MFQREFAMRLVAQPGDSLYCRLSVNVQLLSRVSHLLKVGRNNFRPPPKVDSSVVRIEPRKPLPPVSFKEWDGLVRICFNRKNKTLGSLFKQKRVLELLEKNYKTMQSLQTVQDAEMGEEKMSADDVALLANMVEDMSMETGYDKEDDEMEMDDADMAGDGAASFKEKIMGILQQGDFAEKRGSKLSQVDFLYLLSLFNKAGIHFS

SEQ ID NO: 7490 - DNA, 1432 bp, Zea mays subsp. mays
  misc_feature (1)..(1432): Ceres Seq. ID no. 12357962
  misc_feature (1)..(1432): Ortholog of  Ceres SEQ ID NO 15177091 as cited in SEQ ID NO 52140
  misc_feature (1)..(1432): Ortholog of  Ceres SEQ ID NO 15172539 as cited in SEQ ID NO 57333
  misc_feature (1)..(1432): Ortholog of  Ceres SEQ ID NO 14315951 as cited in SEQ ID NO 57634
  misc_feature (1)..(1432): Ortholog of  Ceres SEQ ID NO 13597324 as cited in SEQ ID NO 64842
  misc_feature (1)..(1432): Ortholog of  Ceres SEQ ID NO 13658672 as cited in SEQ ID NO 66627
gcaggttccagtattccaccacgcggcgtcgcctgccgaaccccgaaccttctcgaggtcgaggcccctcccctttcgccaggaggtgcgcacggcacgactaacctccacactccccactagcttttcttcccagtttgctccgattttgattccatgaaaacaatgagcaggcgcaacagccgtaccatctatgtaggcaatctccctggggacatccgtgagagggaggttgaggatctcttctacaagtatggccgtattttggatattgacttgaaaatacctccgagacctcctggatacgcattcgttgagtttgaggatccacgtgatgctgatgatgcaatttatggccgtgatgggtataactttgatggctacaggttgagggttgaattagctcatggtggcagaggccagtcttattcttatgatcgttcaagcagctatagcagtgcatgccgtggaggtgtttctaggcgctctgatttccgtgttatggtcactggtttaccctcatcggcatcgtggcaagatctgaaggaccacatgcggcgcgctggtgatgtctgtttctctgatgtataccgtgaggctggagaaactattggaattgtggattatacaaattatgacgatatgaaatacgcgattaggaagcttgatgactcacagttcaggaatgcattttcaagagcatatatcagggtgagggagtatgatgctagatcacgaagcagaagccgtagccactcgtactctagaacccccagctacagcaggagcaggagtccaaaatctgtttctcagtcaccctcatctgtggatgaaagatcgctatcaagatctcgatccccaatttcttctccttctcatgcaagatatgcgacaagccctaggagcagaagcgcatcccgttctcggtctcctgttagatccgattgaactttgagagcccttgaagcagtgagcagccccagggagaagaaaggaacttgagagtatgccgtgccatcacaatggtccgagtgattatgctgttgccactgctccctcacatttaagaggtttcctcttatttagacggcgcatttaattaacattatcttgctaaagagagacttatgcgtagtctacttgtgtactcgttcgtttgtcctcatgttcttggcttcaggaactctggttttttatcattgtacccatagtaaaacctagatgtagttggggtatgccgtatgcgtctatattcggttggtcgaatgtaaatctggatgcatatatgcatctgtttggtttcatttaggcctttccttggtttcgtgattaatgacaacataagcttattgctgtgatcaaagtatattttgtanaggtaattaaagctagtcncncaataatggagattgcttagacaacgtatggtttt

SEQ ID NO: 7491 - protein, 263 aa, Zea mays subsp. mays
  peptide (1)..(263): Ceres Seq. ID no. 12357963
MKTMSRRNSRTIYVGNLPGDIREREVEDLFYKYGRILDIDLKIPPRPPGYAFVEFEDPRDADDAIYGRDGYNFDGYRLRVELAHGGRGQSYSYDRSSSYSSACRGGVSRRSDFRVMVTGLPSSASWQDLKDHMRRAGDVCFSDVYREAGETIGIVDYTNYDDMKYAIRKLDDSQFRNAFSRAYIRVREYDARSRSRSRSHSYSRTPSYSRSRSPKSVSQSPSSVDERSLSRSRSPISSPSHARYATSPRSRSASRSRSPVRSD

SEQ ID NO: 7492 - protein, 260 aa, Zea mays subsp. mays
  peptide (1)..(260): Ceres Seq. ID no. 12357964
MSRRNSRTIYVGNLPGDIREREVEDLFYKYGRILDIDLKIPPRPPGYAFVEFEDPRDADDAIYGRDGYNFDGYRLRVELAHGGRGQSYSYDRSSSYSSACRGGVSRRSDFRVMVTGLPSSASWQDLKDHMRRAGDVCFSDVYREAGETIGIVDYTNYDDMKYAIRKLDDSQFRNAFSRAYIRVREYDARSRSRSRSHSYSRTPSYSRSRSPKSVSQSPSSVDERSLSRSRSPISSPSHARYATSPRSRSASRSRSPVRSD

SEQ ID NO: 7493 - protein, 148 aa, Zea mays subsp. mays
  peptide (1)..(148): Ceres Seq. ID no. 12357965
MVTGLPSSASWQDLKDHMRRAGDVCFSDVYREAGETIGIVDYTNYDDMKYAIRKLDDSQFRNAFSRAYIRVREYDARSRSRSRSHSYSRTPSYSRSRSPKSVSQSPSSVDERSLSRSRSPISSPSHARYATSPRSRSASRSRSPVRSD

SEQ ID NO: 7494 - DNA, 1692 bp, Zea mays subsp. mays
  misc_feature (1)..(1692): Ceres Seq. ID no. 12408764
  misc_feature (1)..(1692): Ortholog of  Ceres SEQ ID NO 14314363 as cited in SEQ ID NO 52272
ggccctctagctagctccggctccgcccactctctatccagtagctagccacaggctctcatccgcctcttgttccttgtcttgttcatggatgcagagacactcaacatcttcccttcccagcccatgcatgtggagccgtcgccgaagggggagattagtttagtcctgtcaccggcgccggtgggatccaagcagcctaggtcaccggaccatcaccatcaccagcaggcggccatggaggagttggcggggagcaggaggcagcagcaggagcacctccacctgcagcaccaccaaccctttgctgccgctgctgagccagcagcacccgggatgatcaaagatgtcaagccactggccaagaaggatcacaggagaggcacatcgaccgctgaacgcgacccaaaaacgctgagaaggctggcccagaacagggaggctgcaaggaaaagcaggctaaggaagaaggcttacatccagcaactcgagtccagcaggatcaggctagctcagctcgaacaagaactgcacactgcaagagctcagggagttttcttccccaacagtggcatcctcgctgaccaaggtgtcgccggcaaaggcgtccccatcggcggcatcgacggcctcagctcagaggcggcgatgttcgacgtggagtacgggcggtggcaggaggagcactaccggctgatgtacgagcttcgggcggcgctgcagcagcacctgccggagggggagctgcagatgtacgtggagagctgcctggcgcaccacgacgagatggtgggcatcaaggagggcgccatcaagggcgacgtcttccacctcatctccggcgtctggcggagccccgccgagcgctgcttcctctggctcggcggcttccgcccctccgaagtcatcaagatgctgctgagccacgtagagcccctgaccgaacagcagatcgtgggcgtgtacgggctgcagcagtcggcgctggagacggaggaagcgctgagccagggcctggaggcgctctaccagtcgctgtctgacaccgtggtctccgacgcgctcagctgcccctcgaacgtctccaactacatgggtcagatggccgtcgccatgaacaagctctccacgctcgagggcttcgtcagacaagctgagaaccttcggcagcagacgctgcaccggctgcaccaggtcctgacgacgcggcagatggcgcggtcgctgctggccgtgtcggactacttccaccgcctccgcacgctgagctcgctctgggtcacacgccccagggcaccgcaggagcaataatagggccacagctggtgacggcggcgctgatgaatggtgatcgccggccgccgcatacaacggcgccacacgcgcatgtgtccattcatgcatatatgagtcgtgcatgggcgcatgcatggtgtgtcgttcgtcatcaagaacagagcttgcaggtagagccagttagggccggccgggggagagagagctagtgaggacgacaaaccaaccaaaggataatgttaatcttggcgacgattgtcgtgttgcttgctttgtagctatagctaggtgtagttgatcgttcgatcgcgatctatcgatcgatcggctgctgctgtagtcgatgcggtggagtgatgatgttgttctaagttaattatctctcatgatcaccgg

SEQ ID NO: 7495 - protein, 407 aa, Zea mays subsp. mays
  peptide (1)..(407): Ceres Seq. ID no. 12408765
MDAETLNIFPSQPMHVEPSPKGEISLVLSPAPVGSKQPRSPDHHHHQQAAMEELAGSRRQQQEHLHLQHHQPFAAAAEPAAPGMIKDVKPLAKKDHRRGTSTAERDPKTLRRLAQNREAARKSRLRKKAYIQQLESSRIRLAQLEQELHTARAQGVFFPNSGILADQGVAGKGVPIGGIDGLSSEAAMFDVEYGRWQEEHYRLMYELRAALQQHLPEGELQMYVESCLAHHDEMVGIKEGAIKGDVFHLISGVWRSPAERCFLWLGGFRPSEVIKMLLSHVEPLTEQQIVGVYGLQQSALETEEALSQGLEALYQSLSDTVVSDALSCPSNVSNYMGQMAVAMNKLSTLEGFVRQAENLRQQTLHRLHQVLTTRQMARSLLAVSDYFHRLRTLSSLWVTRPRAPQEQ

SEQ ID NO: 7496 - protein, 394 aa, Zea mays subsp. mays
  peptide (1)..(394): Ceres Seq. ID no. 12408766
MHVEPSPKGEISLVLSPAPVGSKQPRSPDHHHHQQAAMEELAGSRRQQQEHLHLQHHQPFAAAAEPAAPGMIKDVKPLAKKDHRRGTSTAERDPKTLRRLAQNREAARKSRLRKKAYIQQLESSRIRLAQLEQELHTARAQGVFFPNSGILADQGVAGKGVPIGGIDGLSSEAAMFDVEYGRWQEEHYRLMYELRAALQQHLPEGELQMYVESCLAHHDEMVGIKEGAIKGDVFHLISGVWRSPAERCFLWLGGFRPSEVIKMLLSHVEPLTEQQIVGVYGLQQSALETEEALSQGLEALYQSLSDTVVSDALSCPSNVSNYMGQMAVAMNKLSTLEGFVRQAENLRQQTLHRLHQVLTTRQMARSLLAVSDYFHRLRTLSSLWVTRPRAPQEQ

SEQ ID NO: 7497 - protein, 357 aa, Zea mays subsp. mays
  peptide (1)..(357): Ceres Seq. ID no. 12408767
MEELAGSRRQQQEHLHLQHHQPFAAAAEPAAPGMIKDVKPLAKKDHRRGTSTAERDPKTLRRLAQNREAARKSRLRKKAYIQQLESSRIRLAQLEQELHTARAQGVFFPNSGILADQGVAGKGVPIGGIDGLSSEAAMFDVEYGRWQEEHYRLMYELRAALQQHLPEGELQMYVESCLAHHDEMVGIKEGAIKGDVFHLISGVWRSPAERCFLWLGGFRPSEVIKMLLSHVEPLTEQQIVGVYGLQQSALETEEALSQGLEALYQSLSDTVVSDALSCPSNVSNYMGQMAVAMNKLSTLEGFVRQAENLRQQTLHRLHQVLTTRQMARSLLAVSDYFHRLRTLSSLWVTRPRAPQEQ

SEQ ID NO: 7498 - DNA, 1676 bp, Zea mays subsp. mays
  misc_feature (1)..(1676): Ceres Seq. ID no. 12386749
  misc_feature (1)..(1676): Ortholog of  Ceres SEQ ID NO 15174752 as cited in SEQ ID NO 53279
  misc_feature (1)..(1676): Ortholog of  Ceres SEQ ID NO 14308389 as cited in SEQ ID NO 55226
  misc_feature (1)..(1676): Ortholog of  Ceres SEQ ID NO 15177652 as cited in SEQ ID NO 56858
  misc_feature (1)..(1676): Ortholog of  Ceres SEQ ID NO 15226087 as cited in SEQ ID NO 58655
  misc_feature (1)..(1676): Ortholog of  Ceres SEQ ID NO 13662197 as cited in SEQ ID NO 63622
  misc_feature (1)..(1676): Ortholog of  Ceres SEQ ID NO 14313292 as cited in SEQ ID NO 67393
  misc_feature (1)..(1676): Ortholog of  Ceres SEQ ID NO 14313567 as cited in SEQ ID NO 68074
actcaagtcacaacaaacaccaccatcgtctctttgctcagcacaaaagcatcacactccctctctctcgcgcgctcacaagcacgtcgtcaaccatggttgtcgagatgaaggagaacggcgtagcggcgatggcggcgggcgagaaggcgccgcagctgggcgtgaagcgcggcgagccgacgctggtgccgccggcggaggcgacgccgacgggcgggcagtactacctgtccaacctggaccagaacatcgcggtgatcgtgcagacggtgtactgctacaagccctcctcgccgcccggcggcggcgaaggcaaggacgtggacgtggcagccgcgctccgcgacgcgctggcgcgcgtgctggtgcactaccacccgctggcggggcggctgggcgtcagcccggaggatgaagctcaccgtggagctgaccggcggagggcgccgtgttcgtggaggccgacgccgcctgcgacctcgccgccgtcggcgacctcaccaagcccgaccccgccgcgctcggccagctcgtctactccgtccccggcgccaaacacatcctcgagatgccccccatgaccgcgcaggtgacgaggttcaagtgtgggggcttcgcgctcggcctggccatgaaccactgcatgttcgacggcatcggcgccatggagttcgtcaactcgtgggcggagacggcgcgcggcgtcgccgagctcaccgtgccgccgttcctggaccgaagcgtcctgaaggcgcgcgacccgcccgtgcccaccttcccccaccacgagttcgccgagatccccgacgtctccgacacggcggcgctctacggcgcgcaggagctgctgtaccgctccttctgcttcgacccggaccggctggagcgcgtgcgcgggcttgcgctcgccgacggcgccctgggccgctgcaccaccttcgaggcgctgtcggggctggtgtggcgcgcgcgcaccaaggcgctggggctggcgcccgagcagcgcaccaagctgctgttcgccgtggacgggcggcgccggttcgcgccgccgctcccgcggggctacttcggcaacggcatcgtgctcaccaacgcccttgccacggccggcgagctgctgtccgcgcccgtgtcgcgcgcggcggggctggtgcaggacgccgtgcggatggtcaccgacgactacatgcgctcggcggtggactacttcgaggcgacgcgggcccggccgtcgctcgcgtccacgctgctcatcaccacctggtcgcgcctcgagttccacggcgccgacttcgggtggggcgagcccgtcatgtcgggcccggtcacgctgccggagaaggaagtcatcctgttcctggcgcacgggaaggagaggaagagcatcaacgtgctgctcggcctgccagccaccgcgatggacgccttccaagagctcatggacgagatatgattcattcgtcggtgatgacggacatggatgggttgctgctatacatacatttacgatgcagggtgcttatacattcttcaattgctcggtgttatagtacgaccgtgttaatactcgatctatgttgatgttgttaagtttagtggccatatgagaatttgctgtcgattgcaattgttctaatattaatggaaaatagtaaactttatttcctttc

SEQ ID NO: 7499 - protein, 390 aa, Zea mays subsp. mays
  peptide (1)..(390): Ceres Seq. ID no. 12386750
MKLTVELTGGGRRVRGGRRRLRPRRRRRPHQARPRRARPARLLRPRRQTHPRDAPHDRAGDEVQVWGLRARPGHEPLHVRRHRRHGVRQLVGGDGARRRRAHRAAVPGPKRPEGARPARAHLPPPRVRRDPRRLRHGGALRRAGAAVPLLLLRPGPAGARARACARRRRPGPLHHLRGAVGAGVARAHQGAGAGARAAHQAAVRRGRAAPVRAAAPAGLLRQRHRAHQRPCHGRRAAVRARVARGGAGAGRRADGHRRLHALGGGLLRGDAGPAVARVHAAHHHLVAPRVPRRRLRVGRARHVGPGHAAGEGSHPVPGAREGEEEHQRAARPASHRDGRLPRAHGRDMIHSSVMTDMDGLLLYIHLRCRVLIHSSIARCYSTTVLILDLC

SEQ ID NO: 7500 - protein, 295 aa, Zea mays subsp. mays
  peptide (1)..(295): Ceres Seq. ID no. 12386751
MPPMTAQVTRFKCGGFALGLAMNHCMFDGIGAMEFVNSWAETARGVAELTVPPFLDRSVLKARDPPVPTFPHHEFAEIPDVSDTAALYGAQELLYRSFCFDPDRLERVRGLALADGALGRCTTFEALSGLVWRARTKALGLAPEQRTKLLFAVDGRRRFAPPLPRGYFGNGIVLTNALATAGELLSAPVSRAAGLVQDAVRMVTDDYMRSAVDYFEATRARPSLASTLLITTWSRLEFHGADFGWGEPVMSGPVTLPEKEVILFLAHGKERKSINVLLGLPATAMDAFQELMDEI

SEQ ID NO: 7501 - protein, 292 aa, Zea mays subsp. mays
  peptide (1)..(292): Ceres Seq. ID no. 12386752
MTAQVTRFKCGGFALGLAMNHCMFDGIGAMEFVNSWAETARGVAELTVPPFLDRSVLKARDPPVPTFPHHEFAEIPDVSDTAALYGAQELLYRSFCFDPDRLERVRGLALADGALGRCTTFEALSGLVWRARTKALGLAPEQRTKLLFAVDGRRRFAPPLPRGYFGNGIVLTNALATAGELLSAPVSRAAGLVQDAVRMVTDDYMRSAVDYFEATRARPSLASTLLITTWSRLEFHGADFGWGEPVMSGPVTLPEKEVILFLAHGKERKSINVLLGLPATAMDAFQELMDEI

SEQ ID NO: 7502 - DNA, 1385 bp, Zea mays subsp. mays
  misc_feature (1)..(1385): Ceres Seq. ID no. 12391341
  misc_feature (1)..(1385): Ortholog of  Ceres SEQ ID NO 13597854 as cited in SEQ ID NO 64292
acgccatcaacagtaccattcagatcggaatcccagttagctctctgtgccctacctgtcagtgacacagaaatccagtcggcggggctgccgcctgccgcatcctcccctcgcccaccgtcgacgacttgatcccctcccaccgttgaggccgcctcctcacggcagcgagccagcgactcctctcttcttcgtctcctacaagtagccagacaccactccgactttgccggcaacccgtcgacagcgacgaggcgcagcataaggtatacgggcacggcggccatggcgaccagctccaaacccgccgcgcccgtggaccccatggtcgtgctcgcccacgagttccccgaggtgtcattcgactacgacgagagggatgtagcgttgtacgcgctcggggttggtgcctgcggcgatgacgccgtcgacgagaaggagcttcacttcgtgtaccacagggatgggcagccacacattaagacccttcctacttttgtttctttatttcccaacaagaacagcaatgggcttggatttgttgatgtgcctggccttaactttgatgcaagccttctactgcatggtcaacaatacatagagatctataggccaatcccttcgtatgccagtgttgtaaacagggttaaagtagctggtttgcatgacaaggggaaagcaactattcttgagctcgaaactaccacaagcctcaaagagtcaggggaaattttatgcatgaacaggagtactatctacttgcgtggtgctggagggttttcagactcttcacggccatactcatatgctacctatcctgctaatcaagtttctcgcatttctattccaaattcggcaccttctgcagtatgcgacgaccagacaaagcaatcccaggcattgttatacaggctatctggggattacaatcctttgcattcagacccagatattgcacagcttgctgggttcacccgtccaatcctgcacggcctctgcaccctaggattcgctgctcgcgccgtcataaaatctttctgcaacggcgaaccgactgcggtgaagagcatcttcggccgtttccttctgcacgtctaccccggggaaacgttgtccactgagatgtggcttgacggccagaaggtgcactaccaaacgaaggccaaggagcggaatcgcgctgtcctctctggatatgtgttgctccagcacatcccctcgtcattgtaagtaaaagttttgtttcttaaaattggtgcccgctgaaagcatttggcttgtctgtgataaattgagcacgaggtgggctgccactgtaatgatagccatgtatgggtctgcacataacacattcgtactgtattgataagaagcacgtaccactc

SEQ ID NO: 7503 - protein, 314 aa, Zea mays subsp. mays
  peptide (1)..(314): Ceres Seq. ID no. 12391342
MATSSKPAAPVDPMVVLAHEFPEVSFDYDERDVALYALGVGACGDDAVDEKELHFVYHRDGQPHIKTLPTFVSLFPNKNSNGLGFVDVPGLNFDASLLLHGQQYIEIYRPIPSYASVVNRVKVAGLHDKGKATILELETTTSLKESGEILCMNRSTIYLRGAGGFSDSSRPYSYATYPANQVSRISIPNSAPSAVCDDQTKQSQALLYRLSGDYNPLHSDPDIAQLAGFTRPILHGLCTLGFAARAVIKSFCNGEPTAVKSIFGRFLLHVYPGETLSTEMWLDGQKVHYQTKAKERNRAVLSGYVLLQHIPSSL

SEQ ID NO: 7504 - protein, 301 aa, Zea mays subsp. mays
  peptide (1)..(301): Ceres Seq. ID no. 12391343
MVVLAHEFPEVSFDYDERDVALYALGVGACGDDAVDEKELHFVYHRDGQPHIKTLPTFVSLFPNKNSNGLGFVDVPGLNFDASLLLHGQQYIEIYRPIPSYASVVNRVKVAGLHDKGKATILELETTTSLKESGEILCMNRSTIYLRGAGGFSDSSRPYSYATYPANQVSRISIPNSAPSAVCDDQTKQSQALLYRLSGDYNPLHSDPDIAQLAGFTRPILHGLCTLGFAARAVIKSFCNGEPTAVKSIFGRFLLHVYPGETLSTEMWLDGQKVHYQTKAKERNRAVLSGYVLLQHIPSSL

SEQ ID NO: 7505 - protein, 163 aa, Zea mays subsp. mays
  peptide (1)..(163): Ceres Seq. ID no. 12391344
MNRSTIYLRGAGGFSDSSRPYSYATYPANQVSRISIPNSAPSAVCDDQTKQSQALLYRLSGDYNPLHSDPDIAQLAGFTRPILHGLCTLGFAARAVIKSFCNGEPTAVKSIFGRFLLHVYPGETLSTEMWLDGQKVHYQTKAKERNRAVLSGYVLLQHIPSSL

SEQ ID NO: 7506 - DNA, 1262 bp, Zea mays subsp. mays
  misc_feature (1)..(1262): Ceres Seq. ID no. 12413536
  misc_feature (1)..(1262): Ortholog of  Ceres SEQ ID NO 15177225 as cited in SEQ ID NO 58078
gcagactgcagtgcacagggaccgtaccggggagggccggcggcagccatggcgcgcaaggacacagtgccgcttgtcactgcttccggcttcgtggtggcgtcgctgctgctcctgctctgcgccactcgctgcgaagcgagggtcatggcggcgagcaggagcaggagcaggagcaccagcccgctgctcaacgtgctgttcaagctcaacttcatccgcacggtggagccaccgcgccgacttcccactccgaccgccgacgccaccgtcagcctcgccgcgggcgacaccaactcgccgttctgcgtcaacccaccagacgcgccgtcgtccacgacgcctccgtccacgtcatccacgtcatccacgacgcctccgtccacgtcgtccacgccttcgttgccgggccaggcccaggcgccgccgctgccgccgatcacccccgtgccgccgtccttcgagcccagcccgccggagaacggcgccccgggtggaggccagggaggaggagatcaaggccagggaggaggaggtcaaggccagggaggcccaccggcatccacgacaccgaactcgccgccgcaggcaggtccgggagcgccgtttgggtcggtgccgccgagcccccatcgtcatggtgccgagcccgccaggattcggccctggtcccggctccggctcaggcggtggctcgggatccggcgacggcggcggcccgttccagccgccgatcgtgtacccacctccgctggcgccgccgatgctgccgggcgccgggcagacgctgtggtgcgtggccaagcccacggtgccggaccccatcatccaggaggccatggactacgcgtgcggctccggcgccgagtgcgactccatcctgcccagcggcgcgtgctaccaccccaacaccgtgctcgcgcacgcctccttcgcgttcaacagctactggcagcagaacaaggcgaccggcggcaccgccaccattatcaccagagacccgagctacgagaagtgcaaatttgaccttctgtgacgagggagggtacgtagatatgcaggagaacagactgcagataccaaattttttccccaagcttcagttggagttaacattcattttgcttctaggccacaccgatgcacattttgtaactagctcttcttcactagtatggttttgaattttgtaagcctgatactgcgcaaaaggggaaactaaaggtgattccttgacatatttgatatacaagctcttgctc

SEQ ID NO: 7507 - protein, 393 aa, Zea mays subsp. mays
  peptide (1)..(393): Ceres Seq. ID no. 12413537
RLQCTGTVPGRAGGSHGAQGHSAACHCFRLRGGVAAAPALRHSLRSEGHGGEQEQEQEHQPAAQRAVQAQLHPHGGATAPTSHSDRRRHRQPRRGRHQLAVLRQPTRRAVVHDASVHVIHVIHDASVHVVHAFVAGPGPGAAAAADHPRAAVLRAQPAGERRPGWRPGRRRSRPGRRRSRPGRPTGIHDTELAAAGRSGSAVWVGAAEPPSSWCRARQDSALVPAPAQAVARDPATAAARSSRRSCTHLRWRRRCCRAPGRRCGAWPSPRCRTPSSRRPWTTRAAPAPSATPSCPAARATTPTPCSRTPPSRSTATGSRTRRPAAPPPLSPETRATRSANLTFCDEGGYVDMQENRLQIPNFFPKLQLELTFILLLGHTDAHFVTSSSSLVWF

SEQ ID NO: 7508 - protein, 344 aa, Zea mays subsp. mays
  peptide (1)..(344): Ceres Seq. ID no. 12413538
QTAVHRDRTGEGRRQPWRARTQCRLSLLPASWWRRCCSCSAPLAAKRGSWRRAGAGAGAPARCSTCCSSSTSSARWSHRADFPLRPPTPPSASPRATPTRRSASTHQTRRRPRRLRPRHPRHPRRLRPRRPRLRCRARPRRRRCRRSPPCRRPSSPARRRTAPRVEAREEEIKAREEEVKAREAHRHPRHRTRRRRQVRERRLGRCRRAPIVMVPSPPGFGPGPGSGSGGGSGSGDGGGPFQPPIVYPPPLAPPMLPGAGQTLWCVAKPTVPDPIIQEAMDYACGSGAECDSILPSGACYHPNTVLAHASFAFNSYWQQNKATGGTATIITRDPSYEKCKFDLL

SEQ ID NO: 7509 - protein, 341 aa, Zea mays subsp. mays
  peptide (1)..(341): Ceres Seq. ID no. 12413539
ADCSAQGPYRGGPAAAMARKDTVPLVTASGFVVASLLLLLCATRCEARVMAASRSRSRSTSPLLNVLFKLNFIRTVEPPRRLPTPTADATVSLAAGDTNSPFCVNPPDAPSSTTPPSTSSTSSTTPPSTSSTPSLPGQAQAPPLPPITPVPPSFEPSPPENGAPGGGQGGGDQGQGGGGQGQGGPPASTTPNSPPQAGPGAPFGSVPPSPHRHGAEPARIRPWSRLRLRRWLGIRRRRRPVPAADRVPTSAGAADAAGRRADAVVRGQAHGAGPHHPGGHGLRVRLRRRVRLHPAQRRVLPPQHRARARLLRVQQLLAAEQGDRRHRHHYHQRPELREVQI

SEQ ID NO: 7510 - protein, 325 aa, Zea mays subsp. mays
  peptide (1)..(325): Ceres Seq. ID no. 12413540
MARKDTVPLVTASGFVVASLLLLLCATRCEARVMAASRSRSRSTSPLLNVLFKLNFIRTVEPPRRLPTPTADATVSLAAGDTNSPFCVNPPDAPSSTTPPSTSSTSSTTPPSTSSTPSLPGQAQAPPLPPITPVPPSFEPSPPENGAPGGGQGGGDQGQGGGGQGQGGPPASTTPNSPPQAGPGAPFGSVPPSPHRHGAEPARIRPWSRLRLRRWLGIRRRRRPVPAADRVPTSAGAADAAGRRADAVVRGQAHGAGPHHPGGHGLRVRLRRRVRLHPAQRRVLPPQHRARARLLRVQQLLAAEQGDRRHRHHYHQRPELREVQI

SEQ ID NO: 7511 - DNA, 1621 bp, Zea mays subsp. mays
  misc_feature (1)..(1621): Ceres Seq. ID no. 12388645
  misc_feature (1)..(1621): Ortholog of  Ceres SEQ ID NO 13595616 as cited in SEQ ID NO 59854
acaaattgtgtgtgccttggcgtgtcgtggaggccccgggcacgcacgccgcacagtggcatcagctctcagtgcgcgcacgtcaccacaaattgtgtgccttgtcgtggaggccccgggcacgtacgccgcacagggcacacctgctccctccggcctgctctgctcactgctttgattccgcttcggcgcttcgccgcctccggttttctctccgcgcctccagtctccagggacgcaccacctctcccaagtcccaatctcccatggcggcgctgggcacggcgatcacccccgcagcagctaccacggcgccgtgctgctataatcggcatccgcggagccacatcacggcgcgccgtaaccgggttgcctccgcgaggaggcttgacctgtgcgccagctcctcacctgccgtcaccgctcccgacataccagacgaggcgctggtggaacccttggtggcgccggcgccggagacgaagctcaggaagctggcgtgtccaatctgctactaccccctggcgagctcgagcgatcagttggatgatgctaccagtctcgaatgtccaacgtgcaagaaatgctaccccaacaagcaagattactgggatcttacagtgtcagttggttcgacagagtactccgagtccatgccagtggcaacagagttgtttaggactccactggtatcttttctttacgaaagaggatggcgccaaaatttcatatggggtggtttcccaggcctagaaagagagtttgaaatggcaaaaacttatttgaagccaacaattggagggactattgttgatgcaagttgtggaagtggcctgttctcaagattatttattaagagtgggctatattctcttgttgtggcactggatttctcagagaatatgttgaagcagtgcaaccaatacatcaagcaggaaaacatttcagatgagagattagtattggtgagggctgacatatctagactcccttttgtgagtggttcaattgacgctctgcatgcaggtgctgcaattcattgttggccatccccagcttgtgctgttgcagatatcagtagagtccttcgcccagggggaatttttgttgcttcgacattcgtggcagatgttattccaccagctattccagtattgaagatcgtacgcccgtacattagccaaataactggcaacaataccttcttatctgaagtggagcttgaagatctttgcaaagcatgtgggctggttgatttcaaatttgtcagaagtggattctatataatgttttctgccactaaagcatgctaactaagtagcagcaatcgtccagtcgtttatgtcaagactcctcggttttatactgcaaatggtttccttctgtgcattgtgcggttgtgccatttgctctaaaggttgccaactttcctcaagggggtgtggtgtaaatagtgaacacatatattttacttctacttgaccgacctcattatagcatgaaaatatcatattttttgtgtacagcttcatagatctttgcaattatgtaatttaaggcttgtttggaacagctctaccaacctaaaaactgaatctggatatagaatttagttagatcc

SEQ ID NO: 7512 - protein, 436 aa, Zea mays subsp. mays
  peptide (1)..(436): Ceres Seq. ID no. 12388646
KLCVPWRVVEAPGTHAAQWHQLSVRARHHKLCALSWRPRARTPHRAHLLPPACSAHCFDSASALRRLRFSLRASSLQGRTTSPKSQSPMAALGTAITPAAATTAPCCYNRHPRSHITARRNRVASARRLDLCASSSPAVTAPDIPDEALVEPLVAPAPETKLRKLACPICYYPLASSSDQLDDATSLECPTCKKCYPNKQDYWDLTVSVGSTEYSESMPVATELFRTPLVSFLYERGWRQNFIWGGFPGLEREFEMAKTYLKPTIGGTIVDASCGSGLFSRLFIKSGLYSLVVALDFSENMLKQCNQYIKQENISDERLVLVRADISRLPFVSGSIDALHAGAAIHCWPSPACAVADISRVLRPGGIFVASTFVADVIPPAIPVLKIVRPYISQITGNNTFLSEVELEDLCKACGLVDFKFVRSGFYIMFSATKAC

SEQ ID NO: 7513 - protein, 348 aa, Zea mays subsp. mays
  peptide (1)..(348): Ceres Seq. ID no. 12388647
MAALGTAITPAAATTAPCCYNRHPRSHITARRNRVASARRLDLCASSSPAVTAPDIPDEALVEPLVAPAPETKLRKLACPICYYPLASSSDQLDDATSLECPTCKKCYPNKQDYWDLTVSVGSTEYSESMPVATELFRTPLVSFLYERGWRQNFIWGGFPGLEREFEMAKTYLKPTIGGTIVDASCGSGLFSRLFIKSGLYSLVVALDFSENMLKQCNQYIKQENISDERLVLVRADISRLPFVSGSIDALHAGAAIHCWPSPACAVADISRVLRPGGIFVASTFVADVIPPAIPVLKIVRPYISQITGNNTFLSEVELEDLCKACGLVDFKFVRSGFYIMFSATKAC

SEQ ID NO: 7514 - protein, 250 aa, Zea mays subsp. mays
  peptide (1)..(250): Ceres Seq. ID no. 12388648
TNCVCLGVSWRPRARTPHSGISSQCAHVTTNCVPCRGGPGHVRRTGHTCSLRPALLTALIPLRRFAASGFLSAPPVSRDAPPLPSPNLPWRRWARRSPPQQLPRRRAAIIGIRGATSRRAVTGLPPRGGLTCAPAPHLPSPLPTYQTRRWWNPWWRRRRRRSSGSWRVQSATTPWRARAISWMMLPVSNVQRARNATPTSKITGILQCQLVRQSTPSPCQWQQSCLGLHWYLFFTKEDGAKISYGVVSQA

SEQ ID NO: 7515 - DNA, 1434 bp, Zea mays subsp. mays
  misc_feature (1)..(1434): Ceres Seq. ID no. 12412606
  misc_feature (1)..(1434): Ortholog of  Ceres SEQ ID NO 15224772 as cited in SEQ ID NO 65970
  misc_feature (1)..(1434): Ortholog of  Ceres SEQ ID NO 15180059 as cited in SEQ ID NO 0
gtgggcgttgtgtgcgcggccgcagtgtgcggatcaagctgcatgtgtggaaggcagcgctgagttagtgcccagcgtcagcagctataaaagcacttgtactcatcgattatcaacagggaatagagaaaggcagtgtcggagcgctgcaggtgtttgggcgccgaactctttgtgtttagctactgttcattcgtcttcctcctctcaccaatctgtgtcctgtgcttgtgagcgttttagagttccaacaattggtatcagaggcagtttatgcccaagatcttacgctactacctcgagtccgagtccatggcgatggttccgcacggcgccggggggagttcggtctccatgtcatacccggtgctgtcgccggcgagctacacggcgtgggcaatcaaggtggagtcgatcctcgacgcgcaaggtctctgggaggccgtgtctccaccagataatggcgaggtgaacgcggtgaagaacaagacggcgcgggcacagcttctccaagctctgcccgatgacatcttgatgcaggtctccatcaagaaaacggcagcggaggtgtgggcgagcctcaagactcgtttcgtcggtgcggatcgggtcaagacggcacgcctcgccacgctcaagggggagttcgacaagctgtacatggaggacgaggaggcattggacgactacgcaggcaaaatcagcggtatggcagcgcgttacgccgggcttggcgcaacgctcgacgacgctgccatggtgaagaagctcctcgacaccgttccagatcggctcttccccgtcgtcgcgggcatcgagcagttctgcgacgtcgagacgatgccgttcgaggaggcgctcggacgtctcaaggcgttcgatgagcgttctcggcggcgtactcatgccggcggtgaacggcgcgacgatcagctccttctcacggaggccgagtggaaagctcgaaaaaagaagaagtcgacgatcggcaaatgcttcaactgtggcaatcgcggccatttcgcccgggactgccccaagaagaaggaggaggaggcgctgctcgccaacgccaacgaggagccggcgctgttctgagcagcggcgctgggtttagggggagtttgttgggaataaacccagctgcgtgtgcgtgcacacagcgggtggcgtgagtgcgtcgtgttgtctagtgtgtgcgtctgtgtccgagtcgtgcggcggacggagcaattcgtgccgagtacgtgttcttgccgcgtacgttgcgtggtggtagttgcatgcagtcgtggtgatctgttggaggccagccgcagtgtacgcgttcgtgggcgttgtgtgcgcggccgcagtgtgcggatcaagctgcatgtgtggaaggcagcgctgagttagtgcccagcgtcagcagctataaaagcacttgtaccc

SEQ ID NO: 7516 - protein, 274 aa, Zea mays subsp. mays
  peptide (1)..(274): Ceres Seq. ID no. 12412607
MPKILRYYLESESMAMVPHGAGGSSVSMSYPVLSPASYTAWAIKVESILDAQGLWEAVSPPDNGEVNAVKNKTARAQLLQALPDDILMQVSIKKTAAEVWASLKTRFVGADRVKTARLATLKGEFDKLYMEDEEALDDYAGKISGMAARYAGLGATLDDAAMVKKLLDTVPDRLFPVVAGIEQFCDVETMPFEEALGRLKAFDERSRRRTHAGGERRDDQLLLTEAEWKARKKKKSTIGKCFNCGNRGHFARDCPKKKEEEALLANANEEPALF

SEQ ID NO: 7517 - protein, 261 aa, Zea mays subsp. mays
  peptide (1)..(261): Ceres Seq. ID no. 12412608
MAMVPHGAGGSSVSMSYPVLSPASYTAWAIKVESILDAQGLWEAVSPPDNGEVNAVKNKTARAQLLQALPDDILMQVSIKKTAAEVWASLKTRFVGADRVKTARLATLKGEFDKLYMEDEEALDDYAGKISGMAARYAGLGATLDDAAMVKKLLDTVPDRLFPVVAGIEQFCDVETMPFEEALGRLKAFDERSRRRTHAGGERRDDQLLLTEAEWKARKKKKSTIGKCFNCGNRGHFARDCPKKKEEEALLANANEEPALF

SEQ ID NO: 7518 - protein, 259 aa, Zea mays subsp. mays
  peptide (1)..(259): Ceres Seq. ID no. 12412609
MVPHGAGGSSVSMSYPVLSPASYTAWAIKVESILDAQGLWEAVSPPDNGEVNAVKNKTARAQLLQALPDDILMQVSIKKTAAEVWASLKTRFVGADRVKTARLATLKGEFDKLYMEDEEALDDYAGKISGMAARYAGLGATLDDAAMVKKLLDTVPDRLFPVVAGIEQFCDVETMPFEEALGRLKAFDERSRRRTHAGGERRDDQLLLTEAEWKARKKKKSTIGKCFNCGNRGHFARDCPKKKEEEALLANANEEPALF

SEQ ID NO: 7519 - DNA, 1504 bp, Zea mays subsp. mays
  misc_feature (1)..(1504): Ceres Seq. ID no. 12357893
  misc_feature (1)..(1504): Ortholog of  Ceres SEQ ID NO 14310819 as cited in SEQ ID NO 53794
atcaggcctacttggcgcgcgcgcgtctctctctgtctagcggccgagtttaacagttaaaccctagctcaccgtcgtgctcgcctccccgcgcctgctcccttcaggcactgacagttcgccgccgcggcggcgctttcgagcccacgcggaagcgcacctagtgccatggcgaagaagcggaagcacaccgacgcccaggcagagacggccggcgcagagaagccagacgactccgcaccggcgcgcccggagcgcacgctcttcggcttcaaggatccggcccccgacgccgtgcccgcctctgcggcctccagggccgcggtggcgccgtttaggaacagggagaaggtactcatcacctgctcccgccgcatcacgtacaggtatcgtcatctgatgcaggacgtgctatcgatgctcccgcacgcgaagaaggacagcaaggtcgagtcgaagcagagcaaggggaacgctctcaacgagatgctcgagctcaggagctgctccagttgtctcttcttcgagtgccgaaaacagaaggatctttacctttggatggtgaagtctcctggaggaccatcagtgaaatttctagttaatgctgttcacaccatggaggagttgaagcttacgggtaaccatctgaaagggtcacggccacttcttacattttctacaaattttgatgagcaacctcattggaagcttgtgaaggaaattataactcatatatttgctactcctaaagatcaccgtaaagcaaaacctttccatgaccatgtatttgtcttctccattgtggatggccatgtttggttccgaaactaccagatttctgttccccacaatgagattgataaagttgataaaggtggtatggataaaatgacacttattgaggttggccccaggttctgtttgaatccaatcaaaatatttggtggtagttttggtggtcctacatggtatgagaacccatactacatttcccccaatcagatccgtgcactagagaagaggcagaaggcaggcaaatatgccaagaaggtgaaggccaaggtgaggaggaagatgcacgagatggagaacacgctggagcctgatgagtttgctgagctctggaaaggggagtaggctttgatcgaccctgtcaatgtcgtgaagcacccgcaactcctgtcagcaagcgcagattttgtttacctgtgtggcagtgtctatgttgtggaagttctgtatgacaaggcctacgtttattttacataaaatcggattttagtgataacttatgcccatatgacattctctcttgtttgcttctagtggatgtggtgccaagtgttatatcacttatgtgattggtagctgagaatcatggggaagcgcgatcacagttcaaacctcaagatatcaatgtgatagccatagccgtgttccatatgtatactatgtacttcatttcagcaatggttttgtaaggaaaatagatcaagcttcattt

SEQ ID NO: 7520 - protein, 322 aa, Zea mays subsp. mays
  peptide (1)..(322): Ceres Seq. ID no. 12357894
MAKKRKHTDAQAETAGAEKPDDSAPARPERTLFGFKDPAPDAVPASAASRAAVAPFRNREKVLITCSRRITYRYRHLMQDVLSMLPHAKKDSKVESKQSKGNALNEMLELRSCSSCLFFECRKQKDLYLWMVKSPGGPSVKFLVNAVHTMEELKLTGNHLKGSRPLLTFSTNFDEQPHWKLVKEIITHIFATPKDHRKAKPFHDHVFVFSIVDGHVWFRNYQISVPHNEIDKVDKGGMDKMTLIEVGPRFCLNPIKIFGGSFGGPTWYENPYYISPNQIRALEKRQKAGKYAKKVKAKVRRKMHEMENTLEPDEFAELWKGE

SEQ ID NO: 7521 - protein, 245 aa, Zea mays subsp. mays
  peptide (1)..(245): Ceres Seq. ID no. 12357895
MQDVLSMLPHAKKDSKVESKQSKGNALNEMLELRSCSSCLFFECRKQKDLYLWMVKSPGGPSVKFLVNAVHTMEELKLTGNHLKGSRPLLTFSTNFDEQPHWKLVKEIITHIFATPKDHRKAKPFHDHVFVFSIVDGHVWFRNYQISVPHNEIDKVDKGGMDKMTLIEVGPRFCLNPIKIFGGSFGGPTWYENPYYISPNQIRALEKRQKAGKYAKKVKAKVRRKMHEMENTLEPDEFAELWKGE

SEQ ID NO: 7522 - protein, 239 aa, Zea mays subsp. mays
  peptide (1)..(239): Ceres Seq. ID no. 12357896
MLPHAKKDSKVESKQSKGNALNEMLELRSCSSCLFFECRKQKDLYLWMVKSPGGPSVKFLVNAVHTMEELKLTGNHLKGSRPLLTFSTNFDEQPHWKLVKEIITHIFATPKDHRKAKPFHDHVFVFSIVDGHVWFRNYQISVPHNEIDKVDKGGMDKMTLIEVGPRFCLNPIKIFGGSFGGPTWYENPYYISPNQIRALEKRQKAGKYAKKVKAKVRRKMHEMENTLEPDEFAELWKGE

SEQ ID NO: 7523 - DNA, 2155 bp, Zea mays subsp. mays
  misc_feature (1)..(2155): Ceres Seq. ID no. 12408748
  misc_feature (1)..(2155): Ortholog of  Ceres SEQ ID NO 12778278 as cited in SEQ ID NO 63035
acccctgcttgctgcagcttcaagcactaccgaatcagggcgagtgggagcagaggagggaatcccatgtctccgcccctcgctggagcagatcgttgtcgagccgacgtggagctgctgcggtagaaagctagcggagcctgcgagctagcctgatccgtccgcagtccgatcgggatcgatgggtggggaggcgccggagccgcggcggctgacccgggcgctgagcatcggcggcggtgacggcggctgggttcccgaggagatgctgcaactcgtgatggggttcgtcgaggacccgcgcgaccgggaggccgcgtcgctggtgtgtcaccggtggcaccgcgtcgacgcgctctcgcggaagcacgtgacggtgcccttctgctacgccgtttccccggcacgcctgctcgcgcggttcccgcggctcgagtcgctcgcggtgaaggggaagcccccgcgcggccatgtacgggctcatacccgacgactggggcgcctacgcccgcccgtggatcaccgagctcgccgcgccgctcgagtgcctcaaggcgctccacctccgacgcatggtcgtcacagacgacgacctcgccgagctcgtccgtgccagggggcacatgctgcaggagctgaagctcgataagtgcaccggcttctccactcatggactccgcctcgttgccccgctcctgcagatcactgaggactttatttttggaagaatgtcaaattgatgataagggcagtgaatggatccacgatctcgcagtctgctgtcctgttctgacaacattgaatttccacatgactgagcttgaagtgatgccagctgacctaaagcttcttgcaaagagctgcaagtcactgatttcattgaagattagtgactgcgatctttcagatttgatagagttcttccaatttgccacagcactggaagaatttgctggagggacattcaatgagcaaggggaactcagcaagtatgtgaatgttaaatttccatcaagactatgctccttgggacttacttacatgggaacaaatgaaatgcccattatgttccctttttctgcaatactaaagaagctggatttgcaatacactttcctcaccactgaggaccattgccagctcattgcaaaatgcccgaacttactagttctcgcggtgaggaatgtgattggagatagaggattaggagttgttgcggatacgtgcaagaagctccaaaggctcagaatagagcgaggagatgatgaaggaggtgtgcaagaagagcagggaggggtctctcaagtgggcttgacggctatagccgtaggttgccgtgagctggaatatatagctgcctatgtgtctgatataaccaatggggccttggaatctatcgggacattctgcaaaaaactatacgacttccggcttgttctacttgatagagaagagaggataacagacttgccactggacaatggtgtccgagctttgttgaggggctgcaccaagcttcggaggtttgctctgtacttgagaccaggagggctctcagatgcaggtctcggctacattggacagtgcagcggaaacatccagtacatgcttctcggtaatgttggggaaactgatgatggattgatcagcttcgcattgggttgcgtaaacctgcgaaagcttgaactcaggagttgctgcttcagcgagcgagcactggcccttgcaatactacatatgccttccctgaggtacgtatgggttcagggctacaaagcgtctcaaaccggccgagacctcatgctcatggcaaggcccttctggaacatagagtttacacctcccaatcctaagaacggaggttggctgatggaagatggggagccttgtgtagatagtcacgctcagatacttgcataccactccctcgccggtaagaggctggactgcccacaatccgtggttcctttgtatcctgcgtgagtgtaaatagactaagctggtgtctttccttagcctcctggtcaacaagaatggtgttgataactcgatatatgcggttattgtatggatctagatggctagctgctacgtactgtaataagctactagtagctgagagatgtcctggaataagcccttgctatttttgcct

SEQ ID NO: 7524 - protein, 437 aa, Zea mays subsp. mays
  peptide (1)..(437): Ceres Seq. ID no. 12408749
MDSASLPRSCRSLRTLFLEECQIDDKGSEWIHDLAVCCPVLTTLNFHMTELEVMPADLKLLAKSCKSLISLKISDCDLSDLIEFFQFATALEEFAGGTFNEQGELSKYVNVKFPSRLCSLGLTYMGTNEMPIMFPFSAILKKLDLQYTFLTTEDHCQLIAKCPNLLVLAVRNVIGDRGLGVVADTCKKLQRLRIERGDDEGGVQEEQGGVSQVGLTAIAVGCRELEYIAAYVSDITNGALESIGTFCKKLYDFRLVLLDREERITDLPLDNGVRALLRGCTKLRRFALYLRPGGLSDAGLGYIGQCSGNIQYMLLGNVGETDDGLISFALGCVNLRKLELRSCCFSERALALAILHMPSLRYVWVQGYKASQTGRDLMLMARPFWNIEFTPPNPKNGGWLMEDGEPCVDSHAQILAYHSLAGKRLDCPQSVVPLYPA

SEQ ID NO: 7525 - protein, 390 aa, Zea mays subsp. mays
  peptide (1)..(390): Ceres Seq. ID no. 12408750
MTELEVMPADLKLLAKSCKSLISLKISDCDLSDLIEFFQFATALEEFAGGTFNEQGELSKYVNVKFPSRLCSLGLTYMGTNEMPIMFPFSAILKKLDLQYTFLTTEDHCQLIAKCPNLLVLAVRNVIGDRGLGVVADTCKKLQRLRIERGDDEGGVQEEQGGVSQVGLTAIAVGCRELEYIAAYVSDITNGALESIGTFCKKLYDFRLVLLDREERITDLPLDNGVRALLRGCTKLRRFALYLRPGGLSDAGLGYIGQCSGNIQYMLLGNVGETDDGLISFALGCVNLRKLELRSCCFSERALALAILHMPSLRYVWVQGYKASQTGRDLMLMARPFWNIEFTPPNPKNGGWLMEDGEPCVDSHAQILAYHSLAGKRLDCPQSVVPLYPA

SEQ ID NO: 7526 - protein, 384 aa, Zea mays subsp. mays
  peptide (1)..(384): Ceres Seq. ID no. 12408751
MPADLKLLAKSCKSLISLKISDCDLSDLIEFFQFATALEEFAGGTFNEQGELSKYVNVKFPSRLCSLGLTYMGTNEMPIMFPFSAILKKLDLQYTFLTTEDHCQLIAKCPNLLVLAVRNVIGDRGLGVVADTCKKLQRLRIERGDDEGGVQEEQGGVSQVGLTAIAVGCRELEYIAAYVSDITNGALESIGTFCKKLYDFRLVLLDREERITDLPLDNGVRALLRGCTKLRRFALYLRPGGLSDAGLGYIGQCSGNIQYMLLGNVGETDDGLISFALGCVNLRKLELRSCCFSERALALAILHMPSLRYVWVQGYKASQTGRDLMLMARPFWNIEFTPPNPKNGGWLMEDGEPCVDSHAQILAYHSLAGKRLDCPQSVVPLYPA

SEQ ID NO: 7527 - DNA, 1808 bp, Zea mays subsp. mays
  misc_feature (1)..(1808): Ceres Seq. ID no. 12408744
  misc_feature (1)..(1808): Ortholog of  Ceres SEQ ID NO 14311032 as cited in SEQ ID NO 54590
  misc_feature (1)..(1808): Ortholog of  Ceres SEQ ID NO 15170493 as cited in SEQ ID NO 58432
  misc_feature (1)..(1808): Ortholog of  Ceres SEQ ID NO 13597688 as cited in SEQ ID NO 65290
aattccaggagccgcctccttctagagggagagagggagggaccacagccgcggccgcaccggcgcacaccacctacaccgcccgaattcccgatcgataccggagctggacgtggcctagggtttccgagccaggccggcgctatggtgggctgctctaggggctccctccccacctggatgaccgccgccgccgcgcgggtcgacctctcgggcggcgtaacgccttcgcaccagggcccatcctcttcgtccccctcctcgggtcccgctccggccgcgggggcggaccaggagctcgggatgtacgagcgcgcgttctccgctgccggcgccgccttcgtctcagctatcatcgtcaaccctctagatgtcgccaagactagattgcaggcgcaggcggcaggggtgctgtaccaccagcctgcccagatggcggcgctcggccccgatgcgatcctgtctgaattccgatgctctccttcgtgcacacgtggtcttgtattaggaagtgagccagtttgtcctcctgactgcttccagtacaaggggacacttgatgtattcttgaaagtggttagacaggaggggttcgttagactatggagaggaacaaatgcaggcttagcattagctgtacccactgttgggatatacttgccttgttatgatatattccgcaactggattgaggatttcacaagaagtaatgctcctggcttgacaccatatgccccgctagtagcaggatctgttgcacgctcgttagcatgtattgcttgttctccaattgagctcgcaaggacgcgtatgcaggcatataaagagtttcgtcctggcgtaaagcctcctggaatgtggaaaaccttggttggtgttctctcaccacttccaagttcgagtcagaatgtacaaaattaccgtgttctgtggactggggtgggtgcacaacttgctcgagatgttcctttctctgctatatgctggtcaactcttgagcctatgcgaagaaaactacttggttttgttggagaagaaggcaatgcaggtagtgtattgggagtgaattttgctgctggttttgtagcaggcagtcttgctgctggtgctacatgccctctggatgttgcaaaaacaaggagacaaatagagaaggatactgagaaggcaatgaggatgactacaaggcaaacattagctgagatatggaggtctggaggcatgaaaggtctgttcgccggcgttggcccacgtgttgcacgcgctggtccatcggttggtattgtcatttccttctacgaggttgtcaagtacgctcttcatcaaaggcacacctcatgacctagttttgttgataagatggaagccctcccattttgtgaaggcatggtaggctagttactctgacagggctaggtgtaagttggaagatcagagtgcccaacagtcaagacacgacaggctttttcatggacagtgtccatttcagtcaaggataacaataccagttttgccatggagcaggctccagtttcgcccgtgtcaggttttggatcatcgtctaagcttatgtcttggctggatctgaagctgctccggtaaacttggtgtagtccctgtaattgaaggaaaggagagtgtagtagcgtagatactgatcaataattttgcacacccttgaaactacagaagaaattttgcacatcctagtctttgtctcgatgacttaaaaaaagttttggtcttcttgttgacttgttactgtaaaaaccaacgggtatatgtttacttggcagaatcattaattc

SEQ ID NO: 7528 - protein, 446 aa, Zea mays subsp. mays
  peptide (1)..(446): Ceres Seq. ID no. 12408745
NSRSRLLLEGEREGPQPRPHRRTPPTPPEFPIDTGAGRGLGFPSQAGAMVGCSRGSLPTWMTAAAARVDLSGGVTPSHQGPSSSSPSSGPAPAAGADQELGMYERAFSAAGAAFVSAIIVNPLDVAKTRLQAQAAGVLYHQPAQMAALGPDAILSEFRCSPSCTRGLVLGSEPVCPPDCFQYKGTLDVFLKVVRQEGFVRLWRGTNAGLALAVPTVGIYLPCYDIFRNWIEDFTRSNAPGLTPYAPLVAGSVARSLACIACSPIELARTRMQAYKEFRPGVKPPGMWKTLVGVLSPLPSSSQNVQNYRVLWTGVGAQLARDVPFSAICWSTLEPMRRKLLGFVGEEGNAGSVLGVNFAAGFVAGSLAAGATCPLDVAKTRRQIEKDTEKAMRMTTRQTLAEIWRSGGMKGLFAGVGPRVARAGPSVGIVISFYEVVKYALHQRHTS

SEQ ID NO: 7529 - protein, 398 aa, Zea mays subsp. mays
  peptide (1)..(398): Ceres Seq. ID no. 12408746
MVGCSRGSLPTWMTAAAARVDLSGGVTPSHQGPSSSSPSSGPAPAAGADQELGMYERAFSAAGAAFVSAIIVNPLDVAKTRLQAQAAGVLYHQPAQMAALGPDAILSEFRCSPSCTRGLVLGSEPVCPPDCFQYKGTLDVFLKVVRQEGFVRLWRGTNAGLALAVPTVGIYLPCYDIFRNWIEDFTRSNAPGLTPYAPLVAGSVARSLACIACSPIELARTRMQAYKEFRPGVKPPGMWKTLVGVLSPLPSSSQNVQNYRVLWTGVGAQLARDVPFSAICWSTLEPMRRKLLGFVGEEGNAGSVLGVNFAAGFVAGSLAAGATCPLDVAKTRRQIEKDTEKAMRMTTRQTLAEIWRSGGMKGLFAGVGPRVARAGPSVGIVISFYEVVKYALHQRHTS

SEQ ID NO: 7530 - protein, 386 aa, Zea mays subsp. mays
  peptide (1)..(386): Ceres Seq. ID no. 12408747
MTAAAARVDLSGGVTPSHQGPSSSSPSSGPAPAAGADQELGMYERAFSAAGAAFVSAIIVNPLDVAKTRLQAQAAGVLYHQPAQMAALGPDAILSEFRCSPSCTRGLVLGSEPVCPPDCFQYKGTLDVFLKVVRQEGFVRLWRGTNAGLALAVPTVGIYLPCYDIFRNWIEDFTRSNAPGLTPYAPLVAGSVARSLACIACSPIELARTRMQAYKEFRPGVKPPGMWKTLVGVLSPLPSSSQNVQNYRVLWTGVGAQLARDVPFSAICWSTLEPMRRKLLGFVGEEGNAGSVLGVNFAAGFVAGSLAAGATCPLDVAKTRRQIEKDTEKAMRMTTRQTLAEIWRSGGMKGLFAGVGPRVARAGPSVGIVISFYEVVKYALHQRHTS

SEQ ID NO: 7531 - DNA, 1815 bp, Zea mays subsp. mays
  misc_feature (1)..(1815): Ceres Seq. ID no. 12408731
  misc_feature (1)..(1815): Ortholog of  Ceres SEQ ID NO 13599613 as cited in SEQ ID NO 0
  misc_feature (1)..(1815): Ortholog of  Ceres SEQ ID NO 15179570 as cited in SEQ ID NO 0
ctgttcattcagatctgctccgtgctgtgcttcttctgctgctgccttgcagcgaccagcgagaagaaatccattcgctaggccggcccacccacccacgatagcggttgtggtcactcatgcgtcgtcgccggagtccaatctcgccgctcggagtttcttgacttttctggtcggagtttccatttcctcctggaggagattatttctttctcctctttcaccccgagaatctcgtctcgggtcgcgctggtttgattcctcctcgcctgagtccaccgctttcgcttccagtggagaagcttgtccgtgaagcagcgctcgtctcctgcttaaaatttcttccttctgccttggtttctttgctcgcgcccgccgatttgcttgctgcccagtccacactcctccgttcgtgtctcgcggctttccgcactcgttttcccggtctcggatttcgttaccaatgggcaacgcgttcgcgtgcatgccgcgcaaggagcagcgaggcgcggccgcggtgtcgcgcagcaagcggatggggagcgcgcggtcggcgcgcggcgggcccaagctgacgcccgcggaggaggagctcctccaccgccaggctctggccatggccatccaccagcacctcgacgccggcggctccatgtcccgccgcatcgacgccggggcctccctgtcccggcgcatggccccgggctccaccagctcccgccgccgcggcgacctgccggactccgtcacgaatgccaagcccgccccaattgttctggagaatttggaaacaaagaaaattgtccttgttcatggagaagggttcggtgcttggtgttggtacaagaccatctcacacttggaggaagctggtctagatcctgttgccttagatctcacaggctctggcatagaccatactgatacaaacagcatagctacgttagcagattactccaagccattgattgattacctcgacagacttcctgaagatgagaaggtcattttggtcggccatagttgcggaggtgcgagtgtctcgtatgcactggagcagtacccccgaaagatctcaaaggcggtgtttcttactgctacaatggtaaaggatggccagaggccctttgacgtgttctcggaggaactccggtcggcggatgttttcttgcaagagtcacagtttctagtctatggaaatgggaaggacaagcctcctactgggctgatgttcgataagcagcagatcaaggggctgtatttcaaccaaactccttccaaggatatggcactagcagcggtgtccatgaggcctatccctctagccccaatcatggagaagctctccctcaccccggagaactacggctccgtccgtcgctacttcatccaggcactcgacgaccacatgctgtcgccggacgcccaggagaagctggtccgcgagaaccctcccgacggcatcttcaagatcaagggcggcgaccactgccccttcttctcgaagccgcagtccctcaacaagatcctgctggagatcgcacagatccaagctcctgcggcgctgctcaaggcgagctcccccgaggagaccgtcgccgccatggtgacagggccagccaagtcatgactgcatgtatgtagtgtacacgaaaagagaaatgagtaagcacataggttgcaaaagggagggggaggaggtctggggattaactgaagccaagctgtgtcggataataatgtagggagttcaaagtgtttctttctttcttctgtgatcagatcagatcatatagagaatgagaggtggtcagc

SEQ ID NO: 7532 - protein, 388 aa, Zea mays subsp. mays
  peptide (1)..(388): Ceres Seq. ID no. 12408732
MGNAFACMPRKEQRGAAAVSRSKRMGSARSARGGPKLTPAEEELLHRQALAMAIHQHLDAGGSMSRRIDAGASLSRRMAPGSTSSRRRGDLPDSVTNAKPAPIVLENLETKKIVLVHGEGFGAWCWYKTISHLEEAGLDPVALDLTGSGIDHTDTNSIATLADYSKPLIDYLDRLPEDEKVILVGHSCGGASVSYALEQYPRKISKAVFLTATMVKDGQRPFDVFSEELRSADVFLQESQFLVYGNGKDKPPTGLMFDKQQIKGLYFNQTPSKDMALAAVSMRPIPLAPIMEKLSLTPENYGSVRRYFIQALDDHMLSPDAQEKLVRENPPDGIFKIKGGDHCPFFSKPQSLNKILLEIAQIQAPAALLKASSPEETVAAMVTGPAKS

SEQ ID NO: 7533 - protein, 381 aa, Zea mays subsp. mays
  peptide (1)..(381): Ceres Seq. ID no. 12408733
MPRKEQRGAAAVSRSKRMGSARSARGGPKLTPAEEELLHRQALAMAIHQHLDAGGSMSRRIDAGASLSRRMAPGSTSSRRRGDLPDSVTNAKPAPIVLENLETKKIVLVHGEGFGAWCWYKTISHLEEAGLDPVALDLTGSGIDHTDTNSIATLADYSKPLIDYLDRLPEDEKVILVGHSCGGASVSYALEQYPRKISKAVFLTATMVKDGQRPFDVFSEELRSADVFLQESQFLVYGNGKDKPPTGLMFDKQQIKGLYFNQTPSKDMALAAVSMRPIPLAPIMEKLSLTPENYGSVRRYFIQALDDHMLSPDAQEKLVRENPPDGIFKIKGGDHCPFFSKPQSLNKILLEIAQIQAPAALLKASSPEETVAAMVTGPAKS

SEQ ID NO: 7534 - protein, 364 aa, Zea mays subsp. mays
  peptide (1)..(364): Ceres Seq. ID no. 12408734
MGSARSARGGPKLTPAEEELLHRQALAMAIHQHLDAGGSMSRRIDAGASLSRRMAPGSTSSRRRGDLPDSVTNAKPAPIVLENLETKKIVLVHGEGFGAWCWYKTISHLEEAGLDPVALDLTGSGIDHTDTNSIATLADYSKPLIDYLDRLPEDEKVILVGHSCGGASVSYALEQYPRKISKAVFLTATMVKDGQRPFDVFSEELRSADVFLQESQFLVYGNGKDKPPTGLMFDKQQIKGLYFNQTPSKDMALAAVSMRPIPLAPIMEKLSLTPENYGSVRRYFIQALDDHMLSPDAQEKLVRENPPDGIFKIKGGDHCPFFSKPQSLNKILLEIAQIQAPAALLKASSPEETVAAMVTGPAKS

SEQ ID NO: 7535 - DNA, 1678 bp, Zea mays subsp. mays
  misc_feature (1)..(1678): Ceres Seq. ID no. 12367431
  misc_feature (1)..(1678): Ortholog of  Ceres SEQ ID NO 14303423 as cited in SEQ ID NO 54243
  misc_feature (1)..(1678): Ortholog of  Ceres SEQ ID NO 12611314 as cited in SEQ ID NO 56535
  misc_feature (1)..(1678): Ortholog of  Ceres SEQ ID NO 15178046 as cited in SEQ ID NO 60380
  misc_feature (1)..(1678): Ortholog of  Ceres SEQ ID NO 14312016 as cited in SEQ ID NO 60412
  misc_feature (1)..(1678): Ortholog of  Ceres SEQ ID NO 13661438 as cited in SEQ ID NO 61414
accggacccgttctgggttttacccctccgccactgccttgttctttcctgctccgctccccacgcgtacgcgcactcgtggcgacgactgggtgatcgccgccgccgccaccacgcaccaccaggccttcaccggcgacaaacaccatcaacagacacaagtgcttcggtcattatagtgccagtaccattctgccagcgagttcctttgccacaaaaagataacactcggatatctcatggcaaaacctgggattttaggccgcagcagtgcacagagatcaaatgagggcatgcgaatcatattctcagcagttattggtgttatgctagggtacttgtttggcatttccttccctacagttaatataacaaagcttcacttcccttccagcattatctcctatatcgaggacagaaactctggcatcacaacccaaacattattgaatcatgcatggacgtctgcagctactcataagaagaacaattcagcttctaactctgatgaaattcctaagatttatgttccaacaaaccctaaaggtgctgaaaggcttccaccgggcattgtagtgtctgaaacagacctttatctccggagattgtggggtgaacctagtgaggatcttactaccaaaccaagataccttgttacatttacagtgggatactctcaaaaggcaaacattgatgcagcggtgaaaaaattttcagataacttcacaattatgttgttccattatgatggccggacaactgagtgggatgaatttgagtggtcaaaaagggctgtccatgtgagtgtcacaaagcagaccaaatggtggtatgccaaacgatttctacatcctgacattgttgcccgctacgactacatatttatctgggatgaagatcttggtgtcgaacattttaatgcagaggcgtacattaagcttgttaggaagcatgggcttgagatctctcagcctggtttggagcccgataaaggtttgacatggcaaatgactaaacgaagaggtgatcaggaagtccacaaagtaactgaggagagacctggctggtgtagcgaccctcacctgccaccatgtgcagcgtttgttgaaattatggcaactgtattctcaagggatgcatggcgctgtgtatggcatatgattcagaacgacttggtccatggatggggccttgattttgctcttaggaaatgtgtggagccagcccatgagaaaattggagtggttgattcccagtggattgttcatcaagtcatcccttcgcttggtaaccagggcaaggcagagaatggaaaagcaccatgggaaggggttagagcacgctgtcgtaaagaatgggggatgttccaaacaaggttgactgatgctgagaaagcatattacttggagcacgggatcacaccaccaaaatcgacggtagcttagctgcacgcaccgacagtagcttagctgcactgcatgcctgcatacaggcacctcgcgagtcacgccaaggtttctgttttgtgaacctagcgccttcctgtccgataagcaactgactctgtagagatgcagcaccacagccagatttgtacagaatcgatgtacgtttttactcttcttaatcttctttacttgttttcaaccgtagcgacgagagtagctcttgtgtaagt

SEQ ID NO: 7536 - protein, 401 aa, Zea mays subsp. mays
  peptide (1)..(401): Ceres Seq. ID no. 12367432
MAKPGILGRSSAQRSNEGMRIIFSAVIGVMLGYLFGISFPTVNITKLHFPSSIISYIEDRNSGITTQTLLNHAWTSAATHKKNNSASNSDEIPKIYVPTNPKGAERLPPGIVVSETDLYLRRLWGEPSEDLTTKPRYLVTFTVGYSQKANIDAAVKKFSDNFTIMLFHYDGRTTEWDEFEWSKRAVHVSVTKQTKWWYAKRFLHPDIVARYDYIFIWDEDLGVEHFNAEAYIKLVRKHGLEISQPGLEPDKGLTWQMTKRRGDQEVHKVTEERPGWCSDPHLPPCAAFVEIMATVFSRDAWRCVWHMIQNDLVHGWGLDFALRKCVEPAHEKIGVVDSQWIVHQVIPSLGNQGKAENGKAPWEGVRARCRKEWGMFQTRLTDAEKAYYLEHGITPPKSTVA

SEQ ID NO: 7537 - protein, 383 aa, Zea mays subsp. mays
  peptide (1)..(383): Ceres Seq. ID no. 12367433
MRIIFSAVIGVMLGYLFGISFPTVNITKLHFPSSIISYIEDRNSGITTQTLLNHAWTSAATHKKNNSASNSDEIPKIYVPTNPKGAERLPPGIVVSETDLYLRRLWGEPSEDLTTKPRYLVTFTVGYSQKANIDAAVKKFSDNFTIMLFHYDGRTTEWDEFEWSKRAVHVSVTKQTKWWYAKRFLHPDIVARYDYIFIWDEDLGVEHFNAEAYIKLVRKHGLEISQPGLEPDKGLTWQMTKRRGDQEVHKVTEERPGWCSDPHLPPCAAFVEIMATVFSRDAWRCVWHMIQNDLVHGWGLDFALRKCVEPAHEKIGVVDSQWIVHQVIPSLGNQGKAENGKAPWEGVRARCRKEWGMFQTRLTDAEKAYYLEHGITPPKSTVA

SEQ ID NO: 7538 - protein, 372 aa, Zea mays subsp. mays
  peptide (1)..(372): Ceres Seq. ID no. 12367434
MLGYLFGISFPTVNITKLHFPSSIISYIEDRNSGITTQTLLNHAWTSAATHKKNNSASNSDEIPKIYVPTNPKGAERLPPGIVVSETDLYLRRLWGEPSEDLTTKPRYLVTFTVGYSQKANIDAAVKKFSDNFTIMLFHYDGRTTEWDEFEWSKRAVHVSVTKQTKWWYAKRFLHPDIVARYDYIFIWDEDLGVEHFNAEAYIKLVRKHGLEISQPGLEPDKGLTWQMTKRRGDQEVHKVTEERPGWCSDPHLPPCAAFVEIMATVFSRDAWRCVWHMIQNDLVHGWGLDFALRKCVEPAHEKIGVVDSQWIVHQVIPSLGNQGKAENGKAPWEGVRARCRKEWGMFQTRLTDAEKAYYLEHGITPPKSTVA

SEQ ID NO: 7539 - DNA, 1597 bp, Zea mays subsp. mays
  misc_feature (1)..(1597): Ceres Seq. ID no. 12412195
  misc_feature (1)..(1597): Ortholog of  Ceres SEQ ID NO 14308389 as cited in SEQ ID NO 55226
  misc_feature (1)..(1597): Ortholog of  Ceres SEQ ID NO 13597162 as cited in SEQ ID NO 63955
  misc_feature (1)..(1597): Ortholog of  Ceres SEQ ID NO 14313567 as cited in SEQ ID NO 68074
gatgcaaacagcaccattcggtcgctccagcttttgtgcacgtccactgtgtccctcctcgctacccccgctttttgtgcgcggtggcaacgtgcgacagccgagaggcagaatgacgaagcaagtggtggtggtggacacagctctggtggcgccgagcgaggagacgccgcggcagccgctgtggctgtccaaccttgacctggccgtgccgaggacgcacacgccgctggtctactactacccggcgccgggcacgggctccttcgcgccggaccggctgagggccgcattgggcgccgctctggtgccattctacccacttgccgggcgcctcggcgttggcccggacggccggctgcagatcgagtgcaacagcaagggcgcgctcttcgtcgtcgccaacgcagacctcaccggcgcggacgtcttcgacgactacgagccgtcgtcggagatcaggaacacttttgtgccgttaggggagtccggcgaggcgaacaacagccccatatccatgttccaggtgacttttctcaagtgcggcggcgtggtgctaggaaccgccatccaccacgcggccatggacggcgtgggcgcgttccagtttatgcagacgtggtccggggtggcacgcggcctggacgtggcggaggcgtgcgggccgcagccgttccacgaccggacgctcctgcacgcgcggcgcccgccgtgcccgacatccgaccacttcgtctactccccggcgttcctcagcggccgcccccggccctacgtcacccgcatctactccgtctcgccgaagctcctcgccgacgtcaagtcgcgctgcgcgccaggcgtgtccacctactgcgccgtcaccgcgcacctctggcgctgcgtgtgcgtcgcgcgcgggctagcgccgggcgcggacacccgcctcagcctgccggccaacgtccgccaccgcctgcgccccccgctcccgcgcaccttcttcggcaacgccgtcgtgcgcgaccacgtcaccgcccccgtcagcaccgtcctcggcgcccctctcgggtccgtggcggagaccatcaagaaggcggtggaccgcgtggacgacgccttcgcgcggtcggtgctggactacctggagctgcagaatgcaggcggcaagcagctgagcggccaggctcaggcccaggcgcccagggagcagctcgtaccggcgacggacctgtgggcggtgagctggctggggatggccatgtacgacgccgacttcggctcaggcgcgccgcggttcgtcgcgccggcgcagatgttcggcatcggcacggcgtatatgacgccgcgcggtccggacagggacgacggcatcgccgtgctcatctctctggagcccgagtacctgtcgtgctttgagaaggtcttcttctataacgagtgatgtctcaggtctggagttcaaggatgtgaacgtgtgaatctccgttcgagtagtaagctatttttcctttccctttttttttgtacgtctgagcggtcccaccgagtattctaggtattccttgaaatacttattgttttggtcaaataaataaatatctgccttgcgttattg

SEQ ID NO: 7540 - protein, 473 aa, Zea mays subsp. mays
  peptide (1)..(473): Ceres Seq. ID no. 12412196
MQTAPFGRSSFCARPLCPSSLPPLFVRGGNVRQPRGRMTKQVVVVDTALVAPSEETPRQPLWLSNLDLAVPRTHTPLVYYYPAPGTGSFAPDRLRAALGAALVPFYPLAGRLGVGPDGRLQIECNSKGALFVVANADLTGADVFDDYEPSSEIRNTFVPLGESGEANNSPISMFQVTFLKCGGVVLGTAIHHAAMDGVGAFQFMQTWSGVARGLDVAEACGPQPFHDRTLLHARRPPCPTSDHFVYSPAFLSGRPRPYVTRIYSVSPKLLADVKSRCAPGVSTYCAVTAHLWRCVCVARGLAPGADTRLSLPANVRHRLRPPLPRTFFGNAVVRDHVTAPVSTVLGAPLGSVAETIKKAVDRVDDAFARSVLDYLELQNAGGKQLSGQAQAQAPREQLVPATDLWAVSWLGMAMYDADFGSGAPRFVAPAQMFGIGTAYMTPRGPDRDDGIAVLISLEPEYLSCFEKVFFYNE

SEQ ID NO: 7541 - protein, 436 aa, Zea mays subsp. mays
  peptide (1)..(436): Ceres Seq. ID no. 12412197
MTKQVVVVDTALVAPSEETPRQPLWLSNLDLAVPRTHTPLVYYYPAPGTGSFAPDRLRAALGAALVPFYPLAGRLGVGPDGRLQIECNSKGALFVVANADLTGADVFDDYEPSSEIRNTFVPLGESGEANNSPISMFQVTFLKCGGVVLGTAIHHAAMDGVGAFQFMQTWSGVARGLDVAEACGPQPFHDRTLLHARRPPCPTSDHFVYSPAFLSGRPRPYVTRIYSVSPKLLADVKSRCAPGVSTYCAVTAHLWRCVCVARGLAPGADTRLSLPANVRHRLRPPLPRTFFGNAVVRDHVTAPVSTVLGAPLGSVAETIKKAVDRVDDAFARSVLDYLELQNAGGKQLSGQAQAQAPREQLVPATDLWAVSWLGMAMYDADFGSGAPRFVAPAQMFGIGTAYMTPRGPDRDDGIAVLISLEPEYLSCFEKVFFYNE

SEQ ID NO: 7542 - protein, 301 aa, Zea mays subsp. mays
  peptide (1)..(301): Ceres Seq. ID no. 12412198
MFQVTFLKCGGVVLGTAIHHAAMDGVGAFQFMQTWSGVARGLDVAEACGPQPFHDRTLLHARRPPCPTSDHFVYSPAFLSGRPRPYVTRIYSVSPKLLADVKSRCAPGVSTYCAVTAHLWRCVCVARGLAPGADTRLSLPANVRHRLRPPLPRTFFGNAVVRDHVTAPVSTVLGAPLGSVAETIKKAVDRVDDAFARSVLDYLELQNAGGKQLSGQAQAQAPREQLVPATDLWAVSWLGMAMYDADFGSGAPRFVAPAQMFGIGTAYMTPRGPDRDDGIAVLISLEPEYLSCFEKVFFYNE

SEQ ID NO: 7543 - DNA, 1433 bp, Zea mays subsp. mays
  misc_feature (1)..(1433): Ceres Seq. ID no. 12408719
  misc_feature (1)..(1433): Ortholog of  Ceres SEQ ID NO 13654468 as cited in SEQ ID NO 68094
ggcaagcctactcaggcgatccgcggtacccgcgcgccagctcctcctcctcctcccgcgccacctcgcagccgccggctccgcccccgcctcgtcccgttcgttctcccgcttccacccccgcgacgacgatgacagctctatgttcgatccaccggagccgccggtgaactggggcatgaacatagttccggagaagaaggctttcgtcgtggagaggttcgggaagtatctcaagaccctcgactccgggttccacctgctgatccccgccgtcgaccgtattgcctacgtgcactcgctcaaggaggagaccatccccattcccgatcagaacgcaatcaccaaggacaacgtcaccatacagatcgacagcgtcatatatatcaagatcatggacccctaccttgcttcctatggtgtggaggatccaatctatgctgtcctacaacttgcacaaacaaccatgagaagtgaacttgggaagataaccttagacaagacttttgaggagagagatgcattaaatgagaaaattgtgagtgccatcaatgaagcagccacagattggggcttgaagtgtattcgctatgagatcagggacataactcctccaacagggattaggcaggctatggagatgcaggctgaagcaaaaaggagaaaacgcgcccaaatccttgaatcagaagggaagaaacatgcccaaatccttgaatcagaagggaagaaaactgcccaggtccttgaatctgaaggagctatgttagatctagcaaaccgtgcgaagggtgcggccgaagcaattcttgccaagtcagaagctactgctcgtggaatgagattggtttcagatgcgatgacaactgaaggcagtgccaaggctgctagcctaaaacttgcagagcaatatatcgaagcattctcaaatctagcacaaaagacaaatacaatgctgctcccaggcaacagtgccagcccagcatctttcgtggcccaggcgatgaagacgtatcagcaaatccattcccatagtcaggcattgaagtaccaccctcaggtagaagggctggaggaatcaggagagaccacccctgctgctccatcttctgaggcaagcaagacaccaccatttgtcggggaagcagattctaaccataccttctcgctgcaacgcccaagaacaagaagtgagcttccctcaagtgcttgaagcccttttcttgtctactgttctgcaacataggagtgtcactgataaacaccagtaggtttagttttctttagtcagagaagctgatgtgcggcgaaggggatagacccgtagcccgtaggcatttggtttcgggaaagctaaatgcgaccggagagagattttgattctggtgaagtttatacgttggttccttcatatattttaaaatgaagtttgt

SEQ ID NO: 7544 - protein, 403 aa, Zea mays subsp. mays
  peptide (1)..(403): Ceres Seq. ID no. 12408720
ASLLRRSAVPARQLLLLLPRHLAAAGSAPASSRSFSRFHPRDDDDSSMFDPPEPPVNWGMNIVPEKKAFVVERFGKYLKTLDSGFHLLIPAVDRIAYVHSLKEETIPIPDQNAITKDNVTIQIDSVIYIKIMDPYLASYGVEDPIYAVLQLAQTTMRSELGKITLDKTFEERDALNEKIVSAINEAATDWGLKCIRYEIRDITPPTGIRQAMEMQAEAKRRKRAQILESEGKKHAQILESEGKKTAQVLESEGAMLDLANRAKGAAEAILAKSEATARGMRLVSDAMTTEGSAKAASLKLAEQYIEAFSNLAQKTNTMLLPGNSASPASFVAQAMKTYQQIHSHSQALKYHPQVEGLEESGETTPAAPSSEASKTPPFVGEADSNHTFSLQRPRTRSELPSSA

SEQ ID NO: 7545 - protein, 356 aa, Zea mays subsp. mays
  peptide (1)..(356): Ceres Seq. ID no. 12408721
MFDPPEPPVNWGMNIVPEKKAFVVERFGKYLKTLDSGFHLLIPAVDRIAYVHSLKEETIPIPDQNAITKDNVTIQIDSVIYIKIMDPYLASYGVEDPIYAVLQLAQTTMRSELGKITLDKTFEERDALNEKIVSAINEAATDWGLKCIRYEIRDITPPTGIRQAMEMQAEAKRRKRAQILESEGKKHAQILESEGKKTAQVLESEGAMLDLANRAKGAAEAILAKSEATARGMRLVSDAMTTEGSAKAASLKLAEQYIEAFSNLAQKTNTMLLPGNSASPASFVAQAMKTYQQIHSHSQALKYHPQVEGLEESGETTPAAPSSEASKTPPFVGEADSNHTFSLQRPRTRSELPSSA

SEQ ID NO: 7546 - protein, 344 aa, Zea mays subsp. mays
  peptide (1)..(344): Ceres Seq. ID no. 12408722
MNIVPEKKAFVVERFGKYLKTLDSGFHLLIPAVDRIAYVHSLKEETIPIPDQNAITKDNVTIQIDSVIYIKIMDPYLASYGVEDPIYAVLQLAQTTMRSELGKITLDKTFEERDALNEKIVSAINEAATDWGLKCIRYEIRDITPPTGIRQAMEMQAEAKRRKRAQILESEGKKHAQILESEGKKTAQVLESEGAMLDLANRAKGAAEAILAKSEATARGMRLVSDAMTTEGSAKAASLKLAEQYIEAFSNLAQKTNTMLLPGNSASPASFVAQAMKTYQQIHSHSQALKYHPQVEGLEESGETTPAAPSSEASKTPPFVGEADSNHTFSLQRPRTRSELPSSA

SEQ ID NO: 7547 - DNA, 1414 bp, Zea mays subsp. mays
  misc_feature (1)..(1414): Ceres Seq. ID no. 12344282
  misc_feature (1)..(1414): Ortholog of  Ceres SEQ ID NO 14308615 as cited in SEQ ID NO 58538
  misc_feature (1)..(1414): Ortholog of  Ceres SEQ ID NO 13585342 as cited in SEQ ID NO 63601
  misc_feature (1)..(1414): Ortholog of  Ceres SEQ ID NO 15177459 as cited in SEQ ID NO 0
tccacccgtccgatctaaccgtcccaccgcccaagccactcgagggccgatcttgctgctgctgctccgccctccctcctcctcggcaccgtctcgtccgaccatggctgctgactcgggcaagatgccgtccgccggcggcaaggcgccgccacccaagtcatccgactccggcacaggcatcatgaagaggctcccgcgcctggcgctcgtcttcctggtggcgctgctgtaccggcagctgcaggccccggctcccagggtccccggaacgcccggcgggcccccggtgacgtcgccgaggatcaggctcaaggacggaaggcacctcgcgtaccacgagtcgggcgtccccagggagcaggccaggtacaggatcgtcttcatgcacgggttcgactcgtgcaggtacgacgtgctccgggtgtcgccggagctggcccaggagctggggcgtctacctgctctccttcgaccgccccgggtacggggagagcgacccgcacccggctaggaccgacaagagcgtcgccctggacatcgagcagctcgccgacgccatggagctcggcgacaggttctacctcgccggcttctccatgggcggggagatcatgtggagctgcctcaagtacatcccgcacaggctttccggcgtagccatcctgggccccgtgggcaacttctggtggtccggcctccccgcgaacgtgtccctggaggcctggaacgtgcaggtggcgcaggacaagtgggccgtgggcgtggcgcaccacgctccctggctcacctactggtggaacacccagaagctgttcccggcctccagcgtcatcgccttcaacccggccatcatgtcccgggcggacatggcactcatccccagcttcgcctacaggacccacgcctaccaggcgcggcagcagggggagcacgagagcctgcaccgcgacatgatggtcggcttcggcaagtggagctggagcccgctggacctggaggacccgttccccgacggcgacggcaaggtgcacctgtggcacggcgccgaggacctcatcgtgcccgtggggctgtcgaggcacatcagcaagagcctgccgtgggtgcgctaccacgagctgcccacggccggccacctcttccccatggccgacgggatggccgacgtcatcgtcaagtcgctgctgctgggcgacgagtgacgattgtcatctcccgtcgtcgtcgtcgagtcgatctccctctccctcttcctccccccctgctttttcctgtgcgcgcgagtctttttgagtctttgtagtgcagtgagagaatgctacggacatgtctttgcgatcgttactcctattcctatataatatatgatatatagataaagaaatattaacgggatgtttagtttctaaag

SEQ ID NO: 7548 - protein, 214 aa, Zea mays subsp. mays
  peptide (1)..(214): Ceres Seq. ID no. 12344283
MELGDRFYLAGFSMGGEIMWSCLKYIPHRLSGVAILGPVGNFWWSGLPANVSLEAWNVQVAQDKWAVGVAHHAPWLTYWWNTQKLFPASSVIAFNPAIMSRADMALIPSFAYRTHAYQARQQGEHESLHRDMMVGFGKWSWSPLDLEDPFPDGDGKVHLWHGAEDLIVPVGLSRHISKSLPWVRYHELPTAGHLFPMADGMADVIVKSLLLGDE

SEQ ID NO: 7549 - protein, 201 aa, Zea mays subsp. mays
  peptide (1)..(201): Ceres Seq. ID no. 12344284
MGGEIMWSCLKYIPHRLSGVAILGPVGNFWWSGLPANVSLEAWNVQVAQDKWAVGVAHHAPWLTYWWNTQKLFPASSVIAFNPAIMSRADMALIPSFAYRTHAYQARQQGEHESLHRDMMVGFGKWSWSPLDLEDPFPDGDGKVHLWHGAEDLIVPVGLSRHISKSLPWVRYHELPTAGHLFPMADGMADVIVKSLLLGDE

SEQ ID NO: 7550 - protein, 196 aa, Zea mays subsp. mays
  peptide (1)..(196): Ceres Seq. ID no. 12344285
MWSCLKYIPHRLSGVAILGPVGNFWWSGLPANVSLEAWNVQVAQDKWAVGVAHHAPWLTYWWNTQKLFPASSVIAFNPAIMSRADMALIPSFAYRTHAYQARQQGEHESLHRDMMVGFGKWSWSPLDLEDPFPDGDGKVHLWHGAEDLIVPVGLSRHISKSLPWVRYHELPTAGHLFPMADGMADVIVKSLLLGDE

SEQ ID NO: 7551 - DNA, 1434 bp, Zea mays subsp. mays
  misc_feature (1)..(1434): Ceres Seq. ID no. 12356470
  misc_feature (1)..(1434): Ortholog of  Ceres SEQ ID NO 13598313 as cited in SEQ ID NO 68293
accgagatgcaatgcaatgcaaacatcctccctcttctcctgctcctcacagacatcttatcctagctcccggtcgaaggccgtaggtaggattcccttctctattcctcgtccgcttcctcctccggcagccggacctagctagctagctttcttgccgttcgccgcccatggctaggaagtgctctagctgtgggaacaacggccacaactccaggacctgcggcgggcacagcaggaccacggcggccttcgagaacaacggcggcgccggcgtgaggctgttcggggtgcagctgcacgtggggtcctcgtcgcccgtagccgtagccatgaagaggtgcttcagcatggagtgcctgtcgtcgccgccgcccgccgcgccggcgtactacgcggccgctctcgccgccgccaacagcagctcgccgtcggcgtccgcgtcggcgtcctcgtcctcgtcgctcgtctcggtggaggaggcacaggcacccgagaagatggccagcgggtacctctccgacgggctcgtgggcagggcgcaggcggagaggaagaagggcgttccgtggacggaggacgagcaccggcggttcctggcgggcctggagaagctcgggaagggcgactggcgaggcatctcccggcacttcgtcacgacgcggacgccgacgcaggtggccagccacgcccagaagtacttcctccggcagagcagcctggcgcacaagaagcgcaggtccagcctcttcgacgtggtggagaacgctgctgagagggcgacgacgacgagctccagggagcgcccgaggctcacggtcacggatgcgataatcgcgaccgcctctgctgcagcacccggaacaacggcagcactcccggccctgtcgctcggcatccgacggccagcgaggcctgagtaccacgttgacgtcgcgctgcctccgagcagcctgtccatgcagctgccgcggtgctcggcggcaatgggtagcgcgtcggcgtcgccgtcgccgagcctggcgctggcgctggcggggccgaaacacaagcacccttcgccttcgtccctgacggcggcaaaggctagtagtagtggccaggcaccagacctggagctgaagatctcgaccggccggcagagcgagcaccaggtccagacgggctcgccgccgaggacgccctttctgggcaccatcagggtcacgtaaccggaatgacggcggcggcggttagtcgggaatgtcctgctggtagaagaagagcttggccgggccggggtgggaaaactgaaaaggaggagcttttggcagtggtgttggtgtgtgtgtgttgctgccagtggcagccgagacgacgatgccgttcgtttatcacgtgggtgtggtgttgtgcatcatcatcagaaagatggaaactttactttagtggcct

SEQ ID NO: 7552 - protein, 346 aa, Zea mays subsp. mays
  peptide (1)..(346): Ceres Seq. ID no. 12356471
MARKCSSCGNNGHNSRTCGGHSRTTAAFENNGGAGVRLFGVQLHVGSSSPVAVAMKRCFSMECLSSPPPAAPAYYAAALAAANSSSPSASASASSSSSLVSVEEAQAPEKMASGYLSDGLVGRAQAERKKGVPWTEDEHRRFLAGLEKLGKGDWRGISRHFVTTRTPTQVASHAQKYFLRQSSLAHKKRRSSLFDVVENAAERATTTSSRERPRLTVTDAIIATASAAAPGTTAALPALSLGIRRPARPEYHVDVALPPSSLSMQLPRCSAAMGSASASPSPSLALALAGPKHKHPSPSSLTAAKASSSGQAPDLELKISTGRQSEHQVQTGSPPRTPFLGTIRVT

SEQ ID NO: 7553 - protein, 292 aa, Zea mays subsp. mays
  peptide (1)..(292): Ceres Seq. ID no. 12356472
MKRCFSMECLSSPPPAAPAYYAAALAAANSSSPSASASASSSSSLVSVEEAQAPEKMASGYLSDGLVGRAQAERKKGVPWTEDEHRRFLAGLEKLGKGDWRGISRHFVTTRTPTQVASHAQKYFLRQSSLAHKKRRSSLFDVVENAAERATTTSSRERPRLTVTDAIIATASAAAPGTTAALPALSLGIRRPARPEYHVDVALPPSSLSMQLPRCSAAMGSASASPSPSLALALAGPKHKHPSPSSLTAAKASSSGQAPDLELKISTGRQSEHQVQTGSPPRTPFLGTIRVT

SEQ ID NO: 7554 - protein, 286 aa, Zea mays subsp. mays
  peptide (1)..(286): Ceres Seq. ID no. 12356473
MECLSSPPPAAPAYYAAALAAANSSSPSASASASSSSSLVSVEEAQAPEKMASGYLSDGLVGRAQAERKKGVPWTEDEHRRFLAGLEKLGKGDWRGISRHFVTTRTPTQVASHAQKYFLRQSSLAHKKRRSSLFDVVENAAERATTTSSRERPRLTVTDAIIATASAAAPGTTAALPALSLGIRRPARPEYHVDVALPPSSLSMQLPRCSAAMGSASASPSPSLALALAGPKHKHPSPSSLTAAKASSSGQAPDLELKISTGRQSEHQVQTGSPPRTPFLGTIRVT

SEQ ID NO: 7555 - DNA, 1979 bp, Zea mays subsp. mays
  misc_feature (1)..(1979): Ceres Seq. ID no. 12363354
  misc_feature (1)..(1979): Ortholog of  Ceres SEQ ID NO 15176057 as cited in SEQ ID NO 56363
  misc_feature (1)..(1979): Ortholog of  Ceres SEQ ID NO 14316269 as cited in SEQ ID NO 60082
gcacgagaccattacctagaacatcctaatcgaaaaatcttcgtctctctccgactctccctcgcccgcgcacctttccgcgccgcctccttcctttcctcgcgtgctctggcgcgcgcaaggatcaaaaggcgccggccactagaggcgagtgagtcgcatgtaaacgaccaccagctgctgtgatctcaaaagggagcgagagacaaaggagaggcgagcaggtcgtggcggcagcaatcgttgcgaatccgcgcgggattctgtcctctgcaccactgcttcccgctttcctgcccggcggaagtggtataattctccaacgcggttgactgtattgcctctcgctctcggtgggtgggggcatggacgaggcagaggagatgcaggtggagaggctgcacgaggaggccgatgcggggggagccgacacggacaagctcagctacgagatattctccatcctcgagagcaagttcctgttcggctataccgacccgcaccagctctggctgcccaagccagcggcggaactgccggcgcaggcgtccgcggcggcgccgggtaaggcggcgcagcgcgggaaggtctgcgtgctctgcgtggacggcggcgggggcggcctgcgggcgctgctgcccggccgcgcgcttgcgcacctggaggccgcgctgcgccgcgcgtctggggaccccgacgcccgggtcgccgactacttcgacctcgctgcgggcaccggcgccggcggcgtgttcgccgcgatgctcttctccacgcactcgcgcggcgcnccgctgttccacgccnacgacacgtggcggctcgtcgcggaccacgcgccgcgcatgttccgcaggcccgcggcctcctcgtccacttccctcttctgccgcggcaagaagcggcccctggccgcgccaacggcggcgctggaggcggcaatgaagnnggcgttcggccaggagctcaccctgcgggacaccatcaagcccgtgctcatctcttgctacgacctcaagacgtccgcgccgctggtgttctctcgcgccgacgcactggagaacgggagctacgacttccgcctctgcgaggtcgggcgcgccgcgtggtccgaggccggacgcttcgagcccgccgaggtggcgtcggtggacggcgccacgtcctgcgccgctgtagacggcggccccaccatgggcagcccggcggccgccgccatcacgcacgtgctacacaacaagcacgagttcccgttcgtgcgcggggtcgaggacctcctcgtgctctccatcggcggctgctctggcggaggctctggcgccgctggcgaggcggaactccggcgcatgcgtcggtggggtcccaaggagtgggcacgccccatcgcccgtattgcggccgacggcgccgccgaccttgtcgaccacgccgtggcgcgcgccttcggccaatgccgcgcatccaactacctgcgcatccaggcgaagcgggagagcatgccgccgtgcggtacggacggggagtacgacccgaccccaggcaacgtgcgcgcgctgctcgcggcggcggacgagatgctcaagcagcggaacgtggagtcggtgctgttcgaggggaggcgagtcggggagcagacgaacgcggagaagctggactggttcgcggcagagctcgtcgccgagcaccgcagcagagcctcccggatcgcacccaccgttgcgttcaagcaggcgccgcagaagccgtaggcgctggactgagctggtggccgtaagaccgtggcgttaagggcatgtaggcctctctttcttcttgcttgggctggcggctggaattcctgctgcatatttttgacgcggcagcatggcatatcaatatggcattgctctgtgatggagcatttgccgctgtgaaatcgtttcaagggaggatggaatatgaaaggaacgaacgttgccgatataaaaattctaatcttc

SEQ ID NO: 7556 - protein, 460 aa, Zea mays subsp. mays
  peptide (1)..(460): Ceres Seq. ID no. 12363355
  misc_feature (142)..(142): Xaa is any aa, unknown or other
  misc_feature (148)..(148): Xaa is any aa, unknown or other
  misc_feature (195)..(195): Xaa is any aa, unknown or other
MDEAEEMQVERLHEEADAGGADTDKLSYEIFSILESKFLFGYTDPHQLWLPKPAAELPAQASAAAPGKAAQRGKVCVLCVDGGGGGLRALLPGRALAHLEAALRRASGDPDARVADYFDLAAGTGAGGVFAAMLFSTHSRGXPLFHAXDTWRLVADHAPRMFRRPAASSSTSLFCRGKKRPLAAPTAALEAAMKXAFGQELTLRDTIKPVLISCYDLKTSAPLVFSRADALENGSYDFRLCEVGRAAWSEAGRFEPAEVASVDGATSCAAVDGGPTMGSPAAAAITHVLHNKHEFPFVRGVEDLLVLSIGGCSGGGSGAAGEAELRRMRRWGPKEWARPIARIAADGAADLVDHAVARAFGQCRASNYLRIQAKRESMPPCGTDGEYDPTPGNVRALLAAADEMLKQRNVESVLFEGRRVGEQTNAEKLDWFAAELVAEHRSRASRIAPTVAFKQAPQKP

SEQ ID NO: 7557 - protein, 454 aa, Zea mays subsp. mays
  peptide (1)..(454): Ceres Seq. ID no. 12363356
  misc_feature (136)..(136): Xaa is any aa, unknown or other
  misc_feature (142)..(142): Xaa is any aa, unknown or other
  misc_feature (189)..(189): Xaa is any aa, unknown or other
MQVERLHEEADAGGADTDKLSYEIFSILESKFLFGYTDPHQLWLPKPAAELPAQASAAAPGKAAQRGKVCVLCVDGGGGGLRALLPGRALAHLEAALRRASGDPDARVADYFDLAAGTGAGGVFAAMLFSTHSRGXPLFHAXDTWRLVADHAPRMFRRPAASSSTSLFCRGKKRPLAAPTAALEAAMKXAFGQELTLRDTIKPVLISCYDLKTSAPLVFSRADALENGSYDFRLCEVGRAAWSEAGRFEPAEVASVDGATSCAAVDGGPTMGSPAAAAITHVLHNKHEFPFVRGVEDLLVLSIGGCSGGGSGAAGEAELRRMRRWGPKEWARPIARIAADGAADLVDHAVARAFGQCRASNYLRIQAKRESMPPCGTDGEYDPTPGNVRALLAAADEMLKQRNVESVLFEGRRVGEQTNAEKLDWFAAELVAEHRSRASRIAPTVAFKQAPQKP

SEQ ID NO: 7558 - protein, 328 aa, Zea mays subsp. mays
  peptide (1)..(328): Ceres Seq. ID no. 12363357
  misc_feature (10)..(10): Xaa is any aa, unknown or other
  misc_feature (16)..(16): Xaa is any aa, unknown or other
  misc_feature (63)..(63): Xaa is any aa, unknown or other
MLFSTHSRGXPLFHAXDTWRLVADHAPRMFRRPAASSSTSLFCRGKKRPLAAPTAALEAAMKXAFGQELTLRDTIKPVLISCYDLKTSAPLVFSRADALENGSYDFRLCEVGRAAWSEAGRFEPAEVASVDGATSCAAVDGGPTMGSPAAAAITHVLHNKHEFPFVRGVEDLLVLSIGGCSGGGSGAAGEAELRRMRRWGPKEWARPIARIAADGAADLVDHAVARAFGQCRASNYLRIQAKRESMPPCGTDGEYDPTPGNVRALLAAADEMLKQRNVESVLFEGRRVGEQTNAEKLDWFAAELVAEHRSRASRIAPTVAFKQAPQKP

SEQ ID NO: 7559 - DNA, 1383 bp, Zea mays subsp. mays
  misc_feature (1)..(1383): Ceres Seq. ID no. 12408711
  misc_feature (1)..(1383): Ortholog of  Ceres SEQ ID NO 14302514 as cited in SEQ ID NO 65814
aactttccctgcaagaatggatcgcgagaccaagaacagtagaccaaagacaaaggaaggcgagggccaccatccccaaaacccgtaaaaaaacccgaattgacaaattgagtcgacggggaaggaaataaagaaggggaagagcacgcgccgccgccagcaccgcgtccgccatggccgcctcctcccgccgcgcgtctcaattgctggggtccgcggcctcccgcctcctcctcgggcggggcttcgccgcggcagccgccgcggcgccctcgccggcggtcttcgtcgacaagagcacccgtgtgatctgccagggcatcacggggaagaacggcaccttccacaccgagcaggccatcgagtacggcaccaacatggttggtggagtgactcccaagaaaggtggaactgaacatttagggctcccagtgtttaactctgtagcagaagctaaggctgaaacaaaagccaatgcatctgttatatatgttccaccaccatttgctgccgccgctataatggaggcaatggaggctgagctcgaccttgttgtctgcattacggaaggaattccccagcatgacatggtgaaagtgaaggctgcactaaatagacaatctaaaactcgattgattgggccaaattgccctggtatcattaagcctggtgagtgtaaaattggaatcatgccaggttacatccacaagcctgggcgtattgggattgtatctcgttctggtaccttgacatatgaagcggtgtttcaaacaacagctgtaggcttggggcagtcaacttgtgtaggcattggtggtgacccattcaatggcacaaattttgttgattgccttgaaaaatttgtcgatgaccctcagacagaaggcattgttctcatcggtgaaattggaggtacggctgaggaggatgctgcaacgttcatccaggaaagcaaaacacaaaagcctgttgttgcattcattgctggacttacggcactcccaggccgtcgcatgggtcatgctggagctatcgtggcaggaggaaagggtactgcccaggacaaaatcaaggcactcagagaggctggtgttaccgttgtcgagtcaccagcgaagattggttctaccatgtttgaaatcttcaaacagcgtggaatggtagaatagacacagtggtacagtagagagacattgagaaaccgctttttgatgcttgcgggcaatcgcgagcaattcctcggtagatccttctccctggccacaaacaaaactactgaggttttcttttcgtacttgtcttatctttggaagatgtcctggccttcttcacttggataacctttcgctgagctcatttcaataagacgtttcggagccatgg

SEQ ID NO: 7560 - protein, 331 aa, Zea mays subsp. mays
  peptide (1)..(331): Ceres Seq. ID no. 12408712
MAASSRRASQLLGSAASRLLLGRGFAAAAAAAPSPAVFVDKSTRVICQGITGKNGTFHTEQAIEYGTNMVGGVTPKKGGTEHLGLPVFNSVAEAKAETKANASVIYVPPPFAAAAIMEAMEAELDLVVCITEGIPQHDMVKVKAALNRQSKTRLIGPNCPGIIKPGECKIGIMPGYIHKPGRIGIVSRSGTLTYEAVFQTTAVGLGQSTCVGIGGDPFNGTNFVDCLEKFVDDPQTEGIVLIGEIGGTAEEDAATFIQESKTQKPVVAFIAGLTALPGRRMGHAGAIVAGGKGTAQDKIKALREAGVTVVESPAKIGSTMFEIFKQRGMVE

SEQ ID NO: 7561 - protein, 263 aa, Zea mays subsp. mays
  peptide (1)..(263): Ceres Seq. ID no. 12408713
MVGGVTPKKGGTEHLGLPVFNSVAEAKAETKANASVIYVPPPFAAAAIMEAMEAELDLVVCITEGIPQHDMVKVKAALNRQSKTRLIGPNCPGIIKPGECKIGIMPGYIHKPGRIGIVSRSGTLTYEAVFQTTAVGLGQSTCVGIGGDPFNGTNFVDCLEKFVDDPQTEGIVLIGEIGGTAEEDAATFIQESKTQKPVVAFIAGLTALPGRRMGHAGAIVAGGKGTAQDKIKALREAGVTVVESPAKIGSTMFEIFKQRGMVE

SEQ ID NO: 7562 - protein, 215 aa, Zea mays subsp. mays
  peptide (1)..(215): Ceres Seq. ID no. 12408714
MEAMEAELDLVVCITEGIPQHDMVKVKAALNRQSKTRLIGPNCPGIIKPGECKIGIMPGYIHKPGRIGIVSRSGTLTYEAVFQTTAVGLGQSTCVGIGGDPFNGTNFVDCLEKFVDDPQTEGIVLIGEIGGTAEEDAATFIQESKTQKPVVAFIAGLTALPGRRMGHAGAIVAGGKGTAQDKIKALREAGVTVVESPAKIGSTMFEIFKQRGMVE

SEQ ID NO: 7563 - DNA, 1023 bp, Zea mays subsp. mays
  misc_feature (1)..(1023): Ceres Seq. ID no. 12408705
  misc_feature (1)..(1023): Ortholog of  Ceres SEQ ID NO 13584023 as cited in SEQ ID NO 63516
agtatacgatgatttgagggtgtgagctgaaaaatctccacatcaccagattacggccggcggcggcccgctctgttccatcgcccccaagcggcgggccttggctgcgccgcctaaatccaccggcgagagtaaagggcgcccctctctcacacgatggcctcgagctccgcaagcggcgccggggtggagggcggggtcggggaggggccgacgacgctggacgagctgtaccagatcaacgtagtgccggccgagctccacttcaagttccgcaaggagctgcagggcctccgcgtcggcctcaacctcgagttctacaatcttgaggtcaatgactttgaggcaaagatagtactgaagcctctagattacgagcggaaatggaagttccagtacaagcccatcagtggcgacatacagctgctttccaagaagataccagtcacaaagtttctaaatctacaggttggcattggccacaattttcaactgaatgcaactggatggaagtggaagctttctacttgcctggggggagatggtgtgtctcagataagaaacaagtcaaaactcagcttgttcccagggtttgatttgaggattgggtggaaagcagagtatgtgcttcctgagattcatggggctgttggcacaggagaaccagccttcagtatgaactatggaaggttgcatgcatcgatagatcgggtcgaggctatcgttactcagtcagatcagtattgatcttccagtgcggaaaggcaagggagtttcttgatcaataacaaacacgttgagtagatcccagggttacaagaagcattctgaagctccgtgcctgatgtacagcaaataccaaagtttaggaccacgctttgagaagctgtttgagttctccaaagcttttgactttgagcggcttctgttgcttctgaaagcgtaactataaataatgtttatcctgcttgtgtacgaaacaccagagtatcagtaattcagtatagtgagcgacgtcaaagc

SEQ ID NO: 7564 - protein, 196 aa, Zea mays subsp. mays
  peptide (1)..(196): Ceres Seq. ID no. 12408706
MASSSASGAGVEGGVGEGPTTLDELYQINVVPAELHFKFRKELQGLRVGLNLEFYNLEVNDFEAKIVLKPLDYERKWKFQYKPISGDIQLLSKKIPVTKFLNLQVGIGHNFQLNATGWKWKLSTCLGGDGVSQIRNKSKLSLFPGFDLRIGWKAEYVLPEIHGAVGTGEPAFSMNYGRLHASIDRVEAIVTQSDQY

SEQ ID NO: 7565 - DNA, 1200 bp, Zea mays subsp. mays
  misc_feature (1)..(1200): Ceres Seq. ID no. 12373524
  misc_feature (1)..(1200): Ortholog of  Ceres SEQ ID NO 14301568 as cited in SEQ ID NO 66744
atcgctggaccatttccccatttccattcccatcccaattcccatccgtttcatttccacctccttttccagtttcgactcgattcgaaacaggataccaaatgcatgatcgatcccacaagccgcagccggcggaggccggcaacggcgggccggctggcgagggcggcggcgggaacgtggatcgggtgctcttcaagaacctcgtcgagatggtgccgctcgtcgagtcgctcatggaccggagggtcaacccggcatactcgcgtcgcgcttcgctggtctacacgccggcgccgcccaagaaggcaagcgatttgaaaagtgtcaaattgccacagagcgtatcagccaaaaagcggagagaccctggtgatatagccaagaagagcaccccagattctaacggcgacaacggttcagttgtgccattatctctgtcaggtgctgaaaatatgcccaaggatgaggttgccgtgctaagcgagcagatcaatgacctacaaaagaagctgcttgagaaggaggaggcactgaggtctgcggagagctctgtgactgagatgaatgcagcatatgcaactatcgatgaactcagacgcctggtggctgacaaagaagctttgatcagatctaccaattctcagttgcatgatgcaaagattatgcttgcagacaagcaagcgtctttagagaaacttgaatgggaggtgaagatgtcaaataaaaaggtcgaagatcttcaaggagatatgtcgaatatgggattcgagataagctcattgatggtatttttcgaaaaaatttcagagaatgtttcaggtgactcttatgatgatataataccatcatcatatgaattagagacacttcaatcaatgagtgaaattgacaagattgaggtcgacaagctagacaaggaaagggttacatatgctgaagctctggcggcagcgagagagaaccctgacgaggagcacttgaatatagctgcggaggcgaggtcaaggctgcaggtccttgtactttagtgtccccttctgattatagcgtttgtatgataatgttgaactgctgatgtaattgtatgtgttggcttgagttgaggtgctcgtggaatccttccggtgattgattcagcactgtaaactgacagctgtttcatgttgtaaccatatttaaggcgtgtttgatttctcc

SEQ ID NO: 7566 - protein, 342 aa, Zea mays subsp. mays
  peptide (1)..(342): Ceres Seq. ID no. 12373525
RWTISPFPFPSQFPSVSFPPPFPVSTRFETGYQMHDRSHKPQPAEAGNGGPAGEGGGGNVDRVLFKNLVEMVPLVESLMDRRVNPAYSRRASLVYTPAPPKKASDLKSVKLPQSVSAKKRRDPGDIAKKSTPDSNGDNGSVVPLSLSGAENMPKDEVAVLSEQINDLQKKLLEKEEALRSAESSVTEMNAAYATIDELRRLVADKEALIRSTNSQLHDAKIMLADKQASLEKLEWEVKMSNKKVEDLQGDMSNMGFEISSLMVFFEKISENVSGDSYDDIIPSSYELETLQSMSEIDKIEVDKLDKERVTYAEALAAARENPDEEHLNIAAEARSRLQVLVL

SEQ ID NO: 7567 - protein, 309 aa, Zea mays subsp. mays
  peptide (1)..(309): Ceres Seq. ID no. 12373526
MHDRSHKPQPAEAGNGGPAGEGGGGNVDRVLFKNLVEMVPLVESLMDRRVNPAYSRRASLVYTPAPPKKASDLKSVKLPQSVSAKKRRDPGDIAKKSTPDSNGDNGSVVPLSLSGAENMPKDEVAVLSEQINDLQKKLLEKEEALRSAESSVTEMNAAYATIDELRRLVADKEALIRSTNSQLHDAKIMLADKQASLEKLEWEVKMSNKKVEDLQGDMSNMGFEISSLMVFFEKISENVSGDSYDDIIPSSYELETLQSMSEIDKIEVDKLDKERVTYAEALAAARENPDEEHLNIAAEARSRLQVLVL

SEQ ID NO: 7568 - protein, 272 aa, Zea mays subsp. mays
  peptide (1)..(272): Ceres Seq. ID no. 12373527
MVPLVESLMDRRVNPAYSRRASLVYTPAPPKKASDLKSVKLPQSVSAKKRRDPGDIAKKSTPDSNGDNGSVVPLSLSGAENMPKDEVAVLSEQINDLQKKLLEKEEALRSAESSVTEMNAAYATIDELRRLVADKEALIRSTNSQLHDAKIMLADKQASLEKLEWEVKMSNKKVEDLQGDMSNMGFEISSLMVFFEKISENVSGDSYDDIIPSSYELETLQSMSEIDKIEVDKLDKERVTYAEALAAARENPDEEHLNIAAEARSRLQVLVL

SEQ ID NO: 7569 - DNA, 1304 bp, Zea mays subsp. mays
  misc_feature (1)..(1304): Ceres Seq. ID no. 12372716
  misc_feature (1)..(1304): Ortholog of  Ceres SEQ ID NO 14310819 as cited in SEQ ID NO 53794
gcacgagaccattacctagaacatcctaatcaaaaaaggccacaagcgcccgagcggcttaaaccctagctcgccgtcgtgctcggctcgccaccccgcgcctgctcctttcaggccctaaccgttcgccgccgcgcattcgagcacacgcggaagcgcacctagtgccatggcgaagaagcggaagcgcaccgacgcgcccgcagaggcggccggcgcagagaagcctgacgactccgcgccggcgcgcccggagcgcacgctcttcggcttcaaggacctggtccccgacgccgagcccgcctccgcgggcgccgaggccgcggtggcgccgttccggaacagggagaaggtactcatcacctgctcccgccgaatcacgtataggtatcggcacctgatgcaggacgtgctgtcgctgctcccgcatgcgaagaaggacagcaaggtcgagtcgaagcagagcaaggggaacgcgctgaacgagctccttgagctcaggagctgctccagctgccttttcttcgagtgcagaaaacagaaggatctttacctttggatggtgaagtctcctggaggaccatcagtaaaatttctagttaatgctgttcacaccatggaggagttgaagcttaccggtaaccatctgaaagggtcacgcccacttcttacattttctacaaattttgatgagcaacctcattggaagcttgtgaaggaaatgataactcagatatttgctactcctaaagatcaccgtaaagcaaaacctttccatgaccatgtgtttgtcttctccattgtggatggccatgtttggtttcgaaactaccagatttcggttccccacaatgagattgataaagttgataaaggtggtctggataaaatgacacttattgaggttggccccaggttctgtttgaatccaatcaaaatatttggtggtagttttggtggtcctacatgggtatgagaacccatactacatttcccccaatcagatccgtgcactagagaagaggcagaaggcaggcaaatatgccaagaaggtgaaggccaaggtgaggcggaagatgcacgagatggagaacacgctggagcctgatgagtttgctgagctctggaaaggggagtaactggtctttgatcgaccctgtcaaagtcgtgaagcaccagcaactccttccacttccaccaagcgcaggtcttgtttaccattgtggcagtgccgactgtcgaggttgtggaagttttgtatcacaaagcatacttttatttatataaaatcggattttagtgat

SEQ ID NO: 7570 - protein, 268 aa, Zea mays subsp. mays
  peptide (1)..(268): Ceres Seq. ID no. 12372717
MAKKRKRTDAPAEAAGAEKPDDSAPARPERTLFGFKDLVPDAEPASAGAEAAVAPFRNREKVLITCSRRITYRYRHLMQDVLSLLPHAKKDSKVESKQSKGNALNELLELRSCSSCLFFECRKQKDLYLWMVKSPGGPSVKFLVNAVHTMEELKLTGNHLKGSRPLLTFSTNFDEQPHWKLVKEMITQIFATPKDHRKAKPFHDHVFVFSIVDGHVWFRNYQISVPHNEIDKVDKGGLDKMTLIEVGPRFCLNPIKIFGGSFGGPTWV

SEQ ID NO: 7571 - protein, 191 aa, Zea mays subsp. mays
  peptide (1)..(191): Ceres Seq. ID no. 12372718
MQDVLSLLPHAKKDSKVESKQSKGNALNELLELRSCSSCLFFECRKQKDLYLWMVKSPGGPSVKFLVNAVHTMEELKLTGNHLKGSRPLLTFSTNFDEQPHWKLVKEMITQIFATPKDHRKAKPFHDHVFVFSIVDGHVWFRNYQISVPHNEIDKVDKGGLDKMTLIEVGPRFCLNPIKIFGGSFGGPTWV

SEQ ID NO: 7572 - protein, 138 aa, Zea mays subsp. mays
  peptide (1)..(138): Ceres Seq. ID no. 12372719
MVKSPGGPSVKFLVNAVHTMEELKLTGNHLKGSRPLLTFSTNFDEQPHWKLVKEMITQIFATPKDHRKAKPFHDHVFVFSIVDGHVWFRNYQISVPHNEIDKVDKGGLDKMTLIEVGPRFCLNPIKIFGGSFGGPTWV

SEQ ID NO: 7573 - DNA, 1919 bp, Zea mays subsp. mays; identical to SEQ ID NO: 4314
  misc_feature (1)..(1919): Ceres Seq. ID no. 12406508
  misc_feature (1)..(1919): Ortholog of  Ceres SEQ ID NO 14311203 as cited in SEQ ID NO 53639
  misc_feature (1)..(1919): Ortholog of  Ceres SEQ ID NO 15176053 as cited in SEQ ID NO 57792
  misc_feature (1)..(1919): Ortholog of  Ceres SEQ ID NO 14311175 as cited in SEQ ID NO 60223
  misc_feature (1)..(1919): Ortholog of  Ceres SEQ ID NO 15224727 as cited in SEQ ID NO 64990
  misc_feature (1)..(1919): Ortholog of  Ceres SEQ ID NO 14308023 as cited in SEQ ID NO 65865
  misc_feature (1)..(1919): Ortholog of  Ceres SEQ ID NO 14307972 as cited in SEQ ID NO 66436
  misc_feature (1)..(1919): Ortholog of  Ceres SEQ ID NO 15170175 as cited in SEQ ID NO 67138
  misc_feature (1)..(1919): Ortholog of  Ceres SEQ ID NO 12614670 as cited in SEQ ID NO 68565

SEQ ID NO: 7574 - protein, 460 aa, Zea mays subsp. mays; identical to SEQ ID NO: 4315
  peptide (1)..(460): Ceres Seq. ID no. 12406509

SEQ ID NO: 7575 - protein, 371 aa, Zea mays subsp. mays; identical to SEQ ID NO: 4316
  peptide (1)..(371): Ceres Seq. ID no. 12406510

SEQ ID NO: 7576 - protein, 319 aa, Zea mays subsp. mays; identical to SEQ ID NO: 4317
  peptide (1)..(319): Ceres Seq. ID no. 12406511

SEQ ID NO: 7577 - DNA, 1506 bp, Zea mays subsp. mays
  misc_feature (1)..(1506): Ceres Seq. ID no. 12406215
  misc_feature (1)..(1506): Ortholog of  Ceres SEQ ID NO 15169199 as cited in SEQ ID NO 55297
  misc_feature (1)..(1506): Ortholog of  Ceres SEQ ID NO 15175690 as cited in SEQ ID NO 55466
  misc_feature (1)..(1506): Ortholog of  Ceres SEQ ID NO 15171197 as cited in SEQ ID NO 56892
  misc_feature (1)..(1506): Ortholog of  Ceres SEQ ID NO 14306381 as cited in SEQ ID NO 58812
ctctttctccttcctcctccttcctctcgctcgctcccctcccttccccgctcctcctcctcctcctcctcctccctttcattcctacctccgctcgcgccactctcctccgaccgaggggcagggaccggtgcccgtccgcccgccatggtctcctggcggcgcagcgcgtcctggctgtcgtcggcgtcgcgctcctcgctcggcgccgccgtcggcggggaggccaaggtcacgccgnagncggatccgncggcgcagcacgacgagcccgacgaggagcgctggtcgcgcctgctgccggagctgctcacggagatcatgcgccgcgtggacgccggcgccgagcgctggccgccgcgccgggacgtcgtggtctgcgcctgcgtgtgccgccggtggcgcgacgccgctgtctcggtcgtgcgcccgccgctcgagtgcggcaggatcaccttcccgtcgtcgctcaagcagcctggaccaagggatgcgccgatgcactgttttatccggagggacaaaaaaaattcaaccttttctctctatctcagcttaacgcaggccctaacggataaagggaagtttcttttggctgctcgaaggttcagacaaggagcacatacagaatatatcatctcttatgactacgatgatctgcacccaagaagcagttcatatgttggaaagttgagatctgacttcttggggacaaagttcatcatctatgatagccaggcgccatatgacggtgccaaaccttcgaggacccgatccactcgccgctttgcaagcaagcagataagcccacaggtttcaggcggcaatttcgaagttggacaagtgacctacaggttcaacttcatgaaatcaagagggccgagacggatgcagtgcaatatccagtgccctgtaggccagggcagcgcttcggatccatccaaggagaaaacaccctcgccgagttccttggacctaaagaacaaggctccaagatggcacgaccatcttcagtgttggtgcttaaatttccacggccgggtgaccgtcgcctccgtgaagaacttccagctcgtcgccacagctggctccggcggtccatggggcgtcggagacgaggagacggtgatcctgcagttcgggaagatcgaggacgatgcgtttacgatggactaccggcagcctctgtccgccttccaggcgttcgccatctgcctcaccagctttggcacgaagctggcctgtgaataaatggttgccggtttacccaactatgttggggatcagattgtagggggtagtctgaactagttgccctgagcacctcagatgggagaaaactggcgataagaaacagggcggacgttgtccctataagctttgactccttgtaatcgcctaaatgattgatttatatatatatgatgtgcgcctatgttgttgaagagatgacgatgacttatcgttgtaaatgccattcccttccgtttggtgacattccattct

SEQ ID NO: 7578 - protein, 416 aa, Zea mays subsp. mays
  peptide (1)..(416): Ceres Seq. ID no. 12406216
  misc_feature (81)..(81): Xaa is any aa, unknown or other
  misc_feature (82)..(82): Xaa is any aa, unknown or other
  misc_feature (85)..(85): Xaa is any aa, unknown or other
LFLLPPPSSRSLPSLPRSSSSSSSSLSFLPPLAPLSSDRGAGTGARPPAMVSWRRSASWLSSASRSSLGAAVGGEAKVTPXXDPXAQHDEPDEERWSRLLPELLTEIMRRVDAGAERWPPRRDVVVCACVCRRWRDAAVSVVRPPLECGRITFPSSLKQPGPRDAPMHCFIRRDKKNSTFSLYLSLTQALTDKGKFLLAARRFRQGAHTEYIISYDYDDLHPRSSSYVGKLRSDFLGTKFIIYDSQAPYDGAKPSRTRSTRRFASKQISPQVSGGNFEVGQVTYRFNFMKSRGPRRMQCNIQCPVGQGSASDPSKEKTPSPSSLDLKNKAPRWHDHLQCWCLNFHGRVTVASVKNFQLVATAGSGGPWGVGDEETVILQFGKIEDDAFTMDYRQPLSAFQAFAICLTSFGTKLACE

SEQ ID NO: 7579 - protein, 367 aa, Zea mays subsp. mays
  peptide (1)..(367): Ceres Seq. ID no. 12406217
  misc_feature (32)..(32): Xaa is any aa, unknown or other
  misc_feature (33)..(33): Xaa is any aa, unknown or other
  misc_feature (36)..(36): Xaa is any aa, unknown or other
MVSWRRSASWLSSASRSSLGAAVGGEAKVTPXXDPXAQHDEPDEERWSRLLPELLTEIMRRVDAGAERWPPRRDVVVCACVCRRWRDAAVSVVRPPLECGRITFPSSLKQPGPRDAPMHCFIRRDKKNSTFSLYLSLTQALTDKGKFLLAARRFRQGAHTEYIISYDYDDLHPRSSSYVGKLRSDFLGTKFIIYDSQAPYDGAKPSRTRSTRRFASKQISPQVSGGNFEVGQVTYRFNFMKSRGPRRMQCNIQCPVGQGSASDPSKEKTPSPSSLDLKNKAPRWHDHLQCWCLNFHGRVTVASVKNFQLVATAGSGGPWGVGDEETVILQFGKIEDDAFTMDYRQPLSAFQAFAICLTSFGTKLACE

SEQ ID NO: 7580 - protein, 309 aa, Zea mays subsp. mays
  peptide (1)..(309): Ceres Seq. ID no. 12406218
MRRVDAGAERWPPRRDVVVCACVCRRWRDAAVSVVRPPLECGRITFPSSLKQPGPRDAPMHCFIRRDKKNSTFSLYLSLTQALTDKGKFLLAARRFRQGAHTEYIISYDYDDLHPRSSSYVGKLRSDFLGTKFIIYDSQAPYDGAKPSRTRSTRRFASKQISPQVSGGNFEVGQVTYRFNFMKSRGPRRMQCNIQCPVGQGSASDPSKEKTPSPSSLDLKNKAPRWHDHLQCWCLNFHGRVTVASVKNFQLVATAGSGGPWGVGDEETVILQFGKIEDDAFTMDYRQPLSAFQAFAICLTSFGTKLACE

SEQ ID NO: 7581 - DNA, 2012 bp, Zea mays subsp. mays
  misc_feature (1)..(2012): Ceres Seq. ID no. 12408330
  misc_feature (1)..(2012): Ortholog of  Ceres SEQ ID NO 13597269 as cited in SEQ ID NO 63932
gacttgaacacggccagcgtctcatcggctgggcgtggtctacactgcacgcacacttaccaccagccaccgcaagtgaatcactagccggaagacaggccaaccccactgctagtgctaggaatctaggagcgagaacgagagaccatgtcctcagaggccagcagcgtcgtcgtcgccgacgagaatggagcggcggagacggtcggcgtcgggcggtacgtggaaatggagaaggaccaagactcgagcgcagccaagtcgcggctctcgggcctgctctggcacggcggctccgcctacgacgcttggttcagctgcgcgtccaaccaggtggctcaggtgctcctgaccctgccctactcgttctcgcaactggggatgctgagcggcatactgttccagctcctgtacgggctgatgggcagctggacggcgtacctcatcagcgttctctacgtggagtaccgggccaggaaggagagggagaaggcggacttcaggaaccatgtcatccagtggttcgaggtgctggacgggctgctcgggaggcactggaggaacgtcggcctggccttcaactgcacgttcctgctcttcggctcggtcatccagctcatcgcatgcgcaagcaacatctactacatcaacgacaagctggacaagcggacgtggacgtacatcttcggcgcctgctgcgccacgacggtgttcatcccgtcgttccacaactaccggatctggtcgttcctgggcctcgtcatgaccacctacacggcgtggtacctcgccgtcgcgtccctcatccatggccaggttgatggcgtgaagcactccgggccgaccaagatggtgctctacttcaccggggccacaaacattctctacactttcggagggcacgctgttaccgtggagatcatgcacgcgatgtggcggccgcagaagttcaaggcgatctacctgatggcgacgctgtacgtgctgacgctgacgctgccgtcggcggccagcgtgtactgggcgttcggcgaccagctgctgacccgctccaacgcgctggcgctgctcccgcgcacggcgttccgcgacgccgccgtcgtgctcatgctcgcccaccagttcatcaccttcggcttcgcctgcacgccgctctacttcgtctgggagaagctcgtcggcctgcacgactgccgcagcctctgcaggcgcgccgccgcgcgcctccccgtcgtcgtccccatctggttcctcgccatcatcttccccttcttcgggcccatcaactccgccgtcggctccctcctcgtcagcttcaccgtctacatcatcccggcgctggcgcacatgatcacgttccggtccgcaacagcccgtgagaacgcgatggagccgccgccgcggctgctggggcgttggacgggcgcgtacatgatcaacgcgttcgtggtggcgtgggtgctggtggtcggcttcggcttcggcggctgggcgagcatgacaaacttcgtccgccagatcgacaccttcggcctcttcaccaagtgctaccagtgcccgccgccaccgcccctgccgttccccggcggcggcctcggcaacatcacgatgccattcaacggcgacgggctccctcctaccccggctccttcgccggcgcattacttcttccgccaccaccggcatcacagccaccaccgcgggctctgatgagagacgatgaaatgaacccggcttaccaccagtagtgcgtgcgtggcacactgctgctttagtttgagctgatcccttagttaagtctagcttaattagcacctgcatgcagcatcttcgttctctcctctagcttgctggtgtcgaacgcatgctttcccggtttcagtgactttagagaccctgcctgagcctgacacgaggggagtatcactgtatcagtactagcatgcagtctcttgtgttccgggctgtgtcctggcgtggagctcaaagaaggggaatccatttctacagcc

SEQ ID NO: 7582 - protein, 520 aa, Zea mays subsp. mays
  peptide (1)..(520): Ceres Seq. ID no. 12408331
MSSEASSVVVADENGAAETVGVGRYVEMEKDQDSSAAKSRLSGLLWHGGSAYDAWFSCASNQVAQVLLTLPYSFSQLGMLSGILFQLLYGLMGSWTAYLISVLYVEYRARKEREKADFRNHVIQWFEVLDGLLGRHWRNVGLAFNCTFLLFGSVIQLIACASNIYYINDKLDKRTWTYIFGACCATTVFIPSFHNYRIWSFLGLVMTTYTAWYLAVASLIHGQVDGVKHSGPTKMVLYFTGATNILYTFGGHAVTVEIMHAMWRPQKFKAIYLMATLYVLTLTLPSAASVYWAFGDQLLTRSNALALLPRTAFRDAAVVLMLAHQFITFGFACTPLYFVWEKLVGLHDCRSLCRRAAARLPVVVPIWFLAIIFPFFGPINSAVGSLLVSFTVYIIPALAHMITFRSATARENAMEPPPRLLGRWTGAYMINAFVVAWVLVVGFGFGGWASMTNFVRQIDTFGLFTKCYQCPPPPPLPFPGGGLGNITMPFNGDGLPPTPAPSPAHYFFRHHRHHSHHRGL

SEQ ID NO: 7583 - protein, 493 aa, Zea mays subsp. mays
  peptide (1)..(493): Ceres Seq. ID no. 12408332
MEKDQDSSAAKSRLSGLLWHGGSAYDAWFSCASNQVAQVLLTLPYSFSQLGMLSGILFQLLYGLMGSWTAYLISVLYVEYRARKEREKADFRNHVIQWFEVLDGLLGRHWRNVGLAFNCTFLLFGSVIQLIACASNIYYINDKLDKRTWTYIFGACCATTVFIPSFHNYRIWSFLGLVMTTYTAWYLAVASLIHGQVDGVKHSGPTKMVLYFTGATNILYTFGGHAVTVEIMHAMWRPQKFKAIYLMATLYVLTLTLPSAASVYWAFGDQLLTRSNALALLPRTAFRDAAVVLMLAHQFITFGFACTPLYFVWEKLVGLHDCRSLCRRAAARLPVVVPIWFLAIIFPFFGPINSAVGSLLVSFTVYIIPALAHMITFRSATARENAMEPPPRLLGRWTGAYMINAFVVAWVLVVGFGFGGWASMTNFVRQIDTFGLFTKCYQCPPPPPLPFPGGGLGNITMPFNGDGLPPTPAPSPAHYFFRHHRHHSHHRGL

SEQ ID NO: 7584 - protein, 442 aa, Zea mays subsp. mays
  peptide (1)..(442): Ceres Seq. ID no. 12408333
MLSGILFQLLYGLMGSWTAYLISVLYVEYRARKEREKADFRNHVIQWFEVLDGLLGRHWRNVGLAFNCTFLLFGSVIQLIACASNIYYINDKLDKRTWTYIFGACCATTVFIPSFHNYRIWSFLGLVMTTYTAWYLAVASLIHGQVDGVKHSGPTKMVLYFTGATNILYTFGGHAVTVEIMHAMWRPQKFKAIYLMATLYVLTLTLPSAASVYWAFGDQLLTRSNALALLPRTAFRDAAVVLMLAHQFITFGFACTPLYFVWEKLVGLHDCRSLCRRAAARLPVVVPIWFLAIIFPFFGPINSAVGSLLVSFTVYIIPALAHMITFRSATARENAMEPPPRLLGRWTGAYMINAFVVAWVLVVGFGFGGWASMTNFVRQIDTFGLFTKCYQCPPPPPLPFPGGGLGNITMPFNGDGLPPTPAPSPAHYFFRHHRHHSHHRGL

SEQ ID NO: 7585 - DNA, 1460 bp, Zea mays subsp. mays
  misc_feature (1)..(1460): Ceres Seq. ID no. 12383521
  misc_feature (1)..(1460): Ortholog of  Ceres SEQ ID NO 14313943 as cited in SEQ ID NO 54725
actcggagagcgtgattatgctgcacgcgttgatttaacagctaaggtttatggtctacataaagcagaacagtatatcgagaaaattcctgcatctcataggagtgaggttgtgtatagaacacttctggcgaattgtgttgctgaaggcaatgtaaaaaaatcggagcaagtttttaataggatgaaggatcttggattcccagttacaacattttcttccaatcagcttctgctactctacaaaagattggacaagaaaaagattgctgatgttctcacaatgatggaaaaggaggatgtgaaaccatctatctttacttacaaggtccttgtagacgccaagggaatggttggagatgtagaagctatggagaaagtggttgaatcaatggtgaaagatggcattgagccagatctcacgtttaatgctacaattgccagacagtacatatttaatggtcagcgtgataaagcagagacacttttggagtcaatggagggtgatgatatccagaaaaaccgtgctgcttgcaagtttctattacctttatatgcttttctgggcaatggtgatgctgtggaaagaatttggaaggtgtgtgaggataatactcgtatagatgagtgcttgtctgctatagatgccttcggtaagcttggtaatgttgaaaaggcagagaaggtttttgaggatatgtttgtgaaatggaaaaacctctcttccaaatactacaccgctttgctaaaggtgtatgctaatcagaacctcttagacaagggtgaggaactagcaaagcggatggatgaggagggtgccaagtttgggaccccaactttgaatgcacttgtgaagctatatgctgacgctggagaggtggagaaagctgagtccctattgcacaagctatctctgaagaacaacgtcaagcccagttacagctcatacatgacactgcttgatagctactcgaagaaaggagacgtccacaactcggagaaagtgttcaacaagttgagacagataggctacactgggaggatcaggatgtaccagtttctgctccattcttatctacatgctaaggcccctgcgtatggattcaaagagaggatgaaggctgacaacattttccccaacagtgccgtggcaactctgattgccgctactgatccgttcgtcaagaagaaatcagtatcggacttgctcgattagattatggagtagtgtgaggtactgaggtccatcatgttgctatgcgcatgtgctgtttcgataagactatggagtagtgtgagaatatatggtgagataataacgtcttagtcttgtaatgaactaccattgactttgcatttagactcatgcgctttgctgaacttgagtcatagaaacaggataaagtgcacgagagagagagaacttgtgctaattcttgatataatattttttgttatcc

SEQ ID NO: 7586 - protein, 404 aa, Zea mays subsp. mays
  peptide (1)..(404): Ceres Seq. ID no. 12383522
LGERDYAARVDLTAKVYGLHKAEQYIEKIPASHRSEVVYRTLLANCVAEGNVKKSEQVFNRMKDLGFPVTTFSSNQLLLLYKRLDKKKIADVLTMMEKEDVKPSIFTYKVLVDAKGMVGDVEAMEKVVESMVKDGIEPDLTFNATIARQYIFNGQRDKAETLLESMEGDDIQKNRAACKFLLPLYAFLGNGDAVERIWKVCEDNTRIDECLSAIDAFGKLGNVEKAEKVFEDMFVKWKNLSSKYYTALLKVYANQNLLDKGEELAKRMDEEGAKFGTPTLNALVKLYADAGEVEKAESLLHKLSLKNNVKPSYSSYMTLLDSYSKKGDVHNSEKVFNKLRQIGYTGRIRMYQFLLHSYLHAKAPAYGFKERMKADNIFPNSAVATLIAATDPFVKKKSVSDLLD

SEQ ID NO: 7587 - protein, 343 aa, Zea mays subsp. mays
  peptide (1)..(343): Ceres Seq. ID no. 12383523
MKDLGFPVTTFSSNQLLLLYKRLDKKKIADVLTMMEKEDVKPSIFTYKVLVDAKGMVGDVEAMEKVVESMVKDGIEPDLTFNATIARQYIFNGQRDKAETLLESMEGDDIQKNRAACKFLLPLYAFLGNGDAVERIWKVCEDNTRIDECLSAIDAFGKLGNVEKAEKVFEDMFVKWKNLSSKYYTALLKVYANQNLLDKGEELAKRMDEEGAKFGTPTLNALVKLYADAGEVEKAESLLHKLSLKNNVKPSYSSYMTLLDSYSKKGDVHNSEKVFNKLRQIGYTGRIRMYQFLLHSYLHAKAPAYGFKERMKADNIFPNSAVATLIAATDPFVKKKSVSDLLD

SEQ ID NO: 7588 - protein, 310 aa, Zea mays subsp. mays
  peptide (1)..(310): Ceres Seq. ID no. 12383524
MMEKEDVKPSIFTYKVLVDAKGMVGDVEAMEKVVESMVKDGIEPDLTFNATIARQYIFNGQRDKAETLLESMEGDDIQKNRAACKFLLPLYAFLGNGDAVERIWKVCEDNTRIDECLSAIDAFGKLGNVEKAEKVFEDMFVKWKNLSSKYYTALLKVYANQNLLDKGEELAKRMDEEGAKFGTPTLNALVKLYADAGEVEKAESLLHKLSLKNNVKPSYSSYMTLLDSYSKKGDVHNSEKVFNKLRQIGYTGRIRMYQFLLHSYLHAKAPAYGFKERMKADNIFPNSAVATLIAATDPFVKKKSVSDLLD

SEQ ID NO: 7589 - DNA, 1169 bp, Zea mays subsp. mays
  misc_feature (1)..(1169): Ceres Seq. ID no. 12407205
  misc_feature (1)..(1169): Ortholog of  Ceres SEQ ID NO 13594416 as cited in SEQ ID NO 51058
  misc_feature (1)..(1169): Ortholog of  Ceres SEQ ID NO 15177991 as cited in SEQ ID NO 53915
  misc_feature (1)..(1169): Ortholog of  Ceres SEQ ID NO 15174347 as cited in SEQ ID NO 58577
  misc_feature (1)..(1169): Ortholog of  Ceres SEQ ID NO 13596609 as cited in SEQ ID NO 63070
  misc_feature (1)..(1169): Ortholog of  Ceres SEQ ID NO 12616895 as cited in SEQ ID NO 63909
  misc_feature (1)..(1169): Ortholog of  Ceres SEQ ID NO 14302096 as cited in SEQ ID NO 68356
  misc_feature (1)..(1169): Ortholog of  Ceres SEQ ID NO 13598574 as cited in SEQ ID NO 69083
atcaacccaacacggcgtccccgtcccgagtcaccaccgacccaagcaaaaccgcacgcaccctgccagcggccccccaactcccaacccaacccctactccagctagctcgcggcggcggccagcggccatggccttccggctgagcaacaacctgatcggggtcctaaacttcgtcaccttcctgctctccgtcccgatcctgggcgcgggcatctggctgggccaccgcgccgacggcaccgagtgcgagcgctacctctcggcgcccgtcatcgcgctgggggccttcctcctcgccgtctccctggcgggcctcgtcggcgcctgctgccgcgtcacctggctgctctgggcctacctcctcgccatgttcgtcctcatcctcgtcctcttctgcttcaccgtcttcgccttcgtcgtcaccaacaggggcgccggcgaggccgtctccggccgcggatacaaggagtaccgcctcggggactactccaactggctgcagaagcgcgtcgagaacaccaggaactgggaccggatcaggagctgcctccaggactccaaggtctgcaagagcctgcaggacaagaacgagaccgtcgcccagttcatgagttccagcctctcccccatcgagtctggctgctgcaagccccccaccagctgcggctacacctacgtcggcggcacggactggacgccggtgaccaccaactcgacggacccggactgcaagacctggagcaacgacgcctcggcgctctgctacaactgccagtcgtgcaaggccggcgtggtggccacgttccagcggaactggaagcgcgtcgccgtcgtctgcatcgtcttcctcgtcttcatcatcatcgtctactccgtcggctgctgcgccttcaggaacaaccgcagagacaacgcctaccgcggcgggtggaagggcgggtacgcttgatccaccatcgcgtcgtttaggagcggagccatgcacgcgcgctcggtgctctgctctgctccctgcccgccgctgtcgtcgtacgtacatgtttagtaggctcgttgtagctctgtacaggtgatggagatcgttgttgcggattcttatcgtcttcctggttacatacttacattattgttatgatctgatcagcggtaggttttgtatacgctgc

SEQ ID NO: 7590 - protein, 316 aa, Zea mays subsp. mays
  peptide (1)..(316): Ceres Seq. ID no. 12407206
STQHGVPVPSHHRPKQNRTHPASGPPTPNPTPTPASSRRRPAAMAFRLSNNLIGVLNFVTFLLSVPILGAGIWLGHRADGTECERYLSAPVIALGAFLLAVSLAGLVGACCRVTWLLWAYLLAMFVLILVLFCFTVFAFVVTNRGAGEAVSGRGYKEYRLGDYSNWLQKRVENTRNWDRIRSCLQDSKVCKSLQDKNETVAQFMSSSLSPIESGCCKPPTSCGYTYVGGTDWTPVTTNSTDPDCKTWSNDASALCYNCQSCKAGVVATFQRNWKRVAVVCIVFLVFIIIVYSVGCCAFRNNRRDNAYRGGWKGGYA

SEQ ID NO: 7591 - protein, 273 aa, Zea mays subsp. mays; identical to SEQ ID NO: 2104
  peptide (1)..(273): Ceres Seq. ID no. 12407207

SEQ ID NO: 7592 - protein, 193 aa, Zea mays subsp. mays
  peptide (1)..(193): Ceres Seq. ID no. 12407208
MFVLILVLFCFTVFAFVVTNRGAGEAVSGRGYKEYRLGDYSNWLQKRVENTRNWDRIRSCLQDSKVCKSLQDKNETVAQFMSSSLSPIESGCCKPPTSCGYTYVGGTDWTPVTTNSTDPDCKTWSNDASALCYNCQSCKAGVVATFQRNWKRVAVVCIVFLVFIIIVYSVGCCAFRNNRRDNAYRGGWKGGYA

SEQ ID NO: 7593 - DNA, 927 bp, Zea mays subsp. mays
  misc_feature (1)..(927): Ceres Seq. ID no. 12408690
  misc_feature (1)..(927): Ortholog of  Ceres SEQ ID NO 15179622 as cited in SEQ ID NO 61057
gtctcctcccgctccccttgcacccgaacccaagccccagtctccacgcgagcggcacacgacgggtgccctggcccccgcgccaccgccgccgctgcctcgcgacgccgccgtcgcggaacgggagctcctcctcgccggagattgactggtgcccggtgcctccggaccagctccccgtgaacgagtacgaggcgctcgcggcctccctgcccttctcctgggcggcggggggcctccgcgtctactgctcccgcctcgcgctcacgggcgccgccgtcgcgctcttcgtcgggctcccggtcgccgccttcgggggccgcggcggggccggcggcgacgctctgcacctcgcgctcggcgccacggggtccgggatcctcgccgtcacgctcgctgtcgtgcggatgtacctcgggtgggcctacgtcggcaaccgcctgctcagcgccacagtggagtatgaggaaacgggatggtatgatggtcagatatgggttaaaactccagaagttttagctcgtgatcggcttctaggctcattttctgtcaagcctgtgctaaacagggtgaagttcaccttggtgggtctggcaggctccctgatcctttgcattcttctgtacgtgaacacggaaaccccaaaggaaccttatggaaataccggtggaaggtctatcccgggagtgtacagcgacgctgctgcaaggtcgtttgagcccgatgcattctgtggagaacctgatttgtcgtagcatcgtaaagcgtggagcatggaaggtttgtagatggcggtatatggtctcacagggtatatacgggggtttctgtacggggtttctgatccatcaaactagggtaatgtaaatatttggccacacccacactagtatcgacattttagacgcaagcctcttatgaaaattc

SEQ ID NO: 7594 - protein, 250 aa, Zea mays subsp. mays
  peptide (1)..(250): Ceres Seq. ID no. 12408691
LLPLPLHPNPSPSLHASGTRRVPWPPRHRRRCLATPPSRNGSSSSPEIDWCPVPPDQLPVNEYEALAASLPFSWAAGGLRVYCSRLALTGAAVALFVGLPVAAFGGRGGAGGDALHLALGATGSGILAVTLAVVRMYLGWAYVGNRLLSATVEYEETGWYDGQIWVKTPEVLARDRLLGSFSVKPVLNRVKFTLVGLAGSLILCILLYVNTETPKEPYGNTGGRSIPGVYSDAAARSFEPDAFCGEPDLS

SEQ ID NO: 7595 - DNA, 1833 bp, Zea mays subsp. mays
  misc_feature (1)..(1833): Ceres Seq. ID no. 12406205
  misc_feature (1)..(1833): Ortholog of  Ceres SEQ ID NO 13599324 as cited in SEQ ID NO 0
aaaaagaagctagaacacgctaacaagacaacaaggtgagtagtttcttgctccaaccgccttacctgccgttgactcgcttgctgcctcggctcatggggcgctactacctgtaggatcatggggcgcgggcgcggccacctcctgctgccggcagcagccgcctgcctgtgggcgctgtcgtgcgcgctgctgctgcgcgcgtcccctcaccgcgctggcgccggcgccggcgggctgctgagggtcgggctcagcaggcgcggcggcgggctcgaccagcgcgcgctggcggcggccaaggccgcgaggcagcaggaggcaagccgtctcggggcctccgncggcggcgacgtccctctcgtcgactacctcaacacccagtactatggggtcgtcggcatcggcacaccgccgcagaacttcaccgtcatcttcgacaccggcagctccaacctctgggtcccctcctccagatgctacttctcgattgcctgctacctgcaccacagatacaagtcggccaagtctagcacgtacaaggcggacggcgagacctgcaagatcacctacggctccggctcgatcgccgggttcttcagcgacgacgacgtgctggtcggggacctgaccgtcaaaaaccagaagttcatcgagacaacgcgcgaaagcagcgtaacgttcataatcggcaagttcgacggcatcctcggtctcggataccccgagatctccgtcggcaaggctcctccgatctggcagagcatgcaggagcaggagctgctggcggaggacgtcttctccttctggctgaaccggagcccggacgcggacgcagcgtccggcggcgagctcgtcttcggcggcgtcgaccctgcgcacttcagcgggaaccacacctacgtccccgtctcccgcaagggatactggcagttcgacatgggggaccttctcatcgacggccactccaccggtttctgcgccaaggggtgcgctgccatcgtcgactccgggacttccttgctcgctggcccaacggccataattgcccaggtgaacgaagcgatcggggcagacgggatcatcancacggagtgcaaggnagttgtgagccagtacggagagatgatcctcgacatgctcatcgcacagacggatccacagagggtgtgcagccaggttggtctgtgcgtgttcgatggcgctcgatctgtcagcgaggggattgaatctgttgtcgggaaagaaaacctgggctcagatgtcatgtgctcggcctgtcagatggctgtcgtgtggatagagaaccagtccgcgaaaacaagaccaaggagntcatactgcagtacgctaaccagctgtgtgagcgtctgccgagccccaacggagagtcaacagtcagctgccaggagatctccaagatgcccagccttgcgttcaccatcgcaaacaagaccttcaccctaacacccgagcagtacattgtgaagctggagcaaggaggccaaaccgtctgcatcagtgggttcatggcgtatgacgtgccaccgccgcgtggtcctctctggattcttggggacgtcttcatgggagcttaccacacggtgttcgacttcggcaacgacaggattgnttcgcggaatctgcatgagtgtggagagcactctcatctttataaagacgataccctatgtattagggatgtgtagtttattgtctatccactacatgccaacagtacgccgcaaataaatcggtggccaaaattgctgaaaccagaaacgtgaacagtactgctttctttgtttctggagaagagcaaatggatgcttc

SEQ ID NO: 7596 - protein, 448 aa, Zea mays subsp. mays
  peptide (1)..(448): Ceres Seq. ID no. 12406206
  misc_feature (75)..(75): Xaa is any aa, unknown or other
  misc_feature (323)..(323): Xaa is any aa, unknown or other
  misc_feature (328)..(328): Xaa is any aa, unknown or other
  misc_feature (405)..(405): Xaa is any aa, unknown or other
MGRGRGHLLLPAAAACLWALSCALLLRASPHRAGAGAGGLLRVGLSRRGGGLDQRALAAAKAARQQEASRLGASXGGDVPLVDYLNTQYYGVVGIGTPPQNFTVIFDTGSSNLWVPSSRCYFSIACYLHHRYKSAKSSTYKADGETCKITYGSGSIAGFFSDDDVLVGDLTVKNQKFIETTRESSVTFIIGKFDGILGLGYPEISVGKAPPIWQSMQEQELLAEDVFSFWLNRSPDADAASGGELVFGGVDPAHFSGNHTYVPVSRKGYWQFDMGDLLIDGHSTGFCAKGCAAIVDSGTSLLAGPTAIIAQVNEAIGADGIIXTECKXVVSQYGEMILDMLIAQTDPQRVCSQVGLCVFDGARSVSEGIESVVGKENLGSDVMCSACQMAVVWIENQSAKTRPRXSYCSTLTSCVSVCRAPTESQQSAARRSPRCPALRSPSQTRPSP

SEQ ID NO: 7597 - protein, 233 aa, Zea mays subsp. mays
  peptide (1)..(233): Ceres Seq. ID no. 12406207
  misc_feature (108)..(108): Xaa is any aa, unknown or other
  misc_feature (113)..(113): Xaa is any aa, unknown or other
  misc_feature (190)..(190): Xaa is any aa, unknown or other
MQEQELLAEDVFSFWLNRSPDADAASGGELVFGGVDPAHFSGNHTYVPVSRKGYWQFDMGDLLIDGHSTGFCAKGCAAIVDSGTSLLAGPTAIIAQVNEAIGADGIIXTECKXVVSQYGEMILDMLIAQTDPQRVCSQVGLCVFDGARSVSEGIESVVGKENLGSDVMCSACQMAVVWIENQSAKTRPRXSYCSTLTSCVSVCRAPTESQQSAARRSPRCPALRSPSQTRPSP

SEQ ID NO: 7598 - DNA, 1732 bp, Zea mays subsp. mays
  misc_feature (1)..(1732): Ceres Seq. ID no. 12373520
  misc_feature (1)..(1732): Ortholog of  Ceres SEQ ID NO 14311854 as cited in SEQ ID NO 51455
  misc_feature (1)..(1732): Ortholog of  Ceres SEQ ID NO 14313097 as cited in SEQ ID NO 58902
aaaatcaaacagaaccggagtgtcagattcagaaacaataggcagcagctagagcaagcagcatcgcagcatcgcagcagacgccaccgtcacgccaccgcgccgagagagaaaagccgagcggtggcaggcgaggggacgcctgccgcggtgggttggtgggtgccgcctccgcatccggtgccgctgctctgttcctcagtccgcccccatttacctcgcatggattcctgcttgcttctccccaactccacgcgccgatcctccaacctccaggagagcgcgacgcgatccaattgaggtccaggaggtggagggtgcctgcgctgtccgtgtgttcccctttgtttccatcccaagcctggccgcgccgccgctggacgccatcgcgcgcctgcacagcgtcttggtgaggtggtcgaagcagcggcggcggccgcagctcgggagacccggcgcgaggaagcggtggccgagccggcggagcgcgatgctgtgggtggcgcgcctgtccggcttgttatccgccgccatggtggtggtggtgctgtcgccgtcgctccagtccttcccgcccgccgaggccatccggtcgtcgcagttcgacggcagcgtccgcttcccgggacagatcgcagggggcgccaggggggtcgccttccgccgcgccccgccgttccgcaatgccgccgactgcggcgccggcgcggacaacggcaccggcgccaatgtctgctacccatggctcgtccacatcgcgattacgctcgacaacgaatacctgaggggctccgtcgccgcggtccactcggtggtgcagcacgccaggtgccccgagagcgtcttcttccacttcctcgtctccgacccggggctcggggacctcgtccgcgcggtgttcccgcagctccggttcaaggtctactacctggaccccgggcgcgtccgcgggctcatctccacgtcggtgcggcaggcgctggagcagccgctgaactacgcgcgcaactacctggccgagctcctggagccgtgcgtgcgccgcgccatctacctggactccgacctcgtcgtcgtggacgacgtcgccaagctgtggcgcaccgacctcggcgggcgcaccgtgggcgcgcccgagtactgccacgccaacttcaccaagtacttcacggggcggttctggtcggaccagcggttcgccgggacgttcgcggggcggcggccgtgctacttcaacacgggcgtcatggtggtcgacctggagcggtggcggcaggcgggctacacgcagcgcatcgagcggtggatggaggtacagaagtcggcggcggggcgcatctacgagctggggtcgctgccgcccttcctgctggtgttcgcggggcacgtggcgccgatcgagcaccggtggaaccagcacggcctcggcggcgacaatgtcctgggcagctgccgcgacctgcacccggggcccgtgagcctgctgcattggtccgggtccggcaagccgtgggcgcggctgggcgccgggcggccgtgcccgctcgatgcgctctgggcacccttcgacctgtacggccccggccccggcggcggcgccgaggaggacctacatgtttttttattcgcaaaaaacaaactatatgttctccatcttttttttcttcttcttttcccctttgggctgttggattaaatgttttgtgttagattgttcatgttcgttctcggc

SEQ ID NO: 7599 - protein, 401 aa, Zea mays subsp. mays
  peptide (1)..(401): Ceres Seq. ID no. 12373521
MLWVARLSGLLSAAMVVVVLSPSLQSFPPAEAIRSSQFDGSVRFPGQIAGGARGVAFRRAPPFRNAADCGAGADNGTGANVCYPWLVHIAITLDNEYLRGSVAAVHSVVQHARCPESVFFHFLVSDPGLGDLVRAVFPQLRFKVYYLDPGRVRGLISTSVRQALEQPLNYARNYLAELLEPCVRRAIYLDSDLVVVDDVAKLWRTDLGGRTVGAPEYCHANFTKYFTGRFWSDQRFAGTFAGRRPCYFNTGVMVVDLERWRQAGYTQRIERWMEVQKSAAGRIYELGSLPPFLLVFAGHVAPIEHRWNQHGLGGDNVLGSCRDLHPGPVSLLHWSGSGKPWARLGAGRPCPLDALWAPFDLYGPGPGGGAEEDLHVFLFAKNKLYVLHLFFLLLFPFGLLD

SEQ ID NO: 7600 - protein, 387 aa, Zea mays subsp. mays
  peptide (1)..(387): Ceres Seq. ID no. 12373522
MVVVVLSPSLQSFPPAEAIRSSQFDGSVRFPGQIAGGARGVAFRRAPPFRNAADCGAGADNGTGANVCYPWLVHIAITLDNEYLRGSVAAVHSVVQHARCPESVFFHFLVSDPGLGDLVRAVFPQLRFKVYYLDPGRVRGLISTSVRQALEQPLNYARNYLAELLEPCVRRAIYLDSDLVVVDDVAKLWRTDLGGRTVGAPEYCHANFTKYFTGRFWSDQRFAGTFAGRRPCYFNTGVMVVDLERWRQAGYTQRIERWMEVQKSAAGRIYELGSLPPFLLVFAGHVAPIEHRWNQHGLGGDNVLGSCRDLHPGPVSLLHWSGSGKPWARLGAGRPCPLDALWAPFDLYGPGPGGGAEEDLHVFLFAKNKLYVLHLFFLLLFPFGLLD

SEQ ID NO: 7601 - protein, 322 aa, Zea mays subsp. mays
  peptide (1)..(322): Ceres Seq. ID no. 12373523
MARPHRDYARQRIPEGLRRRGPLGGAARQVPRERLLPLPRLRPGARGPRPRGVPAAPVQGLLPGPRARPRAHLHVGAAGAGAAAELRAQLPGRAPGAVRAPRHLPGLRPRRRGRRRQAVAHRPRRAHRGRARVLPRQLHQVLHGAVLVGPAVRRDVRGAAAVLLQHGRHGGRPGAVAAGGLHAAHRAVDGGTEVGGGAHLRAGVAAALPAGVRGARGADRAPVEPARPRRRQCPGQLPRPAPGAREPAALVRVRQAVGAAGRRAAVPARCALGTLRPVRPRPRRRRRGGPTCFFIRKKQTICSPSFFSSSFPLWAVGLNVLC

SEQ ID NO: 7602 - DNA, 1901 bp, Zea mays subsp. mays
  misc_feature (1)..(1901): Ceres Seq. ID no. 12372730
  misc_feature (1)..(1901): Ortholog of  Ceres SEQ ID NO 15174947 as cited in SEQ ID NO 236
gcacgagaccattacctagaacatcctaatcgaaaaatcgatacgatgcatgaaaaaggcttaaagagcgcatgcaagctaagcagccatgcccatgccaagatctttccttctccacctcctccttgtcgccagcggcatcgccaatgccggcggcgccgatgacgccctctcgaaggagcccacgccctcctcattccagggagaatggcagctcctccacgcgagcatcggcgtctcggcgatgcacatgcagctgctcccgggagacttggttctcatgttcgaccgcaccgacacgggactctccaacatctcgctcgccgcgctggcgccgtgcgcggcgacccccgacagcgccgactgcacggcgcactcggtgctcctcgacctccgctccaacgtgctgcacccgtacccgctcgccaccaacccgtggtgctcctcgggcgcgctcctccccaacggcacgctcctccagaccggcggcttctccaacggcgaccgcgtcgcgcggctcttctccccggccacggggctgggtcgagctcccgtcgttcctcgccgcgcggaggtggtacgccaccgacatgatccttcccgacgggcgcgtgctcatcctcggcgggcggcgacagttcaacctcgagtacttcccgcacgacggcgcggcgccggcgctgacgttcttcccgttcctggacgagaccacagagccggacgccgagaacaacctgtacccgttcctccacctcctccccgacggcaccgtcttcgtcttcgccaacgaccgcgccgtcgtcttcgacccctacaaccgcgccccgctccggtggctccccgccgtcccgggcggcgtgccgaggaactacccgtcgtccggctcgtccgtgctcctcccgctccgcccggacgcgcccgagcacgccgaggtgctggtctgcggcggcgcgccgcgcggcgcgtaccagctggcgctgcggaacggcacgttcgtgcccgccgaccggacctgcgcccgcgtcgcgccgacggacccggacccagtgtgggcgatcgaggagatgccgctggccagggtgatgggcgacatggtgctgctccccacgggcgacgtgctgatcgtgaacggcgcgncggcggggaccgccgggtgggagctgggccgggagcccgtcacgcggccggtgctgtacaggcccgacgcgccactgggcgcgcggttcgaggcgtcgctggcggcgtcggtggtcccgcgcatgtaccactcgtcggccgcgctggacacgtacggccgcgtgctcgtgggcggcagcaacccgcacgtcgggtacgtgttcaccaacgtgacgcaccccacggagctgagcctggaggcgttcctgccgccgtacatggacccacggcacgacggcgcgcggccgcgggtgctggcggcgccggcagaggtcgggtacggcgaggccacggccgtgcggttcgggatacccgcgggggcggcggatggcgcggctacgggcgaagaggtgcgggtggccgcggtggctccggcgtttgcgacgcactcgttcgggatgaaccagcgcgtggtggagctcgcggtggtgaggatcgcgcagctggacgtcggtgtttacgaggtcgaggtcgccgcgccaccgacgcccggggtggcgccgcccgggtactacatgtggttcgtagtgcacgccggcgtgcccagcagcgccgcgtgggtgcgcatgcggccgctaggaacaggcgcctgagtagctcagactgagggctgatttggtcctcgttggtcaccaaaccagccccgagactttttgcgttctccatgtgtgttttgacttcagtaggacagattcaggttcaactgcacatcaaggtttgcaatg

SEQ ID NO: 7603 - protein, 565 aa, Zea mays subsp. mays
  peptide (1)..(565): Ceres Seq. ID no. 12372731
  misc_feature (356)..(356): Xaa is any aa, unknown or other
MQAKQPCPCQDLSFSTSSLSPAASPMPAAPMTPSRRSPRPPHSRENGSSSTRASASRRCTCSCSRETWFSCSTAPTRDSPTSRSPRWRRARRPPTAPTARRTRCSSTSAPTCCTRTRSPPTRGAPRARSSPTARSSRPAASPTATASRGSSPRPRGWVELPSFLAARRWYATDMILPDGRVLILGGRRQFNLEYFPHDGAAPALTFFPFLDETTEPDAENNLYPFLHLLPDGTVFVFANDRAVVFDPYNRAPLRWLPAVPGGVPRNYPSSGSSVLLPLRPDAPEHAEVLVCGGAPRGAYQLALRNGTFVPADRTCARVAPTDPDPVWAIEEMPLARVMGDMVLLPTGDVLIVNGAXAGTAGWELGREPVTRPVLYRPDAPLGARFEASLAASVVPRMYHSSAALDTYGRVLVGGSNPHVGYVFTNVTHPTELSLEAFLPPYMDPRHDGARPRVLAAPAEVGYGEATAVRFGIPAGAADGAATGEEVRVAAVAPAFATHSFGMNQRVVELAVVRIAQLDVGVYEVEVAAPPTPGVAPPGYYMWFVVHAGVPSSAAWVRMRPLGTGA

SEQ ID NO: 7604 - protein, 564 aa, Zea mays subsp. mays
  peptide (1)..(564): Ceres Seq. ID no. 12372732
  misc_feature (350)..(350): Xaa is any aa, unknown or other
MPMPRSFLLHLLLVASGIANAGGADDALSKEPTPSSFQGEWQLLHASIGVSAMHMQLLPGDLVLMFDRTDTGLSNISLAALAPCAATPDSADCTAHSVLLDLRSNVLHPYPLATNPWCSSGALLPNGTLLQTGGFSNGDRVARLFSPATGLGRAPVVPRRAEVVRHRHDPSRRARAHPRRAATVQPRVLPARRRGAGADVLPVPGRDHRAGRREQPVPVPPPPPRRHRLRLRQRPRRRLRPLQPRPAPVAPRRPGRRAEELPVVRLVRAPPAPPGRARARRGAGLRRRAARRVPAGAAERHVRARRPDLRPRRADGPGPSVGDRGDAAGQGDGRHGAAPHGRRADRERRXGGDRRVGAGPGARHAAGAVQARRATGRAVRGVAGGVGGPAHVPLVGRAGHVRPRARGRQQPARRVRVHQRDAPHGAEPGGVPAAVHGPTARRRAAAGAGGAGRGRVRRGHGRAVRDTRGGGGWRGYGRRGAGGRGGSGVCDALVRDEPARGGARGGEDRAAGRRCLRGRGRRATDARGGAARVLHVVRSARRRAQQRRVGAHAAARNRRLSSSD

SEQ ID NO: 7605 - protein, 562 aa, Zea mays subsp. mays
  peptide (1)..(562): Ceres Seq. ID no. 12372733
  misc_feature (348)..(348): Xaa is any aa, unknown or other
MPRSFLLHLLLVASGIANAGGADDALSKEPTPSSFQGEWQLLHASIGVSAMHMQLLPGDLVLMFDRTDTGLSNISLAALAPCAATPDSADCTAHSVLLDLRSNVLHPYPLATNPWCSSGALLPNGTLLQTGGFSNGDRVARLFSPATGLGRAPVVPRRAEVVRHRHDPSRRARAHPRRAATVQPRVLPARRRGAGADVLPVPGRDHRAGRREQPVPVPPPPPRRHRLRLRQRPRRRLRPLQPRPAPVAPRRPGRRAEELPVVRLVRAPPAPPGRARARRGAGLRRRAARRVPAGAAERHVRARRPDLRPRRADGPGPSVGDRGDAAGQGDGRHGAAPHGRRADRERRXGGDRRVGAGPGARHAAGAVQARRATGRAVRGVAGGVGGPAHVPLVGRAGHVRPRARGRQQPARRVRVHQRDAPHGAEPGGVPAAVHGPTARRRAAAGAGGAGRGRVRRGHGRAVRDTRGGGGWRGYGRRGAGGRGGSGVCDALVRDEPARGGARGGEDRAAGRRCLRGRGRRATDARGGAARVLHVVRSARRRAQQRRVGAHAAARNRRLSSSD

SEQ ID NO: 7606 - DNA, 1279 bp, Zea mays subsp. mays
  misc_feature (1)..(1279): Ceres Seq. ID no. 12355346
  misc_feature (1)..(1279): Ortholog of  Ceres SEQ ID NO 13656486 as cited in SEQ ID NO 69202
aaaaatactcccgtgttcttcgaccggcggcggtggtgcgaagcgaggcggtaagggagacgagatgagggggacgaagcggccgctcggcgtggtgacgtcgtgggtgcggcggcagccgcccaaggtgaaggccttccttgccgttgtcaccggcatggccgcgctcgtcttcatccgcttcatcgtccacgaccacgacaacctcttcgtcgctgccgaggctgcgcacgcgctcggcataggcgtcctcatctacaagctaaccaaggagaagacctgcgccggactatccctcaagtctcaggatttaactgcattatttctagctgttagactgtactgcagctttgtcatggagtatgacatccatacaattctggacactgctacacttgtagccacactgtttgttatttatatgatacggttcaaactgaggtcaacttatatggtggataaggataactttgcgttgtattatgtggtgttaccgtgtgctggactggcactacttattcatccgtcaacatctcataacattgtgaaccggatctcctgggggttctgtgtttacttggaagctgtttcagtgcttccgcagttacacttgatgcaaaatactaagattgttgaaccctttacagctcactatgtatttgcattgggagttgcaaggtttcttagctgcgcccactgggttctacaggttttggacacgcgtggtcgtctgttgacagctcttggctatggtttgtggccgtctatggtgcttttatcagaaatcgtgcagacattcatccttgcagatttctgctactactatgtgaagagtcttgttggtgggcaactggtgctacggcttccctcaggggtggtgtaagaagtgcagaaggatactttgaataacagttatgctctagtgcccaacctgggagccttttttttagctgatgatgttgcaagtaatgactatgtattacaaaattgctgcaagggtcctcttaaaacatagtttgtcattgagacttcatagctgcgccgtttcttgatgcccaatctccgagtactagcttcgtgtgactgtcgtggtggtcttagaatcaggtggttagtgatctcattggattatagtagtataattatataatgctttcatatgaaacagattgatcttgatgtatcagcagaactagccacgtgaaaatggttggaccaaggtcatcaggtttgtatttacttaacattgggattatcaataggggttcctttctggtcc

SEQ ID NO: 7607 - protein, 293 aa, Zea mays subsp. mays
  peptide (1)..(293): Ceres Seq. ID no. 12355347
KILPCSSTGGGGAKRGGKGDEMRGTKRPLGVVTSWVRRQPPKVKAFLAVVTGMAALVFIRFIVHDHDNLFVAAEAAHALGIGVLIYKLTKEKTCAGLSLKSQDLTALFLAVRLYCSFVMEYDIHTILDTATLVATLFVIYMIRFKLRSTYMVDKDNFALYYVVLPCAGLALLIHPSTSHNIVNRISWGFCVYLEAVSVLPQLHLMQNTKIVEPFTAHYVFALGVARFLSCAHWVLQVLDTRGRLLTALGYGLWPSMVLLSEIVQTFILADFCYYYVKSLVGGQLVLRLPSGVV

SEQ ID NO: 7608 - protein, 272 aa, Zea mays subsp. mays
  peptide (1)..(272): Ceres Seq. ID no. 12355348
MRGTKRPLGVVTSWVRRQPPKVKAFLAVVTGMAALVFIRFIVHDHDNLFVAAEAAHALGIGVLIYKLTKEKTCAGLSLKSQDLTALFLAVRLYCSFVMEYDIHTILDTATLVATLFVIYMIRFKLRSTYMVDKDNFALYYVVLPCAGLALLIHPSTSHNIVNRISWGFCVYLEAVSVLPQLHLMQNTKIVEPFTAHYVFALGVARFLSCAHWVLQVLDTRGRLLTALGYGLWPSMVLLSEIVQTFILADFCYYYVKSLVGGQLVLRLPSGVV

SEQ ID NO: 7609 - protein, 241 aa, Zea mays subsp. mays
  peptide (1)..(241): Ceres Seq. ID no. 12355349
MAALVFIRFIVHDHDNLFVAAEAAHALGIGVLIYKLTKEKTCAGLSLKSQDLTALFLAVRLYCSFVMEYDIHTILDTATLVATLFVIYMIRFKLRSTYMVDKDNFALYYVVLPCAGLALLIHPSTSHNIVNRISWGFCVYLEAVSVLPQLHLMQNTKIVEPFTAHYVFALGVARFLSCAHWVLQVLDTRGRLLTALGYGLWPSMVLLSEIVQTFILADFCYYYVKSLVGGQLVLRLPSGVV

SEQ ID NO: 7610 - DNA, 1567 bp, Zea mays subsp. mays
  misc_feature (1)..(1567): Ceres Seq. ID no. 12405983
  misc_feature (1)..(1567): Ortholog of  Ceres SEQ ID NO 15225341 as cited in SEQ ID NO 55222
  misc_feature (1)..(1567): Ortholog of  Ceres SEQ ID NO 14311755 as cited in SEQ ID NO 57271
  misc_feature (1)..(1567): Ortholog of  Ceres SEQ ID NO 15171156 as cited in SEQ ID NO 58259
  misc_feature (1)..(1567): Ortholog of  Ceres SEQ ID NO 14302212 as cited in SEQ ID NO 66507
  misc_feature (1)..(1567): Ortholog of  Ceres SEQ ID NO 13653980 as cited in SEQ ID NO 69253
aactctatacagaaaccctggtctgaaagccctcactccaaatctcgcgcactgtcagctgacgccaccgcctgcgccagccctcgccaagccggtgaaaacctcgtgccctccgccgcctccgcccgcctcttccagagtaccgcggtctcatctcctcccgggacgggcatgcagagcacggctgccatcggtctcgttcggccatgcgccgcgcggccactccccacctaccctagcccacggcgcggcgccggcgcgtgcagcggcgccgcacagccgatcctcgcgccccgcggcctctgcctctccgcccgcgccagcctactgccggactcgccgctggaggaggagtaccggagatgcagggccggccggcacgtggccgcggccgggaaggtggcggcggctgatggggccgtagaggaagcggggggagggctcgtcaagacgctgcagctggggtcgctcttcgggctctggtacctcttcaacatctacttcaacatctacaacaagcaggttctgaaggttctgccataccctataaacatcaccacagtgcagtttgccgttggaagtgcccattgctttgtttatgtggatcaccggtatccttaaaaggccaaagatttctggtgcccagctttttgctatccttcctctagctatcgttcataccatgggcaatcttttcacaaacatgagccttggaaaggttgcggtgtcatttacacatactatcaaggccatggaacctttcttctcagttctcctttcagcaattttccttggtgagttgcctacgccttgggttgtgttgtctcttcttccgatcgttggtggtgtggcattggcatcccttactgaggcctcctttaactgggctggattttggagtgcaatggcttcaaatgtaaccttccagtcaaggaatgtgctaagcaagaaacttatggtgaagaaagaggaatctctcgacaacattaatctattttcgataattacagtcatgtcattcttcctgttggccccggtaaccttacttacagaaggtgttaaagttagtccagcagttttgcagtctgctggtttgaacttgaaacagatatacacaaggtcattgattgctgcatgctgcttccatgcataccaacaggtgtcatacatgatcctcgccagggtatccccagtcacacattcagtgggcaattgcgtcaagcgtgtggtggtcattgtgacctcggttctgttcttcaggacccctgtttctcccatcaactcactcggtaccgggatcgctcttgctggagttttcctatactcgcaattgaagaggcttaagcccaagcccaaggctgcttgatcatagacctttgcaggtccatccaatagaacttttgaagttatgctatgccattggaatgattagtgagtgccgtagttagaatgatgtttaaagaagagctaccacttcagcagataatttgtgacttgcttgcattttttggacggatttgttcgtgtattaataattttgcagtgacgatacttctgttgtgctgct

SEQ ID NO: 7611 - protein, 255 aa, Zea mays subsp. mays; identical to SEQ ID NO: 3242
  peptide (1)..(255): Ceres Seq. ID no. 12405984

SEQ ID NO: 7612 - protein, 227 aa, Zea mays subsp. mays; identical to SEQ ID NO: 3243
  peptide (1)..(227): Ceres Seq. ID no. 12405985

SEQ ID NO: 7613 - protein, 220 aa, Zea mays subsp. mays; identical to SEQ ID NO: 3244
  peptide (1)..(220): Ceres Seq. ID no. 12405986

SEQ ID NO: 7614 - DNA, 1555 bp, Zea mays subsp. mays
  misc_feature (1)..(1555): Ceres Seq. ID no. 12352532
  misc_feature (1)..(1555): Ortholog of  Ceres SEQ ID NO 12609146 as cited in SEQ ID NO 52118
  misc_feature (1)..(1555): Ortholog of  Ceres SEQ ID NO 13638136 as cited in SEQ ID NO 58644
  misc_feature (1)..(1555): Ortholog of  Ceres SEQ ID NO 15177947 as cited in SEQ ID NO 60308
  misc_feature (1)..(1555): Ortholog of  Ceres SEQ ID NO 15225826 as cited in SEQ ID NO 64774
  misc_feature (1)..(1555): Ortholog of  Ceres SEQ ID NO 13595885 as cited in SEQ ID NO 69265
  misc_feature (1)..(1555): Ortholog of  Ceres SEQ ID NO 13599119 as cited in SEQ ID NO 0
ctcttcgccttttcctcccctactttttcctgctactgttcacgctctacagtacggaggctcctacgtgcaggtagctcccaggaccagatccgaaccctaaccctagccaatttggtcggtgatggaagagcacgtgcctcgaggcggcggcggcgggaggcccccgatcccggcggcggcggcgaggaagccggcgctcgcgcggcactcctcttttgtgaggagtcctgcaaacaatacaaagcctgcaactgagagagcttttgaaggcatggacactgaatttatccctattgtacgatctggtgggtgggctgatattggctccaggcacacaatggaggatgtctttatctgctttgataatttcatgcaagattttggaattgaaagttttgaagaaggacccagtgccttttatgggatttttgatgggcatggtggaaagcatgcagctgattttgtgtgcagtaatttaccaaggtttattgtcgaggatgaggattttcctagggagatagtgaaagcaatgtcctctgcattcttgcaggctgatgcttcttttgcagatgcttgttctctgaactgctctctttcttctggtacaactgctcttgcagcacttgtggttgggagatcacttctggtcgcgaatgctggtgactgccgagcagtactttgtcgtcgtggaaaggcaattgagatgtccagggatcacaaaccatcttgcaacagggagaagatacgtattgaggcattgggtggatatgtcgatgatggctacctgaatgggcagcttaatgtcgctcgagcaattggggactggcatatggaaggcatgaaggcatgtggtggtcttggtcctcttactgccgagcctgaggtaatgacaatggatctaactgatgaggacgaattcctgatcatgggctgtgatgggatctgggatgtattcctcagccaaaatgcagtagattttgctcgccgtaagctccaagaacacaatgacccggctgcctgctgtaaagaactagttgatgaggccattaagaggaagagtggtgataacctttctgtggttgtcgtctgcttcaactctaggccgcctcctgttctaacaactcctaggcctcgtgtacagaggagcatatctgcagaaggcctgagagagctgcagagcttccttgatagtttggccgattgacatggggttctagcagccccactataagttttgacattttccatagcttagcttggaaaataggtttagcatgtgctgtctcataacttcgctgagatggctgctgttgagtaatctagagttgtaaaatatgctgcggctaactgtgtcagcagttgagagcgtttatcagttgagagtatttatcagcatgttgactttgtgagtcctgaatgattagtcggcatttcttaggtctccataaatcggtggttcatcgttgtaaaaggctgttaatgcccttggatattttcctgtattgttcgctttggacaagttattaactgggaaaactgctgtttttgctgc

SEQ ID NO: 7615 - protein, 360 aa, Zea mays subsp. mays
  peptide (1)..(360): Ceres Seq. ID no. 12352533
MEEHVPRGGGGGRPPIPAAAARKPALARHSSFVRSPANNTKPATERAFEGMDTEFIPIVRSGGWADIGSRHTMEDVFICFDNFMQDFGIESFEEGPSAFYGIFDGHGGKHAADFVCSNLPRFIVEDEDFPREIVKAMSSAFLQADASFADACSLNCSLSSGTTALAALVVGRSLLVANAGDCRAVLCRRGKAIEMSRDHKPSCNREKIRIEALGGYVDDGYLNGQLNVARAIGDWHMEGMKACGGLGPLTAEPEVMTMDLTDEDEFLIMGCDGIWDVFLSQNAVDFARRKLQEHNDPAACCKELVDEAIKRKSGDNLSVVVVCFNSRPPPVLTTPRPRVQRSISAEGLRELQSFLDSLAD

SEQ ID NO: 7616 - protein, 310 aa, Zea mays subsp. mays
  peptide (1)..(310): Ceres Seq. ID no. 12352534
MDTEFIPIVRSGGWADIGSRHTMEDVFICFDNFMQDFGIESFEEGPSAFYGIFDGHGGKHAADFVCSNLPRFIVEDEDFPREIVKAMSSAFLQADASFADACSLNCSLSSGTTALAALVVGRSLLVANAGDCRAVLCRRGKAIEMSRDHKPSCNREKIRIEALGGYVDDGYLNGQLNVARAIGDWHMEGMKACGGLGPLTAEPEVMTMDLTDEDEFLIMGCDGIWDVFLSQNAVDFARRKLQEHNDPAACCKELVDEAIKRKSGDNLSVVVVCFNSRPPPVLTTPRPRVQRSISAEGLRELQSFLDSLAD

SEQ ID NO: 7617 - protein, 288 aa, Zea mays subsp. mays
  peptide (1)..(288): Ceres Seq. ID no. 12352535
MEDVFICFDNFMQDFGIESFEEGPSAFYGIFDGHGGKHAADFVCSNLPRFIVEDEDFPREIVKAMSSAFLQADASFADACSLNCSLSSGTTALAALVVGRSLLVANAGDCRAVLCRRGKAIEMSRDHKPSCNREKIRIEALGGYVDDGYLNGQLNVARAIGDWHMEGMKACGGLGPLTAEPEVMTMDLTDEDEFLIMGCDGIWDVFLSQNAVDFARRKLQEHNDPAACCKELVDEAIKRKSGDNLSVVVVCFNSRPPPVLTTPRPRVQRSISAEGLRELQSFLDSLAD

SEQ ID NO: 7618 - DNA, 1603 bp, Zea mays subsp. mays
  misc_feature (1)..(1603): Ceres Seq. ID no. 13498922
  misc_feature (1)..(1603): Ortholog of  Ceres SEQ ID NO 13590739 as cited in SEQ ID NO 66960
acaggtcgcaacaaccccaacgagcaaaccccccatttgccaccaaccccgacgaccggcgatgaccggcacggtgtctaagctggcggcgccccgtccggcggcaccgccgctccggccggcgtccctccgcaccgccgccctcgccttcgccccctccgcgcgccgggtccgcgtctccgtcgccgggcgagccaggagccccatcattgcgatggcttcggccaaggaaggaaatggtgcaccgaccaagaggactgcgcttcatgatctctacgagctccagggcctgtccccgtggtacgacaacctatgccgccctgtcacagacttgctgcccattatcgccagcggcgtccgtggagtcaccagcaacccaacgattttccaaaaggccatttcatcgtccagcgcatatgatgatcagttcaagcagctcatttcggctggaaaggacgcggagagcgcttactgggaactcgttataaaggatatccaagatgcgtgcaaactttttgagcccatctacgatgagactgatggggctgatgggtatgtctccgtagaggtgtctcctaggttggcaaatgacactcaaggaactgttgaagcggcaaagtggttacacaaagtggtcaaccgccccaatgtctacataaagatcccagctactgcagaatgtgttccttccatccaggaagttatcgctaatggcattagcgtcaacgtcacgcttattttctcaattgcaagatatgaggctgtgattgatgcttacctcgatgggctagaggcttctggcttgagtgacttatcccgagttactagcgttgcatccttctttgtcagccgagtggacacccttattgacaaaatgcttgacaagattggaacacctgaggcccttgccttgagaggaaaggctgcagtagcacaggccaaactagcaaatcggctctaccagaagaaattctctggcccaaggtgggaggcgttggccaagaaaggtgccaagaaacaaaggttgttgtgggcatccaccggtgtcaagaacccagcttatcctgacactctttatgtggacagtctcatcggacctgacacggtcaacacgatgcccgaccaagctttgcaagcattcatagaccacggcaccgtttcaaggacagttgatgcgaacgtgtctgaggcggaaggtgtatacagtgccttggagaagcttggcatcgactgggaagaggttggaaagcagcttgagctggaaggcgtggactccttcaagaagagctttgacagcctactcgtgagcctgcaggagaagggcaacagcctcaagatggcgagtgtgtaaagctgagaagattgggtacctgcgagtgaacgattttactaaataaaatgctagcttgctggctctcctcttagtttttacgctgtacctttgctctcaattttctgagtcggctttgtatcccaggcttgccagaacgtcattgtgtagccactgttcatggcttgtaattgctacggggtatccgataacgtcattgtggatgaggcctgtttgccctgactcttgaactcaatgtcgccatggtttgct

SEQ ID NO: 7619 - protein, 449 aa, Zea mays subsp. mays
  peptide (1)..(449): Ceres Seq. ID no. 13498923
QVATTPTSKPPICHQPRRPAMTGTVSKLAAPRPAAPPLRPASLRTAALAFAPSARRVRVSVAGRARSPIIAMASAKEGNGAPTKRTALHDLYELQGLSPWYDNLCRPVTDLLPIIASGVRGVTSNPTIFQKAISSSSAYDDQFKQLISAGKDAESAYWELVIKDIQDACKLFEPIYDETDGADGYVSVEVSPRLANDTQGTVEAAKWLHKVVNRPNVYIKIPATAECVPSIQEVIANGISVNVTLIFSIARYEAVIDAYLDGLEASGLSDLSRVTSVASFFVSRVDTLIDKMLDKIGTPEALALRGKAAVAQAKLANRLYQKKFSGPRWEALAKKGAKKQRLLWASTGVKNPAYPDTLYVDSLIGPDTVNTMPDQALQAFIDHGTVSRTVDANVSEAEGVYSALEKLGIDWEEVGKQLELEGVDSFKKSFDSLLVSLQEKGNSLKMASV

SEQ ID NO: 7620 - protein, 429 aa, Zea mays subsp. mays
  peptide (1)..(429): Ceres Seq. ID no. 13498924
MTGTVSKLAAPRPAAPPLRPASLRTAALAFAPSARRVRVSVAGRARSPIIAMASAKEGNGAPTKRTALHDLYELQGLSPWYDNLCRPVTDLLPIIASGVRGVTSNPTIFQKAISSSSAYDDQFKQLISAGKDAESAYWELVIKDIQDACKLFEPIYDETDGADGYVSVEVSPRLANDTQGTVEAAKWLHKVVNRPNVYIKIPATAECVPSIQEVIANGISVNVTLIFSIARYEAVIDAYLDGLEASGLSDLSRVTSVASFFVSRVDTLIDKMLDKIGTPEALALRGKAAVAQAKLANRLYQKKFSGPRWEALAKKGAKKQRLLWASTGVKNPAYPDTLYVDSLIGPDTVNTMPDQALQAFIDHGTVSRTVDANVSEAEGVYSALEKLGIDWEEVGKQLELEGVDSFKKSFDSLLVSLQEKGNSLKMASV

SEQ ID NO: 7621 - protein, 378 aa, Zea mays subsp. mays
  peptide (1)..(378): Ceres Seq. ID no. 13498925
MASAKEGNGAPTKRTALHDLYELQGLSPWYDNLCRPVTDLLPIIASGVRGVTSNPTIFQKAISSSSAYDDQFKQLISAGKDAESAYWELVIKDIQDACKLFEPIYDETDGADGYVSVEVSPRLANDTQGTVEAAKWLHKVVNRPNVYIKIPATAECVPSIQEVIANGISVNVTLIFSIARYEAVIDAYLDGLEASGLSDLSRVTSVASFFVSRVDTLIDKMLDKIGTPEALALRGKAAVAQAKLANRLYQKKFSGPRWEALAKKGAKKQRLLWASTGVKNPAYPDTLYVDSLIGPDTVNTMPDQALQAFIDHGTVSRTVDANVSEAEGVYSALEKLGIDWEEVGKQLELEGVDSFKKSFDSLLVSLQEKGNSLKMASV

SEQ ID NO: 7622 - DNA, 1725 bp, Zea mays subsp. mays
  misc_feature (1)..(1725): Ceres Seq. ID no. 12408676
  misc_feature (1)..(1725): Ortholog of  Ceres SEQ ID NO 13600071 as cited in SEQ ID NO 0
gagatttcgcgctccgttcacccaaaatttccccatctccgacctcccccttcctctccccctgccgctccccgcgccgagaaggagaaccccagccgccgcgcagcgcgccgcccatggcctcctcgtcggagaacgcggctgtgccgccggaggaggagccccaggccccgccgccgccggacacagagcctaccgaggcggcgcccggcgaggcggaggatgagccgcaaaccctagagcgggcgcaggagctcttcgacaggggttccaaggccatcgaggatgaggacttcgtcgacgccgtagactgtctcagccgagcgctcgagatcagggcttcacattatggagagctcgcaccggagtgtgccagcacatacttcaaatatggatgtgccctgctatacaaagctcaggaggagagtgatgttttgggaaatgttcccaagagcttgccaaatgaagactcagtgaagagtacagctactaaagatgacagtggaacctcaaaggtctctggtaccgatgcggaggatgctgcgtcatcagaaaaagttgatgctgaagaaggtcacaactcaaatggcaaaaatcaggagaatgggaatggtgaagttgagaaagatgatgacgacgtcgacgatgatgagaagatgggagatgaagaggataatgatttggatctttcttggaaaatgttggacattgctagggcaatagttgagaagagccaagataacactatggagaaagtaaaaatatattctgctcttgctgaagtggcaacggaaagagaggacatggacaactcactcagtgactatatgaaagctttatccatgttggagcatttggttgagcctgaccatcgtcgagttgtggaattaaacttccgcatttgtttggtttatgaactagtttccaagatcggagaagcaatttcatactgtgcaaaagcaatttcgctatgcaagtcacgcatacagagcctgaaaagttccaaggatgctttgttggctggtatagatggtgatgcatctgctgctgaagctgaaggaggctcagaaaaatctgccattgaaaaagagctagagcagcttactagcatattgcctgatcttgagaagaagcttgaggacctgtctgaagcaaacccaagcgctgacatggatgagatggtgaaggcaatcgtgtccagggtaactgatgtgatgccaaaagctgcatcttttacttcttcccagatggcaacctcaagcaatggattcgactcctcggttatgtctacggcagcgacaaccggaagctctggaagcaccgtgactgaccttggggttgtaggcagaggcgtcaaacgagctagcatcaagccgatctctgctgaacctgctgctaagaaacctgcacttgattcaccatctcaacaaggtgacagcagcatcaactctgaggttgttcctgcaacgcagactggagacgagtcagtatctaagtaaattacaatttcattagccctactgtaatgttaacttgctggaacatattagctgctatgtaaacgcttaagaagggactgctggggccatagactcatcgtgagctgaccattgaaatgttaaattgctgagatcatcatggcggtaaatcatgtctgctatatcaaatatgcttggtgagatgtgtactttctgatttttttgatgtatctgaccgtagtagctc

SEQ ID NO: 7623 - protein, 498 aa, Zea mays subsp. mays
  peptide (1)..(498): Ceres Seq. ID no. 12408677
DFALRSPKISPSPTSPFLSPCRSPRREGEPQPPRSAPPMASSSENAAVPPEEEPQAPPPPDTEPTEAAPGEAEDEPQTLERAQELFDRGSKAIEDEDFVDAVDCLSRALEIRASHYGELAPECASTYFKYGCALLYKAQEESDVLGNVPKSLPNEDSVKSTATKDDSGTSKVSGTDAEDAASSEKVDAEEGHNSNGKNQENGNGEVEKDDDDVDDDEKMGDEEDNDLDLSWKMLDIARAIVEKSQDNTMEKVKIYSALAEVATEREDMDNSLSDYMKALSMLEHLVEPDHRRVVELNFRICLVYELVSKIGEAISYCAKAISLCKSRIQSLKSSKDALLAGIDGDASAAEAEGGSEKSAIEKELEQLTSILPDLEKKLEDLSEANPSADMDEMVKAIVSRVTDVMPKAASFTSSQMATSSNGFDSSVMSTAATTGSSGSTVTDLGVVGRGVKRASIKPISAEPAAKKPALDSPSQQGDSSINSEVVPATQTGDESVSK

SEQ ID NO: 7624 - protein, 460 aa, Zea mays subsp. mays; identical to SEQ ID NO: 3042
  peptide (1)..(460): Ceres Seq. ID no. 12408678

SEQ ID NO: 7625 - protein, 280 aa, Zea mays subsp. mays; identical to SEQ ID NO: 2639
  peptide (1)..(280): Ceres Seq. ID no. 12408679

SEQ ID NO: 7626 - DNA, 1277 bp, Zea mays subsp. mays
  misc_feature (1)..(1277): Ceres Seq. ID no. 12408673
  misc_feature (1)..(1277): Ortholog of  Ceres SEQ ID NO 12608143 as cited in SEQ ID NO 59963
gcacgagaccattacctagaacatcctaatcgaaaagcaaaatagcaaatttctcggcaaacccgcaattcgcaaacccgcccccaagcccatccctcccgcccgccaggtcccgcgagatctctcacagccccctcagatccgcctcccctcgccgccggcgcgctcgcgcgctttccgcacgcccgccgccatgtcgcacaaccacggcgacacgatcccgctccacccctcgtcggcgcagtccgacatggacgagatcgagagcctcatccacgccgcgccatccccggccaccgtgctccccgcgcggccaccgtctcctacgcgggcctccatccccgtatcctcctctccggccccggcgcccgtccccacgaagccgcctttccccgccgcttccatcccgatctccgtctcccccgttcccgttcccgcgtccgtctccgtccccatcggcgccgacgggtttgggtctccgcccaacacgctcacggagcctgtatgggacaccatcaagcgagacttagcacgcatcgtcagcaatctcaagctcgtcgtcttccccaatccctaccgcgaggaccccggcaaggcgcttagggactgggacctgtggggtcccttcttcttcatcgtcttcctaggcctcacgctctcctggtcggcttccgtgaagaagtctgaagtatttgctgttgcattcgcggtcctggcagctggtgctataattctgaccttgaatgttctgcttctgggggggcacatcatcttcttccaaagcctgagtcttcttggctattgcctatttccattggatgttggtgctctagtttgcatgctgaaggacaatgtcatacttaagattgtcgtggtgacaatcacattggcttggagctcctgggctgcgtatccattcatgagcgctgctgttaacccaaggagaaaagctctggccctatatcctgtcttcctcatgtatatctcagttgggttcctcataattgccattgattaacggggttgagctttgtagtaacatctgaagagttgagagtttccttggatggttgaaccaccagaatacatacaagtttgagtagacaatgcttctatccttgtaccctcgtggagtctttgtgaattgcctcgtaggaattttggtttttacatgatcttgaggcataaggttgtaaaattagtcgaaaatatgtatctgttgtaaagggcatggactttggaccactgaaatggctgtcaagctttcgtatactgcg

SEQ ID NO: 7627 - protein, 274 aa, Zea mays subsp. mays
  peptide (1)..(274): Ceres Seq. ID no. 12408674
MSHNHGDTIPLHPSSAQSDMDEIESLIHAAPSPATVLPARPPSPTRASIPVSSSPAPAPVPTKPPFPAASIPISVSPVPVPASVSVPIGADGFGSPPNTLTEPVWDTIKRDLARIVSNLKLVVFPNPYREDPGKALRDWDLWGPFFFIVFLGLTLSWSASVKKSEVFAVAFAVLAAGAIILTLNVLLLGGHIIFFQSLSLLGYCLFPLDVGALVCMLKDNVILKIVVVTITLAWSSWAAYPFMSAAVNPRRKALALYPVFLMYISVGFLIIAID

SEQ ID NO: 7628 - protein, 255 aa, Zea mays subsp. mays
  peptide (1)..(255): Ceres Seq. ID no. 12408675
MDEIESLIHAAPSPATVLPARPPSPTRASIPVSSSPAPAPVPTKPPFPAASIPISVSPVPVPASVSVPIGADGFGSPPNTLTEPVWDTIKRDLARIVSNLKLVVFPNPYREDPGKALRDWDLWGPFFFIVFLGLTLSWSASVKKSEVFAVAFAVLAAGAIILTLNVLLLGGHIIFFQSLSLLGYCLFPLDVGALVCMLKDNVILKIVVVTITLAWSSWAAYPFMSAAVNPRRKALALYPVFLMYISVGFLIIAID

SEQ ID NO: 7629 - DNA, 803 bp, Zea mays subsp. mays
  misc_feature (1)..(803): Ceres Seq. ID no. 12381210
  misc_feature (1)..(803): Ortholog of  Ceres SEQ ID NO 15224286 as cited in SEQ ID NO 62627
aatttctcccgaaaaagggtgaagagcagaacgacgaggagattgcttggtgagaggagttggtgaggagaggtcgcgaccatggagaaccttgctctgctttggggcatcatcggcccgggcgtgtccggcgccatcttcggggccggatggtggttctgggtggacgcggtcgtttgcagcgcggtccaggtctccttcctccactaccttccagggatcttcgcttcgctggcggcgctcatgttcaattgcgtgaacaaggatgagatcggatacgactattactcaccctacggggacgattcagagtggagagtgaagctctggctttttgtggcatatgtcgtttcttttgtctgtttagctggatccgtgggtttattggtgcaagatgcactgacgaacaagggcccttctgtctggactggtgttgctggcgttctgcaatgtgttcttgtgttgataagcggcctggtgtattggacatgccactcagaagattaagggcgtaatgtcatgagcagacttgcaaggttggtcacagttgtgtgaaggaaattatttctggcaacatatgattttgtgtgatggaaatgacggacactgttcactgctgaatgggatgactagatgtttcatctgtgcatatctgacttttggaaaatgatgtttcttaacaccggtgcatgtgttagccccagcttcttgtgagttgccaatctgtgatgcggtcgtgatcatgcaaatcttttggctaaagctgaaaccggctgcagcaacaagctagtgctactatttac

SEQ ID NO: 7630 - protein, 141 aa, Zea mays subsp. mays
  peptide (1)..(141): Ceres Seq. ID no. 12381211
MENLALLWGIIGPGVSGAIFGAGWWFWVDAVVCSAVQVSFLHYLPGIFASLAALMFNCVNKDEIGYDYYSPYGDDSEWRVKLWLFVAYVVSFVCLAGSVGLLVQDALTNKGPSVWTGVAGVLQCVLVLISGLVYWTCHSED

SEQ ID NO: 7631 - protein, 87 aa, Zea mays subsp. mays
  peptide (1)..(87): Ceres Seq. ID no. 12381212
MFNCVNKDEIGYDYYSPYGDDSEWRVKLWLFVAYVVSFVCLAGSVGLLVQDALTNKGPSVWTGVAGVLQCVLVLISGLVYWTCHSED

SEQ ID NO: 7632 - DNA, 1175 bp, Zea mays subsp. mays
  misc_feature (1)..(1175): Ceres Seq. ID no. 12408185
  misc_feature (1)..(1175): Ortholog of  Ceres SEQ ID NO 12557497 as cited in SEQ ID NO 43
  misc_feature (1)..(1175): Ortholog of  Ceres SEQ ID NO 15177850 as cited in SEQ ID NO 51765
  misc_feature (1)..(1175): Ortholog of  Ceres SEQ ID NO 14303417 as cited in SEQ ID NO 54923
  misc_feature (1)..(1175): Ortholog of  Ceres SEQ ID NO 15169084 as cited in SEQ ID NO 59115
  misc_feature (1)..(1175): Ortholog of  Ceres SEQ ID NO 12635723 as cited in SEQ ID NO 0
aacaccaacctcagcacaccaaggagagtacgtggaggagcagccatggcttcatcggtggccgccgcggcgagcacattcctgggcacccgcctggcggacccggcgccacagaacgggcgcatcgtggcccggttcgggttcgggttgggcggcaaggcgaagcctgctccgaagaaggtggcgaagacatcgacctcctctgaccggccgctgtggttccccggcgccgtggcgcccgactacctggacggctcgctggtcggcgactacgggttcgacccgttcggtctcgggaagcccgtggagtacctgcagttcgagttggactcgctggaccagaacctggccaagaatgaggccggcggcatcatcggcacccggttcgagtcctccgaagtcaagtccaccccgttgcagccctacagcgaggtgttcggcctccagcggttccgcgagtgcgagctcatccacggccgctgggccatgctcgccaccctcggcgccctctccgtcgagtggctcaccggcgtcacctggcaggacgccggcaaggtggagctggtggacgggtcctcctacctgggccagccgctgccgttctccatctcgacgctcatctggatcgaggtgctcgtgatcggctacatcgagttccagcgcaacgccgagctcgacccggagaagaggctgtaccccggcggctcctacttcgacccgctcggcctggcggccgaccctgagaagaaggagcggctgcagctggcggagatcaagcacgcgcgcctcgccatggtcgccttcctcggcttcgccgtgcaggccgccgccaccggcaaggggccgctcaacaactgggccacccacctgagcgacccgctccacactaccatcttcgacacgttcggagggtcctcttaagcccgccattgctccgccccgtccatcgaccggaacgtgttcttggattaattaactacgatctctatgagcctggggatggatcaacccgtcgtgcgtggtctcgttttgtgatgagtgggagagagaggatgacaagatcgatcctttgttaatggagatctcgttaattaggagagctaccgctgggacttggtggtttgtaatatatgatccaaccagtgatgaatcaatgcattcacttgtgtacacat

SEQ ID NO: 7633 - protein, 306 aa, Zea mays subsp. mays
  peptide (1)..(306): Ceres Seq. ID no. 12408186
NTNLSTPRRVRGGAAMASSVAAAASTFLGTRLADPAPQNGRIVARFGFGLGGKAKPAPKKVAKTSTSSDRPLWFPGAVAPDYLDGSLVGDYGFDPFGLGKPVEYLQFELDSLDQNLAKNEAGGIIGTRFESSEVKSTPLQPYSEVFGLQRFRECELIHGRWAMLATLGALSVEWLTGVTWQDAGKVELVDGSSYLGQPLPFSISTLIWIEVLVIGYIEFQRNAELDPEKRLYPGGSYFDPLGLAADPEKKERLQLAEIKHARLAMVAFLGFAVQAAATGKGPLNNWATHLSDPLHTTIFDTFGGSS

SEQ ID NO: 7634 - protein, 291 aa, Zea mays subsp. mays
  peptide (1)..(291): Ceres Seq. ID no. 12408187
MASSVAAAASTFLGTRLADPAPQNGRIVARFGFGLGGKAKPAPKKVAKTSTSSDRPLWFPGAVAPDYLDGSLVGDYGFDPFGLGKPVEYLQFELDSLDQNLAKNEAGGIIGTRFESSEVKSTPLQPYSEVFGLQRFRECELIHGRWAMLATLGALSVEWLTGVTWQDAGKVELVDGSSYLGQPLPFSISTLIWIEVLVIGYIEFQRNAELDPEKRLYPGGSYFDPLGLAADPEKKERLQLAEIKHARLAMVAFLGFAVQAAATGKGPLNNWATHLSDPLHTTIFDTFGGSS

SEQ ID NO: 7635 - protein, 212 aa, Zea mays subsp. mays
  peptide (1)..(212): Ceres Seq. ID no. 12408188
TPTSAHQGEYVEEQPWLHRWPPRRAHSWAPAWRTRRHRTGASWPGSGSGWAARRSLLRRRWRRHRPPLTGRCGSPAPWRPTTWTARWSATTGSTRSVSGSPWSTCSSSWTRWTRTWPRMRPAASSAPGSSPPKSSPPRCSPTARCSASSGSASASSSTAAGPCSPPSAPSPSSGSPASPGRTPARWSWWTGPPTWASRCRSPSRRSSGSRCS

SEQ ID NO: 7636 - DNA, 1163 bp, Zea mays subsp. mays
  misc_feature (1)..(1163): Ceres Seq. ID no. 12483001
  misc_feature (1)..(1163): Ortholog of  Ceres SEQ ID NO 14305682 as cited in SEQ ID NO 59267
  misc_feature (1)..(1163): Ortholog of  Ceres SEQ ID NO 14315060 as cited in SEQ ID NO 60039
  misc_feature (1)..(1163): Ortholog of  Ceres SEQ ID NO 13594430 as cited in SEQ ID NO 60181
  misc_feature (1)..(1163): Ortholog of  Ceres SEQ ID NO 13597809 as cited in SEQ ID NO 64598
  misc_feature (1)..(1163): Ortholog of  Ceres SEQ ID NO 14313544 as cited in SEQ ID NO 68424
  misc_feature (1)..(1163): Ortholog of  Ceres SEQ ID NO 12617960 as cited in SEQ ID NO 69051
  misc_feature (1)..(1163): Ortholog of  Ceres SEQ ID NO 13589401 as cited in SEQ ID NO 0
  misc_feature (1)..(1163): Ortholog of  Ceres SEQ ID NO 15179361 as cited in SEQ ID NO 0
aaaagtagaaaaagcgaaaagcctagtagcacaaggctacaagcctacaagcaaccgcgtccgcgtgtggagcaaggaaggcgaggggagccgagcgggcaaccggcggcgacagacatggcggagcagcacaaggaggagtcgggcgtgacagtgctggacaagatctccgacaagctccacgggcgcgggggcggctcgtcttcgtcgtcggactcggacgacgagcgctcgtcggcgacggccgccgtgaaggccaagatctaccgcatcttcgggcgcgagaagcccgtgcactccgtcctcggcggcggcaagccggccgatctgtttctatggaggaacaagaggatctctggtggggtgctcgcaggcgcaactgccttctggctgctgtttgaggtcatggattaccacctcctcaccctgctatgccactgcctcatcctcaccctggccatcctgttcctctggtccaatgccacgactttcatcaacaagtctcctcctaacatccccgaggtgaagatcccagatgacctggctgtgaatgttgcacgttccctgagatatgagatcaacaggggttttgctaccttgagggagattggccaaggccatgacctcaagaaatttctgattgtgattgcaggactgtggatcctttctgttcttgggagctgctgcaatttcctcaccttgtcttacatagtttttatggtactgtacactgtaccggtcctgtatgagaaacatgaggataaggttgatgcttttggtgagaaggccatggtcgagctgaagaggtactacgccatcttcgacgagaaatgcctatcaaagattccgaagggcccattaaaagacaagaagcaacattagaagcttagaatcagataagggtctgcggtgatttatcatctcttttgaccattattcgtcggttttggtggatggatgtgattccatgtctaaatacctggacgtgctctagtgttttagtgtggtcagtagcaatgttctaaattatctgagattacgctgaatcatgttctgaagtccacgtttaacgttgctctccctatcctttggaagtggcaatttcctcaatgtctgtaatatatctagtctagtgctatttcttaatctgacctagcgtcatg

SEQ ID NO: 7637 - protein, 293 aa, Zea mays subsp. mays
  peptide (1)..(293): Ceres Seq. ID no. 12483002
KSRKSEKPSSTRLQAYKQPRPRVEQGRRGEPSGQPAATDMAEQHKEESGVTVLDKISDKLHGRGGGSSSSSDSDDERSSATAAVKAKIYRIFGREKPVHSVLGGGKPADLFLWRNKRISGGVLAGATAFWLLFEVMDYHLLTLLCHCLILTLAILFLWSNATTFINKSPPNIPEVKIPDDLAVNVARSLRYEINRGFATLREIGQGHDLKKFLIVIAGLWILSVLGSCCNFLTLSYIVFMVLYTVPVLYEKHEDKVDAFGEKAMVELKRYYAIFDEKCLSKIPKGPLKDKKQH

SEQ ID NO: 7638 - protein, 254 aa, Zea mays subsp. mays
  peptide (1)..(254): Ceres Seq. ID no. 12483003
MAEQHKEESGVTVLDKISDKLHGRGGGSSSSSDSDDERSSATAAVKAKIYRIFGREKPVHSVLGGGKPADLFLWRNKRISGGVLAGATAFWLLFEVMDYHLLTLLCHCLILTLAILFLWSNATTFINKSPPNIPEVKIPDDLAVNVARSLRYEINRGFATLREIGQGHDLKKFLIVIAGLWILSVLGSCCNFLTLSYIVFMVLYTVPVLYEKHEDKVDAFGEKAMVELKRYYAIFDEKCLSKIPKGPLKDKKQH

SEQ ID NO: 7639 - protein, 158 aa, Zea mays subsp. mays
  peptide (1)..(158): Ceres Seq. ID no. 12483004
MDYHLLTLLCHCLILTLAILFLWSNATTFINKSPPNIPEVKIPDDLAVNVARSLRYEINRGFATLREIGQGHDLKKFLIVIAGLWILSVLGSCCNFLTLSYIVFMVLYTVPVLYEKHEDKVDAFGEKAMVELKRYYAIFDEKCLSKIPKGPLKDKKQH

SEQ ID NO: 7640 - DNA, 1806 bp, Zea mays subsp. mays
  misc_feature (1)..(1806): Ceres Seq. ID no. 12373188
  misc_feature (1)..(1806): Ortholog of  Ceres SEQ ID NO 15170151 as cited in SEQ ID NO 53069
  misc_feature (1)..(1806): Ortholog of  Ceres SEQ ID NO 14311183 as cited in SEQ ID NO 58495
  misc_feature (1)..(1806): Ortholog of  Ceres SEQ ID NO 13594209 as cited in SEQ ID NO 59089
  misc_feature (1)..(1806): Ortholog of  Ceres SEQ ID NO 14306857 as cited in SEQ ID NO 60035
  misc_feature (1)..(1806): Ortholog of  Ceres SEQ ID NO 15227091 as cited in SEQ ID NO 60294
  misc_feature (1)..(1806): Ortholog of  Ceres SEQ ID NO 14316039 as cited in SEQ ID NO 62062
  misc_feature (1)..(1806): Ortholog of  Ceres SEQ ID NO 15169627 as cited in SEQ ID NO 64517
  misc_feature (1)..(1806): Ortholog of  Ceres SEQ ID NO 14303546 as cited in SEQ ID NO 64893
  misc_feature (1)..(1806): Ortholog of  Ceres SEQ ID NO 14302228 as cited in SEQ ID NO 65061
  misc_feature (1)..(1806): Ortholog of  Ceres SEQ ID NO 15176783 as cited in SEQ ID NO 65590
  misc_feature (1)..(1806): Ortholog of  Ceres SEQ ID NO 15176091 as cited in SEQ ID NO 65733
  misc_feature (1)..(1806): Ortholog of  Ceres SEQ ID NO 14308019 as cited in SEQ ID NO 65849
  misc_feature (1)..(1806): Ortholog of  Ceres SEQ ID NO 15169611 as cited in SEQ ID NO 65939
  misc_feature (1)..(1806): Ortholog of  Ceres SEQ ID NO 15169599 as cited in SEQ ID NO 66096
  misc_feature (1)..(1806): Ortholog of  Ceres SEQ ID NO 14307960 as cited in SEQ ID NO 66187
  misc_feature (1)..(1806): Ortholog of  Ceres SEQ ID NO 14307964 as cited in SEQ ID NO 66191
  misc_feature (1)..(1806): Ortholog of  Ceres SEQ ID NO 15170167 as cited in SEQ ID NO 66224
  misc_feature (1)..(1806): Ortholog of  Ceres SEQ ID NO 13502874 as cited in SEQ ID NO 66298
  misc_feature (1)..(1806): Ortholog of  Ceres SEQ ID NO 14307944 as cited in SEQ ID NO 66503
  misc_feature (1)..(1806): Ortholog of  Ceres SEQ ID NO 12614124 as cited in SEQ ID NO 68392
  misc_feature (1)..(1806): Ortholog of  Ceres SEQ ID NO 14307980 as cited in SEQ ID NO 69214
  misc_feature (1)..(1806): Ortholog of  Ceres SEQ ID NO 14308011 as cited in SEQ ID NO 69234
accagtcaaacaacgccaagcgcgcctcccgtgaacccagcggcccgtcaagtcaaagcatggacgtgccgctcccgctgctgctcggctccgtggccgtttccctcgtcgtgtggtgccttctgctccgccgcggcggggccgggaaggggaagcggccgctgccgcccggtccccggggctggccggtgctgggcaacctgccgcaggtcggcgccaagccgcaccacaccatgtgtgctctggcgcgggagtacggcccgctgttccggctccggttcggcagcgccgaggtggtggtggccgcgtcggcgcgggtggcggcccagttcctgcgcgcccacgacgccaacttcagcaaccgcccgcccaactccggggccgagcacgtggcgtacaactaccaggacctggtgttcgccccgtacggctcccggtggcgcgcgctacggaagctgtgcgcgctccacctcttctccgccaaggccctggacgacctgcgcggcgtcagggagggcgaggtggcgctcatggtgagggagctcgcccggcagggagagcgagaacgggccgccgtggcgctgggccaggtggccaacgtctgcgcgaccaacacgctggcccgggcgaccgtgggccggcgcgtgttcgccgtcgacggaggggagggcgccagggagttcaaggagatggtggtggagctgatgcagctcgccggggtcttcaacgtcggggacttcgtgccggcgctcgcgtggctcgacccgcagggcgtggtcggcaggatgaagcggctgcaccgcaggtacgacgacatgatgaacgggatcatcagggagaggaaggccgccgaggaaggcaaggacctgctcagcgtgctgctggccaggatgcgggagcagcagccgctagcggagggcgacgacactaggttcaacgagactgacatcaaggcacttctcctgaacctcttcacggctgggacggacacgacatccagcacggtggagtgggcgctggccgagctgatccggcatccggacgtgctcaggaaggcccagcaggagctcgacgccgtcgtcggccgcgaccgcctcgtctccgagtcggacctcccgcgcctcacgtacctcacggcggtgatcaaggagacgttccgtctgcacccgtccacgccgctgtcgctgccccgcgtcgccgccgaggagtgcgaggtggacgggttccgcatccccgccggcaccacgctgctggtgaacgtgtgggcgatcgcccgagacccggaggcgtggcccgagcctctcgagttccggcccggccgcttcctcccgggcggctcgcacgcgggagtcgatgtcaaagggagcgacttcgagctcatcccgttcggcgccggccggagaatctgcgcgggcctcagctggggtctgcggatggtcacgctcatgacggccacgctggtgcacgccctggactgggacctcgccgacggcatgaccgcggacaagctggacatggaggaggcctacgggctcaccctgcagcgcgccgtgccgttaatggtccgcccagcacccagactgctgccgtctgcttacgcagagtagaaatcgatgctcgccggccggccatatccatgccgtccgtatgcatggatgcatggtcaaataaataagcgttgtacgtgggtatcggtgtcacaaactcacaatgtgtatcatgtattgcttcgtcagtggcgtgtgtaagcgtccgtttttttttgtattttattctttttccagaaaaaatcaccgttgaaatcgc

SEQ ID NO: 7641 - protein, 534 aa, Zea mays subsp. mays
  peptide (1)..(534): Ceres Seq. ID no. 12373189
QSNNAKRASREPSGPSSQSMDVPLPLLLGSVAVSLVVWCLLLRRGGAGKGKRPLPPGPRGWPVLGNLPQVGAKPHHTMCALAREYGPLFRLRFGSAEVVVAASARVAAQFLRAHDANFSNRPPNSGAEHVAYNYQDLVFAPYGSRWRALRKLCALHLFSAKALDDLRGVREGEVALMVRELARQGERERAAVALGQVANVCATNTLARATVGRRVFAVDGGEGAREFKEMVVELMQLAGVFNVGDFVPALAWLDPQGVVGRMKRLHRRYDDMMNGIIRERKAAEEGKDLLSVLLARMREQQPLAEGDDTRFNETDIKALLLNLFTAGTDTTSSTVEWALAELIRHPDVLRKAQQELDAVVGRDRLVSESDLPRLTYLTAVIKETFRLHPSTPLSLPRVAAEECEVDGFRIPAGTTLLVNVWAIARDPEAWPEPLEFRPGRFLPGGSHAGVDVKGSDFELIPFGAGRRICAGLSWGLRMVTLMTATLVHALDWDLADGMTADKLDMEEAYGLTLQRAVPLMVRPAPRLLPSAYAE

SEQ ID NO: 7642 - protein, 515 aa, Zea mays subsp. mays
  peptide (1)..(515): Ceres Seq. ID no. 12373190
MDVPLPLLLGSVAVSLVVWCLLLRRGGAGKGKRPLPPGPRGWPVLGNLPQVGAKPHHTMCALAREYGPLFRLRFGSAEVVVAASARVAAQFLRAHDANFSNRPPNSGAEHVAYNYQDLVFAPYGSRWRALRKLCALHLFSAKALDDLRGVREGEVALMVRELARQGERERAAVALGQVANVCATNTLARATVGRRVFAVDGGEGAREFKEMVVELMQLAGVFNVGDFVPALAWLDPQGVVGRMKRLHRRYDDMMNGIIRERKAAEEGKDLLSVLLARMREQQPLAEGDDTRFNETDIKALLLNLFTAGTDTTSSTVEWALAELIRHPDVLRKAQQELDAVVGRDRLVSESDLPRLTYLTAVIKETFRLHPSTPLSLPRVAAEECEVDGFRIPAGTTLLVNVWAIARDPEAWPEPLEFRPGRFLPGGSHAGVDVKGSDFELIPFGAGRRICAGLSWGLRMVTLMTATLVHALDWDLADGMTADKLDMEEAYGLTLQRAVPLMVRPAPRLLPSAYAE

SEQ ID NO: 7643 - protein, 457 aa, Zea mays subsp. mays
  peptide (1)..(457): Ceres Seq. ID no. 12373191
MCALAREYGPLFRLRFGSAEVVVAASARVAAQFLRAHDANFSNRPPNSGAEHVAYNYQDLVFAPYGSRWRALRKLCALHLFSAKALDDLRGVREGEVALMVRELARQGERERAAVALGQVANVCATNTLARATVGRRVFAVDGGEGAREFKEMVVELMQLAGVFNVGDFVPALAWLDPQGVVGRMKRLHRRYDDMMNGIIRERKAAEEGKDLLSVLLARMREQQPLAEGDDTRFNETDIKALLLNLFTAGTDTTSSTVEWALAELIRHPDVLRKAQQELDAVVGRDRLVSESDLPRLTYLTAVIKETFRLHPSTPLSLPRVAAEECEVDGFRIPAGTTLLVNVWAIARDPEAWPEPLEFRPGRFLPGGSHAGVDVKGSDFELIPFGAGRRICAGLSWGLRMVTLMTATLVHALDWDLADGMTADKLDMEEAYGLTLQRAVPLMVRPAPRLLPSAYAE

SEQ ID NO: 7644 - DNA, 1269 bp, Zea mays subsp. mays
  misc_feature (1)..(1269): Ceres Seq. ID no. 12408669
  misc_feature (1)..(1269): Ortholog of  Ceres SEQ ID NO 12598859 as cited in SEQ ID NO 62872
  misc_feature (1)..(1269): Ortholog of  Ceres SEQ ID NO 12617350 as cited in SEQ ID NO 63777
  misc_feature (1)..(1269): Ortholog of  Ceres SEQ ID NO 13598749 as cited in SEQ ID NO 64341
  misc_feature (1)..(1269): Ortholog of  Ceres SEQ ID NO 15176153 as cited in SEQ ID NO 0
  misc_feature (1)..(1269): Ortholog of  Ceres SEQ ID NO 15179157 as cited in SEQ ID NO 0
cttgattggctcgtgaaatccatgggcgggcgcaagatgcgggcgtccatgacgacactgctgatccgcctcgtgctcaccgtcgccctcctgggcgacgaggcggcgcggcggtgcgcggcgttcaacccacgcgtgctgttcacggtgaagcccgacccgatcgtgctgcgggaccaccgcggcgcgctgctcacggggaaccacaccgtcaacctgctcttctacgggcgcttcaccgcagcgcaacgcgcgatcgtcgtcgacttcgtccgttccctctcggacgcgagcgcgcctcgcccggagccgccgggggcaccgccgtccgtggcggcgtggtggtgcaccatccggctctaccgcggcggcggcgcgcggctgcggctcggcaggcagatcatcgacgagcgcatgtcgctgggccggggccctctctctccgggcaacgtcacggcgctggcgcgggccgcggggcaccaccggggcgccatcaccgcagtgctcacggccgccgacgtccccgtggcgtccttctgcgtgtcgcgctgcggcgcccacggccacgaccgcggcggcacgcacggcagggcgcggtacacctacctgtgggcggggaatccggcgcagcagtgccccggccaatgcgcgtggccgttccacctgccgacgtacggtccccagaccccgccgctggtgccacccaacggcgacgtcggcgtcgacggcatggtcatcagcctcgccgccctcctcgccggcacggtcaccaacccgtacggggacgggtactaccagggcgacgctggcaccggcgccgggctggaggctgccacggtgtgcgccgggatcttcgggaccgggtcctaccccggctaccccgggaagctgctcacagacccggccaccggcgcgagctacaacgtcgtcgggctaggcgggaggaagtacctgctcccggcattgtgggatccggcgacctcccagtgcaagacacttgtccagacgtgacaggggtgaggggtgacgcccgcggaccgtggtgcggggagaatgtccaatgcaagggcctgcctgctgcagaagggaggaaaaataaatgcctcatttactatttccattccttattgcatgtacttgttgtctgtcctaccagcagagattgtatgatgtatttggtggatgtctatgttaatggaatttgaacgacatgcttaaatatatggtcttgaaactaaatcacatgtgtctagaatatgatttatctag

SEQ ID NO: 7645 - protein, 336 aa, Zea mays subsp. mays
  peptide (1)..(336): Ceres Seq. ID no. 12408670
LDWLVKSMGGRKMRASMTTLLIRLVLTVALLGDEAARRCAAFNPRVLFTVKPDPIVLRDHRGALLTGNHTVNLLFYGRFTAAQRAIVVDFVRSLSDASAPRPEPPGAPPSVAAWWCTIRLYRGGGARLRLGRQIIDERMSLGRGPLSPGNVTALARAAGHHRGAITAVLTAADVPVASFCVSRCGAHGHDRGGTHGRARYTYLWAGNPAQQCPGQCAWPFHLPTYGPQTPPLVPPNGDVGVDGMVISLAALLAGTVTNPYGDGYYQGDAGTGAGLEAATVCAGIFGTGSYPGYPGKLLTDPATGASYNVVGLGGRKYLLPALWDPATSQCKTLVQT

SEQ ID NO: 7646 - protein, 329 aa, Zea mays subsp. mays
  peptide (1)..(329): Ceres Seq. ID no. 12408671
MGGRKMRASMTTLLIRLVLTVALLGDEAARRCAAFNPRVLFTVKPDPIVLRDHRGALLTGNHTVNLLFYGRFTAAQRAIVVDFVRSLSDASAPRPEPPGAPPSVAAWWCTIRLYRGGGARLRLGRQIIDERMSLGRGPLSPGNVTALARAAGHHRGAITAVLTAADVPVASFCVSRCGAHGHDRGGTHGRARYTYLWAGNPAQQCPGQCAWPFHLPTYGPQTPPLVPPNGDVGVDGMVISLAALLAGTVTNPYGDGYYQGDAGTGAGLEAATVCAGIFGTGSYPGYPGKLLTDPATGASYNVVGLGGRKYLLPALWDPATSQCKTLVQT

SEQ ID NO: 7647 - protein, 324 aa, Zea mays subsp. mays
  peptide (1)..(324): Ceres Seq. ID no. 12408672
MRASMTTLLIRLVLTVALLGDEAARRCAAFNPRVLFTVKPDPIVLRDHRGALLTGNHTVNLLFYGRFTAAQRAIVVDFVRSLSDASAPRPEPPGAPPSVAAWWCTIRLYRGGGARLRLGRQIIDERMSLGRGPLSPGNVTALARAAGHHRGAITAVLTAADVPVASFCVSRCGAHGHDRGGTHGRARYTYLWAGNPAQQCPGQCAWPFHLPTYGPQTPPLVPPNGDVGVDGMVISLAALLAGTVTNPYGDGYYQGDAGTGAGLEAATVCAGIFGTGSYPGYPGKLLTDPATGASYNVVGLGGRKYLLPALWDPATSQCKTLVQT

SEQ ID NO: 7648 - DNA, 1787 bp, Zea mays subsp. mays
  misc_feature (1)..(1787): Ceres Seq. ID no. 12406298
  misc_feature (1)..(1787): Ortholog of  Ceres SEQ ID NO 13595871 as cited in SEQ ID NO 65045
aaaggattcccaaccccaaccccaaccccccaagaagcaccgcgcagaaccctctgctcctctcaccctcacgctccaaggcggcggcgccatgcacggcggaggcgcggcctcgcccgatgccgccatatgcatctccccagaagctgggcccatcgtcggggtcgcccccgccgggatcagggtcgaaaactgctacgtgttcaagagccggctgcaggagtatgctcagagggttggcattccaaccccggagtaccacacgctgaaagaaggcccgtctcatgaacctgtcttcaagtccacagtgttcgttaataataccaagtatgaatcgctgcctgggttcttcagccggaaggctgcagaacagtctgccgcggaagttgcgctcatggagatagccatgtccgctccggtgaccgaaattaggaacatgccagcagttcaagaaactggactgtgcaagaatctccttcaggagtatgctcagaagatgaattatgccattccatcttatatttgcactaaacaagcttcgggtgtagctcctttcgtatgcagtgttgagattggtggcatcctatacattggtgctgcagctaggacaaagaaggaggcagagataaaagctgcccgaactgctcttcttgcaatccaaagtcaatcagaaggtggtgcaaatggtgccaaaaagtacattgttgttcctgggcaaaggccagataaggaggcgaataaaaatccaactgaaacccccataccacttagagtcaagaagcgtggttccaggaagaaatggaacaagaggaaattcaggaggatggctgaccgaattgttgatgctggaaaggatgcagaggggcttggaacgcttgtacatgatgactatgaggaagctagaagaataggatatgagttacctacagatactgctatggttcaatttaacaaggaagttgtaatgacacaacctggtgaaggagataggatagtacaattggagccacccagagatcctgcagagtttcaatataacaaggaagctagaagtgttgaacaggacccacccagagatcctgcagaggtccaacataacaaggaagctagaagtgttgaacaggacccacccagagatcctgcagaggtccaacataacaaggaagctagaactgtcgaacaggacccacccagcaacactgaagtgtggaagcctgacaataaggctacaactacagagcaggagtcggtgagcgcttacatagcattgagatctaatggggattctacagatgtggaggcggcaccaggcgataccttgatgatgcagggcgaggagtcggaagccacaatgcaagaagcatctcacgctggtgaacaggcccagcctaactaggaacctgaaagcaaaaaaaacttcctgaacaggaagaccgaaatgtaggtcgaatgcatgcattgctgtaggagaataagtccgctggaggtacatgagcctaaaataatttgtggagtggtggttgactccagttgtaagtgccttccagagtgtaccggcatgcccaaaactgaaatttccggtttagatagaattgggggcgcggaagagggtgccatgtgtgtgtgtgtgtgttgcctgtggatggaggaattgatgggagtatgtgaactgatgtagctagtctatgtttgttaccattgatgatatgattgtgtttggtcatgttttcactgtcatatttgttgacgaccagcacttgcatgagcattggattcgaggtagcctg

SEQ ID NO: 7649 - protein, 464 aa, Zea mays subsp. mays
  peptide (1)..(464): Ceres Seq. ID no. 12406299
KDSQPQPQPPKKHRAEPSAPLTLTLQGGGAMHGGGAASPDAAICISPEAGPIVGVAPAGIRVENCYVFKSRLQEYAQRVGIPTPEYHTLKEGPSHEPVFKSTVFVNNTKYESLPGFFSRKAAEQSAAEVALMEIAMSAPVTEIRNMPAVQETGLCKNLLQEYAQKMNYAIPSYICTKQASGVAPFVCSVEIGGILYIGAAARTKKEAEIKAARTALLAIQSQSEGGANGAKKYIVVPGQRPDKEANKNPTETPIPLRVKKRGSRKKWNKRKFRRMADRIVDAGKDAEGLGTLVHDDYEEARRIGYELPTDTAMVQFNKEVVMTQPGEGDRIVQLEPPRDPAEFQYNKEARSVEQDPPRDPAEVQHNKEARSVEQDPPRDPAEVQHNKEARTVEQDPPSNTEVWKPDNKATTTEQESVSAYIALRSNGDSTDVEAAPGDTLMMQGEESEATMQEASHAGEQAQPN

SEQ ID NO: 7650 - protein, 434 aa, Zea mays subsp. mays
  peptide (1)..(434): Ceres Seq. ID no. 12406300
MHGGGAASPDAAICISPEAGPIVGVAPAGIRVENCYVFKSRLQEYAQRVGIPTPEYHTLKEGPSHEPVFKSTVFVNNTKYESLPGFFSRKAAEQSAAEVALMEIAMSAPVTEIRNMPAVQETGLCKNLLQEYAQKMNYAIPSYICTKQASGVAPFVCSVEIGGILYIGAAARTKKEAEIKAARTALLAIQSQSEGGANGAKKYIVVPGQRPDKEANKNPTETPIPLRVKKRGSRKKWNKRKFRRMADRIVDAGKDAEGLGTLVHDDYEEARRIGYELPTDTAMVQFNKEVVMTQPGEGDRIVQLEPPRDPAEFQYNKEARSVEQDPPRDPAEVQHNKEARSVEQDPPRDPAEVQHNKEARTVEQDPPSNTEVWKPDNKATTTEQESVSAYIALRSNGDSTDVEAAPGDTLMMQGEESEATMQEASHAGEQAQPN

SEQ ID NO: 7651 - protein, 333 aa, Zea mays subsp. mays
  peptide (1)..(333): Ceres Seq. ID no. 12406301
MEIAMSAPVTEIRNMPAVQETGLCKNLLQEYAQKMNYAIPSYICTKQASGVAPFVCSVEIGGILYIGAAARTKKEAEIKAARTALLAIQSQSEGGANGAKKYIVVPGQRPDKEANKNPTETPIPLRVKKRGSRKKWNKRKFRRMADRIVDAGKDAEGLGTLVHDDYEEARRIGYELPTDTAMVQFNKEVVMTQPGEGDRIVQLEPPRDPAEFQYNKEARSVEQDPPRDPAEVQHNKEARSVEQDPPRDPAEVQHNKEARTVEQDPPSNTEVWKPDNKATTTEQESVSAYIALRSNGDSTDVEAAPGDTLMMQGEESEATMQEASHAGEQAQPN

SEQ ID NO: 7652 - DNA, 2066 bp, Zea mays subsp. mays
  misc_feature (1)..(2066): Ceres Seq. ID no. 12344306
  misc_feature (1)..(2066): Ortholog of  Ceres SEQ ID NO 14301550 as cited in SEQ ID NO 66519
  misc_feature (1)..(2066): Ortholog of  Ceres SEQ ID NO 15180570 as cited in SEQ ID NO 0
ctccatggccgttaagcccacatccatcatcgccgcctccgccacagcacgccatggagaccagcaagtcgccaccgctctactcggcgccgcgggagccctctgccacgacagtgatgctgtgtccgtgcctggcgttcttcctcctcgctctcatcatcacctccatcgcactcactgtccactttcgcctctactgccacactcctcttgcccacctcatctccccgcaccgctgcccccaccacatctgacctccgtctccgcccgcatcgctggcgtggtcctgcttcccagaggcgtgttccctctgctgccgccgagatcccgatacgttatgggttcccctctcctcgcgacgccggcatgcggggcttacgacgtgctctggggcttcgcagccggaaggttcctctccatcttggctgcctccgacgaagatcagggctcgtcggagcaggaggcggctgcgagcaacccggagggcgtggaccgcgtctgcgcggccatcgcggacgtcgtcgcctccggtgccgacgcgaacctggaggcggcgctatccgcgctctcgccaccgctctgcgaagcggtcgtgctcgctgtgctccaccgcttcaagcacgcacataggccgtcctaccgcttcttcaggtgggccacagtgtccggtggctttacccacaccaccattacctactgcaagatgttacacatcttaggcaagacgaggcagttcgagtcgatggttgcgatgatccaagagatggggaaggcgggggccctgtccatggacgccttcaaggttgccattaagtccttcgctgcggctggtgagatcaagaatgcggttggcgtgttcgagttgatgagaaagaacggtttcgatgatggggtggaatcattcaattgcttgctcgttgctttagccaaagagggattaggtagggaggccaggcaggtgtttgacaaaatgcatggccagtactctccagacctgcgctcttatactgcactgatgctggcatggtgcaatgcgaggaatctggttgaggcggggcgggtttggaatgagatgctggagaagggaatggatccagatgttgttgtccacaacacaatgattgaggggttgctgcgtgggcagaggcgacccgaggccgtgaagatgtttgagctgatgaaggcaaaggggcctccaccaaatgtgtggacttacacaatgttaatccgtgaccattgtaagcaggggaagatggacatggcaatggagtgctttgaggagatgcaggaggctaaatgccaaccagatgttgctacctatacatgtttgctggttggatatgggaatgcaaaacaaatggacagagtgactgctgtgttggaggagatgacacagaagggatgcccccctgatgctcggacttacaatgcactgattaagttgctaacaaataggaatatgccagacgatgctgcaaggatatacaagaagatgatcaagaagggacttgagcccacaatccatacttacaacatgatgatgaagtcatatttcgttggtgatagcaactatgcaatgggttgtgcagtgtgggaggagatgcaccagaggggtatttgccctgatgtgaactcttacacagtgttcattaatcggcatatacgacatggcaggccagaggaggcatataaatatatcgaggagatgattaataaagggatgaaagctccacaaatagactataataagtttgctgcagatttctcaaaggctgggaaaccagatatattgtttgagttggctcagaaagtgaaatttgctgggaaattagatgtatctaatgtgttctatcagtgggcagatagaatgaagagtcgggtgaagagaaatgtaccttcagattggtaatagaatgttctaagattactatgctgccagcaggaatgtggcatgctgtgatggtgcttgaaatttgattactaaggagaactgctacctttttcagtttgccattgtacggtaatgtgccattgaagaattgcgtgcgttaatatccgttggtctg

SEQ ID NO: 7653 - protein, 635 aa, Zea mays subsp. mays
  peptide (1)..(635): Ceres Seq. ID no. 12344307
SMAVKPTSIIAASATARHGDQQVATALLGAAGALCHDSDAVSVPGVLPPRSHHHLHRTHCPLSPLLPHSSCPPHLPAPLPPPHLTSVSARIAGVVLLPRGVFPLLPPRSRYVMGSPLLATPACGAYDVLWGFAAGRFLSILAASDEDQGSSEQEAAASNPEGVDRVCAAIADVVASGADANLEAALSALSPPLCEAVVLAVLHRFKHAHRPSYRFFRWATVSGGFTHTTITYCKMLHILGKTRQFESMVAMIQEMGKAGALSMDAFKVAIKSFAAAGEIKNAVGVFELMRKNGFDDGVESFNCLLVALAKEGLGREARQVFDKMHGQYSPDLRSYTALMLAWCNARNLVEAGRVWNEMLEKGMDPDVVVHNTMIEGLLRGQRRPEAVKMFELMKAKGPPPNVWTYTMLIRDHCKQGKMDMAMECFEEMQEAKCQPDVATYTCLLVGYGNAKQMDRVTAVLEEMTQKGCPPDARTYNALIKLLTNRNMPDDAARIYKKMIKKGLEPTIHTYNMMMKSYFVGDSNYAMGCAVWEEMHQRGICPDVNSYTVFINRHIRHGRPEEAYKYIEEMINKGMKAPQIDYNKFAADFSKAGKPDILFELAQKVKFAGKLDVSNVFYQWADRMKSRVKRNVPSDW

SEQ ID NO: 7654 - protein, 634 aa, Zea mays subsp. mays
  peptide (1)..(634): Ceres Seq. ID no. 12344308
MAVKPTSIIAASATARHGDQQVATALLGAAGALCHDSDAVSVPGVLPPRSHHHLHRTHCPLSPLLPHSSCPPHLPAPLPPPHLTSVSARIAGVVLLPRGVFPLLPPRSRYVMGSPLLATPACGAYDVLWGFAAGRFLSILAASDEDQGSSEQEAAASNPEGVDRVCAAIADVVASGADANLEAALSALSPPLCEAVVLAVLHRFKHAHRPSYRFFRWATVSGGFTHTTITYCKMLHILGKTRQFESMVAMIQEMGKAGALSMDAFKVAIKSFAAAGEIKNAVGVFELMRKNGFDDGVESFNCLLVALAKEGLGREARQVFDKMHGQYSPDLRSYTALMLAWCNARNLVEAGRVWNEMLEKGMDPDVVVHNTMIEGLLRGQRRPEAVKMFELMKAKGPPPNVWTYTMLIRDHCKQGKMDMAMECFEEMQEAKCQPDVATYTCLLVGYGNAKQMDRVTAVLEEMTQKGCPPDARTYNALIKLLTNRNMPDDAARIYKKMIKKGLEPTIHTYNMMMKSYFVGDSNYAMGCAVWEEMHQRGICPDVNSYTVFINRHIRHGRPEEAYKYIEEMINKGMKAPQIDYNKFAADFSKAGKPDILFELAQKVKFAGKLDVSNVFYQWADRMKSRVKRNVPSDW

SEQ ID NO: 7655 - protein, 523 aa, Zea mays subsp. mays
  peptide (1)..(523): Ceres Seq. ID no. 12344309
MGSPLLATPACGAYDVLWGFAAGRFLSILAASDEDQGSSEQEAAASNPEGVDRVCAAIADVVASGADANLEAALSALSPPLCEAVVLAVLHRFKHAHRPSYRFFRWATVSGGFTHTTITYCKMLHILGKTRQFESMVAMIQEMGKAGALSMDAFKVAIKSFAAAGEIKNAVGVFELMRKNGFDDGVESFNCLLVALAKEGLGREARQVFDKMHGQYSPDLRSYTALMLAWCNARNLVEAGRVWNEMLEKGMDPDVVVHNTMIEGLLRGQRRPEAVKMFELMKAKGPPPNVWTYTMLIRDHCKQGKMDMAMECFEEMQEAKCQPDVATYTCLLVGYGNAKQMDRVTAVLEEMTQKGCPPDARTYNALIKLLTNRNMPDDAARIYKKMIKKGLEPTIHTYNMMMKSYFVGDSNYAMGCAVWEEMHQRGICPDVNSYTVFINRHIRHGRPEEAYKYIEEMINKGMKAPQIDYNKFAADFSKAGKPDILFELAQKVKFAGKLDVSNVFYQWADRMKSRVKRNVPSDW

SEQ ID NO: 7656 - DNA, 1554 bp, Zea mays subsp. mays
  misc_feature (1)..(1554): Ceres Seq. ID no. 12367443
  misc_feature (1)..(1554): Ortholog of  Ceres SEQ ID NO 15178909 as cited in SEQ ID NO 0
gtcgaacacatacctaattatcacctgtaagccagctgaaccacatctcgtcgtgcacatccggagcccgggaacacacacacacattgccatggccatgcccatgcccaagcccgtcctgagcctgctcgtgcacctacacgccgccgtcctgttccttcccgccccggccggcggcgcggtctacaacgttctgcgctacggcgcgcgccccgacggcgtgacggacgcggcggggcccttcctccgcgcgtgggcggacgcctgccgctcgcccctcccggccgccatgtacgtgccgccagggaggtacctggtgcggagcgccacgttcaccggcccgtgccacagccgcgccgtgacgttcgccgtcgccggcacggtcgtcgcccccgcggcctacggcgcgcgcggctcgtcggggaggtggatcacgttcgagaacatggacggcctcgtcgtcgccggcggcggcacgctggacggccgcggcagggcgctctggacctgcagacagcgcgggcagcgcgactgtccgacccccacgtccactctgacgatcgccaactccaaggacgtggtggtggcccgggctgcggtcggtggacagcgagctgttccacgtggtggtgctgcagtgccacggcgtgacggtgcgcggggtgacggtggaggcgccggcggacagccccaacaccgacggcatccacctacacatgtccacccacgtgtcggtgtacgacgccaggatcagcaccggcgacgactgcatctccatcggccccggccaactctcacctctggatcgagcgcgtcgcctgcggccccggccacggcatcagcatcgggagcctgggcaagcagcagggcacggaggtggaggcggtgcagaacgtgacggtgaagacgacgtggttcaccggcaccatgaacgggctgcggatcaagacgtggggcggctccaagcgcggcttcgtcacgggcgtcaccttcgccgactccaccatgtccggcgtggacaaccccatcattatcgaccagaactactgccccgccagcagcggctgccccggcgccggccggagctccagcatcaggatcagcgacgtgcggtacgtgggcatccggggctcgtccgccacgccggtggccgtcaacttcgactgcagccggagctacccctgcagtggcatcagcctgcaggacgtggcgctgacgtaccagaaccgggccgccgccaagtcctactgccggaacgtgcaggggaccgcgctcggcctcgtgctgccgccgagctgcctctgatcagacgatcgaccttgcaacttacattgccggccggacgcagcagttcagttagctgcatgcgttgtcacgtgtatatagatgcatatgtcgagtgtattatgtacggagtatgtggggagtgcttagactaggagaacattacgagcttcttctgacagtagatggttatatagtcgatatatgttggttcttttctttaacccttcacctttttcgcagcacgattattatatgagcgagtttttt

SEQ ID NO: 7657 - protein, 298 aa, Zea mays subsp. mays
  peptide (1)..(298): Ceres Seq. ID no. 12367444
SNTYLIITCKPAEPHLVVHIRSPGTHTHIAMAMPMPKPVLSLLVHLHAAVLFLPAPAGGAVYNVLRYGARPDGVTDAAGPFLRAWADACRSPLPAAMYVPPGRYLVRSATFTGPCHSRAVTFAVAGTVVAPAAYGARGSSGRWITFENMDGLVVAGGGTLDGRGRALWTCRQRGQRDCPTPTSTLTIANSKDVVVARAAVGGQRAVPRGGAAVPRRDGARGDGGGAGGQPQHRRHPPTHVHPRVGVRRQDQHRRRLHLHRPRPTLTSGSSASPAAPATASASGAWASSRARRWRRCRT

SEQ ID NO: 7658 - protein, 268 aa, Zea mays subsp. mays
  peptide (1)..(268): Ceres Seq. ID no. 12367445
MAMPMPKPVLSLLVHLHAAVLFLPAPAGGAVYNVLRYGARPDGVTDAAGPFLRAWADACRSPLPAAMYVPPGRYLVRSATFTGPCHSRAVTFAVAGTVVAPAAYGARGSSGRWITFENMDGLVVAGGGTLDGRGRALWTCRQRGQRDCPTPTSTLTIANSKDVVVARAAVGGQRAVPRGGAAVPRRDGARGDGGGAGGQPQHRRHPPTHVHPRVGVRRQDQHRRRLHLHRPRPTLTSGSSASPAAPATASASGAWASSRARRWRRCRT

SEQ ID NO: 7659 - protein, 266 aa, Zea mays subsp. mays
  peptide (1)..(266): Ceres Seq. ID no. 12367446
MPMPKPVLSLLVHLHAAVLFLPAPAGGAVYNVLRYGARPDGVTDAAGPFLRAWADACRSPLPAAMYVPPGRYLVRSATFTGPCHSRAVTFAVAGTVVAPAAYGARGSSGRWITFENMDGLVVAGGGTLDGRGRALWTCRQRGQRDCPTPTSTLTIANSKDVVVARAAVGGQRAVPRGGAAVPRRDGARGDGGGAGGQPQHRRHPPTHVHPRVGVRRQDQHRRRLHLHRPRPTLTSGSSASPAAPATASASGAWASSRARRWRRCRT

SEQ ID NO: 7660 - DNA, 1229 bp, Zea mays subsp. mays
  misc_feature (1)..(1229): Ceres Seq. ID no. 12408661
  misc_feature (1)..(1229): Ortholog of  Ceres SEQ ID NO 13581902 as cited in SEQ ID NO 52223
  misc_feature (1)..(1229): Ortholog of  Ceres SEQ ID NO 13661681 as cited in SEQ ID NO 61174
  misc_feature (1)..(1229): Ortholog of  Ceres SEQ ID NO 13659221 as cited in SEQ ID NO 66831
ataataacgctgcacctcttttcatttcaccatctcctgcccccttaaaaaaagactcaccgtcgacacgccctcccgtcccgagagttctgaatcgaaaccgtcggccacgagagcagtgcgaggcgcccaccgcgatggctcgaaccaagcaccaggccgtgaggaagacggcggagaagcccaagaagaagctccagttcgagcgctcaggtggtgcgagtacctcggcgacgccggtgagcgcgtgcgtgcggggatcagttccctccttttgccttttttgtgggctgctcttacttgcttgcaagctgtttgatggaatgcaggaaagggctgctgggaccgggggaagagcggcgtctggaggtgactcagttaagaagacgaaaccacgccaccgctggcggccagggactgtagcgctgcgggagatcaggaagtaccagaagtccactgaaccgctcatcccctttgcgcctttcgtccgtgtggtgagggagttaaccaatttcgtaacaaacgggaaagtagagcgctataccgcagaagccctccttgcgctgcaagaggcagcagaattccacttgatagaactgtttgaaatggcgaatctgtgtgccatccatgccaagcgtgtcacaatcatgcaaaaggacatacaacttgcaaggcgtatcggaggaaggcgttgggcatgatatataatatccattctgattgcatcattcttgtgaatttgtttgtaggagctagacattagtgttgttgaatgctgcatggttcctaatccttttcgcagtctaacatctgtggagttagtatgttacatggcaacagctgaacatctgtggactataactatatggcaacagccgaagattgtgtctgtgggataactggttgttttggttgctcttcagtagtttgtttgcttcagtctgcagtatggactatggagtaaactgcatgctgaaacccgaaccactgctgaaacggcagttgccaggatagcaggagggcctttatgcacagtggaattgagtagagaactgagtaaaccatggttctttctccttttgaactggaacacacacagttggatcttgtttctcttcttatgccattgtcatcgtgtttataaggggtgtaaatggtacaaatattatctgcccgtattcacatttgatctatctaagaaggctgaaatccgatccgtattcgagtcg

SEQ ID NO: 7661 - protein, 232 aa, Zea mays subsp. mays
  peptide (1)..(232): Ceres Seq. ID no. 12408662
NNAAPLFISPSPAPLKKDSPSTRPPVPRVLNRNRRPREQCEAPTAMARTKHQAVRKTAEKPKKKLQFERSGGASTSATPVSACVRGSVPSFCLFCGLLLLACKLFDGMQERAAGTGGRAASGGDSVKKTKPRHRWRPGTVALREIRKYQKSTEPLIPFAPFVRVVRELTNFVTNGKVERYTAEALLALQEAAEFHLIELFEMANLCAIHAKRVTIMQKDIQLARRIGGRRWA

SEQ ID NO: 7662 - protein, 187 aa, Zea mays subsp. mays
  peptide (1)..(187): Ceres Seq. ID no. 12408663
MARTKHQAVRKTAEKPKKKLQFERSGGASTSATPVSACVRGSVPSFCLFCGLLLLACKLFDGMQERAAGTGGRAASGGDSVKKTKPRHRWRPGTVALREIRKYQKSTEPLIPFAPFVRVVRELTNFVTNGKVERYTAEALLALQEAAEFHLIELFEMANLCAIHAKRVTIMQKDIQLARRIGGRRWA

SEQ ID NO: 7663 - protein, 125 aa, Zea mays subsp. mays
  peptide (1)..(125): Ceres Seq. ID no. 12408664
MQERAAGTGGRAASGGDSVKKTKPRHRWRPGTVALREIRKYQKSTEPLIPFAPFVRVVRELTNFVTNGKVERYTAEALLALQEAAEFHLIELFEMANLCAIHAKRVTIMQKDIQLARRIGGRRWA

SEQ ID NO: 7664 - DNA, 1805 bp, Zea mays subsp. mays
  misc_feature (1)..(1805): Ceres Seq. ID no. 12408657
  misc_feature (1)..(1805): Ortholog of  Ceres SEQ ID NO 14311183 as cited in SEQ ID NO 58495
  misc_feature (1)..(1805): Ortholog of  Ceres SEQ ID NO 14306857 as cited in SEQ ID NO 60035
  misc_feature (1)..(1805): Ortholog of  Ceres SEQ ID NO 13664173 as cited in SEQ ID NO 61223
  misc_feature (1)..(1805): Ortholog of  Ceres SEQ ID NO 15169627 as cited in SEQ ID NO 64517
  misc_feature (1)..(1805): Ortholog of  Ceres SEQ ID NO 15176091 as cited in SEQ ID NO 65733
  misc_feature (1)..(1805): Ortholog of  Ceres SEQ ID NO 15169599 as cited in SEQ ID NO 66096
  misc_feature (1)..(1805): Ortholog of  Ceres SEQ ID NO 14307964 as cited in SEQ ID NO 66191
  misc_feature (1)..(1805): Ortholog of  Ceres SEQ ID NO 13502874 as cited in SEQ ID NO 66298
  misc_feature (1)..(1805): Ortholog of  Ceres SEQ ID NO 12614124 as cited in SEQ ID NO 68392
  misc_feature (1)..(1805): Ortholog of  Ceres SEQ ID NO 14307980 as cited in SEQ ID NO 69214
  misc_feature (1)..(1805): Ortholog of  Ceres SEQ ID NO 14308011 as cited in SEQ ID NO 69234
aagtcctgctagctccataaaggcgcagccggccggctggccggtagcagtcagccagccagccagccatggagacggcctccttcctctcagtggcgctggccctggcggccctcgtccccgtctcgctgctccttgtgaaccggcccctctacggcaaactgcccccggggccgcggcggcgtcccgtggtgggtaacctgttcgacgtgcagcccgtgcggtgccggtgctaccaggagtgggcgcgccggtacgggcccatcatgacggtgtggctgggcacgtcgcccacggtggtggtgtccacgtcggagctggccaaggaggtgctcaagacccacgaccagcagctcgccgaccgctgccgggaccgctccaccgagagcttcagccgaggcggccaggacctcatctgggccgactacggcccccactacatcaaggtgcgcaagctctgcaacctcgagctcttcacgcagcgccgcctcgaggcgctcaggcccatccgcgaggacgaggtcaccgccatggtcgagtccgtctacaaagccgtcaccgcgcctggcagtgcagggaagccgttggttgtaaagaaccacctctcgatggtggccttcaacaacatcacgcggctggccttcgggaagcggttcgtggacgcggccggcgagctggacgagcaagggcgcgagttcaaggggatcgtccacaacggcatcaagatcggtgcgtccctctccatcgcgcagcacatcccgtggctacgctggctggccccggtcgacgagcaggccttcaaagcccacggcgaacggcgcgaccgcctcaccgtgaagatcatggaggagcacgccagggccctcaagcagcgcggcgcccagcagcacttcgtcgacgcgctcttcactctcagggacaagtacgacctcagcgatgacaccgtcataggcctcctctgggacatgatcaccgccggcacggacacgacggtgatctcggtggagtgggcgatggcggagctgctgaggaaccccagagtgcaggagaagctgcaggaggagctggaccgtgtcgtcggccgcgaccgggtcctgtcggagacggacttcccgaacctgccttacctgcaggccgtcgtcaaggagtccctgcgcctgcacccgccgacgccgctgatgctcccccacagggccagcgccagcgtcaagatcgccggctacgacatccccaagggcgccaacgtcgtcgtcaacgtgtgggcggtggcgcgcgaccccgaggtgtgggacagcccgctcgagttccggccggagcggttcctccgggagaacatcgacatcaagggcgccgacttccgcgtgctgccgttcggcgccggccgccgggtgtgccccggcgcgcagctcgggatcaacctcgtggcgtccatgatcggccacatgctgcaccacttcacgtggacgctgccgagcgggacctgtcccgaggacgtgagcatgatggagtcccccgggctcgtcaccttcatggccacgccgctgcaggccgtcgccacgccgcgcctggacaaggaggaactgtacaggcgtgtcccttcggacgtgtgagccgtcggcgtcctggcatctgctgcgttccctgttttgaaacctgctgctgctgttgcgaatttgtgtaccattaactattcgctggtgatgtacgtgtcatagtcgtgtacgagcattttgtgtactgcagaacttgatcgctgagcatacacttttgcccggtagtaatttacaatttcagcattgcaaatt

SEQ ID NO: 7665 - protein, 513 aa, Zea mays subsp. mays
  peptide (1)..(513): Ceres Seq. ID no. 12408658
METASFLSVALALAALVPVSLLLVNRPLYGKLPPGPRRRPVVGNLFDVQPVRCRCYQEWARRYGPIMTVWLGTSPTVVVSTSELAKEVLKTHDQQLADRCRDRSTESFSRGGQDLIWADYGPHYIKVRKLCNLELFTQRRLEALRPIREDEVTAMVESVYKAVTAPGSAGKPLVVKNHLSMVAFNNITRLAFGKRFVDAAGELDEQGREFKGIVHNGIKIGASLSIAQHIPWLRWLAPVDEQAFKAHGERRDRLTVKIMEEHARALKQRGAQQHFVDALFTLRDKYDLSDDTVIGLLWDMITAGTDTTVISVEWAMAELLRNPRVQEKLQEELDRVVGRDRVLSETDFPNLPYLQAVVKESLRLHPPTPLMLPHRASASVKIAGYDIPKGANVVVNVWAVARDPEVWDSPLEFRPERFLRENIDIKGADFRVLPFGAGRRVCPGAQLGINLVASMIGHMLHHFTWTLPSGTCPEDVSMMESPGLVTFMATPLQAVATPRLDKEELYRRVPSDV

SEQ ID NO: 7666 - protein, 447 aa, Zea mays subsp. mays
  peptide (1)..(447): Ceres Seq. ID no. 12408659
MTVWLGTSPTVVVSTSELAKEVLKTHDQQLADRCRDRSTESFSRGGQDLIWADYGPHYIKVRKLCNLELFTQRRLEALRPIREDEVTAMVESVYKAVTAPGSAGKPLVVKNHLSMVAFNNITRLAFGKRFVDAAGELDEQGREFKGIVHNGIKIGASLSIAQHIPWLRWLAPVDEQAFKAHGERRDRLTVKIMEEHARALKQRGAQQHFVDALFTLRDKYDLSDDTVIGLLWDMITAGTDTTVISVEWAMAELLRNPRVQEKLQEELDRVVGRDRVLSETDFPNLPYLQAVVKESLRLHPPTPLMLPHRASASVKIAGYDIPKGANVVVNVWAVARDPEVWDSPLEFRPERFLRENIDIKGADFRVLPFGAGRRVCPGAQLGINLVASMIGHMLHHFTWTLPSGTCPEDVSMMESPGLVTFMATPLQAVATPRLDKEELYRRVPSDV

SEQ ID NO: 7667 - protein, 359 aa, Zea mays subsp. mays
  peptide (1)..(359): Ceres Seq. ID no. 12408660
MVESVYKAVTAPGSAGKPLVVKNHLSMVAFNNITRLAFGKRFVDAAGELDEQGREFKGIVHNGIKIGASLSIAQHIPWLRWLAPVDEQAFKAHGERRDRLTVKIMEEHARALKQRGAQQHFVDALFTLRDKYDLSDDTVIGLLWDMITAGTDTTVISVEWAMAELLRNPRVQEKLQEELDRVVGRDRVLSETDFPNLPYLQAVVKESLRLHPPTPLMLPHRASASVKIAGYDIPKGANVVVNVWAVARDPEVWDSPLEFRPERFLRENIDIKGADFRVLPFGAGRRVCPGAQLGINLVASMIGHMLHHFTWTLPSGTCPEDVSMMESPGLVTFMATPLQAVATPRLDKEELYRRVPSDV

SEQ ID NO: 7668 - DNA, 1655 bp, Zea mays subsp. mays
  misc_feature (1)..(1655): Ceres Seq. ID no. 12347506
  misc_feature (1)..(1655): Ortholog of  Ceres SEQ ID NO 13594128 as cited in SEQ ID NO 58608
  misc_feature (1)..(1655): Ortholog of  Ceres SEQ ID NO 14309682 as cited in SEQ ID NO 58908
  misc_feature (1)..(1655): Ortholog of  Ceres SEQ ID NO 15176122 as cited in SEQ ID NO 62462
  misc_feature (1)..(1655): Ortholog of  Ceres SEQ ID NO 12624849 as cited in SEQ ID NO 62773
gaggccttgcctgcctgccttgtttccccaaccccctcggaccctcacatcttcctcggtctctccgccgcccaccacctccatccccctcctctctttatacgccaccgcggcggggcttcccccatccctctgtccgttcgctgcattgctcccctaaccgttcggccaggagacagcggagagggcagagatggcggccgcgtccttcaccgccgccaagttcctggcgccggtggccgcgagatccggcggagagagggcgcccccgctccccgccggcgcctcgtcctcctccttcgccaggaccctgcgccgcggcgcggtgcaccacccgcgcctgcgcaccgcgctcgccgtctcctccgacctgctcgctgggaacaaggccgcgcaggccgccgccgcgcatccggcggttacacgggaagaggcactggagctgtatgaggacatggttcttggccgtgtattcgaggacatgtgtgcacaaatgtactaccgtggcaagatgtttggtttcgtccacctttacaatggccaggaggctgtctccactggcttcatcaaacttctgaaccaagctgactgtgttgttagcacataccgtgatcatgtccatgcgctgtccaagggcgtcccggcacgttctgtcatggctgagctctttggcaaggccacaggctgctgccgtggacagggtggttccatgcacatgttctctgctccccacaacctcctgggaggctttgccttcatcggagagggcattcctgttgccactggtgcagcctttgctgctaagtaccgtcatgaggtgctcaaggagtctggccctgatgggcttgatgtcacattggcgttctttggcgatggtacctgtaataatggccagttctttgagtgtctgaacatggcacagctttggaagcttcctattgtgtttgttgtggagaataacctgtgggcaattggaatgtcacacattagggctacatcggacccagagatttggaagaaggggccagcatttggaatgcctggggtgcatgttgatggtatggatgtcctgaaggtcagggaggttgctaaggaggcaattgagagggcaaggagaggtgaagggccaaccctagtcgagtgtgaaacatacaggttccggggtcactcccttgcagacccagatgagctcaggaagcctgatgagaaaacacactacgccgcaagggattctatcacggccttgaagaagtacatcatagagcagaacctcgcaaccgaatccgagctgaagagcatcgagaagaagatcgacgatgtcgttgaggaggctgtcgagtttgctgacgcgagcccgcatccgccgcgcagccagctgttggagaacgtgtttgccgaccccaaaggctttggtatcggccccgatgggaagtacaggtgcgaggatcccaagttcacccaaggcactgcccaagtttaaggaggttaatctgcgctctgtaccactgtgcttgagttctctagttttgtcgatcccagtgtcatgttaaggatactgtatgcataaggcggtccatttctttggctcttaggcttgtgtctgatactattgtgtaatttattcgaatgctcaactgatgcccatgttttatggc

SEQ ID NO: 7669 - protein, 428 aa, Zea mays subsp. mays
  peptide (1)..(428): Ceres Seq. ID no. 12347507
MAAASFTAAKFLAPVAARSGGERAPPLPAGASSSSFARTLRRGAVHHPRLRTALAVSSDLLAGNKAAQAAAAHPAVTREEALELYEDMVLGRVFEDMCAQMYYRGKMFGFVHLYNGQEAVSTGFIKLLNQADCVVSTYRDHVHALSKGVPARSVMAELFGKATGCCRGQGGSMHMFSAPHNLLGGFAFIGEGIPVATGAAFAAKYRHEVLKESGPDGLDVTLAFFGDGTCNNGQFFECLNMAQLWKLPIVFVVENNLWAIGMSHIRATSDPEIWKKGPAFGMPGVHVDGMDVLKVREVAKEAIERARRGEGPTLVECETYRFRGHSLADPDELRKPDEKTHYAARDSITALKKYIIEQNLATESELKSIEKKIDDVVEEAVEFADASPHPPRSQLLENVFADPKGFGIGPDGKYRCEDPKFTQGTAQV

SEQ ID NO: 7670 - protein, 341 aa, Zea mays subsp. mays
  peptide (1)..(341): Ceres Seq. ID no. 12347508
MVLGRVFEDMCAQMYYRGKMFGFVHLYNGQEAVSTGFIKLLNQADCVVSTYRDHVHALSKGVPARSVMAELFGKATGCCRGQGGSMHMFSAPHNLLGGFAFIGEGIPVATGAAFAAKYRHEVLKESGPDGLDVTLAFFGDGTCNNGQFFECLNMAQLWKLPIVFVVENNLWAIGMSHIRATSDPEIWKKGPAFGMPGVHVDGMDVLKVREVAKEAIERARRGEGPTLVECETYRFRGHSLADPDELRKPDEKTHYAARDSITALKKYIIEQNLATESELKSIEKKIDDVVEEAVEFADASPHPPRSQLLENVFADPKGFGIGPDGKYRCEDPKFTQGTAQV

SEQ ID NO: 7671 - protein, 332 aa, Zea mays subsp. mays
  peptide (1)..(332): Ceres Seq. ID no. 12347509
MCAQMYYRGKMFGFVHLYNGQEAVSTGFIKLLNQADCVVSTYRDHVHALSKGVPARSVMAELFGKATGCCRGQGGSMHMFSAPHNLLGGFAFIGEGIPVATGAAFAAKYRHEVLKESGPDGLDVTLAFFGDGTCNNGQFFECLNMAQLWKLPIVFVVENNLWAIGMSHIRATSDPEIWKKGPAFGMPGVHVDGMDVLKVREVAKEAIERARRGEGPTLVECETYRFRGHSLADPDELRKPDEKTHYAARDSITALKKYIIEQNLATESELKSIEKKIDDVVEEAVEFADASPHPPRSQLLENVFADPKGFGIGPDGKYRCEDPKFTQGTAQV

SEQ ID NO: 7672 - DNA, 1825 bp, Zea mays subsp. mays
  misc_feature (1)..(1825): Ceres Seq. ID no. 13498687
  misc_feature (1)..(1825): Ortholog of  Ceres SEQ ID NO 14311183 as cited in SEQ ID NO 58495
  misc_feature (1)..(1825): Ortholog of  Ceres SEQ ID NO 14306857 as cited in SEQ ID NO 60035
  misc_feature (1)..(1825): Ortholog of  Ceres SEQ ID NO 15227091 as cited in SEQ ID NO 60294
  misc_feature (1)..(1825): Ortholog of  Ceres SEQ ID NO 15169627 as cited in SEQ ID NO 64517
  misc_feature (1)..(1825): Ortholog of  Ceres SEQ ID NO 15169611 as cited in SEQ ID NO 65939
  misc_feature (1)..(1825): Ortholog of  Ceres SEQ ID NO 15169599 as cited in SEQ ID NO 66096
  misc_feature (1)..(1825): Ortholog of  Ceres SEQ ID NO 14307960 as cited in SEQ ID NO 66187
  misc_feature (1)..(1825): Ortholog of  Ceres SEQ ID NO 15170167 as cited in SEQ ID NO 66224
  misc_feature (1)..(1825): Ortholog of  Ceres SEQ ID NO 13502874 as cited in SEQ ID NO 66298
  misc_feature (1)..(1825): Ortholog of  Ceres SEQ ID NO 12614124 as cited in SEQ ID NO 68392
tagaacatcctaatcgaaaaacagcacgcataggacgaactaccgatgcaagctgcgatcgatcagtcaccgcatctccggttccgcgcaggcatggacgacaagtcctgctacgtggccaccggcctctccctggcggccatcctcctcgtcctccaccgcctcgtggtccgtgctggcggcaaggggaacgccgccgcgcggcggtgtgcctcctagccctcccgccgtcccgttcctcgggcacctccacctgctagcatcggagtgccctctccactcgtcgctggcccgcctcgcggcgcgccacggccccgtgctctcgctgcgcctgggctcccgcgccgccgtggtggtgtcgtcgccggagtgcgccgaggcgtgcttcacggagcacgacgtggcgttcgccaaccgccccagactgacctcgcaggcgctggcctccttcggcggcgccgcgctggccgtgtctagctacgggccctactggcgcaacctccggcgcgtggccgccgtgcgcctcctctccacgcaccgcgtggcgtgcatgtgccccgtcatctcggccgaggtgcgcgccatgctgcgccgggtggggcgtgcggccgaggcggcggggcgcgtccagctcaaggccagcctgttcgagctctccctcagcgtgctcatggagaccatcgcgcagaccaagacgtcgcgcgccgacgacgcggacgatgccgtgtcgcccgaggcgcacgagttccggcggatcgtcgacgagatcctgccctacctcggcgccaccaacctgtgggactacctgccgctcctgcggcggttcgacgtgctcggggtgaggaacaagatcagggacgttgtcggcaggagggacgccttcctgcagcggctcatcgacgcggagcggcggaggctggacggcgacggtgacggcgacgacggcgagaagaagagcatgatcgccgtgatgctctcgctgcagaagtcggagccggacgtgtacacggacaccatgatcatggcactgtgcgggaacttgtttacagccggaacggagacgacgtcgtccacgatagaatgggccatgtcgctgttgctgaaccacccggacgcgctgaagaaggccgaggcagagatcgaggcggccgtgggcgcgtcccgcctcatcaccatggacgacgtgcccgggctgggctacctgcagtgcgtcatcaacgagacgctgcgcctgtacccggtggccccgctgctgctgccgcacgagtcggcggcggactgcacggtcggcggctacgacgtgccccgcggcacgctgctgttcgtcaacgcgtacgccatccacagggacccggcggcgtgggaggagccggacgagttcaggccggagcggttccgcgacggcaaggccgagggccggctgatgctgccgttcgggatgggacggcgcaggtgccccggggagacactcgcgctgcggaccgccggcctcgtgctcgccacgctcatccagtgcttccactgggacaggatcgatggcgctgagatcgacatgaccgagagcggcgggctcaccatgccccgggccgtcccgttggaggccacctgcaagcctcgcgaagccatgcgtcatgttcttcagcagctctgattggtctatgtgctaaacattctcatccctattctctcttgtgtgtgtggcagtacgaacagcacgtgctagctaaataagctgcgagcaatagctatccgcgtaacagtatggttcgtcaaagttgttatctttcaaaagttatctagtactataaacaaattgttcgtgtcg

SEQ ID NO: 7673 - protein, 366 aa, Zea mays subsp. mays
  peptide (1)..(366): Ceres Seq. ID no. 13498688
MCPVISAEVRAMLRRVGRAAEAAGRVQLKASLFELSLSVLMETIAQTKTSRADDADDAVSPEAHEFRRIVDEILPYLGATNLWDYLPLLRRFDVLGVRNKIRDVVGRRDAFLQRLIDAERRRLDGDGDGDDGEKKSMIAVMLSLQKSEPDVYTDTMIMALCGNLFTAGTETTSSTIEWAMSLLLNHPDALKKAEAEIEAAVGASRLITMDDVPGLGYLQCVINETLRLYPVAPLLLPHESAADCTVGGYDVPRGTLLFVNAYAIHRDPAAWEEPDEFRPERFRDGKAEGRLMLPFGMGRRRCPGETLALRTAGLVLATLIQCFHWDRIDGAEIDMTESGGLTMPRAVPLEATCKPREAMRHVLQQL

SEQ ID NO: 7674 - protein, 355 aa, Zea mays subsp. mays
  peptide (1)..(355): Ceres Seq. ID no. 13498689
MLRRVGRAAEAAGRVQLKASLFELSLSVLMETIAQTKTSRADDADDAVSPEAHEFRRIVDEILPYLGATNLWDYLPLLRRFDVLGVRNKIRDVVGRRDAFLQRLIDAERRRLDGDGDGDDGEKKSMIAVMLSLQKSEPDVYTDTMIMALCGNLFTAGTETTSSTIEWAMSLLLNHPDALKKAEAEIEAAVGASRLITMDDVPGLGYLQCVINETLRLYPVAPLLLPHESAADCTVGGYDVPRGTLLFVNAYAIHRDPAAWEEPDEFRPERFRDGKAEGRLMLPFGMGRRRCPGETLALRTAGLVLATLIQCFHWDRIDGAEIDMTESGGLTMPRAVPLEATCKPREAMRHVLQQL

SEQ ID NO: 7675 - protein, 326 aa, Zea mays subsp. mays
  peptide (1)..(326): Ceres Seq. ID no. 13498690
METIAQTKTSRADDADDAVSPEAHEFRRIVDEILPYLGATNLWDYLPLLRRFDVLGVRNKIRDVVGRRDAFLQRLIDAERRRLDGDGDGDDGEKKSMIAVMLSLQKSEPDVYTDTMIMALCGNLFTAGTETTSSTIEWAMSLLLNHPDALKKAEAEIEAAVGASRLITMDDVPGLGYLQCVINETLRLYPVAPLLLPHESAADCTVGGYDVPRGTLLFVNAYAIHRDPAAWEEPDEFRPERFRDGKAEGRLMLPFGMGRRRCPGETLALRTAGLVLATLIQCFHWDRIDGAEIDMTESGGLTMPRAVPLEATCKPREAMRHVLQQL

SEQ ID NO: 7676 - DNA, 936 bp, Zea mays subsp. mays; identical to SEQ ID NO: 2373
  misc_feature (1)..(936): Ceres Seq. ID no. 13564260
  misc_feature (1)..(936): Ortholog of  Ceres SEQ ID NO 14311229 as cited in SEQ ID NO 53262

SEQ ID NO: 7677 - protein, 212 aa, Zea mays subsp. mays; identical to SEQ ID NO: 2374
  peptide (1)..(212): Ceres Seq. ID no. 13564261

SEQ ID NO: 7678 - protein, 186 aa, Zea mays subsp. mays; identical to SEQ ID NO: 2375
  peptide (1)..(186): Ceres Seq. ID no. 13564262

SEQ ID NO: 7679 - protein, 125 aa, Zea mays subsp. mays; identical to SEQ ID NO: 2376
  peptide (1)..(125): Ceres Seq. ID no. 13564263

SEQ ID NO: 7680 - DNA, 1417 bp, Zea mays subsp. mays
  misc_feature (1)..(1417): Ceres Seq. ID no. 12408649
  misc_feature (1)..(1417): Ortholog of  Ceres SEQ ID NO 12593170 as cited in SEQ ID NO 63263
  misc_feature (1)..(1417): Ortholog of  Ceres SEQ ID NO 14301882 as cited in SEQ ID NO 64381
  misc_feature (1)..(1417): Ortholog of  Ceres SEQ ID NO 13597851 as cited in SEQ ID NO 64869
  misc_feature (1)..(1417): Ortholog of  Ceres SEQ ID NO 13662420 as cited in SEQ ID NO 68680
aggtgacaaatccacgcggagtccgctgaaattttggtcgccccatgcccgttctagacgccatggacgatgcggcggcggcggcggtagataggcacggcggcttctagaccgtctccgttttctgcgcgttggccgtcgggggaagtacacaataaacaaagcaagagcagaggtgcaactgggctgctgtgtcctctgcctcttctccttcctgtcgttctgcgctgccccgacccccgagtgcccctggtcttgtcctcctctccctgctgacctcggagcggagcggagcaagcagccgccaggagggaaggatccatggccgggagatcgcggtacgacaaccccttcgaggagggcggcgccgacgaggtcaaccctttcgcggaccaagctaagagaggaggatcgagtgctcagtccggctactctggtggcgcgttctacacgacgcaatcgcaacgccctgctcctcctagcacacgcctttcgcctcttcctcctgaacctgccgacttctacaacgacttcgctaccccggtggatatccccatggacacaaacaaggacatgaagacaagggagaaggagcttctggccaaggaggccgagctgaacaggcgtgagaaggaaataaaaaggcgagaagatgctgcggcacgagctggtgtcgtgttggaagagaagaactggcccccgtttttccccatcattcataacgatatcggcaacgagatacctgtccatctgcaaagaacgctgtacgtcgcgttcgcgtcgctcttagggttggtcttgtgcctgttttggaacataatctgcgttaccgctgcctgggcaaaagggtcaggtccaaagatatggtttctcgcaatcatatacttcatcctcggatgccccggtgcatactacctttggtaccggccactataccgcgcaatgaggaacgagagcgctctcaagttcggatggtttttcctcttctacttggttcatatcgccttctgcgcgtacgcagctgtttctccttcaattctcttcgtgggaaaatcgttaaccgggattttgccagcaatcaacttgataggcgacagcgtcattgttgggatcttctacttcattggctttgcattgttctgcctggaggctttgctaagcgtgtgggtcattcagcgcgtctacctgtacttccgagggagcgggaaagaagcggagatgaggcgtgaagcagcacgcggtgcagcgagggcagcgttttgatgaaagccgtatatagatgatatattatatatataggcacgacatacatacactgttcataatagtttgaagtgttttaggtcaacaggcatgtgtgtacagtagggttggcgtcctgtattacttctagttaaaagacgcaaggttttgagtc

SEQ ID NO: 7681 - protein, 313 aa, Zea mays subsp. mays
  peptide (1)..(313): Ceres Seq. ID no. 12408650
MAGRSRYDNPFEEGGADEVNPFADQAKRGGSSAQSGYSGGAFYTTQSQRPAPPSTRLSPLPPEPADFYNDFATPVDIPMDTNKDMKTREKELLAKEAELNRREKEIKRREDAAARAGVVLEEKNWPPFFPIIHNDIGNEIPVHLQRTLYVAFASLLGLVLCLFWNIICVTAAWAKGSGPKIWFLAIIYFILGCPGAYYLWYRPLYRAMRNESALKFGWFFLFYLVHIAFCAYAAVSPSILFVGKSLTGILPAINLIGDSVIVGIFYFIGFALFCLEALLSVWVIQRVYLYFRGSGKEAEMRREAARGAARAAF

SEQ ID NO: 7682 - protein, 235 aa, Zea mays subsp. mays
  peptide (1)..(235): Ceres Seq. ID no. 12408651
MDTNKDMKTREKELLAKEAELNRREKEIKRREDAAARAGVVLEEKNWPPFFPIIHNDIGNEIPVHLQRTLYVAFASLLGLVLCLFWNIICVTAAWAKGSGPKIWFLAIIYFILGCPGAYYLWYRPLYRAMRNESALKFGWFFLFYLVHIAFCAYAAVSPSILFVGKSLTGILPAINLIGDSVIVGIFYFIGFALFCLEALLSVWVIQRVYLYFRGSGKEAEMRREAARGAARAAF

SEQ ID NO: 7683 - protein, 229 aa, Zea mays subsp. mays
  peptide (1)..(229): Ceres Seq. ID no. 12408652
MKTREKELLAKEAELNRREKEIKRREDAAARAGVVLEEKNWPPFFPIIHNDIGNEIPVHLQRTLYVAFASLLGLVLCLFWNIICVTAAWAKGSGPKIWFLAIIYFILGCPGAYYLWYRPLYRAMRNESALKFGWFFLFYLVHIAFCAYAAVSPSILFVGKSLTGILPAINLIGDSVIVGIFYFIGFALFCLEALLSVWVIQRVYLYFRGSGKEAEMRREAARGAARAAF

SEQ ID NO: 7684 - DNA, 1629 bp, Zea mays subsp. mays
  misc_feature (1)..(1629): Ceres Seq. ID no. 12408645
  misc_feature (1)..(1629): Ortholog of  Ceres SEQ ID NO 14304471 as cited in SEQ ID NO 53670
accaccgtgacagttctattaacttgacgagacaaaaggggggaaagttctcctcctacaatcctacctccagtgatgtcagtaccaccgccggccggcggcggcgccatcatcaacgaggtcctcaccgacgacgagctccgcgcagtgctcaggcggctggggcccgaggcggagcgggacgcgttcgggctcgtgtgccgccgctggctccggatccagagctccgagcggcggcgcctgcgcgcgcgcgccggcccggacatgctgcgccgcctcgctgcacgcttccctggtgtcctggatctcgacctctctcagtcgccctcccgctccttctaccctggggtcatcgacgacgacctcaactttatcgccagcagcttccgcaacctgcgtgtcctcgcgctgcagaactgcaaaggtatctctgatgtcggagttgccaaattgggagatggactgccatcctctacagtcccttgatgtttctcgctgcataaagctgagtgacaaaggtttgaaggcggttgcactagggtgcaaaaaattgagtcagctgcaaatcatgggatgcaaattagtaacagataatttattgactgctctatcaaagagctgcctgcaattggtagaacttggagctgcgggatgtaacagcataacagatgctggtatatctgctctggctgatggctgtcatcacataaaatcactagacataagcaaatgcaacaaagttagtgatcctggagtctgtaagatcgctgaggtttcttcatcatgcttggtgtcaataaagctattggactgcagcaaggtgggagataagtccatctattcgttagctaagttttgcagtaacctagagactcttgtcattggtggatgtcggaacattagcgatggctccatacaagcacttgctcttgcctgctccagtagcttaaggagcctgagaatggactggtgcttgaaaataacagacacatcattgcaaagcctgctgtctaactgtaaacttcttgtagccattgatgtcggatgttgtgaccagataaccgacaatgcattcatggacggggaaggatacgggtttcagtctgaactgagagttttgaagatcagcagctgtgttcggctcacagttgcaggggtcggcagagtgattgaatccttcaaggctcttgagtacttggatgttcggtcatgccctcaggttacaagggacagctgcgagcaagctggagtgcagtttcctgctggctgtaaggtgaatttcgatggcagtttgctggaatctgatccatctgctgagatgttcttctaaaatgtgatctcggttgaaatcagatttagtgtgaactgcaaaactaagatttgaagagctcggtcatggaggcgagtgcttgacattgctgctgatctttcactgtcaaaatctatgcaagaacctgagaccacaacggatgcaagccatgatcatattcagtacccaattcaatatgcatgtgatttaatctgtagaaagtagcgcaaaagaccatgaaataagttgtctgaccaaagaacgtatttgcattatgtattgtgccagtgcagcgggtgtattaaaaaaatgtgcatttt

SEQ ID NO: 7685 - protein, 298 aa, Zea mays subsp. mays
  peptide (1)..(298): Ceres Seq. ID no. 12408646
MSELPNWEMDCHPLQSLDVSRCIKLSDKGLKAVALGCKKLSQLQIMGCKLVTDNLLTALSKSCLQLVELGAAGCNSITDAGISALADGCHHIKSLDISKCNKVSDPGVCKIAEVSSSCLVSIKLLDCSKVGDKSIYSLAKFCSNLETLVIGGCRNISDGSIQALALACSSSLRSLRMDWCLKITDTSLQSLLSNCKLLVAIDVGCCDQITDNAFMDGEGYGFQSELRVLKISSCVRLTVAGVGRVIESFKALEYLDVRSCPQVTRDSCEQAGVQFPAGCKVNFDGSLLESDPSAEMFF

SEQ ID NO: 7686 - protein, 290 aa, Zea mays subsp. mays
  peptide (1)..(290): Ceres Seq. ID no. 12408647
MDCHPLQSLDVSRCIKLSDKGLKAVALGCKKLSQLQIMGCKLVTDNLLTALSKSCLQLVELGAAGCNSITDAGISALADGCHHIKSLDISKCNKVSDPGVCKIAEVSSSCLVSIKLLDCSKVGDKSIYSLAKFCSNLETLVIGGCRNISDGSIQALALACSSSLRSLRMDWCLKITDTSLQSLLSNCKLLVAIDVGCCDQITDNAFMDGEGYGFQSELRVLKISSCVRLTVAGVGRVIESFKALEYLDVRSCPQVTRDSCEQAGVQFPAGCKVNFDGSLLESDPSAEMFF

SEQ ID NO: 7687 - protein, 253 aa, Zea mays subsp. mays
  peptide (1)..(253): Ceres Seq. ID no. 12408648
MGCKLVTDNLLTALSKSCLQLVELGAAGCNSITDAGISALADGCHHIKSLDISKCNKVSDPGVCKIAEVSSSCLVSIKLLDCSKVGDKSIYSLAKFCSNLETLVIGGCRNISDGSIQALALACSSSLRSLRMDWCLKITDTSLQSLLSNCKLLVAIDVGCCDQITDNAFMDGEGYGFQSELRVLKISSCVRLTVAGVGRVIESFKALEYLDVRSCPQVTRDSCEQAGVQFPAGCKVNFDGSLLESDPSAEMFF

SEQ ID NO: 7688 - DNA, 1203 bp, Zea mays subsp. mays
  misc_feature (1)..(1203): Ceres Seq. ID no. 12408641
  misc_feature (1)..(1203): Ortholog of  Ceres SEQ ID NO 14316161 as cited in SEQ ID NO 52384
  misc_feature (1)..(1203): Ortholog of  Ceres SEQ ID NO 14315249 as cited in SEQ ID NO 52512
  misc_feature (1)..(1203): Ortholog of  Ceres SEQ ID NO 15174595 as cited in SEQ ID NO 53460
  misc_feature (1)..(1203): Ortholog of  Ceres SEQ ID NO 13503553 as cited in SEQ ID NO 64822
  misc_feature (1)..(1203): Ortholog of  Ceres SEQ ID NO 13660155 as cited in SEQ ID NO 67635
aaggcgcaaaagccatcaacctctgcagctacaggacagcgtgcttgtgagtggctgtgcttccgtaggggtagtagggtgcttgcgttgcgttgcagtgcagaggacactgacggacggcgaagaatcgaagatggaggcgtacgctgctggagccaagttcgactgcttgctgttcgacatggacgacactctgtacccgctgagccttggcatcaacctagcatgccgcaagaacatacaggagtacatgctgaagaagctgcggatcgaggagagccaggtccccaggatgtgcctggacctgtacagggagtatgggaccacaatggccggcctcaaggttttggggtacgatttcgactacgacgacttccacgcctgcgtgcacgggacgctgccgtacgagaaggtgaagcctgacccggtgctcaggcagctgctgctttccctgccgcagaggaagatcatcttcaccaactccgacaaggcccacgcggccagagtcctggagaagctcggcctccaggactgcttccaagggatcgtctgcttcgagacactgaacccgccaccaccaaccgagaccgagaagaacagtggcagtgctgggacgatcctgtgcaagccctcgctggcgtccatggaagccgtcatcgagatcgccaagctcgacgccgagagaacggtgttctttgacgacagcacgcgcaacatcgccgcagggaaggccgccggtttccgcaccgtcatcgtggggagctcggcgctggtgccaggggcggacgtggcgctggagagcatccacaacatcaaggaggcgctgccggagctctgggaggttgccgccgccgctgccgccggcgaccgcgtcgacgccgtcctccggtccaccaccgccgtggagaccacagtgattgcctgagcaataataccatatgacaaatgacattaaccgtcacggactcacggccacgtaatataatgctggcgtgtagtatttcttgtgacgtgcaaattaaaatgacttggaatgtggtgtgcctgattaagtaccgaccgaggtaactaatactactgtatatgacagaccagaactttactggtaataaggtttgtatagctcatccctgtcggcccgtgcttttttatggcgcggtccgtggtgcaaatggatgccacgtactgaatacaaataaatat

SEQ ID NO: 7689 - protein, 307 aa, Zea mays subsp. mays
  peptide (1)..(307): Ceres Seq. ID no. 12408642
RRKSHQPLQLQDSVLVSGCASVGVVGCLRCVAVQRTLTDGEESKMEAYAAGAKFDCLLFDMDDTLYPLSLGINLACRKNIQEYMLKKLRIEESQVPRMCLDLYREYGTTMAGLKVLGYDFDYDDFHACVHGTLPYEKVKPDPVLRQLLLSLPQRKIIFTNSDKAHAARVLEKLGLQDCFQGIVCFETLNPPPPTETEKNSGSAGTILCKPSLASMEAVIEIAKLDAERTVFFDDSTRNIAAGKAAGFRTVIVGSSALVPGADVALESIHNIKEALPELWEVAAAAAAGDRVDAVLRSTTAVETTVIA

SEQ ID NO: 7690 - protein, 263 aa, Zea mays subsp. mays
  peptide (1)..(263): Ceres Seq. ID no. 12408643
MEAYAAGAKFDCLLFDMDDTLYPLSLGINLACRKNIQEYMLKKLRIEESQVPRMCLDLYREYGTTMAGLKVLGYDFDYDDFHACVHGTLPYEKVKPDPVLRQLLLSLPQRKIIFTNSDKAHAARVLEKLGLQDCFQGIVCFETLNPPPPTETEKNSGSAGTILCKPSLASMEAVIEIAKLDAERTVFFDDSTRNIAAGKAAGFRTVIVGSSALVPGADVALESIHNIKEALPELWEVAAAAAAGDRVDAVLRSTTAVETTVIA

SEQ ID NO: 7691 - protein, 247 aa, Zea mays subsp. mays
  peptide (1)..(247): Ceres Seq. ID no. 12408644
MDDTLYPLSLGINLACRKNIQEYMLKKLRIEESQVPRMCLDLYREYGTTMAGLKVLGYDFDYDDFHACVHGTLPYEKVKPDPVLRQLLLSLPQRKIIFTNSDKAHAARVLEKLGLQDCFQGIVCFETLNPPPPTETEKNSGSAGTILCKPSLASMEAVIEIAKLDAERTVFFDDSTRNIAAGKAAGFRTVIVGSSALVPGADVALESIHNIKEALPELWEVAAAAAAGDRVDAVLRSTTAVETTVIA

SEQ ID NO: 7692 - DNA, 1458 bp, Zea mays subsp. mays
  misc_feature (1)..(1458): Ceres Seq. ID no. 12408637
  misc_feature (1)..(1458): Ortholog of  Ceres SEQ ID NO 12584561 as cited in SEQ ID NO 68643
aagcgaaacaaacggcgtgacgggagccaagagcccgagagcgccctccgcggccgccgcaccgcgtcgtcgttgtccccagccaacccaacccagcgcaatcccaaacgaatccagccccacctcagccgctgcgcggacctccgaatcccggcgccggtgcgcgcagggcaccgcagggcgcggcgcggccatggacatggacagcgtggagtgcctctccctcccggacgctgccatggacgtggacgacatcgaaggccgcccgcaccacggccatctcggcctcccgctccaccccgcccacctcccatcctcaggtgccggccgcgcgttccccaaggtgaatgccgggggcgccgtggcgggcccggcgggagcggcgggcacagcaggagcaggcgtggggccgccggcgaccagcgtgcacgagctgctcgagtgccccgtctgcaccaactccatgttcccgccaatccatcagtgtcaaaatggacatactttgtgttcgacatgcaaggccagggtgcacaacaggtgccctacatgcagacaagagcttggtgatatcaggtgcttagcattggaaaaagtagcagagtcacttgagcttccctgtaagtactgctctttagggtgcccagagatcttcccatactacagcaagataaagcacgaagcacagtgcagcttcaggccatatacctgcccctatgctggttctgaatgtgctgtggctggtgatattccattccttgttgcacatttgagggatgatcacaaagtcgatatgcacagcggctgcacgttcaaccatagatatgtcaagtccaacccgcgagaggttgaaaacgccacctggatgcttacggtattccattgttttgggcagtacttctgcctgcacttcgaggcattccagctcggaatggctccagtctacatggctttcctccggttcatgggtgatgagaatgatgcgaggaactacacatatagcctagaggttggtggtaacgggaggaagatggtgtgggaaggtactcctagaagcatccgtgacagccaccgcaaggtccgtgacagccatgatggcctcatcatccagaggaacatggcgctgttcttctcgggcggtgacaggaaggagctgaagctgagggtgactgggcggatctggaaggagcagaccaacccggacggggcctgcattcctaacctttgcagctgagcaagggagacgtttggaaagcaaaaaagaaagaaaatacggtgctgtttggctggcttgtctcaaaattgccacgttatgctttcatcatagtgtctgccgttaaaatgttgtagtagtaaaatcgtagggtgtaaaatgttttcttgtaaagtcattgtgtataccaaccaaattcaagaaagcttacaagttggcccataaatgcatgtgctacgttcttgtgt

SEQ ID NO: 7693 - protein, 409 aa, Zea mays subsp. mays
  peptide (1)..(409): Ceres Seq. ID no. 12408638
SETNGVTGAKSPRAPSAAAAPRRRCPQPTQPSAIPNESSPTSAAARTSESRRRCAQGTAGRGAAMDMDSVECLSLPDAAMDVDDIEGRPHHGHLGLPLHPAHLPSSGAGRAFPKVNAGGAVAGPAGAAGTAGAGVGPPATSVHELLECPVCTNSMFPPIHQCQNGHTLCSTCKARVHNRCPTCRQELGDIRCLALEKVAESLELPCKYCSLGCPEIFPYYSKIKHEAQCSFRPYTCPYAGSECAVAGDIPFLVAHLRDDHKVDMHSGCTFNHRYVKSNPREVENATWMLTVFHCFGQYFCLHFEAFQLGMAPVYMAFLRFMGDENDARNYTYSLEVGGNGRKMVWEGTPRSIRDSHRKVRDSHDGLIIQRNMALFFSGGDRKELKLRVTGRIWKEQTNPDGACIPNLCS

SEQ ID NO: 7694 - protein, 345 aa, Zea mays subsp. mays
  peptide (1)..(345): Ceres Seq. ID no. 12408639
MDMDSVECLSLPDAAMDVDDIEGRPHHGHLGLPLHPAHLPSSGAGRAFPKVNAGGAVAGPAGAAGTAGAGVGPPATSVHELLECPVCTNSMFPPIHQCQNGHTLCSTCKARVHNRCPTCRQELGDIRCLALEKVAESLELPCKYCSLGCPEIFPYYSKIKHEAQCSFRPYTCPYAGSECAVAGDIPFLVAHLRDDHKVDMHSGCTFNHRYVKSNPREVENATWMLTVFHCFGQYFCLHFEAFQLGMAPVYMAFLRFMGDENDARNYTYSLEVGGNGRKMVWEGTPRSIRDSHRKVRDSHDGLIIQRNMALFFSGGDRKELKLRVTGRIWKEQTNPDGACIPNLCS

SEQ ID NO: 7695 - protein, 343 aa, Zea mays subsp. mays
  peptide (1)..(343): Ceres Seq. ID no. 12408640
MDSVECLSLPDAAMDVDDIEGRPHHGHLGLPLHPAHLPSSGAGRAFPKVNAGGAVAGPAGAAGTAGAGVGPPATSVHELLECPVCTNSMFPPIHQCQNGHTLCSTCKARVHNRCPTCRQELGDIRCLALEKVAESLELPCKYCSLGCPEIFPYYSKIKHEAQCSFRPYTCPYAGSECAVAGDIPFLVAHLRDDHKVDMHSGCTFNHRYVKSNPREVENATWMLTVFHCFGQYFCLHFEAFQLGMAPVYMAFLRFMGDENDARNYTYSLEVGGNGRKMVWEGTPRSIRDSHRKVRDSHDGLIIQRNMALFFSGGDRKELKLRVTGRIWKEQTNPDGACIPNLCS

SEQ ID NO: 7696 - DNA, 1335 bp, Zea mays subsp. mays
  misc_feature (1)..(1335): Ceres Seq. ID no. 12408633
  misc_feature (1)..(1335): Ortholog of  Ceres SEQ ID NO 12562215 as cited in SEQ ID NO 20489
  misc_feature (1)..(1335): Ortholog of  Ceres SEQ ID NO 13595548 as cited in SEQ ID NO 51024
  misc_feature (1)..(1335): Ortholog of  Ceres SEQ ID NO 13582350 as cited in SEQ ID NO 56734
  misc_feature (1)..(1335): Ortholog of  Ceres SEQ ID NO 12476493 as cited in SEQ ID NO 58163
  misc_feature (1)..(1335): Ortholog of  Ceres SEQ ID NO 12582113 as cited in SEQ ID NO 58349
  misc_feature (1)..(1335): Ortholog of  Ceres SEQ ID NO 14310807 as cited in SEQ ID NO 58696
  misc_feature (1)..(1335): Ortholog of  Ceres SEQ ID NO 14313459 as cited in SEQ ID NO 62395
  misc_feature (1)..(1335): Ortholog of  Ceres SEQ ID NO 13597295 as cited in SEQ ID NO 63743
  misc_feature (1)..(1335): Ortholog of  Ceres SEQ ID NO 12617090 as cited in SEQ ID NO 64005
  misc_feature (1)..(1335): Ortholog of  Ceres SEQ ID NO 13597439 as cited in SEQ ID NO 64081
  misc_feature (1)..(1335): Ortholog of  Ceres SEQ ID NO 13597233 as cited in SEQ ID NO 64370
  misc_feature (1)..(1335): Ortholog of  Ceres SEQ ID NO 13623850 as cited in SEQ ID NO 0
  misc_feature (1)..(1335): Ortholog of  Ceres SEQ ID NO 14309162 as cited in SEQ ID NO 0
aaaaaaaactcaaacaaactcaagcctgccctgccctgccttgttaagcaaagcaacccagctgcgagacacgagagctagctagagagagatggcggccacggtttcgtccttcccggtggtgaacatggagaagctggagaccgaggagagggccacggccatggaggtcatccgcgacggctgcgagaactggggcttcttcgagctgctgaaccacggcatctcgcacgagctgatggacgaggtggagcggctgaccaaggcgcactacgccaccttccgggaggccaagttccaggagttcgcggcccggacgctggaggccggcgagaagggcgccgacgtcaaggacgtggactgggagagcaccttcttcgtccgccacctcccggcctccaacctcgccgacctccccgacgtcgacgaccgctacaggcaggtgatggagcagttcgcatcggagatccggaagctgtcggagaggctgctggacctgctgtgcgagaacctgggcctggagcccgggtacctgaaggcggccttcgcggggtcggacggcccgacgttcggcaccaaggtgagcgcgtacccgccgtgcccgcgcccggacctcgtcgacggccttcgcgcgcacaccgacgccggcggcatcgtgctgctgttccaggacgaccaggtgagcggcctgcagctgctcaggggcggggagtgggtggacgtgccgcccatgcgccacgccatcgtcgccaacgtcggcgaccagctggaggtcatcaccaacgggcggtacaagagcgtcatgcaccgcgtgctcacgcgccccgacggcaaccgcatgtccgtcgcgtccttctacaacccgggcgccgacgccgtcatcttcccggcgcccgcgctcgtcggcgccgccgaggaggaccgcgccgaggccgcgtacccgagcttcgtgttcgaggactacatgaacctgtacgtgcgccacaagttcgaggccaaggagcccaggttcgaggccatgaagtcggccatcgccaccgcgtgagaaagactgccttccgctgccggcttccttcgtggcgtcaagccttgaggcttgaacgaacaacgtacgtccatgtgcttatagtggcacagttgtgtgtgtaactaccgatcgtggaacggcctaatgtatttcggttgcctcagatcgatctatatgtgcgtatacattatgtactcaaaagtgtgtagcgtctggttaatgtacgagcagtgtgtatgtgaccaggacccggtgtgtagttgctactactaccatatccggtgaatgatcaaaccttttggtgtatt

SEQ ID NO: 7697 - protein, 317 aa, Zea mays subsp. mays
  peptide (1)..(317): Ceres Seq. ID no. 12408634
MAATVSSFPVVNMEKLETEERATAMEVIRDGCENWGFFELLNHGISHELMDEVERLTKAHYATFREAKFQEFAARTLEAGEKGADVKDVDWESTFFVRHLPASNLADLPDVDDRYRQVMEQFASEIRKLSERLLDLLCENLGLEPGYLKAAFAGSDGPTFGTKVSAYPPCPRPDLVDGLRAHTDAGGIVLLFQDDQVSGLQLLRGGEWVDVPPMRHAIVANVGDQLEVITNGRYKSVMHRVLTRPDGNRMSVASFYNPGADAVIFPAPALVGAAEEDRAEAAYPSFVFEDYMNLYVRHKFEAKEPRFEAMKSAIATA

SEQ ID NO: 7698 - protein, 305 aa, Zea mays subsp. mays
  peptide (1)..(305): Ceres Seq. ID no. 12408635
MEKLETEERATAMEVIRDGCENWGFFELLNHGISHELMDEVERLTKAHYATFREAKFQEFAARTLEAGEKGADVKDVDWESTFFVRHLPASNLADLPDVDDRYRQVMEQFASEIRKLSERLLDLLCENLGLEPGYLKAAFAGSDGPTFGTKVSAYPPCPRPDLVDGLRAHTDAGGIVLLFQDDQVSGLQLLRGGEWVDVPPMRHAIVANVGDQLEVITNGRYKSVMHRVLTRPDGNRMSVASFYNPGADAVIFPAPALVGAAEEDRAEAAYPSFVFEDYMNLYVRHKFEAKEPRFEAMKSAIATA

SEQ ID NO: 7699 - protein, 293 aa, Zea mays subsp. mays
  peptide (1)..(293): Ceres Seq. ID no. 12408636
MEVIRDGCENWGFFELLNHGISHELMDEVERLTKAHYATFREAKFQEFAARTLEAGEKGADVKDVDWESTFFVRHLPASNLADLPDVDDRYRQVMEQFASEIRKLSERLLDLLCENLGLEPGYLKAAFAGSDGPTFGTKVSAYPPCPRPDLVDGLRAHTDAGGIVLLFQDDQVSGLQLLRGGEWVDVPPMRHAIVANVGDQLEVITNGRYKSVMHRVLTRPDGNRMSVASFYNPGADAVIFPAPALVGAAEEDRAEAAYPSFVFEDYMNLYVRHKFEAKEPRFEAMKSAIATA

SEQ ID NO: 7700 - DNA, 1252 bp, Zea mays subsp. mays
  misc_feature (1)..(1252): Ceres Seq. ID no. 12343013
  misc_feature (1)..(1252): Ortholog of  Ceres SEQ ID NO 12636774 as cited in SEQ ID NO 372
  misc_feature (1)..(1252): Ortholog of  Ceres SEQ ID NO 12562215 as cited in SEQ ID NO 20489
  misc_feature (1)..(1252): Ortholog of  Ceres SEQ ID NO 14311866 as cited in SEQ ID NO 51178
  misc_feature (1)..(1252): Ortholog of  Ceres SEQ ID NO 15174842 as cited in SEQ ID NO 53054
  misc_feature (1)..(1252): Ortholog of  Ceres SEQ ID NO 15170037 as cited in SEQ ID NO 55447
  misc_feature (1)..(1252): Ortholog of  Ceres SEQ ID NO 13582350 as cited in SEQ ID NO 56734
  misc_feature (1)..(1252): Ortholog of  Ceres SEQ ID NO 12476493 as cited in SEQ ID NO 58163
  misc_feature (1)..(1252): Ortholog of  Ceres SEQ ID NO 12582113 as cited in SEQ ID NO 58349
  misc_feature (1)..(1252): Ortholog of  Ceres SEQ ID NO 14310807 as cited in SEQ ID NO 58696
  misc_feature (1)..(1252): Ortholog of  Ceres SEQ ID NO 13596470 as cited in SEQ ID NO 62158
  misc_feature (1)..(1252): Ortholog of  Ceres SEQ ID NO 14313459 as cited in SEQ ID NO 62395
  misc_feature (1)..(1252): Ortholog of  Ceres SEQ ID NO 12578315 as cited in SEQ ID NO 62451
  misc_feature (1)..(1252): Ortholog of  Ceres SEQ ID NO 12615466 as cited in SEQ ID NO 62761
  misc_feature (1)..(1252): Ortholog of  Ceres SEQ ID NO 12615907 as cited in SEQ ID NO 62860
  misc_feature (1)..(1252): Ortholog of  Ceres SEQ ID NO 14314080 as cited in SEQ ID NO 63105
  misc_feature (1)..(1252): Ortholog of  Ceres SEQ ID NO 13597295 as cited in SEQ ID NO 63743
  misc_feature (1)..(1252): Ortholog of  Ceres SEQ ID NO 12617090 as cited in SEQ ID NO 64005
  misc_feature (1)..(1252): Ortholog of  Ceres SEQ ID NO 15226458 as cited in SEQ ID NO 64042
  misc_feature (1)..(1252): Ortholog of  Ceres SEQ ID NO 13597439 as cited in SEQ ID NO 64081
  misc_feature (1)..(1252): Ortholog of  Ceres SEQ ID NO 13597233 as cited in SEQ ID NO 64370
  misc_feature (1)..(1252): Ortholog of  Ceres SEQ ID NO 14302844 as cited in SEQ ID NO 65379
  misc_feature (1)..(1252): Ortholog of  Ceres SEQ ID NO 13599438 as cited in SEQ ID NO 0
  misc_feature (1)..(1252): Ortholog of  Ceres SEQ ID NO 13600370 as cited in SEQ ID NO 0
  misc_feature (1)..(1252): Ortholog of  Ceres SEQ ID NO 13623850 as cited in SEQ ID NO 0
  misc_feature (1)..(1252): Ortholog of  Ceres SEQ ID NO 14309162 as cited in SEQ ID NO 0
ttaccattacggcattacctacaccgtcgcctaatttgccaacgcccgccgccgttccgatggaaaccgccgagccggcgcgcgtccaagccctcgctgaggccggcgtgttccgcctcccggcgcagtacatccagccgcctgagcacagaccgaccccctcgccttctcctattgccgcggcgctctccgtgccggtcgtcgacctctcaacctccaccgccaccgacgccgtccgcgccgcgtgcgcggactggggcgcctttcacgtggtcggccacggcgtgccgggggagctcctcgacgcggtgcgcgcggcagggctcgcgttcttccgcgcgcccatggaggacaagctccggttcgcctgcgacccggccaggggcgccgcctcggaagggtacggcagccgcatgctcgccaacgacgactccgtgctcgactggcgcgactactttgaccaccacacgctcccggagtcccgctgtgatcccgcccgctggcccgacttcgtccccggttacagagatactattgcaaaatacagccacagcatgaaggatcttgctaaaaaattgttgtgcatcatctcagaaaatctgagcctgccaccatcttatatacaagaggcggttggagaagttttccagaacattactattagctactattctccgtgtccacaacctgatcttgctcttgggttacaatctcattctgatatgggcgcaataacacttctgatacaagatgatgttggtgggcttgaagtattaaaggatggaatgtggatacctgtgcctgctttgcgtgatggcatccttgtgattctcgctgatcagacagagatcatcaccaatggaagatacaagagttcagttcatcgagctgttgtcaatgctgagcgtgcccgcttatcagtagcaacattttatgatccatcaaaatcaaggaaaatatgcactgccccgcagcttgtgagtgagaatgaaccacaaaagtatcgggatgtaatttatggtgactatgtctcatcttggtatagcaaaggtccagagggcaagcgaaacatcgatgccctcctgattcagcactagagccataggtatgccttaaaacagggttgggccactcatctgtttcctaaacttctaatgcatgtacaatatatcagtttccaactttaaacaatcaggataaggaaaccaacttgtatactggatgcagtgcaataaagtaccttttcattgtc

SEQ ID NO: 7701 - protein, 364 aa, Zea mays subsp. mays
  peptide (1)..(364): Ceres Seq. ID no. 12343014
TITALPTPSPNLPTPAAVPMETAEPARVQALAEAGVFRLPAQYIQPPEHRPTPSPSPIAAALSVPVVDLSTSTATDAVRAACADWGAFHVVGHGVPGELLDAVRAAGLAFFRAPMEDKLRFACDPARGAASEGYGSRMLANDDSVLDWRDYFDHHTLPESRCDPARWPDFVPGYRDTIAKYSHSMKDLAKKLLCIISENLSLPPSYIQEAVGEVFQNITISYYSPCPQPDLALGLQSHSDMGAITLLIQDDVGGLEVLKDGMWIPVPALRDGILVILADQTEIITNGRYKSSVHRAVVNAERARLSVATFYDPSKSRKICTAPQLVSENEPQKYRDVIYGDYVSSWYSKGPEGKRNIDALLIQH

SEQ ID NO: 7702 - protein, 345 aa, Zea mays subsp. mays
  peptide (1)..(345): Ceres Seq. ID no. 12343015
METAEPARVQALAEAGVFRLPAQYIQPPEHRPTPSPSPIAAALSVPVVDLSTSTATDAVRAACADWGAFHVVGHGVPGELLDAVRAAGLAFFRAPMEDKLRFACDPARGAASEGYGSRMLANDDSVLDWRDYFDHHTLPESRCDPARWPDFVPGYRDTIAKYSHSMKDLAKKLLCIISENLSLPPSYIQEAVGEVFQNITISYYSPCPQPDLALGLQSHSDMGAITLLIQDDVGGLEVLKDGMWIPVPALRDGILVILADQTEIITNGRYKSSVHRAVVNAERARLSVATFYDPSKSRKICTAPQLVSENEPQKYRDVIYGDYVSSWYSKGPEGKRNIDALLIQH

SEQ ID NO: 7703 - protein, 250 aa, Zea mays subsp. mays
  peptide (1)..(250): Ceres Seq. ID no. 12343016
MEDKLRFACDPARGAASEGYGSRMLANDDSVLDWRDYFDHHTLPESRCDPARWPDFVPGYRDTIAKYSHSMKDLAKKLLCIISENLSLPPSYIQEAVGEVFQNITISYYSPCPQPDLALGLQSHSDMGAITLLIQDDVGGLEVLKDGMWIPVPALRDGILVILADQTEIITNGRYKSSVHRAVVNAERARLSVATFYDPSKSRKICTAPQLVSENEPQKYRDVIYGDYVSSWYSKGPEGKRNIDALLIQH

SEQ ID NO: 7704 - DNA, 1774 bp, Zea mays subsp. mays
  misc_feature (1)..(1774): Ceres Seq. ID no. 12349251
  misc_feature (1)..(1774): Ortholog of  Ceres SEQ ID NO 12583469 as cited in SEQ ID NO 51031
  misc_feature (1)..(1774): Ortholog of  Ceres SEQ ID NO 13597389 as cited in SEQ ID NO 63426
  misc_feature (1)..(1774): Ortholog of  Ceres SEQ ID NO 13595998 as cited in SEQ ID NO 68161
  misc_feature (1)..(1774): Ortholog of  Ceres SEQ ID NO 15180463 as cited in SEQ ID NO 0
aatcgaaaatttggtcgaaataaacaagcagagcagaaaaccccccacacgctttagttggccgtccgtccgtccgtctctgaggagcacacagcagtcgattttaaactgcagctacagaggtcaggtcaggggacacagcctgagcggctggctggcgggggctagcgagcggcgccacagcgcagcacgcagagagccagggcggcggccatggcgagcgcggcgagtggcggcggcgggtcgctgaagcggatgggcccgctccgggtacagtactacatcgtgatgggcgcggtggcagcggcggtggtgctggccacgctgcgctacatgccggggccagccgtcccggcgaccaccgcccgtaccagcggaggcggcgtcgtgcgctcggccccagcagccgcggccgtccctgtgcccgtgcccgccgtggaggtagaaacgggggaggatgagcaggcgcagaggaggaggaggaggaggaagaagaagggtgacggggtcgtgctcttcaacttcggcgactccaacagcgacacgggcggcgtggcggcggtcatggggatccgcatcgcgccgccggagggcagggcctacttccaccaccccacggggcggctctccgacggacgcgtcatcctcgacttcatctgtgagagcctgggcatgccgcacctgagtccgttcatgaagccgctgggctccaacttctccaacggcgtcaacttcgccattgcagggtccacggccatgccgggagtaaccaccttctcgctggacgtgcaggtggatcagttcgtcttcttcaaggagagatgcctcgactccatcgagagaggtgagagtgccccgattgttgagaaggcgttcccagatgctatatacaccatggacatcgggcacaacgatataaacggtgttctccacttgccctatcatacaatgctcgaaaatctccccccagtaattgctgaaatcaagaaagccatcgagaggttgcacgagaatggagccaggaagttctggatacatggaacgggagcattagggtgcatgcctcagaagctttctatgccgagggatgacgacagcgacctcgatgagcatggatgcatcgcaagcattaataatgtctgcaagaagttcaattccttgctgagtgaagccttggacgagctgcgtttgacactgaaaagttcgactatcgtctttgtggatatgttcgctatcaagtatgatcttgttgccaaccacacgaaatatgggattgagaagccattgatgacatgttgtggtcatggaggccccccttacaactatgaccccaaggagagctgcatgacttcggacaaatacctgtgcaagcttggcgaaaagttcataagctgggacggggttcacttcactgatgctgcaaatggcattgtggcttccaaagtactcagtggtgagtacaacattcccagggtcaagctggccagcctcgtccccgttccaaaatctgacgattaatggtgatgcagcaccttaattggcctttagtttggcctatcaaggatgatgaagatgaaactactaacaaaactgacaccaccgaagtttaattattttgaggttcttacgttacatccattgtagaagaagactttccttttgtttacttctctttttgtacaatcggcgcatatgtatatcctagggttaatatatggcgatgcaggtgtctgtaccatgtataattttctttttgaattttgggtctgttggc

SEQ ID NO: 7705 - protein, 434 aa, Zea mays subsp. mays
  peptide (1)..(434): Ceres Seq. ID no. 12349252
MASAASGGGGSLKRMGPLRVQYYIVMGAVAAAVVLATLRYMPGPAVPATTARTSGGGVVRSAPAAAAVPVPVPAVEVETGEDEQAQRRRRRRKKKGDGVVLFNFGDSNSDTGGVAAVMGIRIAPPEGRAYFHHPTGRLSDGRVILDFICESLGMPHLSPFMKPLGSNFSNGVNFAIAGSTAMPGVTTFSLDVQVDQFVFFKERCLDSIERGESAPIVEKAFPDAIYTMDIGHNDINGVLHLPYHTMLENLPPVIAEIKKAIERLHENGARKFWIHGTGALGCMPQKLSMPRDDDSDLDEHGCIASINNVCKKFNSLLSEALDELRLTLKSSTIVFVDMFAIKYDLVANHTKYGIEKPLMTCCGHGGPPYNYDPKESCMTSDKYLCKLGEKFISWDGVHFTDAANGIVASKVLSGEYNIPRVKLASLVPVPKSDD

SEQ ID NO: 7706 - protein, 420 aa, Zea mays subsp. mays
  peptide (1)..(420): Ceres Seq. ID no. 12349253
MGPLRVQYYIVMGAVAAAVVLATLRYMPGPAVPATTARTSGGGVVRSAPAAAAVPVPVPAVEVETGEDEQAQRRRRRRKKKGDGVVLFNFGDSNSDTGGVAAVMGIRIAPPEGRAYFHHPTGRLSDGRVILDFICESLGMPHLSPFMKPLGSNFSNGVNFAIAGSTAMPGVTTFSLDVQVDQFVFFKERCLDSIERGESAPIVEKAFPDAIYTMDIGHNDINGVLHLPYHTMLENLPPVIAEIKKAIERLHENGARKFWIHGTGALGCMPQKLSMPRDDDSDLDEHGCIASINNVCKKFNSLLSEALDELRLTLKSSTIVFVDMFAIKYDLVANHTKYGIEKPLMTCCGHGGPPYNYDPKESCMTSDKYLCKLGEKFISWDGVHFTDAANGIVASKVLSGEYNIPRVKLASLVPVPKSDD

SEQ ID NO: 7707 - protein, 409 aa, Zea mays subsp. mays
  peptide (1)..(409): Ceres Seq. ID no. 12349254
MGAVAAAVVLATLRYMPGPAVPATTARTSGGGVVRSAPAAAAVPVPVPAVEVETGEDEQAQRRRRRRKKKGDGVVLFNFGDSNSDTGGVAAVMGIRIAPPEGRAYFHHPTGRLSDGRVILDFICESLGMPHLSPFMKPLGSNFSNGVNFAIAGSTAMPGVTTFSLDVQVDQFVFFKERCLDSIERGESAPIVEKAFPDAIYTMDIGHNDINGVLHLPYHTMLENLPPVIAEIKKAIERLHENGARKFWIHGTGALGCMPQKLSMPRDDDSDLDEHGCIASINNVCKKFNSLLSEALDELRLTLKSSTIVFVDMFAIKYDLVANHTKYGIEKPLMTCCGHGGPPYNYDPKESCMTSDKYLCKLGEKFISWDGVHFTDAANGIVASKVLSGEYNIPRVKLASLVPVPKSDD

SEQ ID NO: 7708 - DNA, 1291 bp, Zea mays subsp. mays
  misc_feature (1)..(1291): Ceres Seq. ID no. 13494949
  misc_feature (1)..(1291): Ortholog of  Ceres SEQ ID NO 13594298 as cited in SEQ ID NO 57803
  misc_feature (1)..(1291): Ortholog of  Ceres SEQ ID NO 13503476 as cited in SEQ ID NO 61978
  misc_feature (1)..(1291): Ortholog of  Ceres SEQ ID NO 12578438 as cited in SEQ ID NO 62201
  misc_feature (1)..(1291): Ortholog of  Ceres SEQ ID NO 12617675 as cited in SEQ ID NO 64656
gtttgtgatgaagcactgtcgtcgcccatgacgggaaaacggctccatatacgtactactaacgtacacaccacagcgactctccggccatgcagttgccggctgcacaacttgtgcaagtgcatgcatgcatggatttggatccatgcatggccacagcccacagcccacaggggaggggaaggtgaggccgcgccgcgaggaaccgcgtcgaccttgtcgtcgatgttggcttgcaaggcgagcccgagccggccgtgcgtcgtcccccttgtttgcctgctggtggtggcggccgcagtcgtcgtcgtcgctgcctcggcgccgccggcggaggcggcgttcgacgacaactacgtggcgcagtggggtagagatggttatcaccttgtcgtccggggcacgggaggcgaatgtcaccatggaccagagctctggtgcccgggttccggtccaagtccacgtacggctcagggttcttccacatgaggatgaagctgccctccgggtacacggccggcgtcgtcacgaccttctacctcatctcgcagccggaggatgggagccgcgacgaggtggacttggagttcctgggcgacaaggccggcgtgcccatcaccctccagaccaacgtcttcgtcgacggccgcggcgacagggagcagcggacgcgcctctggttcgaccccgccgccgacttccacgactacaagatcctctggaacccataccagctcgtgatgttcgtggacgacacgccggtccgggtgctgaggaacctgacgggcgccgtgccggggtacccgttcccggggaagcagacgatgctgatccgcgcgagcgtgtgggacggctccgactgggccacggacggcggccggaccaaggtggactggtccaggggccccttcaccgccggctaccggggcttcgacgtcgacggctgcgccaacaacgggagcgacgcgtgccaatcgcccgacctatggtggaacgccgccgagtaccggaacatcaccgcggagcagcgggcggcgtacgaggacgtgaagaggagttacatgaactacgactactgcgccgataaggccaggtttaacagcaccaccgtacccattgaatgcaactacgcttgagaagccagttaggagtggcggcgttgtatatcaacggtttatatatatatattatatatatatacacacacacgaaaaagatatgtcttcttatttgttgcaagggtttaaatatgcaaatgcttataaggactaaaaaaatatatttccatgtc

SEQ ID NO: 7709 - protein, 319 aa, Zea mays subsp. mays
  peptide (1)..(319): Ceres Seq. ID no. 13494950
MHGFGSMHGHSPQPTGEGKVRPRREEPRRPCRRCWLARRARAGRASSPLFACWWWRPQSSSSLPRRRRRRRRSTTTTWRSGVEMVITLSSGAREANVTMDQSSGARVPVQVHVRLRVLPHEDEAALRVHGRRRHDLLPHLAAGGWEPRRGGLGVPGRQGRRAHHPPDQRLRRRPRRQGAADAPLVRPRRRLPRLQDPLEPIPARDVRGRHAGPGAEEPDGRRAGVPVPGEADDADPRERVGRLRLGHGRRPDQGGLVQGPLHRRLPGLRRRRLRQQRERRVPIARPMVERRRVPEHHRGAAGGVRGREEELHELRLLRR

SEQ ID NO: 7710 - protein, 313 aa, Zea mays subsp. mays
  peptide (1)..(313): Ceres Seq. ID no. 13494951
MHGHSPQPTGEGKVRPRREEPRRPCRRCWLARRARAGRASSPLFACWWWRPQSSSSLPRRRRRRRRSTTTTWRSGVEMVITLSSGAREANVTMDQSSGARVPVQVHVRLRVLPHEDEAALRVHGRRRHDLLPHLAAGGWEPRRGGLGVPGRQGRRAHHPPDQRLRRRPRRQGAADAPLVRPRRRLPRLQDPLEPIPARDVRGRHAGPGAEEPDGRRAGVPVPGEADDADPRERVGRLRLGHGRRPDQGGLVQGPLHRRLPGLRRRRLRQQRERRVPIARPMVERRRVPEHHRGAAGGVRGREEELHELRLLRR

SEQ ID NO: 7711 - protein, 240 aa, Zea mays subsp. mays
  peptide (1)..(240): Ceres Seq. ID no. 13494952
MSPWTRALVPGFRSKSTYGSGFFHMRMKLPSGYTAGVVTTFYLISQPEDGSRDEVDLEFLGDKAGVPITLQTNVFVDGRGDREQRTRLWFDPAADFHDYKILWNPYQLVMFVDDTPVRVLRNLTGAVPGYPFPGKQTMLIRASVWDGSDWATDGGRTKVDWSRGPFTAGYRGFDVDGCANNGSDACQSPDLWWNAAEYRNITAEQRAAYEDVKRSYMNYDYCADKARFNSTTVPIECNYA

SEQ ID NO: 7712 - DNA, 1467 bp, Zea mays subsp. mays
  misc_feature (1)..(1467): Ceres Seq. ID no. 12408629
  misc_feature (1)..(1467): Ortholog of  Ceres SEQ ID NO 14314037 as cited in SEQ ID NO 52244
  misc_feature (1)..(1467): Ortholog of  Ceres SEQ ID NO 13661419 as cited in SEQ ID NO 61673
atccgagttgccagccaattttgcatccccaccaccaatccaccaccccacacccagtgacagagacagaaggccggacggctacgcgacgcgacggagatggagcacacgaatcatcgccgccgccgtcaagctttggccaccgtgtcggcgacgacgacgctcctgctgcttctcctctgcctcgcggcgttgacgacggcagaggcgctgcgcgagcacagggacgagggcggcgctagcagcagtggcggaagcggaagcggctgcggcagcaacgccgccggcggcaagcaatcgccggccgtgtgggtgttcggggactcgtacgcggacacggggaacctgggcgacctcgggcgggagctgacccgcgagtggtacgacccgtacgggaccaccttccccggccggcccgccggccgcttctccgacggccgcgtcctcaccgacttcatagcctccgcgatgggagtgccaacgccggtggcgtacaagctgcgcaggggcgccgcgcgcgggctcgtggcgcgcggcatgaacttcgccgtcggcggcgcgggcgtgctggacaccggcaacttccagcgcaacatcggcgagcagatcgacctgttccaggcgcagcgcccgccgccgccgtcgccctccgcccgcggctgcgacgccggggtcgccgtcgtcgtcgtctccggcaacgactactcctacgccgccgacaaggacaacagcacaagcgccgcgatcgcctacatcccagcggtggtgcggcagctccgggagcagctgcggcggctgcgcgacgaggcgggcatgcgcaaggtggtggtcaccaacctgcaccccatggggtgcacgccgctcttcacccgcgctctcaactacacggcctgcgacccgctggccaacgccggcgccgcgcagcacaacgcggcgcttcagtccgtgctcgccgcgctcgacccggccaaccgcaccttcctcctcctcgacctcaacacgcccttcgccgccttagtcgacggcgcggcggcggcgacggcggaggagaggttcgcggagccgaggcggccgtgctgcgagagcttcagcgccgacggccactgcgggcagcaggacgacagcggcaggcggcagtacacgctgtgtagcgacccgagcaagcatttttactgggacgacgtccacccgacgcaggccgcgtgggccgccgtctcccgaacgttcaggcccatgattcaaggagttccttctgtctacctgatcacagctttgtttcgatcagatgagataaaaactagcactacttatcaaaagaaccaatcaatcaagggtggagagctaaccgagttgttggattagtgaaattctcctgtcattgttactctaaaaatggctggattttttgtattaaaaaaaatccacggtgcgagatgttggaataaaaaagcgatcttcagttcagtg

SEQ ID NO: 7713 - protein, 420 aa, Zea mays subsp. mays
  peptide (1)..(420): Ceres Seq. ID no. 12408630
MEHTNHRRRRQALATVSATTTLLLLLLCLAALTTAEALREHRDEGGASSSGGSGSGCGSNAAGGKQSPAVWVFGDSYADTGNLGDLGRELTREWYDPYGTTFPGRPAGRFSDGRVLTDFIASAMGVPTPVAYKLRRGAARGLVARGMNFAVGGAGVLDTGNFQRNIGEQIDLFQAQRPPPPSPSARGCDAGVAVVVVSGNDYSYAADKDNSTSAAIAYIPAVVRQLREQLRRLRDEAGMRKVVVTNLHPMGCTPLFTRALNYTACDPLANAGAAQHNAALQSVLAALDPANRTFLLLDLNTPFAALVDGAAAATAEERFAEPRRPCCESFSADGHCGQQDDSGRRQYTLCSDPSKHFYWDDVHPTQAAWAAVSRTFRPMIQGVPSVYLITALFRSDEIKTSTTYQKNQSIKGGELTELLD

SEQ ID NO: 7714 - protein, 297 aa, Zea mays subsp. mays
  peptide (1)..(297): Ceres Seq. ID no. 12408631
MGVPTPVAYKLRRGAARGLVARGMNFAVGGAGVLDTGNFQRNIGEQIDLFQAQRPPPPSPSARGCDAGVAVVVVSGNDYSYAADKDNSTSAAIAYIPAVVRQLREQLRRLRDEAGMRKVVVTNLHPMGCTPLFTRALNYTACDPLANAGAAQHNAALQSVLAALDPANRTFLLLDLNTPFAALVDGAAAATAEERFAEPRRPCCESFSADGHCGQQDDSGRRQYTLCSDPSKHFYWDDVHPTQAAWAAVSRTFRPMIQGVPSVYLITALFRSDEIKTSTTYQKNQSIKGGELTELLD

SEQ ID NO: 7715 - protein, 274 aa, Zea mays subsp. mays
  peptide (1)..(274): Ceres Seq. ID no. 12408632
MNFAVGGAGVLDTGNFQRNIGEQIDLFQAQRPPPPSPSARGCDAGVAVVVVSGNDYSYAADKDNSTSAAIAYIPAVVRQLREQLRRLRDEAGMRKVVVTNLHPMGCTPLFTRALNYTACDPLANAGAAQHNAALQSVLAALDPANRTFLLLDLNTPFAALVDGAAAATAEERFAEPRRPCCESFSADGHCGQQDDSGRRQYTLCSDPSKHFYWDDVHPTQAAWAAVSRTFRPMIQGVPSVYLITALFRSDEIKTSTTYQKNQSIKGGELTELLD

SEQ ID NO: 7716 - DNA, 1407 bp, Zea mays subsp. mays
  misc_feature (1)..(1407): Ceres Seq. ID no. 12344326
  misc_feature (1)..(1407): Ortholog of  Ceres SEQ ID NO 13593963 as cited in SEQ ID NO 59580
aataaaccccgcgccgccgctgccgcctcctgtcccggtcggatcctccgcgccgctcgcgccgccctcatcttcccagccccaacgcgacgcaccacaagggccctcgccatgtcgaagaaagtaggacgagcgaagaaagcagcgggcggcggcgagctgtcccgcttcctggagtcgcatctccagaccattagcgacaccttccagatgatggcggagtcggctccgggggccttggaccggacggagtggtctgaggtcgttaagctcggcgaccaggtctccaggcaggccaccgtcgctggaatgctctggagcggtgacttgcctgatgtagagaccctcaaagagaacatcgttgcttatttcaacatcctacagggatttcttttggtttgccacggaagcatggtcggtgctgggcctactctacacaagtccatctttgggtctgcaaaagacgtggttgactctagcttctcattgttcaagcatgctgtctctgcttatgaatctcgcagccctgaccgcaacacaactataccccaggtcacaggaactgtatgggaagcttgtgctgctctcaagaaggtgcctgcatcaaactgcattgccataggacgagccatgaccaggataggtgtgtgtctgaaagatgttctccgagaaatgaatgagctccctattggtgattctggtgttagtactgctgagaagtcttccaatggtgttgtcgacacaacgagttgttctgatagagatgagaggtctgatcttgatttagatgatgatgacgacgacgacgacgacgagttcactgaagaagaggttgctgttgccaagttggttattaacgtggtatctgattccttggttgtagtgaaagaggcaattcgtttcattactggtttgctcaggagctctggtaacaaagacaaagatgaggacaaagttgagccaatggagaaattgctgagccactgcaaggagatcgcggaccaggtcaatgatcttggggcttctgtatacccaccacaagactcgtctgagatggagctcgctataaaaagactgtacaatggcatcaacgggatgcgcaaggaaatagggaacctcggtggcgcacctgagagcacctttgccgcccttgaaggattcgaaaagtgccttggatctctgcgggccaggttagctgatgatgtggtgaacgagatggaaggtcttaatattagccattagcacgtactgttcagatttttccatagcagtgttatgccagtatatcttctggttttgcacgatggaaggagcttctgtggtttcagtaaatgaggcgtccggtctctgtactgatggcgttgttgcgggtcatcgattgtaaaggaagtgggcctggattgctgc

SEQ ID NO: 7717 - protein, 413 aa, Zea mays subsp. mays
  peptide (1)..(413): Ceres Seq. ID no. 12344327
NKPRAAAAASCPGRILRAARAALIFPAPTRRTTRALAMSKKVGRAKKAAGGGELSRFLESHLQTISDTFQMMAESAPGALDRTEWSEVVKLGDQVSRQATVAGMLWSGDLPDVETLKENIVAYFNILQGFLLVCHGSMVGAGPTLHKSIFGSAKDVVDSSFSLFKHAVSAYESRSPDRNTTIPQVTGTVWEACAALKKVPASNCIAIGRAMTRIGVCLKDVLREMNELPIGDSGVSTAEKSSNGVVDTTSCSDRDERSDLDLDDDDDDDDDEFTEEEVAVAKLVINVVSDSLVVVKEAIRFITGLLRSSGNKDKDEDKVEPMEKLLSHCKEIADQVNDLGASVYPPQDSSEMELAIKRLYNGINGMRKEIGNLGGAPESTFAALEGFEKCLGSLRARLADDVVNEMEGLNISH

SEQ ID NO: 7718 - protein, 376 aa, Zea mays subsp. mays
  peptide (1)..(376): Ceres Seq. ID no. 12344328
MSKKVGRAKKAAGGGELSRFLESHLQTISDTFQMMAESAPGALDRTEWSEVVKLGDQVSRQATVAGMLWSGDLPDVETLKENIVAYFNILQGFLLVCHGSMVGAGPTLHKSIFGSAKDVVDSSFSLFKHAVSAYESRSPDRNTTIPQVTGTVWEACAALKKVPASNCIAIGRAMTRIGVCLKDVLREMNELPIGDSGVSTAEKSSNGVVDTTSCSDRDERSDLDLDDDDDDDDDEFTEEEVAVAKLVINVVSDSLVVVKEAIRFITGLLRSSGNKDKDEDKVEPMEKLLSHCKEIADQVNDLGASVYPPQDSSEMELAIKRLYNGINGMRKEIGNLGGAPESTFAALEGFEKCLGSLRARLADDVVNEMEGLNISH

SEQ ID NO: 7719 - protein, 343 aa, Zea mays subsp. mays
  peptide (1)..(343): Ceres Seq. ID no. 12344329
MMAESAPGALDRTEWSEVVKLGDQVSRQATVAGMLWSGDLPDVETLKENIVAYFNILQGFLLVCHGSMVGAGPTLHKSIFGSAKDVVDSSFSLFKHAVSAYESRSPDRNTTIPQVTGTVWEACAALKKVPASNCIAIGRAMTRIGVCLKDVLREMNELPIGDSGVSTAEKSSNGVVDTTSCSDRDERSDLDLDDDDDDDDDEFTEEEVAVAKLVINVVSDSLVVVKEAIRFITGLLRSSGNKDKDEDKVEPMEKLLSHCKEIADQVNDLGASVYPPQDSSEMELAIKRLYNGINGMRKEIGNLGGAPESTFAALEGFEKCLGSLRARLADDVVNEMEGLNISH

SEQ ID NO: 7720 - DNA, 1388 bp, Zea mays subsp. mays
  misc_feature (1)..(1388): Ceres Seq. ID no. 12364160
  misc_feature (1)..(1388): Ortholog of  Ceres SEQ ID NO 13598313 as cited in SEQ ID NO 68293
aaaacatcctcctctcctcgcagacatcttatccctcccgatcgaggccccgtttcctcctcctccggccaccgcacttagctgtcttaacttgccgttcggttcgcagcctcacgcccatggctaggaagtgctctagctgtgggaacaacggccacaactcgaggacctgcagcgggcacggcgccgggggcgggggcgtgaggctgttcggggtgcagctgcacgtggggtcctcgcccgtggccatgaagaagtgcttcagcatggagtgcctgtcgtcgtcggcgtccgccgcgccggcgtactacgcggccgctctccgccgcgaccaacagcgcctcgncgtcggcctcctcctcctcgtcgctcgtctcggtggaggaggcccccgagaagatggcccacgggtacctctccgacgggctcatgggcagggcggcgcaggagaggaagaagggcgttccatggacggaggacgagcacaggcgattcctggcgggcctggagaagctcgggaagggcgactggcgaggcatctcccggcacttcgtgacgacgcggaccccgacgcaggtggccagccacgcccagaagtacttcctccggcagagcagcctgacgcacaagaagcgcaggtccagcctcttcgacgtggtggagaacgccgagagggcggcgacgagctccatcaagggcatggagcgcctgcggctcaaggacgccatcacgaccgcgaccgcgactggctccgcagaacccggaaccgggacgacggcacagctcccgccggccctgtcgctcggcgtcggcaggcccaccagcgaggcccgaccacgccgcgctgcctccgagcagcctgctgtccctgcagctgccgcggtgctcgggcgggaattgggccgcacggcgccgagcctggcccctggcgccgccgaaacacagccacccttcttcgtcgctgacggcggcaaaggctggtggcctggcgccggacctggagctgaagatctcgaccgcccggcagagcgagcaccagcagcaggtccagatggggccatcgctgccgccgccgccgccgccgccgcagaggacgccctttctggggaccatcagggtcacatgacatgaccggcaaagacggcggcggttagtagggaatatcctgctggtaggagaagagcttttgcccatctgaagctggagaaggttgcttcaaaagataggacggggtgggaaaactggaaagaaggaagcttttggcagcgtgtgcgtgtgtgtgtgttgctggcacctggcagtggcagccgagacgacgatggcgtcgtgtatcatgtgggtgttgtgtatatcatatcatcatcatccgaaagatggaaactttactg

SEQ ID NO: 7721 - protein, 320 aa, Zea mays subsp. mays
  peptide (1)..(320): Ceres Seq. ID no. 12364161
  misc_feature (115)..(115): Xaa is any aa, unknown or other
NILLSSQTSYPSRSRPRFLLLRPPHLAVLTCRSVRSLTPMARKCSSCGNNGHNSRTCSGHGAGGGGVRLFGVQLHVGSSPVAMKKCFSMECLSSSASAAPAYYAAALRRDQQRLXVGLLLLVARLGGGGPREDGPRVPLRRAHGQGGAGEEEGRSMDGGRAQAIPGGPGEAREGRLARHLPALRDDADPDAGGQPRPEVLPPAEQPDAQEAQVQPLRRGGERREGGDELHQGHGAPAAQGRHHDRDRDWLRRTRNRDDGTAPAGPVARRRQAHQRGPTTPRCLRAACCPCSCRGARAGIGPHGAEPGPWRRRNTATLLRR

SEQ ID NO: 7722 - protein, 281 aa, Zea mays subsp. mays
  peptide (1)..(281): Ceres Seq. ID no. 12364162
  misc_feature (76)..(76): Xaa is any aa, unknown or other
MARKCSSCGNNGHNSRTCSGHGAGGGGVRLFGVQLHVGSSPVAMKKCFSMECLSSSASAAPAYYAAALRRDQQRLXVGLLLLVARLGGGGPREDGPRVPLRRAHGQGGAGEEEGRSMDGGRAQAIPGGPGEAREGRLARHLPALRDDADPDAGGQPRPEVLPPAEQPDAQEAQVQPLRRGGERREGGDELHQGHGAPAAQGRHHDRDRDWLRRTRNRDDGTAPAGPVARRRQAHQRGPTTPRCLRAACCPCSCRGARAGIGPHGAEPGPWRRRNTATLLRR

SEQ ID NO: 7723 - protein, 243 aa, Zea mays subsp. mays
  peptide (1)..(243): Ceres Seq. ID no. 12364163
MAHGYLSDGLMGRAAQERKKGVPWTEDEHRRFLAGLEKLGKGDWRGISRHFVTTRTPTQVASHAQKYFLRQSSLTHKKRRSSLFDVVENAERAATSSIKGMERLRLKDAITTATATGSAEPGTGTTAQLPPALSLGVGRPTSEARPRRAASEQPAVPAAAAVLGRELGRTAPSLAPGAAETQPPFFVADGGKGWWPGAGPGAEDLDRPAERAPAAGPDGAIAAAAAAAAAEDALSGDHQGHMT

SEQ ID NO: 7724 - DNA, 1542 bp, Zea mays subsp. mays
  misc_feature (1)..(1542): Ceres Seq. ID no. 12365770
  misc_feature (1)..(1542): Ortholog of  Ceres SEQ ID NO 12364737 as cited in SEQ ID NO 51089
  misc_feature (1)..(1542): Ortholog of  Ceres SEQ ID NO 14311515 as cited in SEQ ID NO 51680
  misc_feature (1)..(1542): Ortholog of  Ceres SEQ ID NO 14306553 as cited in SEQ ID NO 53121
  misc_feature (1)..(1542): Ortholog of  Ceres SEQ ID NO 12581561 as cited in SEQ ID NO 53617
  misc_feature (1)..(1542): Ortholog of  Ceres SEQ ID NO 14316263 as cited in SEQ ID NO 55294
  misc_feature (1)..(1542): Ortholog of  Ceres SEQ ID NO 13595567 as cited in SEQ ID NO 56760
  misc_feature (1)..(1542): Ortholog of  Ceres SEQ ID NO 14315035 as cited in SEQ ID NO 56880
  misc_feature (1)..(1542): Ortholog of  Ceres SEQ ID NO 13594147 as cited in SEQ ID NO 58975
  misc_feature (1)..(1542): Ortholog of  Ceres SEQ ID NO 15176751 as cited in SEQ ID NO 59719
  misc_feature (1)..(1542): Ortholog of  Ceres SEQ ID NO 13597380 as cited in SEQ ID NO 64054
  misc_feature (1)..(1542): Ortholog of  Ceres SEQ ID NO 12625474 as cited in SEQ ID NO 64169
  misc_feature (1)..(1542): Ortholog of  Ceres SEQ ID NO 13597502 as cited in SEQ ID NO 64681
  misc_feature (1)..(1542): Ortholog of  Ceres SEQ ID NO 15180805 as cited in SEQ ID NO 0
agtccccgtgcgccacgccacctgccagtactagctcgcccgctcgatcgcgcccatcaatcaatcaattctcgacctcactactcgatctcgtctcatcagtgtgagtgtccgagcacggcagcacgcgcaatggacgctctgctcgtgactacgaccttcctcgtccccgtgggtggcgctcctcctcgggtccgggtccgggtccgcggcggcgctgccgcgcgccttcttcgtgttcggtaactccctcgtggacaacggcaacaacaactacctgatgacgacggcgcgcgccgacgcgccgccctacgggatcgacttccccacgcacatggccacggggcggttctccaacgggctgaacatccccgacatcatcagcgagcacctcggctcccagcccgcgctgccgtacctgagccccgacctccgcggcgcccagctcctggtcggcgccaacttcgcgtccgccggcgtcggcatcctcaacgacaccgacatacagttcgtgaacatcatcaggatcggacagcagctgcgcaacttccaggagtaccagcagaggctggcggcgttcgtcggcgaggacgcggcgcggcaggccgtcaacgacgcgctcgtgctcatcacgctcggcggcaacgacttcgtcaacaactactacctggtgcccttctccgtccgctctcgccagtttgccatccaggactacgtcccctacctcatctccgagtacaggaagatcctcacgcggctgtacgagctcggggcccggcgcgtggtggtgacgggcaccgggatgatcgggtgcgtgccggcggagctcgccatgcacagcgtcgacggcgagtgcgcgcgcgacctcacggaggcggccgacctcttcaacccgcagctggtgcagatgctctccgagctcaacgccgacatcggcgccgacgtcttcatcgccgccaacaccaaccgggtcagcttcgacttcatgttcaacccgcaggactacgggttcgtgacgtccaaggtggcatgctgcgggcagggcccctacaacgggatcgggctgtgcacgccggcgtccaacgtgtgccccaaccgggacgtgtacgcgtactgggacgcgttccaccccacggagcgcgccaaccggatcatcgtcggccagttcatgcacggatccaccgaccacatcagccccatgaacatcagcaccatcctcgccatggacaacaggaactaggccctgcgcgtggcgtgcctcgacctcgatccatccatctctagccggctgggattgagatgccaatctgcactgccatggatccgtcccgacactggcagctataatactacgagacgacacacatagctactgcatgcatgcgtaatactactagtataagttcgtgtcattggtaattggttatgttcatgaagcttcttttttgtggtttagattgacgtgaattgatggtgagaaattaatcctttattagagatgcatgggttcaatataatacagctgtatgtcaagtttcttcg

SEQ ID NO: 7725 - protein, 319 aa, Zea mays subsp. mays
  peptide (1)..(319): Ceres Seq. ID no. 12365771
MTTARADAPPYGIDFPTHMATGRFSNGLNIPDIISEHLGSQPALPYLSPDLRGAQLLVGANFASAGVGILNDTDIQFVNIIRIGQQLRNFQEYQQRLAAFVGEDAARQAVNDALVLITLGGNDFVNNYYLVPFSVRSRQFAIQDYVPYLISEYRKILTRLYELGARRVVVTGTGMIGCVPAELAMHSVDGECARDLTEAADLFNPQLVQMLSELNADIGADVFIAANTNRVSFDFMFNPQDYGFVTSKVACCGQGPYNGIGLCTPASNVCPNRDVYAYWDAFHPTERANRIIVGQFMHGSTDHISPMNISTILAMDNRN

SEQ ID NO: 7726 - protein, 301 aa, Zea mays subsp. mays
  peptide (1)..(301): Ceres Seq. ID no. 12365772
MATGRFSNGLNIPDIISEHLGSQPALPYLSPDLRGAQLLVGANFASAGVGILNDTDIQFVNIIRIGQQLRNFQEYQQRLAAFVGEDAARQAVNDALVLITLGGNDFVNNYYLVPFSVRSRQFAIQDYVPYLISEYRKILTRLYELGARRVVVTGTGMIGCVPAELAMHSVDGECARDLTEAADLFNPQLVQMLSELNADIGADVFIAANTNRVSFDFMFNPQDYGFVTSKVACCGQGPYNGIGLCTPASNVCPNRDVYAYWDAFHPTERANRIIVGQFMHGSTDHISPMNISTILAMDNRN

SEQ ID NO: 7727 - DNA, 1673 bp, Zea mays subsp. mays
  misc_feature (1)..(1673): Ceres Seq. ID no. 12369078
  misc_feature (1)..(1673): Ortholog of  Ceres SEQ ID NO 15169655 as cited in SEQ ID NO 64922
  misc_feature (1)..(1673): Ortholog of  Ceres SEQ ID NO 13596004 as cited in SEQ ID NO 68212
atagaccccgcgcatggacggcctccatccactccgcccagcacccgcacctcgtcagtcgtcaccgagaagcagaagcagcagctgctgcctgctggtcgttcgttcgcctcgttctctccgcctccccccaccccccgcctcgcttcctcctccgcgcttccttcgccgaggcgtcagcgtcagcgagggcgtataaagcgctccccctccgcgcgcgtccgcacaatcgccaccgcctctccgctcctcgacaagaccaatggcggctgctgcgtcctccgctctgcacgccgttggcgccgtcgcctccgccaagcctagatccgtcgcccccgcggtggcgacgaggaggagcgtgcgcgtggcgcccgcggccaagcgaggaccaggctcgggaggaggcaggctcgtggctcgcagcgccgttgcagccaaggcggatgaggcggccgcggcggcgggatccaagtcaggcggccatgagttgctgatgtttgaggcccttcgtgaagccttgatagaagagatgaatttggatccaacagtgtgcgtcatgggtgaagatgttggtcattatggaggttcatacaaggtgaccaaagggttggctgagatgttcggagatctccgggtccttgatacccctatcgccgagaactccttcactggcatgggagttggagcagcaatgaaggggctgaggcctgttgtggaaggcatgaacatgggtttccttctccttgcctacaaccagatctcgaacaactgcggcatgcttcactacacctcaggcggccagttcaagatcccggtcgtgatccgaggccccggcggtgtcggtcgccagctcggtgccgagcactcgcagcggctagagtcgtacttccagtcgattcctggccttcagatggttgcctgctccactccttacaacgcaaagggcctgatgaaggcggccataaggagcgagaaccccgtggtgctgtttgagcacgtcctcttgtacaacctgaaggagaaaatccccgacgaggagtacatctgctgcctggaggaggcggagatggtgcggccaggtgagcacgtgaccatcctcacgtactcccgcatgaggtaccacgtgatgcaggctgccaagacgctggtgaacaaggggtacgaccccgaggtcatcgacatcaggtcgctgaagccgttcgacctgcacacgatcgggaactcgatcaagaagacccaccgcgtgctgatcgtggaggagtgcatgcggacgggcggcatcggcgccagcctgcggtcggccatcatcgacaacttctgggactacctggacgcccccatcatgtgcctgtcgtcgcaggacgtgccgaccccgtacgccgcgacgctggaggacgccaccgtggtgcagcccgcgcagatcgtggccgccgtcgagcagatctgccaatgatcagtgatatcatggctttgttgagtacctgatctgtggagtcagattaccgtggttttgtttctctgtcgcatcgcgactgtcaccgtgccttagacaagacatgtttttgtattttgcaacgcagaagccatactcgtactggatgccgtttgtgggtggcctatttgttcattgtgcaaagttggatgccatactcgtacactattattatcaggtt

SEQ ID NO: 7728 - protein, 396 aa, Zea mays subsp. mays
  peptide (1)..(396): Ceres Seq. ID no. 12369079
MAAAASSALHAVGAVASAKPRSVAPAVATRRSVRVAPAAKRGPGSGGGRLVARSAVAAKADEAAAAAGSKSGGHELLMFEALREALIEEMNLDPTVCVMGEDVGHYGGSYKVTKGLAEMFGDLRVLDTPIAENSFTGMGVGAAMKGLRPVVEGMNMGFLLLAYNQISNNCGMLHYTSGGQFKIPVVIRGPGGVGRQLGAEHSQRLESYFQSIPGLQMVACSTPYNAKGLMKAAIRSENPVVLFEHVLLYNLKEKIPDEEYICCLEEAEMVRPGEHVTILTYSRMRYHVMQAAKTLVNKGYDPEVIDIRSLKPFDLHTIGNSIKKTHRVLIVEECMRTGGIGASLRSAIIDNFWDYLDAPIMCLSSQDVPTPYAATLEDATVVQPAQIVAAVEQICQ

SEQ ID NO: 7729 - protein, 319 aa, Zea mays subsp. mays
  peptide (1)..(319): Ceres Seq. ID no. 12369080
MFEALREALIEEMNLDPTVCVMGEDVGHYGGSYKVTKGLAEMFGDLRVLDTPIAENSFTGMGVGAAMKGLRPVVEGMNMGFLLLAYNQISNNCGMLHYTSGGQFKIPVVIRGPGGVGRQLGAEHSQRLESYFQSIPGLQMVACSTPYNAKGLMKAAIRSENPVVLFEHVLLYNLKEKIPDEEYICCLEEAEMVRPGEHVTILTYSRMRYHVMQAAKTLVNKGYDPEVIDIRSLKPFDLHTIGNSIKKTHRVLIVEECMRTGGIGASLRSAIIDNFWDYLDAPIMCLSSQDVPTPYAATLEDATVVQPAQIVAAVEQICQ

SEQ ID NO: 7730 - protein, 307 aa, Zea mays subsp. mays
  peptide (1)..(307): Ceres Seq. ID no. 12369081
MNLDPTVCVMGEDVGHYGGSYKVTKGLAEMFGDLRVLDTPIAENSFTGMGVGAAMKGLRPVVEGMNMGFLLLAYNQISNNCGMLHYTSGGQFKIPVVIRGPGGVGRQLGAEHSQRLESYFQSIPGLQMVACSTPYNAKGLMKAAIRSENPVVLFEHVLLYNLKEKIPDEEYICCLEEAEMVRPGEHVTILTYSRMRYHVMQAAKTLVNKGYDPEVIDIRSLKPFDLHTIGNSIKKTHRVLIVEECMRTGGIGASLRSAIIDNFWDYLDAPIMCLSSQDVPTPYAATLEDATVVQPAQIVAAVEQICQ

SEQ ID NO: 7731 - DNA, 1102 bp, Zea mays subsp. mays
  misc_feature (1)..(1102): Ceres Seq. ID no. 12413211
  misc_feature (1)..(1102): Ortholog of  Ceres SEQ ID NO 14301994 as cited in SEQ ID NO 56653
  misc_feature (1)..(1102): Ortholog of  Ceres SEQ ID NO 13595658 as cited in SEQ ID NO 59888
  misc_feature (1)..(1102): Ortholog of  Ceres SEQ ID NO 13661330 as cited in SEQ ID NO 61614
  misc_feature (1)..(1102): Ortholog of  Ceres SEQ ID NO 13596025 as cited in SEQ ID NO 62024
  misc_feature (1)..(1102): Ortholog of  Ceres SEQ ID NO 13662324 as cited in SEQ ID NO 62162
  misc_feature (1)..(1102): Ortholog of  Ceres SEQ ID NO 12625713 as cited in SEQ ID NO 64160
  misc_feature (1)..(1102): Ortholog of  Ceres SEQ ID NO 14302860 as cited in SEQ ID NO 67667
ataaaactaacccacctaaaaccacggtccacgaccctcgcttcacttgtcacggactcgcgtccacaaaccacaaccagctcactcaagaacaaagaacccaacccatggcttctcccaagccgctcctcctgctcgccacctcgttcctgagctgcggcctcctggtggccgccgacttacgccccaatgaccctgaccgtggtgaacaactgcccctacccggtgtggccgggcatccaggccaactccgggcacgacgtcctggagggcggcggcttcttcctcccgccgctctcccacaagtccttcccggcgccggcccacccctggtccggccgcatctgggcgcgcacgggctgcgcgggcgccggcgcgcagctccactgcgccacgggcgactgcggcgggcggctccagtgcggcgggctcggcggcgcggcgcccgcgacgctggcgcaggtgaacctccaccacggcaacgaccagacctcgtacggcgtgagcgtggtggacggcttcaacgtgggcctgtccgtgaccccgcacgagggccgcggcaactgccccgtcctcgcctgccgcaagaacctcaccgagacctgccccggcgagctgcagctgcgctccccggccggcagcgtcctcgcgtgcaagagcggctgcgaggccttccgcaccgacgagctgtgctgccgcaacatgtacaacagcccgcacacctgccgcgcctccaagtactcggagttcttcaagcgagagtgcccgcaggccttcacctacgcgcacgacagcccctngctcacccacgagtgcgccgcgccgcgcgagctcaaggtcatcttctgccactagagctcggagctcggagggcgccgccgccgtcaacaagtgtcgctagtagaggtagtaggatttgcggtgcgtgtgttgtctagtgtgtgctggaatagctgtggctgtgttcccgtcgtgtctgtggcctgtgtaggctgtctgtagtatactgggttgttggatgtatgcgttctggccgcaagactgatgtcatgctgttgctgcttactacagtttgcagtctgaaataaaaacttgtttgatg

SEQ ID NO: 7732 - protein, 311 aa, Zea mays subsp. mays
  peptide (1)..(311): Ceres Seq. ID no. 12413212
  misc_feature (266)..(266): Xaa is any aa, unknown or other
KTNPPKTTVHDPRFTCHGLASTNHNQLTQEQRTQPMASPKPLLLLATSFLSCGLLVAADLRPNDPDRGEQLPLPGVAGHPGQLRARRPGGRRLLPPAALPQVLPGAGPPLVRPHLGAHGLRGRRRAAPLRHGRLRRAAPVRRARRRGARDAGAGEPPPRQRPDLVRRERGGRLQRGPVRDPARGPRQLPRPRLPQEPHRDLPRRAAAALPGRQRPRVQERLRGLPHRRAVLPQHVQQPAHLPRLQVLGVLQARVPAGLHLRARQPXAHPRVRRAARAQGHLLPLELGARRAPPPSTSVASRGSRICGACVV

SEQ ID NO: 7733 - protein, 276 aa, Zea mays subsp. mays
  peptide (1)..(276): Ceres Seq. ID no. 12413213
  misc_feature (231)..(231): Xaa is any aa, unknown or other
MASPKPLLLLATSFLSCGLLVAADLRPNDPDRGEQLPLPGVAGHPGQLRARRPGGRRLLPPAALPQVLPGAGPPLVRPHLGAHGLRGRRRAAPLRHGRLRRAAPVRRARRRGARDAGAGEPPPRQRPDLVRRERGGRLQRGPVRDPARGPRQLPRPRLPQEPHRDLPRRAAAALPGRQRPRVQERLRGLPHRRAVLPQHVQQPAHLPRLQVLGVLQARVPAGLHLRARQPXAHPRVRRAARAQGHLLPLELGARRAPPPSTSVASRGSRICGACVV

SEQ ID NO: 7734 - protein, 221 aa, Zea mays subsp. mays
  peptide (1)..(221): Ceres Seq. ID no. 12413214
  misc_feature (204)..(204): Xaa is any aa, unknown or other
MTLTVVNNCPYPVWPGIQANSGHDVLEGGGFFLPPLSHKSFPAPAHPWSGRIWARTGCAGAGAQLHCATGDCGGRLQCGGLGGAAPATLAQVNLHHGNDQTSYGVSVVDGFNVGLSVTPHEGRGNCPVLACRKNLTETCPGELQLRSPAGSVLACKSGCEAFRTDELCCRNMYNSPHTCRASKYSEFFKRECPQAFTYAHDSPXLTHECAAPRELKVIFCH

SEQ ID NO: 7735 - DNA, 600 bp, Zea mays subsp. mays
  misc_feature (1)..(600): Ceres Seq. ID no. 12365691
  misc_feature (1)..(600): Ortholog of  Ceres SEQ ID NO 12329459 as cited in SEQ ID NO 20533
  misc_feature (1)..(600): Ortholog of  Ceres SEQ ID NO 14302474 as cited in SEQ ID NO 60589
ggcaccagagtcatcgcggcgtgttcaaatcccacaatcttcttgtagcacaccactgtcttcgtccaactcggcggcgatgtctgggcgcggcaagggcggcaaggggctgggcaagggtggtgcgaaacgccaccgtaaggttctccgcgacaacatccagggtatcacgaagccggcaatccggaggctggcgaggaggggcggcgtgaagcgtatctccgggcttatctacgaggagacccgcggcgtgctcaagatcttcctcgagaatgtcatccgcgacgcggtcacctacaccgagcacgctcgccgcaagaccgtcaccgccatggatgttgtgtacgccctcaagcgccagggccgcactctgtacgggttcggtggttgagcgcatctcttccctcgtctgcagcggctgccggtggcgtttcctcagttccctctgccttgcttggcttgatgtagagagttatcagattaaaatatctctgatgtgcttcgttattgggtggaatcatgtgtcccagcagtgctgggaaatcgagatcaagatgtatctttctttgcagtaatgaaatgttaaaatcgagatcaaaa

SEQ ID NO: 7736 - protein, 129 aa, Zea mays subsp. mays
  peptide (1)..(129): Ceres Seq. ID no. 12365692
APESSRRVQIPQSSCSTPLSSSNSAAMSGRGKGGKGLGKGGAKRHRKVLRDNIQGITKPAIRRLARRGGVKRISGLIYEETRGVLKIFLENVIRDAVTYTEHARRKTVTAMDVVYALKRQGRTLYGFGG

SEQ ID NO: 7737 - protein, 103 aa, Zea mays subsp. mays
  peptide (1)..(103): Ceres Seq. ID no. 12365693
MSGRGKGGKGLGKGGAKRHRKVLRDNIQGITKPAIRRLARRGGVKRISGLIYEETRGVLKIFLENVIRDAVTYTEHARRKTVTAMDVVYALKRQGRTLYGFGG

SEQ ID NO: 7738 - protein, 100 aa, Zea mays subsp. mays
  peptide (1)..(100): Ceres Seq. ID no. 12365694
MSSATRSPTPSTLAARPSPPWMLCTPSSARAALCTGSVVERISSLVCSGCRWRFLSSLCLAWLDVESYQIKISLMCFVIGWNHVSQQCWEIEIKMYLSLQ

SEQ ID NO: 7739 - DNA, 1068 bp, Zea mays subsp. mays
  misc_feature (1)..(1068): Ceres Seq. ID no. 12373184
  misc_feature (1)..(1068): Ortholog of  Ceres SEQ ID NO 13594260 as cited in SEQ ID NO 57558
  misc_feature (1)..(1068): Ortholog of  Ceres SEQ ID NO 13654956 as cited in SEQ ID NO 62966
atctctctctctctctctcttcctgcgcccacacgcacgtttccactccgaccgggccagagccccgccgggcagtttccgttcgctgttgcgatccacctcctgcctgcacatcccctcccccgagttcgagccggagggccgaagagtagatctgcggcggcggccagaggatggccgtcaactgggagctgcggggctgctgcgaccacgaccagaggatcttcatcgccgccgtcggcgtctccaccgtcgtcatcctcctcctctggaggacgttcctgctcacgccgttcaagctcatcaccgtcttcctccacgagaccagccacgcgcttgcctgcaagctcacttgcggcgatgtagaaggcatgcaggtccatgcgaatgagggtggcgttactcaaacccggggtggcatatattggataatcttgcccgctggatatctgggttcatcattttggggaatggtcttcatacttgcatccacaaatctcctcactacaagaattgcagcgggttgtttcatacttgcattgtttattgttctttttgttgcagaaaatgtaagacttgtttgaattgtgcagtggtttcttcgctggctctgccttggattcattgtgttcattgctgttgtttgggtcatacaagaatttacatctttccatgttctgaaatatgtgatcttattcataggtgtgatgaacagcttattttcagtttacgatatttatgatgacttgatatcccgaagagttaacacaagtgatgctgaaaagtttgctgaaatctgcccttgcccctgcaatggttttgcatggggtgttatatggggattcatctcgtttatctttctctgcgcttcaatataccttggactggtcatattgtcttgagggttcgccattttgatctgacaatcgactctggttggctttttcgaagcttcgttgctcgaggttttggttcaagcttacaaggttctggtggttgtacagtatacatgtgcagggtaaacatgtacatccattataagttaatttggtggggattattcatggg

SEQ ID NO: 7740 - protein, 136 aa, Zea mays subsp. mays
  peptide (1)..(136): Ceres Seq. ID no. 12373185
MAVNWELRGCCDHDQRIFIAAVGVSTVVILLLWRTFLLTPFKLITVFLHETSHALACKLTCGDVEGMQVHANEGGVTQTRGGIYWIILPAGYLGSSFWGMVFILASTNLLTTRIAAGCFILALFIVLFVAENVRLV

SEQ ID NO: 7741 - protein, 129 aa, Zea mays subsp. mays
  peptide (1)..(129): Ceres Seq. ID no. 12373186
SLSLSLFLRPHARFHSDRARAPPGSFRSLLRSTSCLHIPSPEFEPEGRRVDLRRRPEDGRQLGAAGLLRPRPEDLHRRRRRLHRRHPPPLEDVPAHAVQAHHRLPPRDQPRACLQAHLRRCRRHAGPCE

SEQ ID NO: 7742 - protein, 121 aa, Zea mays subsp. mays
  peptide (1)..(121): Ceres Seq. ID no. 12373187
ISLSLSLPAPTRTFPLRPGQSPAGQFPFAVAIHLLPAHPLPRVRAGGPKSRSAAAARGWPSTGSCGAAATTTRGSSSPPSASPPSSSSSSGGRSCSRRSSSSPSSSTRPATRLPASSLAAM

SEQ ID NO: 7743 - DNA, 1754 bp, Zea mays subsp. mays
  misc_feature (1)..(1754): Ceres Seq. ID no. 12344330
  misc_feature (1)..(1754): Ortholog of  Ceres SEQ ID NO 14313714 as cited in SEQ ID NO 54084
aagtagtgcttttcttctcttgtcacgttcacggggcggccgatcgaccgttcacctcgcccgacggcccaagcagcccatgtcttcgtcgggcccctccccggcgacgggaatccacgcgtcgccgccgttgggccttttgccggcgacgggaacccatcacaccaggtcatggggcaaaacaacctccacaagttttactggttctaccaccaaacatgagcagagcttgcatggaaatgttaagccgttgcaattggcggcaaatgaatcctctcgtttggcttacagaagtccagcacttaaaaaccagtggaatcttcctgctagttcttcctccactaatgtggttaccacctttgatgataacgaacacgtgtcttccagtgttattgaagaaaaagttggagtactgttattaaaccttggtggtccagagacacttgacgatgttcaaccatttttattcaacctatttgctgatccagatatcattcgactccctaggctcttcaggtttcttcaaagaccactggccaaacttatttctacttttagagctcctaagagtaaagaagggtatgcttcaattggtggtgggtcgccgttaaggaaaattactgatgaacaggcgaatgctttgaagattgccctggaaaagaaaaaattgaacgcaaacatatatgttgggatgcggtattggtaccctttcacagaagaggccattgatcaaattaaaaaggataagattaccaagctcgttgttcttcccctttaccctcagtactccatatcaacaagtgggtcaagcattcgtgttctccaagacattgtcaaggaagattcatatttttctggtttgccaatttccattattgaatcatggtaccaacgagatggctatgtgaaatcaatgtctgacctaattgaaaaggagctctccgccttctccaatcctgaagaggttatgatattcttcagtgcacatggtgtgccacttacctatgttgaggatgctggagatccttacagagatcagatggaggattgtattgctttgatcatgggggagttaagatcaagaggaatcttaaatagtcacactttggcgtaccagagtcgggtggggccagttcaatggctgaagccatatactgatgaagttttagtagaacttggtcaaaagggtgtgaagagcctcctggctgttccagtaagctttgtgagtgagcacatcgagacattggaagaaattgacatggagtacaaggagttggctctggaatcaggcatcaagaactggggtcgggttcctgctcttggatgcacttcaacattcatctccgaccttgcagatgctgtcgtcgaagccctgccctctgcttcagcgctcgcgaccagaaagcctgacgacatcgattccagcatggacctgacgcattacctcaccaagatgctgtttggctcaatcttggcatttgtcctgctgctatcaccaaggctagtttccgccttccggagcaccatgctttaagtttttctccaaagcactaaatttgagattgagaatgagatatttcattttggacctttttttcctccttaatagaatgatgtgcagttcttctgctcgttccagagaaaaaaataactgctaggaactcacaaggtagtaggggattgcaaaagggatgtgaacagctgttttgatcgaagttgtctataaataccgtgctcacggactctgtattttg

SEQ ID NO: 7744 - protein, 510 aa, Zea mays subsp. mays
  peptide (1)..(510): Ceres Seq. ID no. 12344331
SSAFLLLSRSRGGRSTVHLARRPKQPMSSSGPSPATGIHASPPLGLLPATGTHHTRSWGKTTSTSFTGSTTKHEQSLHGNVKPLQLAANESSRLAYRSPALKNQWNLPASSSSTNVVTTFDDNEHVSSSVIEEKVGVLLLNLGGPETLDDVQPFLFNLFADPDIIRLPRLFRFLQRPLAKLISTFRAPKSKEGYASIGGGSPLRKITDEQANALKIALEKKKLNANIYVGMRYWYPFTEEAIDQIKKDKITKLVVLPLYPQYSISTSGSSIRVLQDIVKEDSYFSGLPISIIESWYQRDGYVKSMSDLIEKELSAFSNPEEVMIFFSAHGVPLTYVEDAGDPYRDQMEDCIALIMGELRSRGILNSHTLAYQSRVGPVQWLKPYTDEVLVELGQKGVKSLLAVPVSFVSEHIETLEEIDMEYKELALESGIKNWGRVPALGCTSTFISDLADAVVEALPSASALATRKPDDIDSSMDLTHYLTKMLFGSILAFVLLLSPRLVSAFRSTML

SEQ ID NO: 7745 - protein, 484 aa, Zea mays subsp. mays
  peptide (1)..(484): Ceres Seq. ID no. 12344332
MSSSGPSPATGIHASPPLGLLPATGTHHTRSWGKTTSTSFTGSTTKHEQSLHGNVKPLQLAANESSRLAYRSPALKNQWNLPASSSSTNVVTTFDDNEHVSSSVIEEKVGVLLLNLGGPETLDDVQPFLFNLFADPDIIRLPRLFRFLQRPLAKLISTFRAPKSKEGYASIGGGSPLRKITDEQANALKIALEKKKLNANIYVGMRYWYPFTEEAIDQIKKDKITKLVVLPLYPQYSISTSGSSIRVLQDIVKEDSYFSGLPISIIESWYQRDGYVKSMSDLIEKELSAFSNPEEVMIFFSAHGVPLTYVEDAGDPYRDQMEDCIALIMGELRSRGILNSHTLAYQSRVGPVQWLKPYTDEVLVELGQKGVKSLLAVPVSFVSEHIETLEEIDMEYKELALESGIKNWGRVPALGCTSTFISDLADAVVEALPSASALATRKPDDIDSSMDLTHYLTKMLFGSILAFVLLLSPRLVSAFRSTML

SEQ ID NO: 7746 - protein, 280 aa, Zea mays subsp. mays
  peptide (1)..(280): Ceres Seq. ID no. 12344333
MRYWYPFTEEAIDQIKKDKITKLVVLPLYPQYSISTSGSSIRVLQDIVKEDSYFSGLPISIIESWYQRDGYVKSMSDLIEKELSAFSNPEEVMIFFSAHGVPLTYVEDAGDPYRDQMEDCIALIMGELRSRGILNSHTLAYQSRVGPVQWLKPYTDEVLVELGQKGVKSLLAVPVSFVSEHIETLEEIDMEYKELALESGIKNWGRVPALGCTSTFISDLADAVVEALPSASALATRKPDDIDSSMDLTHYLTKMLFGSILAFVLLLSPRLVSAFRSTML

SEQ ID NO: 7747 - DNA, 1192 bp, Zea mays subsp. mays
  misc_feature (1)..(1192): Ceres Seq. ID no. 12343186
  misc_feature (1)..(1192): Ortholog of  Ceres SEQ ID NO 12615217 as cited in SEQ ID NO 62470
acaccgtccaccggcacgtccaccggctccatggcgctccacgccgtctcctccgcggcggtctcctccccgttgcgctctctctcacgcagcctcccccagcgcccaggctgtggttgtttaccaaagcagtccgtcatgatttactccacaaaatttgcaagacctcaggctggaccggtggacttcgctggcaggcctctggttcttggacgctcggacaagagagcagttttgatgcatgccactattgaagaaatcgaagcggagaaatccctcatcgaagaccaagctaaagaaaagatggagaaggcaatcgaaacagtccaagctaacttcaacactgtgaggacaggacgtgcaaacccggccatgcttgaccggattgaggttgagtactacggaactccagtaaacttgaagagcattgcacagataagcactccagatgcaacttctcttcttattcaaccatatgataagtcaagcctcaagcttattgagaaaactatagttgctgcaaatcttggtgtgacaccaagcaatgatggagaagtaatacgagtgactgtcccaccattgacatctgatcgcagaaaggaattatcaaagacagtagctaaattagctgaagatggcaaggttgctataaggaacataagaagagatgcaatcaaagcttatgataaactagagaaggaaaagaagctttctgaggacaatgtgaaagatttatcagctgatttacaaaaagtcacagatgagtacatgaaaaagatcgaatccatccagaagcagaaggaacaggaactgatgaaaatttagacctcaagctgactgtatggctggtgaggagtaaccgcctccgtgaagcatggacccctgcatatgttggtgtttctgaagcaatttgtttggttcatggctttggcgtctcggcgctgcgccagggatgcacgttttgaatcaggcgctttgctggaacttttgggtgcacacaagttgagacaatgctgctgctgctgtgtgtgtgtgtttttagattaagacaatgctgctgtgttttttctttgagattaagacaatgctgttgcgtgtgttcttctcgttttctgtaatgttcgtaaatagtctcttcgtcgccgtgttgtctgactgctacattgtcaatatttcaaaacatacatctctg

SEQ ID NO: 7748 - protein, 274 aa, Zea mays subsp. mays
  peptide (1)..(274): Ceres Seq. ID no. 12343187
TPSTGTSTGSMALHAVSSAAVSSPLRSLSRSLPQRPGCGCLPKQSVMIYSTKFARPQAGPVDFAGRPLVLGRSDKRAVLMHATIEEIEAEKSLIEDQAKEKMEKAIETVQANFNTVRTGRANPAMLDRIEVEYYGTPVNLKSIAQISTPDATSLLIQPYDKSSLKLIEKTIVAANLGVTPSNDGEVIRVTVPPLTSDRRKELSKTVAKLAEDGKVAIRNIRRDAIKAYDKLEKEKKLSEDNVKDLSADLQKVTDEYMKKIESIQKQKEQELMKI

SEQ ID NO: 7749 - protein, 264 aa, Zea mays subsp. mays
  peptide (1)..(264): Ceres Seq. ID no. 12343188
MALHAVSSAAVSSPLRSLSRSLPQRPGCGCLPKQSVMIYSTKFARPQAGPVDFAGRPLVLGRSDKRAVLMHATIEEIEAEKSLIEDQAKEKMEKAIETVQANFNTVRTGRANPAMLDRIEVEYYGTPVNLKSIAQISTPDATSLLIQPYDKSSLKLIEKTIVAANLGVTPSNDGEVIRVTVPPLTSDRRKELSKTVAKLAEDGKVAIRNIRRDAIKAYDKLEKEKKLSEDNVKDLSADLQKVTDEYMKKIESIQKQKEQELMKI

SEQ ID NO: 7750 - protein, 228 aa, Zea mays subsp. mays
  peptide (1)..(228): Ceres Seq. ID no. 12343189
MIYSTKFARPQAGPVDFAGRPLVLGRSDKRAVLMHATIEEIEAEKSLIEDQAKEKMEKAIETVQANFNTVRTGRANPAMLDRIEVEYYGTPVNLKSIAQISTPDATSLLIQPYDKSSLKLIEKTIVAANLGVTPSNDGEVIRVTVPPLTSDRRKELSKTVAKLAEDGKVAIRNIRRDAIKAYDKLEKEKKLSEDNVKDLSADLQKVTDEYMKKIESIQKQKEQELMKI

SEQ ID NO: 7751 - DNA, 1421 bp, Zea mays subsp. mays
  misc_feature (1)..(1421): Ceres Seq. ID no. 12408617
  misc_feature (1)..(1421): Ortholog of  Ceres SEQ ID NO 13594308 as cited in SEQ ID NO 57706
cagacacctaaacgatgacacagcgtgcacccaccaccaccaccagcgccgactgccgagcgccggccgcgataccgtcgtgtcccccctccccaccgcattagcgccggccgacaaaattactaggtgcttaatttaactagtggccctaggcgtgaaacttcaccagctccgccactgcccatggccaacggctttccggaccctcgctgcgtcgtcctcaccgccgacgctgcccgatccctcgtcggattccgtcgacgccttcctcttcgactgcgatggcgtcatttggaagggagatatgctcattgaaggggtcccagagacgatggagctactgaggaaactgggaaagaaattagtttttgtaacaaataactctagaaagtcaagaaggcaatactcaaagaaattcagatcacttggacttgaagttactgaggaagagatttttacatcatcgtttgcggcagccatgttcttgaagttaaataattttcctccagaaaagaaggtttatgttgttggtgaagatggaatcttggaagagctcaagttagctggttttgaatgttttggtggtccggaggatggcaagaaaaacataaagttggaggcggatttctactttgaacatgacaaaagtgttggagctgtcattgttggacttgatcagtacttcaattattataaaatgcagtatgcaagaacatgtattagtgagaaccctggctgctttttcattgcgaccaaccgtgatccaaccgggcatatgacatctgcccaagaatggccaggagctggagctatggttgctgcagtaagctgctcagtacagaaagaacccattgttgttggaaaaccttcaggctttttgatggacttcctcttgaaaagcttcaatctggagacgtcaaggatgtgcatggttggtgatagactggacacggacatactatttggccagaacaccggctgcaagaccctccttgttttgtctggttgcactgccttaccagaagtgcaggatgctcgtaacaatatccatccagatctctacacaaacagcgtgtatgatctagttgggttactgcagaagtaattctccttggccgcgttgcagcgcaatctcagcacgctttggatagcgcctatcagcaatttattacgtggattacttgcatgaagccatgtgttcttgaaacaacaattttgaactttctttggggtaacctgtttgacagtaacaaaatctttcaattggatcctacaaattagaccaatttgacaaccttgtaagcgtggctgtaaagctttaaatctggcaacttgattcccttgctggaaaatatattggttggagtatggaattgtacagaatcgaattgtaatgaagcaacgtgttgtactttgttgct

SEQ ID NO: 7752 - protein, 266 aa, Zea mays subsp. mays
  peptide (1)..(266): Ceres Seq. ID no. 12408618
MLIEGVPETMELLRKLGKKLVFVTNNSRKSRRQYSKKFRSLGLEVTEEEIFTSSFAAAMFLKLNNFPPEKKVYVVGEDGILEELKLAGFECFGGPEDGKKNIKLEADFYFEHDKSVGAVIVGLDQYFNYYKMQYARTCISENPGCFFIATNRDPTGHMTSAQEWPGAGAMVAAVSCSVQKEPIVVGKPSGFLMDFLLKSFNLETSRMCMVGDRLDTDILFGQNTGCKTLLVLSGCTALPEVQDARNNIHPDLYTNSVYDLVGLLQK

SEQ ID NO: 7753 - protein, 257 aa, Zea mays subsp. mays
  peptide (1)..(257): Ceres Seq. ID no. 12408619
MELLRKLGKKLVFVTNNSRKSRRQYSKKFRSLGLEVTEEEIFTSSFAAAMFLKLNNFPPEKKVYVVGEDGILEELKLAGFECFGGPEDGKKNIKLEADFYFEHDKSVGAVIVGLDQYFNYYKMQYARTCISENPGCFFIATNRDPTGHMTSAQEWPGAGAMVAAVSCSVQKEPIVVGKPSGFLMDFLLKSFNLETSRMCMVGDRLDTDILFGQNTGCKTLLVLSGCTALPEVQDARNNIHPDLYTNSVYDLVGLLQK

SEQ ID NO: 7754 - protein, 208 aa, Zea mays subsp. mays
  peptide (1)..(208): Ceres Seq. ID no. 12408620
MFLKLNNFPPEKKVYVVGEDGILEELKLAGFECFGGPEDGKKNIKLEADFYFEHDKSVGAVIVGLDQYFNYYKMQYARTCISENPGCFFIATNRDPTGHMTSAQEWPGAGAMVAAVSCSVQKEPIVVGKPSGFLMDFLLKSFNLETSRMCMVGDRLDTDILFGQNTGCKTLLVLSGCTALPEVQDARNNIHPDLYTNSVYDLVGLLQK

SEQ ID NO: 7755 - DNA, 1369 bp, Zea mays subsp. mays
  misc_feature (1)..(1369): Ceres Seq. ID no. 12408614
  misc_feature (1)..(1369): Ortholog of  Ceres SEQ ID NO 15177079 as cited in SEQ ID NO 51989
  misc_feature (1)..(1369): Ortholog of  Ceres SEQ ID NO 14315354 as cited in SEQ ID NO 58232
  misc_feature (1)..(1369): Ortholog of  Ceres SEQ ID NO 13596392 as cited in SEQ ID NO 62136
  misc_feature (1)..(1369): Ortholog of  Ceres SEQ ID NO 14313244 as cited in SEQ ID NO 66802
  misc_feature (1)..(1369): Ortholog of  Ceres SEQ ID NO 13654360 as cited in SEQ ID NO 67980
  misc_feature (1)..(1369): Ortholog of  Ceres SEQ ID NO 13596394 as cited in SEQ ID NO 68561
ttttaaagaaaagctccccccatccacgaacaaaagatcgcgaagcgagagggaatgatggaggcataggcactagcacctcctcgcctccacctccgtcctcttcgatcccgtccaatcccccgcgccccggcgcccctctccgccggcggctttgctgggtcccgcgctcctcctcctcctaggctgttctggttggggctgcggcggagggaactaggtaagggggaaggaaaggggaggtttgagggagagcgcagcggcagcggcagcagcgatgccatcgcccggatctggaccgccagatctcgcagctgcgggattgcaagttcctgcctgaggcggaggtcaaaacgctatgcgagcaggccaaggcgatcctcatggaggagtggaacgtgcagcccgtgcgttgccccgtcactgtctgcggcgacatccacggccagttctacgacctcatcgagctctttcgcatcggtggcgacgcgcccgacaccaactacctctttatgggcgactacgtcgaccgtggctactactcagtggagactgtgtccttattggtggctctaaaagtacgttatagagacagaatcacaatattgagaggaaatcatgagagtagacaaataactcaagtgtatggcttctatgatgaatgcttgcggaaatatggaaatgcaaatgtgtggaagtactttacagacttgtttgattatttgcctctcacagctcttatagaaaatcagatcttctgcctacatggtggtctctctccatcactggatactttggataatgtccgctcccttgatcgcatacaagaggtcccgcatgaaggacctatgtgtgatcttttgtggtctgacccggatgacagatgtggatggggaatttcaccaaggggtgctggatacacatttggccaagatattgcacaacaattcaaccatacaaatgggctaagtcttatttcaagagctcatcaacttgtaatggaagggttcaattggtgccaggataagaacgttgtgacagtgttcagcgcgcctaactattgctaccgatgcgggaacatggctgcgatcctcgaaattggcgagaacatggatcagaacttcctccaattcgacccagctccgcggcagattgagccggacatgacgcgcaagaccccagactactttttgtaatcagcatgctggctttctttcaacttgtctactgcagcgccagcacctgtagatctccttagaaaatggtgtttcctctagccgccttgtacccccatcattcttttggtgtggagattttattgccgcttctcagaacattgaggttgttgaaagtacatggcattgggtct

SEQ ID NO: 7756 - protein, 270 aa, Zea mays subsp. mays
  peptide (1)..(270): Ceres Seq. ID no. 12408615
MEEWNVQPVRCPVTVCGDIHGQFYDLIELFRIGGDAPDTNYLFMGDYVDRGYYSVETVSLLVALKVRYRDRITILRGNHESRQITQVYGFYDECLRKYGNANVWKYFTDLFDYLPLTALIENQIFCLHGGLSPSLDTLDNVRSLDRIQEVPHEGPMCDLLWSDPDDRCGWGISPRGAGYTFGQDIAQQFNHTNGLSLISRAHQLVMEGFNWCQDKNVVTVFSAPNYCYRCGNMAAILEIGENMDQNFLQFDPAPRQIEPDMTRKTPDYFL

SEQ ID NO: 7757 - protein, 227 aa, Zea mays subsp. mays
  peptide (1)..(227): Ceres Seq. ID no. 12408616
MGDYVDRGYYSVETVSLLVALKVRYRDRITILRGNHESRQITQVYGFYDECLRKYGNANVWKYFTDLFDYLPLTALIENQIFCLHGGLSPSLDTLDNVRSLDRIQEVPHEGPMCDLLWSDPDDRCGWGISPRGAGYTFGQDIAQQFNHTNGLSLISRAHQLVMEGFNWCQDKNVVTVFSAPNYCYRCGNMAAILEIGENMDQNFLQFDPAPRQIEPDMTRKTPDYFL

SEQ ID NO: 7758 - DNA, 1760 bp, Zea mays subsp. mays
  misc_feature (1)..(1760): Ceres Seq. ID no. 12423851
  misc_feature (1)..(1760): Ortholog of  Ceres SEQ ID NO 14306152 as cited in SEQ ID NO 694
  misc_feature (1)..(1760): Ortholog of  Ceres SEQ ID NO 14314312 as cited in SEQ ID NO 57283
aaaaccgaccggcctcgctttcgccggttacccggtcaaacgcatcaaccgccggcacgtctccgatcggatcacgatggctgccccgtgcccccgccggtcaggccaggtcgcgtggtcacgtgcgacgcgcatgccgtcctcggccggcgccccagccccctcgccgtgtccttttattctcccccgcctcaccgcccgcatccccaattcacgcccccaccacgacttccgtgctcgccgccttctcggactaggggggttcggctcgagatctgatttcgggcgccggaggactacatggaggttagggagatggcgatggccgcggcggctgcggctgcggcgtccggcgggggaggcgtcaagctgccgccgcccaatcccaacctgccctacagggaggactgctggagcgacggcgagacggcagctctcgtctccgcctggggcagccgctacgtcgagctcaaccgcggtaacctgcgccagaagcagtggcaggaggtggcggacgccgtcaactcgcgccggggagcctccgcgcggcgccgcccgccgcgcaccgacatccagtgcaagaaccgcgtcgataccctcaagaagaagtacaaggccgagctcgcccgcaacgcgccgtccgcctggtcctacttccccgagctcgaccgcctcgtcggcccaaccctcagcgcctccgcctccaagagacccttggcgtctctgcctcctcaattcgctttgcccatgcatccaccagccgtgcggaggcccccgtcgccttcgccgtcatcgtcctccccgccgcagccgcctatggctttgcctctacccaattaccgccgtgggtccccgctccctgctgctgccctcatccagaaggaagccgcggctgctgcggctgctgcgtctgattcagaggactccgatgatgcggctggcggcaataatcacaaattgccccggtcgccttcgcgctcggtgtcgtcactctctgccagtaacaagaagcgctgcagagatgaggctggcagcagtgctgacaaaggtttcagagagttagcaagggcgatcgaagcttttgcggagatgtatgagcgtgtggagagtgctaagcaaaagcatgtggtggagatggagcgccagcgaattgaattcctgaagcaactggaggtgaaacgcatggagaatttcgttgatgcccatgtgaagctggctagagcaaagcgcacgaagaagactacagggggtgctgccgacggtgctggtggtatggagttggttgccaccgttgctgcgctgcctttcgtctccacctccaccttcctctgatattgaggaagagtttagagaaagagggagcaaaaaatggtggtccaaggaagcaagctaatccgaaagatagcaagtgaagcgtttggccgggcgtttgggtggtgcgaatttctgggtgatcaaaactggaatgtggattctgcagttggagatagcctttcttttagttgatgacttgaatctgtgccttttgttttcgcctgtctgtcgtgatctggttgtaaataagaaagtcttatgccgctagtcgcaggtcgaactttatcttctatcctaggccctctacttatctaggttgatagtgtaaggtgtctagatagagatctgacctaattgctattctgtcggatcgtttgatcgcgatggatgtcgttgttctgaaactttcctatttcctaatgaaatagggggcttcgccccttcgt

SEQ ID NO: 7759 - protein, 353 aa, Zea mays subsp. mays
  peptide (1)..(353): Ceres Seq. ID no. 12423852
KPTGLAFAGYPVKRINRRHVSDRITMAAPCPRRSGQVAWSRATRMPSSAGAPAPSPCPFILPRLTARIPNSRPHHDFRARRLLGLGGFGSRSDFGRRRTTWRLGRWRWPRRLRLRRPAGEASSCRRPIPTCPTGRTAGATARRQLSSPPGAAATSSSTAVTCARSSGRRWRTPSTRAGEPPRGAARRAPTSSARTASIPSRRSTRPSSPATRRPPGPTSPSSTASSAQPSAPPPPRDPWRLCLLNSLCPCIHQPCGGPRRLRRHRPPRRSRLWLCLYPITAVGPRSLLLPSSRRKPRLLRLLRLIQRTPMMRLAAIITNCPGRLRARCRHSLPVTRSAAEMRLAAVLTKVSES

SEQ ID NO: 7760 - protein, 343 aa, Zea mays subsp. mays
  peptide (1)..(343): Ceres Seq. ID no. 12423853
MEVREMAMAAAAAAAASGGGGVKLPPPNPNLPYREDCWSDGETAALVSAWGSRYVELNRGNLRQKQWQEVADAVNSRRGASARRRPPRTDIQCKNRVDTLKKKYKAELARNAPSAWSYFPELDRLVGPTLSASASKRPLASLPPQFALPMHPPAVRRPPSPSPSSSSPPQPPMALPLPNYRRGSPLPAAALIQKEAAAAAAAASDSEDSDDAAGGNNHKLPRSPSRSVSSLSASNKKRCRDEAGSSADKGFRELARAIEAFAEMYERVESAKQKHVVEMERQRIEFLKQLEVKRMENFVDAHVKLARAKRTKKTTGGAADGAGGMELVATVAALPFVSTSTFL

SEQ ID NO: 7761 - protein, 338 aa, Zea mays subsp. mays
  peptide (1)..(338): Ceres Seq. ID no. 12423854
MAMAAAAAAAASGGGGVKLPPPNPNLPYREDCWSDGETAALVSAWGSRYVELNRGNLRQKQWQEVADAVNSRRGASARRRPPRTDIQCKNRVDTLKKKYKAELARNAPSAWSYFPELDRLVGPTLSASASKRPLASLPPQFALPMHPPAVRRPPSPSPSSSSPPQPPMALPLPNYRRGSPLPAAALIQKEAAAAAAAASDSEDSDDAAGGNNHKLPRSPSRSVSSLSASNKKRCRDEAGSSADKGFRELARAIEAFAEMYERVESAKQKHVVEMERQRIEFLKQLEVKRMENFVDAHVKLARAKRTKKTTGGAADGAGGMELVATVAALPFVSTSTFL

SEQ ID NO: 7762 - DNA, 997 bp, Zea mays subsp. mays
  misc_feature (1)..(997): Ceres Seq. ID no. 12352560
  misc_feature (1)..(997): Ortholog of  Ceres SEQ ID NO 15179139 as cited in SEQ ID NO 1093
  misc_feature (1)..(997): Ortholog of  Ceres SEQ ID NO 15226793 as cited in SEQ ID NO 58689
gattcactcacgaattccccattcccttccctatcgcatcgcatcgagagccaggccagccagccacctctgcttggtctccatggccgccgcgctcaggtccccggcctcggccaaggtctcgagccccgccgccgcctccaaggtgcgccaggcgtccagagtcgcggtgggcgggttccggcagcatccccggagccgtggcggccccgtggccgtgcgggcgtcgctgttctcgcccaagcccgcggcggccaaggacgcgcggccgaccaaggtgcaggagctgtacgtgtacgagatgaacgagcgggaccgcgagagcccggcgtacctgcgcctcagcgccaagcagacggagaacgcgctgggcgacctggtccccttcacaaacaaggtttacaacggcagcctggacaagcggctgggcatcaccgccggcatctgcgtgctcatccagcacgtccccgaccgcaacggcgaccggtacgaggccatctacagcttctacttcggcgactacggccacatctcggtgcagggcgcgtacctgacctacgaggagtcgtacctggccgtcacgggcggctccggcgtcttcgagggcgcctacggccaggtcaagctccaccagatcgtcttccccttcaagatcttctacaccttctacctccggggcatcccggacctgcccagggacctgctctgcacgcccgtcccgccctcccccaccgtcgagcccacgcccgccgccagggccgccgagccgcacgcctgcgtcaacaactacaccaactgactcatcaattccagcccaggaaccatctctgcctgccgtgcctgtccccccctgctcctcactcgatttgtatgtttgtatggcttagggttcttcgattcgtacgcgcgtgcgtggtagcaccaataaagacgcgatcgatcgagttgtgtacttgtgtcacccttgaacaaacaatgagatatttgtttgtcgtcg

SEQ ID NO: 7763 - protein, 332 aa, Zea mays subsp. mays
  peptide (1)..(332): Ceres Seq. ID no. 12352561
DSLTNSPFPSLSHRIESQASQPPLLGLHGRRAQVPGLGQGLEPRRRLQGAPGVQSRGGRVPAASPEPWRPRGRAGVAVLAQARGGQGRAADQGAGAVRVRDERAGPREPGVPAPQRQADGERAGRPGPLHKQGLQRQPGQAAGHHRRHLRAHPARPRPQRRPVRGHLQLLLRRLRPHLGAGRVPDLRGVVPGRHGRLRRLRGRLRPGQAPPDRLPLQDLLHLLPPGHPGPAQGPALHARPALPHRRAHARRQGRRAARLRQQLHQLTHQFQPRNHLCLPCLSPPAPHSICMFVWLRVLRFVRACVVAPIKTRSIELCTCVTLEQTMRYLFVV

SEQ ID NO: 7764 - protein, 265 aa, Zea mays subsp. mays
  peptide (1)..(265): Ceres Seq. ID no. 12352562
IHSRIPHSLPYRIASRARPASHLCLVSMAAALRSPASAKVSSPAAASKVRQASRVAVGGFRQHPRSRGGPVAVRASLFSPKPAAAKDARPTKVQELYVYEMNERDRESPAYLRLSAKQTENALGDLVPFTNKVYNGSLDKRLGITAGICVLIQHVPDRNGDRYEAIYSFYFGDYGHISVQGAYLTYEESYLAVTGGSGVFEGAYGQVKLHQIVFPFKIFYTFYLRGIPDLPRDLLCTPVPPSPTVEPTPAARAAEPHACVNNYTN

SEQ ID NO: 7765 - protein, 238 aa, Zea mays subsp. mays
  peptide (1)..(238): Ceres Seq. ID no. 12352563
MAAALRSPASAKVSSPAAASKVRQASRVAVGGFRQHPRSRGGPVAVRASLFSPKPAAAKDARPTKVQELYVYEMNERDRESPAYLRLSAKQTENALGDLVPFTNKVYNGSLDKRLGITAGICVLIQHVPDRNGDRYEAIYSFYFGDYGHISVQGAYLTYEESYLAVTGGSGVFEGAYGQVKLHQIVFPFKIFYTFYLRGIPDLPRDLLCTPVPPSPTVEPTPAARAAEPHACVNNYTN

SEQ ID NO: 7766 - DNA, 1192 bp, Zea mays subsp. mays
  misc_feature (1)..(1192): Ceres Seq. ID no. 12346157
  misc_feature (1)..(1192): Ortholog of  Ceres SEQ ID NO 13662574 as cited in SEQ ID NO 64794
gtatctcctctctggacgaacagatcctctctggacgaacagaaaggttaccagcagcaccacggcgagatctccccttggcgggccaaaaccgacggcgagcttcaccggcgttggtcggctccaatctcttcgccgttttattttcctcccaggttaaggttgcaggcttttagcttgggattctgaaagatggggacctcttctggcgcgaatttccatcagcaacctcctccgacccaggggatgttgcctccaaggcatggtccacgcccctcagggttgcagacctcgctctcgctggcctcttcggagcaggttggctcgcctgacatgcaggagcctggttcaaactcggagccagggcatgattccgccactgagagcgccagttccaaagacacatggccagctgagccgaaccagagcaatggtggggtggctgccagtgatgttgtgagtaaggcggcggagaaggaggtggcaaatggtgtatccaagccgcaggttatccatggaccctcctcccgtgtgagtgggatgcttctgcgggaggttgcacgggagagggttgatctggtcgctgagaagatgaagatgatgtcggatgagcacctagaggaggtcaagaatgagctcaggtcgattctggagggcactggaggttctcaccacatcgaggagttcttgtacttgcagaagcttgtccaggacaggcatgatttgacaccatccatgctttcagtggcacaccatgtgcagcttgagatccttgttgcaatcaagactggaatacaggcctttctgcaccccagtgttaccattccacacaatcgcttggtggaggtcttcttgtacaagaggtgccggaacattgcttgccagagtgctctccctgctgaggagtgcagatgcaacgtgtgcgctagcaggaatggtttttgcaacctgtgcatgtgtgtcatctgcaacaagtttgattttgaggtcaatacatgccgtttgattggctgtgatttttgctctcactggacacatacagattgtgcaattcacaatggccagatcggaatgggacaatcagtgaaaagcagcattggtcatgctgaaatgctttttaggtgccgagcttgccagaggacctcagagctgctgggttgggttaaggatgtcttccaacaatgcgctcctg

SEQ ID NO: 7767 - protein, 333 aa, Zea mays subsp. mays
  peptide (1)..(333): Ceres Seq. ID no. 12346158
MGTSSGANFHQQPPPTQGMLPPRHGPRPSGLQTSLSLASSEQVGSPDMQEPGSNSEPGHDSATESASSKDTWPAEPNQSNGGVAASDVVSKAAEKEVANGVSKPQVIHGPSSRVSGMLLREVARERVDLVAEKMKMMSDEHLEEVKNELRSILEGTGGSHHIEEFLYLQKLVQDRHDLTPSMLSVAHHVQLEILVAIKTGIQAFLHPSVTIPHNRLVEVFLYKRCRNIACQSALPAEECRCNVCASRNGFCNLCMCVICNKFDFEVNTCRLIGCDFCSHWTHTDCAIHNGQIGMGQSVKSSIGHAEMLFRCRACQRTSELLGWVKDVFQQCAP

SEQ ID NO: 7768 - protein, 315 aa, Zea mays subsp. mays
  peptide (1)..(315): Ceres Seq. ID no. 12346159
MLPPRHGPRPSGLQTSLSLASSEQVGSPDMQEPGSNSEPGHDSATESASSKDTWPAEPNQSNGGVAASDVVSKAAEKEVANGVSKPQVIHGPSSRVSGMLLREVARERVDLVAEKMKMMSDEHLEEVKNELRSILEGTGGSHHIEEFLYLQKLVQDRHDLTPSMLSVAHHVQLEILVAIKTGIQAFLHPSVTIPHNRLVEVFLYKRCRNIACQSALPAEECRCNVCASRNGFCNLCMCVICNKFDFEVNTCRLIGCDFCSHWTHTDCAIHNGQIGMGQSVKSSIGHAEMLFRCRACQRTSELLGWVKDVFQQCAP

SEQ ID NO: 7769 - protein, 286 aa, Zea mays subsp. mays
  peptide (1)..(286): Ceres Seq. ID no. 12346160
MQEPGSNSEPGHDSATESASSKDTWPAEPNQSNGGVAASDVVSKAAEKEVANGVSKPQVIHGPSSRVSGMLLREVARERVDLVAEKMKMMSDEHLEEVKNELRSILEGTGGSHHIEEFLYLQKLVQDRHDLTPSMLSVAHHVQLEILVAIKTGIQAFLHPSVTIPHNRLVEVFLYKRCRNIACQSALPAEECRCNVCASRNGFCNLCMCVICNKFDFEVNTCRLIGCDFCSHWTHTDCAIHNGQIGMGQSVKSSIGHAEMLFRCRACQRTSELLGWVKDVFQQCAP

SEQ ID NO: 7770 - DNA, 1422 bp, Zea mays subsp. mays
  misc_feature (1)..(1422): Ceres Seq. ID no. 12356590
  misc_feature (1)..(1422): Ortholog of  Ceres SEQ ID NO 13622682 as cited in SEQ ID NO 0
attctccaccttcttcaaaggttcaactcagagaggagagaactagagaaagatccccacccccaggcgacgcgaccggcgagccccgaaaccctaggtcgcgcgacccgggcagcgcgcttctgcgtgactgcgtgtctttcggggaggggacagcgttaggacgcgacgaggttagcgaggccgtctggccgactataagcggaagaatctcctccgaagccttcctagagctgtgaagagcgcgtggatctcctggatttgcagactcgaggggagctgagacaagacatgggttggggaatatccaggttgattggactgaaggctgctgccctgctttctgtagcatgttttttccaaggactaggagtgacccttatctcatttcctctcatatatgcatccataattgcaatactagtctcgatagcttcccgcccatctattgatcttcctttactccttggcaaggcatccgatggaagttttccattgtggtcatggatcatcttctcaccatttcttcttttcattcacctgttcgtgctgctacggagatttgtgaaaaacgagcccttatacactgaggttgcagatggtgtgtttgttggagggtggccttcttcagttgaacacctgccaccaggtgaccccgcgatcatagattgcacgtgcgagctgccaaaaagctcgactatctctaacaatgcatatttgtgcattgctacctgggacacgagggctcctcagccatcacagattgagtctgccgtgcaatgggctgtgagaaagcggtcacagaacaagcctgtctatgtccactgtgcctatggtcatggcagaagtgtctgtgtgatgtgtgcgcttcttgtcgcattagggttcgctgaagattggaaagctgctgcacaaatgatccgtgagaagcgaccttctattagcatgaatactcttcaccgcaaaagcttggaggaatggtcaaaacatttgctctcctctaaaagaagtggggaatcagatgtgagttctgttatacattcggattataaccggaaataaaattgaaccagcaagggacaggcgtgttcagttgctgtgacattgaagatgcattacattcggtagtattgtttgctgctgtcctagtgaatgcctatggttcattttaaattatccttttgtggcatttgtgttgtaaaaactatatgtatcaaattatattagtactgtaggtttacccggctagttcttcaaggaagatgtactgtccttgtctccttttttctgataccagtgcccttgcctctcatcgaatgcttgccagggaagtgctgttgccggaccctttggggcgagaaaaccctgcattcttgcattcctgctgggttctcatttatagctatatgtgatatgtttcgt

SEQ ID NO: 7771 - protein, 256 aa, Zea mays subsp. mays
  peptide (1)..(256): Ceres Seq. ID no. 12356591
MGWGISRLIGLKAAALLSVACFFQGLGVTLISFPLIYASIIAILVSIASRPSIDLPLLLGKASDGSFPLWSWIIFSPFLLFIHLFVLLRRFVKNEPLYTEVADGVFVGGWPSSVEHLPPGDPAIIDCTCELPKSSTISNNAYLCIATWDTRAPQPSQIESAVQWAVRKRSQNKPVYVHCAYGHGRSVCVMCALLVALGFAEDWKAAAQMIREKRPSISMNTLHRKSLEEWSKHLLSSKRSGESDVSSVIHSDYNRK

SEQ ID NO: 7772 - DNA, 1502 bp, Zea mays subsp. mays
  misc_feature (1)..(1502): Ceres Seq. ID no. 12381206
  misc_feature (1)..(1502): Ortholog of  Ceres SEQ ID NO 15168537 as cited in SEQ ID NO 57100
  misc_feature (1)..(1502): Ortholog of  Ceres SEQ ID NO 15178681 as cited in SEQ ID NO 63192
  misc_feature (1)..(1502): Ortholog of  Ceres SEQ ID NO 13579918 as cited in SEQ ID NO 64644
  misc_feature (1)..(1502): Ortholog of  Ceres SEQ ID NO 13654122 as cited in SEQ ID NO 68192
ctcaatctcctctccttgtccactggcttgggcgtgcctttgcgtgcgacgggagctaggaatccacggcatcggaaaagtggccgcctgaagaaccgatttctccaagatttttttgtccatcctatcgcttgcaggatcggattcgccgtctctggccatggttctcgccggcctccgccggcacgtcggccagttcttgaccagcagtaatgagcttatggcggcgtcgctctcggccgtgagctgcgcggacgaggtgcagaaggcggagggggcggggtgccgtgacgacgccgcggcgctgcggctcaagaaggtggccatggcggcgatactggtggccggggtgctcggggtggtcctgccgctcgcagggcggaagcggcgcgcgctgcgcacggacagcgccgcgttcctggcggccaaggcgttcgccgccggggtcatcctggccacggggttcgtccacatgcttcacgacgccgagcacgcgctgtccagcccgtgcctccccgccgcgccgtggcgacggttcccagtccccgggttcgtcgccatggccgccgcgctagccacgctggtgctcgacttcctggccaccaggttttacgaggccaagcatcgcgacgaggccgcgcgcgtcaaggtggccgccgccgccgcactggttgcgacctcctctgggagcgacgaggacatcaccgtggtcaccgtcgacgaggacgagcgcaaggccccgctgttgcaaacgcactgccatggacacggtcacagccacagccacagccatgtgcatgagccggtgcaagtagagggtagcgagggggaggtgtcggcacatgtgcgctctattgtcgtgtcacagatactggagatggggattgtgtcacactctgtgatcatcggattgtcactgggagtgtcgcggagcccatgcacaatcaggccacttgtcgcagcacttgcattccaccagttcttcgaggggtttgcactaggtgggtgcattgctcaggcacaattcaagaacctttcagcagttctaatggcatctttcttcgccatcacaacaccggcaggaatagctgctggggcaggcatgaccacattctacaatcccaatagcccaagggcccttgtggtcgagggcattcttgactcggtatctgctggcattctcatatacatgtcactagtggatctcattgctgtagatttcttgggtggaaagatgacagggaccctgcgacagcaagtgatggcatacatcgcattgttcctcggtgcgctctctatgtcatcacttgcaatatgggcttgagacctgcccttgatgaaatatcagacaaaagatgaagtagtgtccatatatagaatgtctgtggtatatgtacagttttaatgtgtagtattcatgcactgttttttaagggcatgaaaaaaaaaaacaccgctgatgtactcaagggtgaactatgtggtttctttaatcgatgatc

SEQ ID NO: 7773 - protein, 387 aa, Zea mays subsp. mays
  peptide (1)..(387): Ceres Seq. ID no. 12381207
MVLAGLRRHVGQFLTSSNELMAASLSAVSCADEVQKAEGAGCRDDAAALRLKKVAMAAILVAGVLGVVLPLAGRKRRALRTDSAAFLAAKAFAAGVILATGFVHMLHDAEHALSSPCLPAAPWRRFPVPGFVAMAAALATLVLDFLATRFYEAKHRDEAARVKVAAAAALVATSSGSDEDITVVTVDEDERKAPLLQTHCHGHGHSHSHSHVHEPVQVEGSEGEVSAHVRSIVVSQILEMGIVSHSVIIGLSLGVSRSPCTIRPLVAALAFHQFFEGFALGGCIAQAQFKNLSAVLMASFFAITTPAGIAAGAGMTTFYNPNSPRALVVEGILDSVSAGILIYMSLVDLIAVDFLGGKMTGTLRQQVMAYIALFLGALSMSSLAIWA

SEQ ID NO: 7774 - protein, 367 aa, Zea mays subsp. mays
  peptide (1)..(367): Ceres Seq. ID no. 12381208
MAASLSAVSCADEVQKAEGAGCRDDAAALRLKKVAMAAILVAGVLGVVLPLAGRKRRALRTDSAAFLAAKAFAAGVILATGFVHMLHDAEHALSSPCLPAAPWRRFPVPGFVAMAAALATLVLDFLATRFYEAKHRDEAARVKVAAAAALVATSSGSDEDITVVTVDEDERKAPLLQTHCHGHGHSHSHSHVHEPVQVEGSEGEVSAHVRSIVVSQILEMGIVSHSVIIGLSLGVSRSPCTIRPLVAALAFHQFFEGFALGGCIAQAQFKNLSAVLMASFFAITTPAGIAAGAGMTTFYNPNSPRALVVEGILDSVSAGILIYMSLVDLIAVDFLGGKMTGTLRQQVMAYIALFLGALSMSSLAIWA

SEQ ID NO: 7775 - protein, 332 aa, Zea mays subsp. mays
  peptide (1)..(332): Ceres Seq. ID no. 12381209
MAAILVAGVLGVVLPLAGRKRRALRTDSAAFLAAKAFAAGVILATGFVHMLHDAEHALSSPCLPAAPWRRFPVPGFVAMAAALATLVLDFLATRFYEAKHRDEAARVKVAAAAALVATSSGSDEDITVVTVDEDERKAPLLQTHCHGHGHSHSHSHVHEPVQVEGSEGEVSAHVRSIVVSQILEMGIVSHSVIIGLSLGVSRSPCTIRPLVAALAFHQFFEGFALGGCIAQAQFKNLSAVLMASFFAITTPAGIAAGAGMTTFYNPNSPRALVVEGILDSVSAGILIYMSLVDLIAVDFLGGKMTGTLRQQVMAYIALFLGALSMSSLAIWA

SEQ ID NO: 7776 - DNA, 1547 bp, Zea mays subsp. mays
  misc_feature (1)..(1547): Ceres Seq. ID no. 12365695
  misc_feature (1)..(1547): Ortholog of  Ceres SEQ ID NO 15227289 as cited in SEQ ID NO 58851
  misc_feature (1)..(1547): Ortholog of  Ceres SEQ ID NO 13584416 as cited in SEQ ID NO 63441
ttcttggtttgctagagagaggaaaaacaaaaaaacaaaaaaaacagtctagatggctgctgctatagatctgtcaggggaggagctgatgagagcactcgagccttttatccgggatgcctctgctcacggatccagtccgctcctccacccgcaccagccacttagcccctcgtcgccgttctccttccaccaagctgtcgccgtcgccgccgcctcctcctacggaggaaactacccgttcgccgcgcccgacgaggcgggccagctgagcccttcccagatgcagtacatccaggcccgcctccacctgcagcgtcgccaggcgcagacctccgtgctgggcccgcgtgcccagcccatgaaggcgtcggcgtccgcggcccccgccccggcgcggccgcagaagctgtacccgcggcgtgcggcagcggcactggggcaagtgggtggcggagatccggctcccgcgcaaccgcacccggctctggctcggcaccttcgacaccgccgaggaggcggcgctggcctacgaccaggccgcctaccgcctccgcggcgacgcggcgcgcctcaacttccccgacaacgccgcctcccgcggcccgctccacgcctccgtcgacgccaagctccagagcctgtgccagagcatcgccgcgtccaagaagggcgccaagaagccagcctccgccgcagctgccgcgtcgtcgtccgcccccaccagcaactgctgctcctcgccgtcgtccgacgacgcgacctcgtcctgcctcgagtccgccaccgagtcctcgtgcccgtccccgtccacgtcgccgtccgcctcgcccgggccgacggtgccggagatgcagcagctggacttcagcgaggcgccgtgggacgaggccgccggcttcgcgctcaccaagtacccgtcgtacgagatcgactgggactccctcctcgccaattaatcgtcgccccctgttggctggctggctggctcccttcctacccacactgccgtcgtgcagctggaggagggttaaagaaggttaacggccgtcgcgcagatgggattttagacatcctgcgcgggcactagttggatcattagtgctaatccccgtccgtccgttcgttcgttcgttctgtgtagatgtccgtccgattcgtttggtccttgtcactggtgagtcagttgtagatctcgggttatttagggtttggttctccggaggaggagagaaccacaaccgacgggaagccggcgtttttgtgtccggcgttctccggcggtggccggtacgtgtcacactggtcagtgaccccaccccccccggccgttcaggtgtccgttgttctggtagctgtttcttgtgctagatggtgtgctgtgctctacaggttgtaaagagcagcacggtgtgatgtgaaggagatgcttgtcaagcagtagtactccgtatgtatgttgtaaaatcagctagctagctgtgtccaggagttgtaatttgatgaactgctactgttggtgctactattgtatggtttattgttgt

SEQ ID NO: 7777 - protein, 345 aa, Zea mays subsp. mays
  peptide (1)..(345): Ceres Seq. ID no. 12365696
MAAAIDLSGEELMRALEPFIRDASAHGSSPLLHPHQPLSPSSPFSFHQAVAVAAASSYGGNYPFAAPDEAGQLSPSQMQYIQARLHLQRRQAQTSVLGPRAQPMKASASAAPAPARPQKLYPRRAAAALGQVGGGDPAPAQPHPALARHLRHRRGGGAGLRPGRLPPPRRRGAPQLPRQRRLPRPAPRLRRRQAPEPVPEHRRVQEGRQEASLRRSCRVVVRPHQQLLLLAVVRRRDLVLPRVRHRVLVPVPVHVAVRLARADGAGDAAAGLQRGAVGRGRRLRAHQVPVVRDRLGLPPRQLIVAPCWLAGWLPSYPHCRRAAGGGLKKVNGRRADGILDILRGH

SEQ ID NO: 7778 - protein, 333 aa, Zea mays subsp. mays
  peptide (1)..(333): Ceres Seq. ID no. 12365697
MRALEPFIRDASAHGSSPLLHPHQPLSPSSPFSFHQAVAVAAASSYGGNYPFAAPDEAGQLSPSQMQYIQARLHLQRRQAQTSVLGPRAQPMKASASAAPAPARPQKLYPRRAAAALGQVGGGDPAPAQPHPALARHLRHRRGGGAGLRPGRLPPPRRRGAPQLPRQRRLPRPAPRLRRRQAPEPVPEHRRVQEGRQEASLRRSCRVVVRPHQQLLLLAVVRRRDLVLPRVRHRVLVPVPVHVAVRLARADGAGDAAAGLQRGAVGRGRRLRAHQVPVVRDRLGLPPRQLIVAPCWLAGWLPSYPHCRRAAGGGLKKVNGRRADGILDILRGH

SEQ ID NO: 7779 - protein, 268 aa, Zea mays subsp. mays
  peptide (1)..(268): Ceres Seq. ID no. 12365698
MQYIQARLHLQRRQAQTSVLGPRAQPMKASASAAPAPARPQKLYPRRAAAALGQVGGGDPAPAQPHPALARHLRHRRGGGAGLRPGRLPPPRRRGAPQLPRQRRLPRPAPRLRRRQAPEPVPEHRRVQEGRQEASLRRSCRVVVRPHQQLLLLAVVRRRDLVLPRVRHRVLVPVPVHVAVRLARADGAGDAAAGLQRGAVGRGRRLRAHQVPVVRDRLGLPPRQLIVAPCWLAGWLPSYPHCRRAAGGGLKKVNGRRADGILDILRGH

SEQ ID NO: 7780 - DNA, 1003 bp, Zea mays subsp. mays
  misc_feature (1)..(1003): Ceres Seq. ID no. 12407190
  misc_feature (1)..(1003): Ortholog of  Ceres SEQ ID NO 13599585 as cited in SEQ ID NO 988
  misc_feature (1)..(1003): Ortholog of  Ceres SEQ ID NO 13594624 as cited in SEQ ID NO 55765
  misc_feature (1)..(1003): Ortholog of  Ceres SEQ ID NO 15177682 as cited in SEQ ID NO 0
acactctcctctcctgtctatccactttccactccttcactgccctccgtctccctcccctcccccctttgctcgccatggccatggcgacctccaccttctccccgcgtcccgccagcctcaggcccctgcgggcgggcggcaagcccgtcggactcctccccttcccgcgccgcctcgcctgtgccaccgccgccggggaggcgccgcccgtggagcagcgggacaaggcggagccggcccccgccgcggcctccaacggggccgccgtcaagtacgaggccccgccgccgcccgcgccagcgccggtcccggccttccgggacgccaggtgggtcaacggcacctgggacctcgccaagttcgacaagggcagcggcgtcgactgggacgccgtcatcgacgccgaggccaggagaaggagatggctcgaagactatccggaggcgactaacacagacgaggctgtcgtcttcgacacttccattattccatggtgggcttggatgaaacgcttccaccttcccgaagccgagaagctaaatggtcgcgccgccatggtcggcttcttcatggcctacttcgtggacagcttgacgggcgcgggcctcgtcgaccagatgggcaacttcttctgcaagacgctgctgttcgccgccgtcgcaggcgtgctgctggtcaggaaaaacgaggacgtcgagtcgctgaagaagctcgtcgacgagaccacgttctatgacaggcagtggcaggcgacctggcaagatgactccgctgggggaccaaacaactagttcagagttggggtacaaaaaaattagcttatctatttcctcggccttcttgttttccctgtgtagtgagaacttttttttgtttttgtttttgacaaacgcaatgatctacgtcatgttgtaagattgtatgaaaaataattctgcagtttcagtttttttttaaaaaaaccgataatattcagacatggtaatttattcacatatcg

SEQ ID NO: 7781 - protein, 263 aa, Zea mays subsp. mays
  peptide (1)..(263): Ceres Seq. ID no. 12407191
TLLSCLSTFHSFTALRLPPLPPLLAMAMATSTFSPRPASLRPLRAGGKPVGLLPFPRRLACATAAGEAPPVEQRDKAEPAPAAASNGAAVKYEAPPPPAPAPVPAFRDARWVNGTWDLAKFDKGSGVDWDAVIDAEARRRRWLEDYPEATNTDEAVVFDTSIIPWWAWMKRFHLPEAEKLNGRAAMVGFFMAYFVDSLTGAGLVDQMGNFFCKTLLFAAVAGVLLVRKNEDVESLKKLVDETTFYDRQWQATWQDDSAGGPNN

SEQ ID NO: 7782 - protein, 238 aa, Zea mays subsp. mays
  peptide (1)..(238): Ceres Seq. ID no. 12407192
MAMATSTFSPRPASLRPLRAGGKPVGLLPFPRRLACATAAGEAPPVEQRDKAEPAPAAASNGAAVKYEAPPPPAPAPVPAFRDARWVNGTWDLAKFDKGSGVDWDAVIDAEARRRRWLEDYPEATNTDEAVVFDTSIIPWWAWMKRFHLPEAEKLNGRAAMVGFFMAYFVDSLTGAGLVDQMGNFFCKTLLFAAVAGVLLVRKNEDVESLKKLVDETTFYDRQWQATWQDDSAGGPNN

SEQ ID NO: 7783 - protein, 236 aa, Zea mays subsp. mays
  peptide (1)..(236): Ceres Seq. ID no. 12407193
MATSTFSPRPASLRPLRAGGKPVGLLPFPRRLACATAAGEAPPVEQRDKAEPAPAAASNGAAVKYEAPPPPAPAPVPAFRDARWVNGTWDLAKFDKGSGVDWDAVIDAEARRRRWLEDYPEATNTDEAVVFDTSIIPWWAWMKRFHLPEAEKLNGRAAMVGFFMAYFVDSLTGAGLVDQMGNFFCKTLLFAAVAGVLLVRKNEDVESLKKLVDETTFYDRQWQATWQDDSAGGPNN

SEQ ID NO: 7784 - DNA, 1038 bp, Zea mays subsp. mays
  misc_feature (1)..(1038): Ceres Seq. ID no. 12402461
  misc_feature (1)..(1038): Ortholog of  Ceres SEQ ID NO 12627215 as cited in SEQ ID NO 60976
  misc_feature (1)..(1038): Ortholog of  Ceres SEQ ID NO 13654980 as cited in SEQ ID NO 63094
  misc_feature (1)..(1038): Ortholog of  Ceres SEQ ID NO 15178542 as cited in SEQ ID NO 65410
  misc_feature (1)..(1038): Ortholog of  Ceres SEQ ID NO 12635657 as cited in SEQ ID NO 0
  misc_feature (1)..(1038): Ortholog of  Ceres SEQ ID NO 12635879 as cited in SEQ ID NO 0
  misc_feature (1)..(1038): Ortholog of  Ceres SEQ ID NO 13599649 as cited in SEQ ID NO 0
  misc_feature (1)..(1038): Ortholog of  Ceres SEQ ID NO 14309404 as cited in SEQ ID NO 0
ctcagccccttccccggccattcgagcgccgccctgctcttgctcggctgcccttgcccactacggcctcttgatttctccctccattccgatatataagcgaaaaaaatccgataagccaagccaaacccaaacccaaccatggcgtgcatgccggctgtgtctgcccccgtcgtcctcgcgccggcaccggcgtcgacccgcacccacctctgctactcaacggaaatgcgacgcggcgcgctctccctccgtcccgcccgcgctatccccacgttgaggctcggcggccaccgcgacgcccgtggcgctgtcgtcgtccgcgccactgcggcagagggagccgtggagctgcaggccaaggtgacgagcaagtgcttcttcgacgtggaggtcggcggggagcctgcgggccgcattgtcatcgggctcttcggagaggtcgtacctaagaccatcgacaacttccgtgcgctctgcactggtgagaaagggtacggctacaagggctgctccttccaccggatcatcaaggactttatgattcaaggcggagacttccagcaaaacaatggtactggtgggagaagtatttatggtgaatgctttgatgatgaaaattttacactgaagcatgttggtcctggtgtgctaagcatggcaaatgctggccccaacacaaatggaagtcaatttttcatttgcactgtgaagacaccgtggttggacaaccgtcacgtcgtgtttggacatgtattagaggggatggacgtggtgaagcagcttgaatcgcaagagaccagcaggtccgatactcccaagcagccttgccgaatcgttaactgcggcgaggtccccctggacagctgagcgagcgaaatgctcttggtgagtttgaacctgaggtcttcccttacgttagagcgtcgacgcccatttgtgctagcatcattcagtcagttgagttatgtgtacgtgccgtgacggaagtttaattactcagatgtggacacattaccagttaatagcaacgaattg

SEQ ID NO: 7785 - protein, 242 aa, Zea mays subsp. mays
  peptide (1)..(242): Ceres Seq. ID no. 12402462
MACMPAVSAPVVLAPAPASTRTHLCYSTEMRRGALSLRPARAIPTLRLGGHRDARGAVVVRATAAEGAVELQAKVTSKCFFDVEVGGEPAGRIVIGLFGEVVPKTIDNFRALCTGEKGYGYKGCSFHRIIKDFMIQGGDFQQNNGTGGRSIYGECFDDENFTLKHVGPGVLSMANAGPNTNGSQFFICTVKTPWLDNRHVVFGHVLEGMDVVKQLESQETSRSDTPKQPCRIVNCGEVPLDS

SEQ ID NO: 7786 - protein, 239 aa, Zea mays subsp. mays
  peptide (1)..(239): Ceres Seq. ID no. 12402463
MPAVSAPVVLAPAPASTRTHLCYSTEMRRGALSLRPARAIPTLRLGGHRDARGAVVVRATAAEGAVELQAKVTSKCFFDVEVGGEPAGRIVIGLFGEVVPKTIDNFRALCTGEKGYGYKGCSFHRIIKDFMIQGGDFQQNNGTGGRSIYGECFDDENFTLKHVGPGVLSMANAGPNTNGSQFFICTVKTPWLDNRHVVFGHVLEGMDVVKQLESQETSRSDTPKQPCRIVNCGEVPLDS

SEQ ID NO: 7787 - protein, 213 aa, Zea mays subsp. mays
  peptide (1)..(213): Ceres Seq. ID no. 12402464
MRRGALSLRPARAIPTLRLGGHRDARGAVVVRATAAEGAVELQAKVTSKCFFDVEVGGEPAGRIVIGLFGEVVPKTIDNFRALCTGEKGYGYKGCSFHRIIKDFMIQGGDFQQNNGTGGRSIYGECFDDENFTLKHVGPGVLSMANAGPNTNGSQFFICTVKTPWLDNRHVVFGHVLEGMDVVKQLESQETSRSDTPKQPCRIVNCGEVPLDS

SEQ ID NO: 7788 - DNA, 984 bp, Zea mays subsp. mays
  misc_feature (1)..(984): Ceres Seq. ID no. 12401112
  misc_feature (1)..(984): Ortholog of  Ceres SEQ ID NO 12616324 as cited in SEQ ID NO 63414
catttgctccaagtcccaaatactagcaggcggcaggcggccaagaccggtgtccctcgacgacctgccgagtgccgaggcaagcaagacgcgaggaggctgtaagcctgccatcagcagcggcgatggcgggcgccgaggtgggagaagacaagtaccgctccttcatccacggcgagggcgagagggacaccgtgtggaggtacggcgccccgcccaactacgacgtggtcaacaagctcttcgaggaggagaggactcaggtgtggcccgagggctcgctggaggagaaggtgcagcggttgctcaagagctgggagatggagctggtgcacaaggtgcggcccgaggaccagaagaccgtcaactcggagaaatactctgccagcaccaacgggatgagcgctctgacccgggccgaggtgatggccatcggcggctacaacaacttcctgcgcaccaagctgcccccggagcaccgcatctacgacccggacagcgagaccgtggagtccgccatggccaccttcaccacggccttcccgcggggcttcgccatcgaggtgctcgacgtctacagcggcccgcccaggatcgccttcaagttccgccactggggctacatggaggggcccttcaagggccacccgccgcacggccagcgggtcgagctcttcggcgtctgcatcttccatgttgacgaagacatgaaggtggacaagtcagagtacttctacgagcgcggcaacttcctcgccggcttcttgagtgcccctgcccctgatggctcaggcggttgccccgtgatgcgcgggaactgaatgggcctgcaatgggacattggaagactaggcattggaacattgggattattagcattagcgatcccgaatccgcttttattacggtttaataattccatcatgtaacatgacacttgcatttgtgtttgaataaacatgtcgttgcttcgacatattagcg

SEQ ID NO: 7789 - protein, 232 aa, Zea mays subsp. mays
  peptide (1)..(232): Ceres Seq. ID no. 12401113
ICSKSQILAGGRRPRPVSLDDLPSAEASKTRGGCKPAISSGDGGRRGGRRQVPLLHPRRGREGHRVEVRRPAQLRRGQQALRGGEDSGVARGLAGGEGAAVAQELGDGAGAQGAARGPEDRQLGEILCQHQRDERSDPGRGDGHRRLQQLPAHQAAPGAPHLRPGQRDRGVRHGHLHHGLPAGLRHRGARRLQRPAQDRLQVPPLGLHGGALQGPPAARPAGRALRRLHLPC

SEQ ID NO: 7790 - protein, 231 aa, Zea mays subsp. mays
  peptide (1)..(231): Ceres Seq. ID no. 12401114
MAGAEVGEDKYRSFIHGEGERDTVWRYGAPPNYDVVNKLFEEERTQVWPEGSLEEKVQRLLKSWEMELVHKVRPEDQKTVNSEKYSASTNGMSALTRAEVMAIGGYNNFLRTKLPPEHRIYDPDSETVESAMATFTTAFPRGFAIEVLDVYSGPPRIAFKFRHWGYMEGPFKGHPPHGQRVELFGVCIFHVDEDMKVDKSEYFYERGNFLAGFLSAPAPDGSGGCPVMRGN

SEQ ID NO: 7791 - protein, 166 aa, Zea mays subsp. mays
  peptide (1)..(166): Ceres Seq. ID no. 12401115
MELVHKVRPEDQKTVNSEKYSASTNGMSALTRAEVMAIGGYNNFLRTKLPPEHRIYDPDSETVESAMATFTTAFPRGFAIEVLDVYSGPPRIAFKFRHWGYMEGPFKGHPPHGQRVELFGVCIFHVDEDMKVDKSEYFYERGNFLAGFLSAPAPDGSGGCPVMRGN

SEQ ID NO: 7792 - DNA, 881 bp, Zea mays subsp. mays
  misc_feature (1)..(881): Ceres Seq. ID no. 12341797
  misc_feature (1)..(881): Ortholog of  Ceres SEQ ID NO 13594411 as cited in SEQ ID NO 58223
  misc_feature (1)..(881): Ortholog of  Ceres SEQ ID NO 13661991 as cited in SEQ ID NO 61245
tctctctttcttccccagcaatgcaattccgcagacagacgcaggcggcaggcggcaggcggcggcgcaccgcaccgcttcttcctcttctatctctcatctacagccttcgctgcgccgccatggccaccacccgcttgctgccgctgctccgacgccgcctcgccgccgcaatcgccggatcgcctgctccctactccctccgaggaccctcatttcctgcaccagcagctgcagggctaaggtccctcctaacagttgctggagcgagcgatactgcaacagaaccccaggaccaacagcattccgaaacaactcccccgccggcttctgtcccgacaccggagtccggtctcaaagtcagggacacctccaacctgaagatctcaccaaggcatgacctcgccatgatctttacgtgcaaggtgtgcgagaccaggtccatgaagatggccagcagggactcgtacgagaacggagtcgtggtcgtgcggtgcggtggctgcaacaacctccacctcatggcggacaggcttggctggtttggggagccagggagcatcgaggacttcctagcgacgcaaggggaggaggtgaagaaaggttcgacagatactatcagctttactttggacgacttggctgggtctcaggtcagttctaaggggccttccgaacaaaattaatatgatagtgtttggtccagtaagaacctgtagaagcctctctttactataaagaagatgcgcgtgtcacctgtgtgttgaagaaaaaaacgcctctagaagcctaccttaactgttgcacctgtagttctgcttaacttcatggcttttcatgtgtagctttcgagcccatcaaatatgcgatgttgttattct

SEQ ID NO: 7793 - protein, 227 aa, Zea mays subsp. mays
  peptide (1)..(227): Ceres Seq. ID no. 12341798
SLSSPAMQFRRQTQAAGGRRRRTAPLLPLLSLIYSLRCAAMATTRLLPLLRRRLAAAIAGSPAPYSLRGPSFPAPAAAGLRSLLTVAGASDTATEPQDQQHSETTPPPASVPTPESGLKVRDTSNLKISPRHDLAMIFTCKVCETRSMKMASRDSYENGVVVVRCGGCNNLHLMADRLGWFGEPGSIEDFLATQGEEVKKGSTDTISFTLDDLAGSQVSSKGPSEQN

SEQ ID NO: 7794 - protein, 221 aa, Zea mays subsp. mays
  peptide (1)..(221): Ceres Seq. ID no. 12341799
MQFRRQTQAAGGRRRRTAPLLPLLSLIYSLRCAAMATTRLLPLLRRRLAAAIAGSPAPYSLRGPSFPAPAAAGLRSLLTVAGASDTATEPQDQQHSETTPPPASVPTPESGLKVRDTSNLKISPRHDLAMIFTCKVCETRSMKMASRDSYENGVVVVRCGGCNNLHLMADRLGWFGEPGSIEDFLATQGEEVKKGSTDTISFTLDDLAGSQVSSKGPSEQN

SEQ ID NO: 7795 - protein, 187 aa, Zea mays subsp. mays
  peptide (1)..(187): Ceres Seq. ID no. 12341800
MATTRLLPLLRRRLAAAIAGSPAPYSLRGPSFPAPAAAGLRSLLTVAGASDTATEPQDQQHSETTPPPASVPTPESGLKVRDTSNLKISPRHDLAMIFTCKVCETRSMKMASRDSYENGVVVVRCGGCNNLHLMADRLGWFGEPGSIEDFLATQGEEVKKGSTDTISFTLDDLAGSQVSSKGPSEQN

SEQ ID NO: 7796 - DNA, 1207 bp, Zea mays subsp. mays
  misc_feature (1)..(1207): Ceres Seq. ID no. 13492697
  misc_feature (1)..(1207): Ortholog of  Ceres SEQ ID NO 13594341 as cited in SEQ ID NO 57917
  misc_feature (1)..(1207): Ortholog of  Ceres SEQ ID NO 13656441 as cited in SEQ ID NO 65703
aaccatttggacaccgatccatccatccatccagccccgtacgtgtctcgctggccgtccgtatatatagagagaggcatcggagattggccgccacgttgccatcgcgcgcggcgcccgccggccaaggccaaccatgctggcgagggctcctccgccgcggcccgtgctccagcggcgtttgcatcgcccgcgcacatccaagagccgccgccgtcgcggccaggccggggacgacgaggacgacgacgacggtcgcggcggcggcggcagaggccgcttctaacgggtcagcggcggcggccgtcgcagggatcagcagcagcagcagcgcgctggtgacctcgaccgtcgggaaatcgacgaacatcctgtggcatgagtgcgccatcgggcagaaggagcgacagggtctgctgaaccagaagggctgcgtcgtgtggatcactggcctaagcggttcagggaaaagcacgctcgcgtgcgcgctgagccgcgagctgcacggcagaggccacctcacgtacgtcctcgacggcgacaacctcaggcacgggctgaacagggacctcagcttcggagcagaggaccgcgccgagaacatccgcagagtaggggaagtagcgaagctgttcgccgacgctggcctcgtctgcatcgccagcctcatatcgccctacagaagcgaccgaagcgcgtgtcgcgatctgctgcccaagcactcgtttatcgaggtgttcctggacgtgccgcttcaagtgtgcgaagccagggaccccaaaggcctctacaagctcgcacgcgccggcaaaatcaaagggttcaccggcatcgacgatccttacgaaccgccgtcggactgtgagatagtgatccagtgtaaagtcggcgactgcccttcgcctgaatcgatggctggtcacgttgtgtcgtaccttgagacgaatggtttcctccaggactagacatggaatgcgatcgatgcgtctgatgtgtatatatgtagcagcagccggagcggcattgccaaggctgtgtaatctcatggctgtctttctctttaagaccaaaacaaacaagagatggcagtgtaaaaaggaaaaaaaaaactgcgtctgacagagtcgctgaatcaaccatgcttctgataaaagctattgtttgtaggtacggcgttgattcttacgacatttatgacaatgctttc

SEQ ID NO: 7797 - protein, 320 aa, Zea mays subsp. mays
  peptide (1)..(320): Ceres Seq. ID no. 13492698
PFGHRSIHPSSPVRVSLAVRIYRERHRRLAATLPSRAAPAGQGQPCWRGLLRRGPCSSGVCIARAHPRAAAVAARPGTTRTTTTVAAAAAEAASNGSAAAAVAGISSSSSALVTSTVGKSTNILWHECAIGQKERQGLLNQKGCVVWITGLSGSGKSTLACALSRELHGRGHLTYVLDGDNLRHGLNRDLSFGAEDRAENIRRVGEVAKLFADAGLVCIASLISPYRSDRSACRDLLPKHSFIEVFLDVPLQVCEARDPKGLYKLARAGKIKGFTGIDDPYEPPSDCEIVIQCKVGDCPSPESMAGHVVSYLETNGFLQD

SEQ ID NO: 7798 - DNA, 1047 bp, Zea mays subsp. mays
  misc_feature (1)..(1047): Ceres Seq. ID no. 12343255
  misc_feature (1)..(1047): Ortholog of  Ceres SEQ ID NO 12619664 as cited in SEQ ID NO 66048
ctaatcgaaaaaccctatgttcatgccaccatggaagggcttcgtattggagcaccgattatgcaggtttatcatgagaaatcttttatcttacctgatgtttcaagggtgcttgcttgcctttatgagaaggatgtcaagtttgagactcacacagcctcatacaggagcctactcggattgcaggcatcatctcatgctccagttccattctatgaaggccctacttttctagaagaatccagagaaatctgccgttatatagcagaaaagtatgaaaatcaaggatatccgttcctccttggaaaggatgcccttgagagggcttcaattgaacaatggctccacaacgaggagcatgctttcaaccctccgagccgggccttgttctttcatttggcctttcccctgggtgaaggagaagatgatgatattgatgttcatacaaggaagctagaagaggttctggaagtttatgagcaaaggctcagtgacagcgaattccttgttggaaacaagttcactcttgccgaccttgttcacctgccaaattcccactatatcaaagcatctaacaagtttctttacctttatgattcgaggaaaaatgtaaggaggtggtgggatgctatttctgaccggagttcttggaagaaagtgctgaggtatatgaagagcgtggaggagaagaacaaacaagaagaactcaagaagcagcagcagcagcaggaagaggctcctagaacctccaccgacccaactcgggtagactcgagaaagcagagcagaacagagcctcggacaatattggttcctcctgctgataacgagtcatcagcttcgatagttcctcgaacaaagaagcctcttcctggtgatcacttagtgtctactcaacaaattgatggtgttggtatgccagccacaaattgatggtgatggtcgtcttagtggtgtttgtcttgtcttttattgtttggttctttaacaagagttatatttttaccttctgaccaaagagttgtttaacaggatagtcattgtacg

SEQ ID NO: 7799 - protein, 310 aa, Zea mays subsp. mays
  peptide (1)..(310): Ceres Seq. ID no. 12343256
LIEKPYVHATMEGLRIGAPIMQVYHEKSFILPDVSRVLACLYEKDVKFETHTASYRSLLGLQASSHAPVPFYEGPTFLEESREICRYIAEKYENQGYPFLLGKDALERASIEQWLHNEEHAFNPPSRALFFHLAFPLGEGEDDDIDVHTRKLEEVLEVYEQRLSDSEFLVGNKFTLADLVHLPNSHYIKASNKFLYLYDSRKNVRRWWDAISDRSSWKKVLRYMKSVEEKNKQEELKKQQQQQEEAPRTSTDPTRVDSRKQSRTEPRTILVPPADNESSASIVPRTKKPLPGDHLVSTQQIDGVGMPATN

SEQ ID NO: 7800 - protein, 300 aa, Zea mays subsp. mays
  peptide (1)..(300): Ceres Seq. ID no. 12343257
MEGLRIGAPIMQVYHEKSFILPDVSRVLACLYEKDVKFETHTASYRSLLGLQASSHAPVPFYEGPTFLEESREICRYIAEKYENQGYPFLLGKDALERASIEQWLHNEEHAFNPPSRALFFHLAFPLGEGEDDDIDVHTRKLEEVLEVYEQRLSDSEFLVGNKFTLADLVHLPNSHYIKASNKFLYLYDSRKNVRRWWDAISDRSSWKKVLRYMKSVEEKNKQEELKKQQQQQEEAPRTSTDPTRVDSRKQSRTEPRTILVPPADNESSASIVPRTKKPLPGDHLVSTQQIDGVGMPATN

SEQ ID NO: 7801 - protein, 290 aa, Zea mays subsp. mays
  peptide (1)..(290): Ceres Seq. ID no. 12343258
MQVYHEKSFILPDVSRVLACLYEKDVKFETHTASYRSLLGLQASSHAPVPFYEGPTFLEESREICRYIAEKYENQGYPFLLGKDALERASIEQWLHNEEHAFNPPSRALFFHLAFPLGEGEDDDIDVHTRKLEEVLEVYEQRLSDSEFLVGNKFTLADLVHLPNSHYIKASNKFLYLYDSRKNVRRWWDAISDRSSWKKVLRYMKSVEEKNKQEELKKQQQQQEEAPRTSTDPTRVDSRKQSRTEPRTILVPPADNESSASIVPRTKKPLPGDHLVSTQQIDGVGMPATN

SEQ ID NO: 7802 - DNA, 1738 bp, Zea mays subsp. mays
  misc_feature (1)..(1738): Ceres Seq. ID no. 12413950
  misc_feature (1)..(1738): Ortholog of  Ceres SEQ ID NO 13582783 as cited in SEQ ID NO 67821
gcacgagaccattacctagaacatcctaatcgaaaaaaacccctcacactcccatccagccgccaccaggtgcagagtctttcgtcatctcttctccggcgaagaacccccagtcgcccaccagatcacttgttaaactttgttgaggggtgatggcggtttctttcgcaaacctcaactccgaggcagggcttaaaaagcttgatgagtaccttctcactcgcagctacatcactggctaccaagcttccaaggatgaggaggaaatgggtgacaaggaggaagaagcggagctggatgggagaggagggaatggtgtggaggatgaattcctgaaaatagatgaattgacggagttcctggagaagggtgaagaagaggagtatggtgatggagccaaacggagagagaagtcagtgaaaaactggatggttgagagtgacaatgaggatgaagatgaggatcaattggatttagaagattttgaggatgatgacgaggatggtgaagcaggcggtggagatattctgtataaagatttttttgagagtggacacaacaagcaagctaagaagagagatggttccacaaagaaagttcaattcaaggatgaagcacatgaagttgaactccatgacagtgagaatgatgatggaaatgatgaacaagaacatggtctctcaactcacgaaaaggagcgtctgaagatgcgtactaaaatagagcaaatggagaaagctaatcttgaacccagcacgtggaccatgcagggagaggttactgcttctaggaggcccaaaaacagtgccctagaagtggaccttgattttgagcacaatgtaagacctgcccctgtaataaccgaggaagtgacagcttcccttgaagaaatgataaagaaaagaatcgcagagagtcattttgatgatgttgagaagccgtctctcttgccatctaaagctccaaaggagcacaaggaactggatgaaactaagagcaagaagggtcttgctgaactgtatgaggatgactatgcacaaaaagcaggcattgcacctgccccactttctatttcagatgaactaaaggaagaggcaaatactttatttaagaggatatgtttgaaattggatgcgctatcgcatttccactttgctccaaagccagtcattgaggatatgtctgtgcaagcaaatgtgcctgctttagccatggaagagattgcacctgtagctgtttcggatgctgcaatgcttgcccctgaagagatctttgaaggaaaaggtgatgttaaggaagagggggaacttacacaggctgagcgcaagagaagaagagctaacaagaaaaggagatatgcagcatcccataaggagaggacagcgccagccaagttgcagaaagattaaactcaatgtttttttctcactagtttctaaatggtacaagagcgataaactggcaatacatattttccaaattttgtattgtaccctctgctagtagcttttacatgaacagtaaaatgtggccatttatatttctacagaagcacacaagttcgagagttttgatttgctgaagtgcaattttgagagtgcaaaaaaagacttgtctgttgaaccctaggtatcggtagaaacatcatcctacgacctaaccgacctaaccgatggttatggttatgagtataattttctttccagctattgcaattgaagtcggtcatattcaatct

SEQ ID NO: 7803 - protein, 418 aa, Zea mays subsp. mays
  peptide (1)..(418): Ceres Seq. ID no. 12413951
MAVSFANLNSEAGLKKLDEYLLTRSYITGYQASKDEEEMGDKEEEAELDGRGGNGVEDEFLKIDELTEFLEKGEEEEYGDGAKRREKSVKNWMVESDNEDEDEDQLDLEDFEDDDEDGEAGGGDILYKDFFESGHNKQAKKRDGSTKKVQFKDEAHEVELHDSENDDGNDEQEHGLSTHEKERLKMRTKIEQMEKANLEPSTWTMQGEVTASRRPKNSALEVDLDFEHNVRPAPVITEEVTASLEEMIKKRIAESHFDDVEKPSLLPSKAPKEHKELDETKSKKGLAELYEDDYAQKAGIAPAPLSISDELKEEANTLFKRICLKLDALSHFHFAPKPVIEDMSVQANVPALAMEEIAPVAVSDAAMLAPEEIFEGKGDVKEEGELTQAERKRRRANKKRRYAASHKERTAPAKLQKD

SEQ ID NO: 7804 - protein, 380 aa, Zea mays subsp. mays
  peptide (1)..(380): Ceres Seq. ID no. 12413952
MGDKEEEAELDGRGGNGVEDEFLKIDELTEFLEKGEEEEYGDGAKRREKSVKNWMVESDNEDEDEDQLDLEDFEDDDEDGEAGGGDILYKDFFESGHNKQAKKRDGSTKKVQFKDEAHEVELHDSENDDGNDEQEHGLSTHEKERLKMRTKIEQMEKANLEPSTWTMQGEVTASRRPKNSALEVDLDFEHNVRPAPVITEEVTASLEEMIKKRIAESHFDDVEKPSLLPSKAPKEHKELDETKSKKGLAELYEDDYAQKAGIAPAPLSISDELKEEANTLFKRICLKLDALSHFHFAPKPVIEDMSVQANVPALAMEEIAPVAVSDAAMLAPEEIFEGKGDVKEEGELTQAERKRRRANKKRRYAASHKERTAPAKLQKD

SEQ ID NO: 7805 - protein, 326 aa, Zea mays subsp. mays
  peptide (1)..(326): Ceres Seq. ID no. 12413953
MVESDNEDEDEDQLDLEDFEDDDEDGEAGGGDILYKDFFESGHNKQAKKRDGSTKKVQFKDEAHEVELHDSENDDGNDEQEHGLSTHEKERLKMRTKIEQMEKANLEPSTWTMQGEVTASRRPKNSALEVDLDFEHNVRPAPVITEEVTASLEEMIKKRIAESHFDDVEKPSLLPSKAPKEHKELDETKSKKGLAELYEDDYAQKAGIAPAPLSISDELKEEANTLFKRICLKLDALSHFHFAPKPVIEDMSVQANVPALAMEEIAPVAVSDAAMLAPEEIFEGKGDVKEEGELTQAERKRRRANKKRRYAASHKERTAPAKLQKD

SEQ ID NO: 7806 - DNA, 1443 bp, Zea mays subsp. mays
  misc_feature (1)..(1443): Ceres Seq. ID no. 12373180
  misc_feature (1)..(1443): Ortholog of  Ceres SEQ ID NO 14307296 as cited in SEQ ID NO 53966
  misc_feature (1)..(1443): Ortholog of  Ceres SEQ ID NO 15175368 as cited in SEQ ID NO 60071
  misc_feature (1)..(1443): Ortholog of  Ceres SEQ ID NO 13528157 as cited in SEQ ID NO 60102
  misc_feature (1)..(1443): Ortholog of  Ceres SEQ ID NO 15225423 as cited in SEQ ID NO 64689
  misc_feature (1)..(1443): Ortholog of  Ceres SEQ ID NO 15179340 as cited in SEQ ID NO 0
agcattctagttctactgctgatcttctgcatggccatggtgaggaacccaagagaccttgaaacatactaggagtactagcagtagaggatttaaacctatcttggagtttgcaactggtatcttcttgcaagatcccaaggccaccgtaagatttgttgcagcgtgagacaggagctgcggctgcggaggaagtgagcaaaagcatggatctttccggcacgcagggcgagctgccgatggcaacaatgcacgccggcgggtcgccgtacctggggctgcaccacgggcacccacagcagcacaaccatggcgcgaacggccggcacatgtcgccgccggatgtggtggcggaggaggccaagaaccggcagctggcggtggtgcccgtgggcacaggaggcggaggcggggcaggggtgaggtaccgcgagtgcctgaagaaccacgcggctgccatcggcgggagcgcgacggacgggtgcggcgagttcatgcccgcgggcgaggaggggtcgctggacgcgctccggtgctcggcgtgcgggtgccaccgcaacttccaccgcaaggagccgccgggcggcgacgggcggcagctgtacgggcaccaccaccaccacccgctgagcccgctggccgcggtgcacccccaccatcaccgggggctgctggtggcggcgcttcccccggcgccgacgcgcatggtgatgccgctgagcgccgccatgcaccatcaccagcagccgccgcagcagcaccacagctcggcgtcagcggactccgacgacgcacacgtgccaggggtgcgcgggggggaggtgcagcagcagcagcaggcaccggcacggaagcggttccggaccaagttcaccgcggagcagaaggcccggatgctggggttcgcggaggacgccgggtggcggctgcagaagctggacgaggcggcggtgcagcgcttctgccaggaggtcggcgtgaagcggcgcgtgctcaaggtgtggatgcacaacaacaagcacaccctggcgcggcgcggccacgccgggctccccggcgacccggagctgctggggccgcacgacggccagctcggcatgccgctcccggagccggcggcggagcccgcagttgctgctgcggctgcggctggacttggagtgaccgaccaagccatgtctttcgggactggacgacattgatcaagagagtctaatgctgactgaatcagccttgcggcatagggaagctgttttctttgttaatctgctgctgatctcatcaatctagccgtagctttagctgcatttgcattccactgttccatccatcctagctatccatcaaccacaaactgatgatgcggagtctccatggatttctattccttgttgatttctgtagctgctctccccgctcttgactttaattttttagtgctcg

SEQ ID NO: 7807 - protein, 331 aa, Zea mays subsp. mays
  peptide (1)..(331): Ceres Seq. ID no. 12373181
MDLSGTQGELPMATMHAGGSPYLGLHHGHPQQHNHGANGRHMSPPDVVAEEAKNRQLAVVPVGTGGGGGAGVRYRECLKNHAAAIGGSATDGCGEFMPAGEEGSLDALRCSACGCHRNFHRKEPPGGDGRQLYGHHHHHPLSPLAAVHPHHHRGLLVAALPPAPTRMVMPLSAAMHHHQQPPQQHHSSASADSDDAHVPGVRGGEVQQQQQAPARKRFRTKFTAEQKARMLGFAEDAGWRLQKLDEAAVQRFCQEVGVKRRVLKVWMHNNKHTLARRGHAGLPGDPELLGPHDGQLGMPLPEPAAEPAVAAAAAAGLGVTDQAMSFGTGRH

SEQ ID NO: 7808 - protein, 320 aa, Zea mays subsp. mays
  peptide (1)..(320): Ceres Seq. ID no. 12373182
MATMHAGGSPYLGLHHGHPQQHNHGANGRHMSPPDVVAEEAKNRQLAVVPVGTGGGGGAGVRYRECLKNHAAAIGGSATDGCGEFMPAGEEGSLDALRCSACGCHRNFHRKEPPGGDGRQLYGHHHHHPLSPLAAVHPHHHRGLLVAALPPAPTRMVMPLSAAMHHHQQPPQQHHSSASADSDDAHVPGVRGGEVQQQQQAPARKRFRTKFTAEQKARMLGFAEDAGWRLQKLDEAAVQRFCQEVGVKRRVLKVWMHNNKHTLARRGHAGLPGDPELLGPHDGQLGMPLPEPAAEPAVAAAAAAGLGVTDQAMSFGTGRH

SEQ ID NO: 7809 - protein, 317 aa, Zea mays subsp. mays
  peptide (1)..(317): Ceres Seq. ID no. 12373183
MHAGGSPYLGLHHGHPQQHNHGANGRHMSPPDVVAEEAKNRQLAVVPVGTGGGGGAGVRYRECLKNHAAAIGGSATDGCGEFMPAGEEGSLDALRCSACGCHRNFHRKEPPGGDGRQLYGHHHHHPLSPLAAVHPHHHRGLLVAALPPAPTRMVMPLSAAMHHHQQPPQQHHSSASADSDDAHVPGVRGGEVQQQQQAPARKRFRTKFTAEQKARMLGFAEDAGWRLQKLDEAAVQRFCQEVGVKRRVLKVWMHNNKHTLARRGHAGLPGDPELLGPHDGQLGMPLPEPAAEPAVAAAAAAGLGVTDQAMSFGTGRH

SEQ ID NO: 7810 - DNA, 1229 bp, Zea mays subsp. mays
  misc_feature (1)..(1229): Ceres Seq. ID no. 12353971
  misc_feature (1)..(1229): Ortholog of  Ceres SEQ ID NO 13491587 as cited in SEQ ID NO 20500
  misc_feature (1)..(1229): Ortholog of  Ceres SEQ ID NO 15169711 as cited in SEQ ID NO 54274
ctttttgtgttgctctaaccctttcggctgcgctgcgcacgtcccctcccacgagaaacaccccacgtctcaagctgcccctttctcaccgccacggccgccacgcgcagcagcaaccgagcaggagcgcagccagcaagctcaggcccgagccctactgcaaccgccgctgctaccgcactgaacaccatggccgacccggcggagcaccgtccagcggaggaggacgaggaagccgcggcggccggcgaggatgaggacaccggcgctcaggtcgcgcccatcgtgaagctggaggaggtcgccgttaccaccggagaggaggacgaggacgtacttgtcgacatgaaggcgaagctctaccggttcgacaaggaggcgaaccagtggaaagaacgtggcacaggcactgtgaagctgcttaagcacaaggagaccgccaaggtccgcctcgtcatgcgtcaggcgaagacgcttaagatctgtgctaaccatcttgtggtggcgacgactaagatgcaggagcacgcagggagcgacaagtcgtgcgtgtggcacgcgctggacttcgccgacggtgagctcaaggaggagatgtttgctatccgttttggatctgtcgagaattgcaagaagttcaaggacactgttgaagagatagctgaagagcaaggaaagaccgaggtgaaagaaaacgaggaagtctccattgccgccgcagatttggtacagaagttaacagtgacagaggctagcaaggagggagatgcagaggaagaggaggctcctgcatctgaccataagaaggatgctaaagggtaaagattgaaggcaaacaaggccaaatgattatgattccattcatttcgttgtcaaggttcatcttccccacaaattttcattacaaagtttcattgcattttctcctgagatgatttgtgtgtgtgtgtgtgtgtgtgtgtgttgggtgaaatctgagttgtcagtcatctacatgtctttcttggttgttagacttattctcagtcgcctgtttatctgggatggctaggtacatcatgtttgtacaattatttggggttgattttggaatggctctaaagctcgagatgagatagatggtatcatggtagttattagtgatgatttcttttcgcttcttgttcgttcgttctgaaataatatgggatgctttgttatacttgttgatccattattagcttgatgcg

SEQ ID NO: 7811 - protein, 210 aa, Zea mays subsp. mays
  peptide (1)..(210): Ceres Seq. ID no. 12353972
MADPAEHRPAEEDEEAAAAGEDEDTGAQVAPIVKLEEVAVTTGEEDEDVLVDMKAKLYRFDKEANQWKERGTGTVKLLKHKETAKVRLVMRQAKTLKICANHLVVATTKMQEHAGSDKSCVWHALDFADGELKEEMFAIRFGSVENCKKFKDTVEEIAEEQGKTEVKENEEVSIAAADLVQKLTVTEASKEGDAEEEEAPASDHKKDAKG

SEQ ID NO: 7812 - protein, 158 aa, Zea mays subsp. mays
  peptide (1)..(158): Ceres Seq. ID no. 12353973
MKAKLYRFDKEANQWKERGTGTVKLLKHKETAKVRLVMRQAKTLKICANHLVVATTKMQEHAGSDKSCVWHALDFADGELKEEMFAIRFGSVENCKKFKDTVEEIAEEQGKTEVKENEEVSIAAADLVQKLTVTEASKEGDAEEEEAPASDHKKDAKG

SEQ ID NO: 7813 - protein, 121 aa, Zea mays subsp. mays
  peptide (1)..(121): Ceres Seq. ID no. 12353974
MRQAKTLKICANHLVVATTKMQEHAGSDKSCVWHALDFADGELKEEMFAIRFGSVENCKKFKDTVEEIAEEQGKTEVKENEEVSIAAADLVQKLTVTEASKEGDAEEEEAPASDHKKDAKG

SEQ ID NO: 7814 - DNA, 1318 bp, Zea mays subsp. mays
  misc_feature (1)..(1318): Ceres Seq. ID no. 12566620
  misc_feature (1)..(1318): Ortholog of  Ceres SEQ ID NO 12613390 as cited in SEQ ID NO 67690
agtcgtccagctggtttgcctcccacacaaagggtaaaacggccggaacgctaaaatctcaccccttccgcttggaagttggaacccatcgccgcctccatcgctacacaccacgacgcagcgcccgattccgccggccagcaacgatgcagagctccctcgcccggccgccggtactggccggatgcggcgagagacggggcctggcagccgtggcacggtgccgcgctgaggcggcggcgcccgtgtggacggcgtccagggcgcctgtggggccgtacaccgggagggacccggaggtgaagaagcccgcgtggctgcggcagcgcgctgcgcagggggagaagtacgctcgcctgcgggagtccatcggcgagctcaagctcaacaccgtctgcgtcgaggcacaatgccccaacatcggcgagtgttggaacggaggtggaggggccggcggcgaaggggacggcatcgcgacggccaccatcatggtgcttggtgacacctgcacgcgcgggtgtcgattctgcgctgtgaagaccagcaacaaaccgccgccgcctgatcccctggagcctctgaacacggctttggctgttgcaagctggggtgtagattatgttgtgctaaccagtgtcgatagagatgacttacctgatggtggaagtagccattttgctcagacagtgaaagctttaaaggagctcaaacctggaatactggtggagtgcttaacctcggattttcgaggtgacctggaggctatctcatctttggcaaactctggcctagatgtttatgcacacaacattgaaaccgtgaggagtctacagagggttgtgagggatccccgggcagggtatgatcagagcttagcagttctcaagcatgcaaaaggttccagggaggacatgattacgaagtcttctatcatgcttggtcttggagagactgatgaagaggtgaaacaagccatgatggatctacgggcaattggtgttgacatccttactttgggacagtacttgcagccatcagaaagacatctaacagtaagagagtatgtgactccccaaaagttccaattttggaaggagtatggagaatcggtgggtttccgatatgttgctagcggacccttggttcggtcttcctaccgtgcaggagagctatttgtccaaaatttagtcagaaataacaaaactgagtcgtccatggatccgtacgcagaaataacaaaatctaactaaatatcttgtgccagagcaatccatgggatcagtacacactgtttgttaagagcagcaaacaagagtag

SEQ ID NO: 7815 - protein, 415 aa, Zea mays subsp. mays
  peptide (1)..(415): Ceres Seq. ID no. 12566621
SSSWFASHTKGKTAGTLKSHPFRLEVGTHRRLHRYTPRRSARFRRPATMQSSLARPPVLAGCGERRGLAAVARCRAEAAAPVWTASRAPVGPYTGRDPEVKKPAWLRQRAAQGEKYARLRESIGELKLNTVCVEAQCPNIGECWNGGGGAGGEGDGIATATIMVLGDTCTRGCRFCAVKTSNKPPPPDPLEPLNTALAVASWGVDYVVLTSVDRDDLPDGGSSHFAQTVKALKELKPGILVECLTSDFRGDLEAISSLANSGLDVYAHNIETVRSLQRVVRDPRAGYDQSLAVLKHAKGSREDMITKSSIMLGLGETDEEVKQAMMDLRAIGVDILTLGQYLQPSERHLTVREYVTPQKFQFWKEYGESVGFRYVASGPLVRSSYRAGELFVQNLVRNNKTESSMDPYAEITKSN

SEQ ID NO: 7816 - protein, 367 aa, Zea mays subsp. mays
  peptide (1)..(367): Ceres Seq. ID no. 12566622
MQSSLARPPVLAGCGERRGLAAVARCRAEAAAPVWTASRAPVGPYTGRDPEVKKPAWLRQRAAQGEKYARLRESIGELKLNTVCVEAQCPNIGECWNGGGGAGGEGDGIATATIMVLGDTCTRGCRFCAVKTSNKPPPPDPLEPLNTALAVASWGVDYVVLTSVDRDDLPDGGSSHFAQTVKALKELKPGILVECLTSDFRGDLEAISSLANSGLDVYAHNIETVRSLQRVVRDPRAGYDQSLAVLKHAKGSREDMITKSSIMLGLGETDEEVKQAMMDLRAIGVDILTLGQYLQPSERHLTVREYVTPQKFQFWKEYGESVGFRYVASGPLVRSSYRAGELFVQNLVRNNKTESSMDPYAEITKSN

SEQ ID NO: 7817 - protein, 253 aa, Zea mays subsp. mays
  peptide (1)..(253): Ceres Seq. ID no. 12566623
MVLGDTCTRGCRFCAVKTSNKPPPPDPLEPLNTALAVASWGVDYVVLTSVDRDDLPDGGSSHFAQTVKALKELKPGILVECLTSDFRGDLEAISSLANSGLDVYAHNIETVRSLQRVVRDPRAGYDQSLAVLKHAKGSREDMITKSSIMLGLGETDEEVKQAMMDLRAIGVDILTLGQYLQPSERHLTVREYVTPQKFQFWKEYGESVGFRYVASGPLVRSSYRAGELFVQNLVRNNKTESSMDPYAEITKSN

SEQ ID NO: 7818 - DNA, 592 bp, Zea mays subsp. mays
  misc_feature (1)..(592): Ceres Seq. ID no. 12566081
  misc_feature (1)..(592): Ortholog of  Ceres SEQ ID NO 12590378 as cited in SEQ ID NO 0
acgttcctcgcacggcggaggcaaacaaaccctagccgccaggcgcaggcggtcagggagcgagtaccgagcgccccagttcacacgtgagatgtcagaatacaagaacgtcgttggggggaggctaaagctgaagggtaaggcactggatgtgaaggaaggtggagtcaagaagaaaaaaaagaagcatcagcttgaagagtcgtctcagattgagcacgatgagctccacaaagggggaaactctggcttaccagctgatcacaacaatgagcttattgaagctgatgcttctttttttttcttctttcttcctagtattttcttcccttctcttcgcatcatatgatgattccttagtgtctagctgctgtttttgtgtaaacctctgtaagtttcctgttccatcacatatgagtaaggcctttttgtttctttttatttaagtaaaagatccatcttttatgtactgtcgtggcagttttattatactatgtctgaacaaggcctattcactatgtaagccaaacataaacactatccaggtgacctggttgtgatgactacagtaataagtaactgaataattttt

SEQ ID NO: 7819 - protein, 115 aa, Zea mays subsp. mays
  peptide (1)..(115): Ceres Seq. ID no. 12566082
RSSHGGGKQTLAARRRRSGSEYRAPQFTREMSEYKNVVGGRLKLKGKALDVKEGGVKKKKKKHQLEESSQIEHDELHKGGNSGLPADHNNELIEADASFFFFFLPSIFFPSLRII

SEQ ID NO: 7820 - protein, 85 aa, Zea mays subsp. mays
  peptide (1)..(85): Ceres Seq. ID no. 12566083
MSEYKNVVGGRLKLKGKALDVKEGGVKKKKKKHQLEESSQIEHDELHKGGNSGLPADHNNELIEADASFFFFFLPSIFFPSLRII

SEQ ID NO: 7821 - protein, 74 aa, Zea mays subsp. mays
  peptide (1)..(74): Ceres Seq. ID no. 12566084
MSSTKGETLAYQLITTMSLLKLMLLFFSSFFLVFSSLLFASYDDSLVSSCCFCVNLCKFPVPSHMSKAFLFLFI

SEQ ID NO: 7822 - DNA, 1829 bp, Zea mays subsp. mays
  misc_feature (1)..(1829): Ceres Seq. ID no. 12594668
  misc_feature (1)..(1829): Ortholog of  Ceres SEQ ID NO 13666169 as cited in SEQ ID NO 0
tctggtctttgcaacaaaaaccctgttcatcaagttgcgaacaaaattttgaatatgatttgccgaaaaatgaataaaggtgtggtatcgtcaagtactctttcatccacttctagttgtagtgtcagtggttcctctgtaagtgcatcagatgatccttgccaaaggcctgctgtttctggttgggaatttttagaagctgttccttttgttcttgaagctgttctgacagcatgtgctcatgggcagctttctagccgagacttgactacaagcttaagggatctcgtggactttttgcctgcttctcttgctgcaattgtgagctacttctcagcagaaattacacgaggaatctggaaacctgtcccaatgaatggaattgaatggcctagtcccggtgcttctcttcattccattgaagctgaagtaaaggaaattcttgcctctgctggtgttcagattaacagctgctatccacgtggtgtgccaccaatgcttcctttacctatggctgcacttgtcagcttgacgattacatttaagctagataggagtttggagtacattcaaggggtcattggacaggcgctagagaactgtgcaggggggagttcctggccaagcatgcccattattggggcattgtggacacagaaagtgcgaagatggcatgacttcatcgtcctctcttgtatgcgttctccattcggcagagacaaagatgcagttgcgcagctcatccaaagttgcttctcgtcctttctgcagtcttcatccagtggttctgatataattgcaaaccgtggagttggggctttactaggggactcaatcacgaatcaaggtcttaggctcccaatggcacctggtttcatctacttgagaacatgtcgaactttccatgacacttactttgttagtgaagtgatccttaagcaagtgattgagtgggctcacaaacttgcaaacggatggtgtttcaatggtcctccgcagttgaaatcagggcggacaccactatcttgtgcagcatccatggtgcagcaggtcgcgttgcttggtggaggtctcctatgcatagcaggtggaccacttgtggtccaggtgttgtatgaggaaacactgccaacactgctgctatcagccagagatcagagtttgaaaggccctgggccagtttctagcacactccaaggttacgccatggccaacatgctcttctactgtggtagcctgctttggggagcggataggacttctcctgtcatgaaattgtccttcctctcgaggcggccacgggtggtgagaacccacatggatttcatagctggtgtgttggacggacacattcttctgggctgtgacccgggtacgtggaaagcgtatgtgtcgcaatttatgttcctggtggtgaaatttgttccgtcatggttgcgggacataaagctggacacgctaaagaagatagcagctggacttcggagctggcacgaacacgaccttgctctgtctcttcttgaacgaggaggaccacaagcaatctctgttgtagtcgagacctttctgtaatccttccgtttggacattttgcccccacctgacatagcagccgccgttaagggtttgtagttggtgatctgaggtctagctgaagtaatccggatgacccttttgatccagaattacacttgtgctacccgggtaactgatgtttatctcatgtatggcgagctcatcggggttttcgtgaatccaatacggaagaacatgcaacctactagggtgtacttcagccctaacatgtataacatgtgggaagttcatgt

SEQ ID NO: 7823 - protein, 523 aa, Zea mays subsp. mays
  peptide (1)..(523): Ceres Seq. ID no. 12594669
SGLCNKNPVHQVANKILNMICRKMNKGVVSSSTLSSTSSCSVSGSSVSASDDPCQRPAVSGWEFLEAVPFVLEAVLTACAHGQLSSRDLTTSLRDLVDFLPASLAAIVSYFSAEITRGIWKPVPMNGIEWPSPGASLHSIEAEVKEILASAGVQINSCYPRGVPPMLPLPMAALVSLTITFKLDRSLEYIQGVIGQALENCAGGSSWPSMPIIGALWTQKVRRWHDFIVLSCMRSPFGRDKDAVAQLIQSCFSSFLQSSSSGSDIIANRGVGALLGDSITNQGLRLPMAPGFIYLRTCRTFHDTYFVSEVILKQVIEWAHKLANGWCFNGPPQLKSGRTPLSCAASMVQQVALLGGGLLCIAGGPLVVQVLYEETLPTLLLSARDQSLKGPGPVSSTLQGYAMANMLFYCGSLLWGADRTSPVMKLSFLSRRPRVVRTHMDFIAGVLDGHILLGCDPGTWKAYVSQFMFLVVKFVPSWLRDIKLDTLKKIAAGLRSWHEHDLALSLLERGGPQAISVVVETFL

SEQ ID NO: 7824 - protein, 505 aa, Zea mays subsp. mays
  peptide (1)..(505): Ceres Seq. ID no. 12594670
MICRKMNKGVVSSSTLSSTSSCSVSGSSVSASDDPCQRPAVSGWEFLEAVPFVLEAVLTACAHGQLSSRDLTTSLRDLVDFLPASLAAIVSYFSAEITRGIWKPVPMNGIEWPSPGASLHSIEAEVKEILASAGVQINSCYPRGVPPMLPLPMAALVSLTITFKLDRSLEYIQGVIGQALENCAGGSSWPSMPIIGALWTQKVRRWHDFIVLSCMRSPFGRDKDAVAQLIQSCFSSFLQSSSSGSDIIANRGVGALLGDSITNQGLRLPMAPGFIYLRTCRTFHDTYFVSEVILKQVIEWAHKLANGWCFNGPPQLKSGRTPLSCAASMVQQVALLGGGLLCIAGGPLVVQVLYEETLPTLLLSARDQSLKGPGPVSSTLQGYAMANMLFYCGSLLWGADRTSPVMKLSFLSRRPRVVRTHMDFIAGVLDGHILLGCDPGTWKAYVSQFMFLVVKFVPSWLRDIKLDTLKKIAAGLRSWHEHDLALSLLERGGPQAISVVVETFL

SEQ ID NO: 7825 - protein, 500 aa, Zea mays subsp. mays
  peptide (1)..(500): Ceres Seq. ID no. 12594671
MNKGVVSSSTLSSTSSCSVSGSSVSASDDPCQRPAVSGWEFLEAVPFVLEAVLTACAHGQLSSRDLTTSLRDLVDFLPASLAAIVSYFSAEITRGIWKPVPMNGIEWPSPGASLHSIEAEVKEILASAGVQINSCYPRGVPPMLPLPMAALVSLTITFKLDRSLEYIQGVIGQALENCAGGSSWPSMPIIGALWTQKVRRWHDFIVLSCMRSPFGRDKDAVAQLIQSCFSSFLQSSSSGSDIIANRGVGALLGDSITNQGLRLPMAPGFIYLRTCRTFHDTYFVSEVILKQVIEWAHKLANGWCFNGPPQLKSGRTPLSCAASMVQQVALLGGGLLCIAGGPLVVQVLYEETLPTLLLSARDQSLKGPGPVSSTLQGYAMANMLFYCGSLLWGADRTSPVMKLSFLSRRPRVVRTHMDFIAGVLDGHILLGCDPGTWKAYVSQFMFLVVKFVPSWLRDIKLDTLKKIAAGLRSWHEHDLALSLLERGGPQAISVVVETFL

SEQ ID NO: 7826 - DNA, 1668 bp, Zea mays subsp. mays
  misc_feature (1)..(1668): Ceres Seq. ID no. 12373504
  misc_feature (1)..(1668): Ortholog of  Ceres SEQ ID NO 14313170 as cited in SEQ ID NO 20674
gttgcctctccttttcacccgttcctcgtctccctcctgcggtcctgccccccctcccctgcagccgctccctccatggcgtccttcgtcgtgcaccaccacggttcgccgctggacagggagggcaaggtcaagatgtccgccctggccctgaggagtagcctcaggccgtgcgaggccgccgaggaggtcggggccgggcaggcgtggtgcagaggcgcggacatgggcgtcgccgcctttgtcgacgagttctccgtggaggacttgctggacctcgaggacctctgcgaggttgacaaggactgcgccgagctgggcgacacggtgccggcggcggagtctgtgcaggaaggggacaaggtgtccagtgactcccacgggtcgtcggtgctgtcctacgagctcatgacgctcccggttccgcacccgatgattgacctcccgttgccggcccatgacgccgaggagctggagtgggtgtcccgtatcatggacgactcgctcgccgagctcccgccgccaccgaagctacccgcggcgccgttgggagctgcgcggcggccgctggaaggcgcagtggcaggccctatgcggagcccgaccacgaccatatgcgcgctgtcgacggaggcgctagtgccggtgacgagggcgaagcgcagcaagcgctcgcgtggctccgtgtggtcgctgtccggcggagcgcccctgtcggagtcgacgtcgtcgtcttccacggccaccacgtcgtcctgctcctcgtccgcctctttctcgccgctgttactccttccggcggacccgtccctcgtcctatcctcgcacctcctcgacgagacgccgcggcccaagaagaagtccaagcacgggaagcatggcaagagcggcaagcccaagaagcgcggccgcaagccgaagcaccaccccaagccgccccagttctcgggcggcgccgcctacgcgccggcccagggcgaccggcgctgcagccattgcggcgtgcagaagacgccgcagtggcgcgcgggccccgagggcgccaagacgctgtgcaacgcgtgcggggtccgttacaagtccgggcggctgctcccggagtaccgtccggcttgcagccccaccttcgtgagcagcatacactccaactcccaccgcaaggtgctggagatgcgccgcaagaaggatggcgaccttggtcagctcccgctcccagtcccggccgcgcttctgcttgggccggccgtcgagtcgttctagccggcgctgtacattttttcgtccgcgggtggagctgtttaacctgctgtaccgtacttggttttttttttctttctcttccacttctatatttagtagttgtgctgtactatttagctagagctctgaattgtagaagctttattaggtcgagttaggtagtagagattaagatttccatggttgattaggattgttagggtatgtatggccatagtacttgtggtagtagttaagaacttggtgaggtgtttggcctgacctacgaggaatgatgttgtcatgtcgaggcgctgctggcaccagtgacaagaaagttaggcgtgccttggcgcggaacatggaactgtctgccttgttgtaatcgagagtgtcaggcgagtaagaaagtgattgtttgcattgccg

SEQ ID NO: 7827 - protein, 419 aa, Zea mays subsp. mays
  peptide (1)..(419): Ceres Seq. ID no. 12373505
VASPFHPFLVSLLRSCPPSPAAAPSMASFVVHHHGSPLDREGKVKMSALALRSSLRPCEAAEEVGAGQAWCRGADMGVAAFVDEFSVEDLLDLEDLCEVDKDCAELGDTVPAAESVQEGDKVSSDSHGSSVLSYELMTLPVPHPMIDLPLPAHDAEELEWVSRIMDDSLAELPPPPKLPAAPLGAARRPLEGAVAGPMRSPTTTICALSTEALVPVTRAKRSKRSRGSVWSLSGGAPLSESTSSSSTATTSSCSSSASFSPLLLLPADPSLVLSSHLLDETPRPKKKSKHGKHGKSGKPKKRGRKPKHHPKPPQFSGGAAYAPAQGDRRCSHCGVQKTPQWRAGPEGAKTLCNACGVRYKSGRLLPEYRPACSPTFVSSIHSNSHRKVLEMRRKKDGDLGQLPLPVPAALLLGPAVESF

SEQ ID NO: 7828 - protein, 394 aa, Zea mays subsp. mays
  peptide (1)..(394): Ceres Seq. ID no. 12373506
MASFVVHHHGSPLDREGKVKMSALALRSSLRPCEAAEEVGAGQAWCRGADMGVAAFVDEFSVEDLLDLEDLCEVDKDCAELGDTVPAAESVQEGDKVSSDSHGSSVLSYELMTLPVPHPMIDLPLPAHDAEELEWVSRIMDDSLAELPPPPKLPAAPLGAARRPLEGAVAGPMRSPTTTICALSTEALVPVTRAKRSKRSRGSVWSLSGGAPLSESTSSSSTATTSSCSSSASFSPLLLLPADPSLVLSSHLLDETPRPKKKSKHGKHGKSGKPKKRGRKPKHHPKPPQFSGGAAYAPAQGDRRCSHCGVQKTPQWRAGPEGAKTLCNACGVRYKSGRLLPEYRPACSPTFVSSIHSNSHRKVLEMRRKKDGDLGQLPLPVPAALLLGPAVESF

SEQ ID NO: 7829 - protein, 374 aa, Zea mays subsp. mays
  peptide (1)..(374): Ceres Seq. ID no. 12373507
MSALALRSSLRPCEAAEEVGAGQAWCRGADMGVAAFVDEFSVEDLLDLEDLCEVDKDCAELGDTVPAAESVQEGDKVSSDSHGSSVLSYELMTLPVPHPMIDLPLPAHDAEELEWVSRIMDDSLAELPPPPKLPAAPLGAARRPLEGAVAGPMRSPTTTICALSTEALVPVTRAKRSKRSRGSVWSLSGGAPLSESTSSSSTATTSSCSSSASFSPLLLLPADPSLVLSSHLLDETPRPKKKSKHGKHGKSGKPKKRGRKPKHHPKPPQFSGGAAYAPAQGDRRCSHCGVQKTPQWRAGPEGAKTLCNACGVRYKSGRLLPEYRPACSPTFVSSIHSNSHRKVLEMRRKKDGDLGQLPLPVPAALLLGPAVESF

SEQ ID NO: 7830 - DNA, 1545 bp, Zea mays subsp. mays
  misc_feature (1)..(1545): Ceres Seq. ID no. 12352572
  misc_feature (1)..(1545): Ortholog of  Ceres SEQ ID NO 13662197 as cited in SEQ ID NO 63622
aaatcacctgttcccgcgacctcctccccggcgtacctccagtctccagagatccacacgaccacaccgacccaccaccatctgcatcggcaatggacgccgcgccacccaccataaccaagtccccgccgtccctggttccaccagcggggcccactcccggtggttccctcccgctctcctccatcgacaagaccgccgccgtccgtgtctccgtcgacttcatccaggtcttccccgcccctacgtcggggaaggaggactggagcccctcatctgcgatcgcggccatgcgcgagggctttgccagggcgctcgtgccgtactaccctatcgccggccgcatcgccgagcccgtgcctggtgagcctgagattgagtgcacgggggaaggggtgtggttcgtggaggctgaggcaagctgctccctcgaggaggcgcgtaacctcgagcgcccgctgtgcatcccgaaggaggagctgctcccgcgtccgccggccggtgtgcgcgtggaggacaccctgctgctcgcgcaggttacaaagttcacatgtggtgggttttctgtgggcatttgcttcagtcacttggtgttcgacgggcagggtgctgcgcaatttctgaaagcagttggtgagatggctaggggcctccctgagccatcgatcaagccaatctgggctcgtgatgccatccccaacccacctaagccacccctaggcccgccaccgtcattcaccgcattcaacttcgagaaatcagtcgtcgagatcgctctggacagcatcaagcgcgtgaaggatcaagttgcaagcgaaaccaaccagaagtgttccactttcgacgtggtcaccgccatgatcttcaaatgtcgcgccttggcagtcgacttcgcacctgacgctgaggttcgcctgggctttgcagccagcactcgccacctgctgagcaatgtgctgccctccgtcgatggctactacgggaactgtgtgtacccaggtggtctcaccaagaccagccaggaggtgaaggaagcttcactggtggagatcgtgaccgcgatcagggaggccaaggaggctctgtcgtcgaggttcctcgactggttgagcggcggcgccaaggagaaccactacaacgtgtcgctggactacggcaccctcgtcgtgaccgactggagccacgtgggtttcaacgacgttgactacgggttcggtgagccaagctacgtgttcaccctgaacgacgacgtgaacatcgttccctccgttgtgtacctgaagcctcccaagccgaagcagggcatcaggctggtgctgcagtgcgtggaagggcggcactctgccgtgttcagcgaggagctgcagaagcacgcatagagcgagtgtattccatcccacagtggagattgttgtattttgttgtgtcgaattgctgcccccggaatttgcttgcaataagatagggttggcacgtgtttatactctgtactgttatctcagcacgttacattatacatgtattgagtgagtattgacagtggtg

SEQ ID NO: 7831 - protein, 458 aa, Zea mays subsp. mays
  peptide (1)..(458): Ceres Seq. ID no. 12352573
ITCSRDLLPGVPPVSRDPHDHTDPPPSASAMDAAPPTITKSPPSLVPPAGPTPGGSLPLSSIDKTAAVRVSVDFIQVFPAPTSGKEDWSPSSAIAAMREGFARALVPYYPIAGRIAEPVPGEPEIECTGEGVWFVEAEASCSLEEARNLERPLCIPKEELLPRPPAGVRVEDTLLLAQVTKFTCGGFSVGICFSHLVFDGQGAAQFLKAVGEMARGLPEPSIKPIWARDAIPNPPKPPLGPPPSFTAFNFEKSVVEIALDSIKRVKDQVASETNQKCSTFDVVTAMIFKCRALAVDFAPDAEVRLGFAASTRHLLSNVLPSVDGYYGNCVYPGGLTKTSQEVKEASLVEIVTAIREAKEALSSRFLDWLSGGAKENHYNVSLDYGTLVVTDWSHVGFNDVDYGFGEPSYVFTLNDDVNIVPSVVYLKPPKPKQGIRLVLQCVEGRHSAVFSEELQKHA

SEQ ID NO: 7832 - protein, 428 aa, Zea mays subsp. mays
  peptide (1)..(428): Ceres Seq. ID no. 12352574
MDAAPPTITKSPPSLVPPAGPTPGGSLPLSSIDKTAAVRVSVDFIQVFPAPTSGKEDWSPSSAIAAMREGFARALVPYYPIAGRIAEPVPGEPEIECTGEGVWFVEAEASCSLEEARNLERPLCIPKEELLPRPPAGVRVEDTLLLAQVTKFTCGGFSVGICFSHLVFDGQGAAQFLKAVGEMARGLPEPSIKPIWARDAIPNPPKPPLGPPPSFTAFNFEKSVVEIALDSIKRVKDQVASETNQKCSTFDVVTAMIFKCRALAVDFAPDAEVRLGFAASTRHLLSNVLPSVDGYYGNCVYPGGLTKTSQEVKEASLVEIVTAIREAKEALSSRFLDWLSGGAKENHYNVSLDYGTLVVTDWSHVGFNDVDYGFGEPSYVFTLNDDVNIVPSVVYLKPPKPKQGIRLVLQCVEGRHSAVFSEELQKHA

SEQ ID NO: 7833 - protein, 362 aa, Zea mays subsp. mays
  peptide (1)..(362): Ceres Seq. ID no. 12352575
MREGFARALVPYYPIAGRIAEPVPGEPEIECTGEGVWFVEAEASCSLEEARNLERPLCIPKEELLPRPPAGVRVEDTLLLAQVTKFTCGGFSVGICFSHLVFDGQGAAQFLKAVGEMARGLPEPSIKPIWARDAIPNPPKPPLGPPPSFTAFNFEKSVVEIALDSIKRVKDQVASETNQKCSTFDVVTAMIFKCRALAVDFAPDAEVRLGFAASTRHLLSNVLPSVDGYYGNCVYPGGLTKTSQEVKEASLVEIVTAIREAKEALSSRFLDWLSGGAKENHYNVSLDYGTLVVTDWSHVGFNDVDYGFGEPSYVFTLNDDVNIVPSVVYLKPPKPKQGIRLVLQCVEGRHSAVFSEELQKHA

SEQ ID NO: 7834 - DNA, 1228 bp, Zea mays subsp. mays
  misc_feature (1)..(1228): Ceres Seq. ID no. 12345382
  misc_feature (1)..(1228): Ortholog of  Ceres SEQ ID NO 15176155 as cited in SEQ ID NO 0
ctctctgtcgcatttcccgtcctgtccttcccttacccggcggcttaaaccctagttctcactcccatcgccgcttcagctccgccgcagcagatggagttctggggtctcgaggtcaagcctggttccactgttaagtgtgagcctggatatggctttgtgctgcacctttcccaggctgctcttggggaatcgaagaagagtgataatgccttgatgtatgtcaaaattgatgatcagaaacttgccattggaaccctctctgttgacaagaacccacacatacaatttgatctggttttcgataaagagtttgagctgtcgcacacatcaaaaactaccagcgtcttcttcactggctacaaggttgagcagccattcgaggaagatgagccttcttccacaatggatcttgattctgaagatgaagacgaggagcgggatgttccagtagtcaaggaaaatggcaaagctgatgggaagaaacagaaaagtcaagaaaaggcagttgctgcaccttcaaaatcaagtccggattccaagaagagcaaggatgacgatgattctgatgaggacgagactgatgattctgatgaggatgagacggacgattctgatgagggtttatcttctgaagaaggcgatgatgattcaagtgatgaagatgataccagtgacgatgaggaggaagacactccaactcctaagaagcctgaggtaggcaagaagagagctgctgaaagttccgtgctgaaaactcctctatctgataagaaagcaaaggttgccacaccgtcatctcagaagacaggtggcaagaagggcgccgccgtccatgtggcaactccacacccagcaaaaggcaagaccattgtaaacaatgacaaatcggtcaagtctccaaaatctgcgccaaaatctggtgtcccttgcaaatcgtgcagcaagtcattcatcagtcagacggcacttcaggctcactcgaaggcgaagcatgggggcaagtgagtcgcaggtccaatagagtcaacaacaaatgcgaaacatgggagaggagggtaagcgagagtctcgaaagagtgtcggtggaagtaggcctaaccttattttgtttagagacgggctatgcgttcgatgtagcaaaacaaggctgtggtttgtgtacttcaatatttgggttgtgtgtttcgaatttttttttgaacgtgtctcggattgttgtggtgcc

SEQ ID NO: 7835 - protein, 304 aa, Zea mays subsp. mays
  peptide (1)..(304): Ceres Seq. ID no. 12345383
MEFWGLEVKPGSTVKCEPGYGFVLHLSQAALGESKKSDNALMYVKIDDQKLAIGTLSVDKNPHIQFDLVFDKEFELSHTSKTTSVFFTGYKVEQPFEEDEPSSTMDLDSEDEDEERDVPVVKENGKADGKKQKSQEKAVAAPSKSSPDSKKSKDDDDSDEDETDDSDEDETDDSDEGLSSEEGDDDSSDEDDTSDDEEEDTPTPKKPEVGKKRAAESSVLKTPLSDKKAKVATPSSQKTGGKKGAAVHVATPHPAKGKTIVNNDKSVKSPKSAPKSGVPCKSCSKSFISQTALQAHSKAKHGGK

SEQ ID NO: 7836 - protein, 263 aa, Zea mays subsp. mays
  peptide (1)..(263): Ceres Seq. ID no. 12345384
MYVKIDDQKLAIGTLSVDKNPHIQFDLVFDKEFELSHTSKTTSVFFTGYKVEQPFEEDEPSSTMDLDSEDEDEERDVPVVKENGKADGKKQKSQEKAVAAPSKSSPDSKKSKDDDDSDEDETDDSDEDETDDSDEGLSSEEGDDDSSDEDDTSDDEEEDTPTPKKPEVGKKRAAESSVLKTPLSDKKAKVATPSSQKTGGKKGAAVHVATPHPAKGKTIVNNDKSVKSPKSAPKSGVPCKSCSKSFISQTALQAHSKAKHGGK

SEQ ID NO: 7837 - protein, 200 aa, Zea mays subsp. mays
  peptide (1)..(200): Ceres Seq. ID no. 12345385
MDLDSEDEDEERDVPVVKENGKADGKKQKSQEKAVAAPSKSSPDSKKSKDDDDSDEDETDDSDEDETDDSDEGLSSEEGDDDSSDEDDTSDDEEEDTPTPKKPEVGKKRAAESSVLKTPLSDKKAKVATPSSQKTGGKKGAAVHVATPHPAKGKTIVNNDKSVKSPKSAPKSGVPCKSCSKSFISQTALQAHSKAKHGGK

SEQ ID NO: 7838 - DNA, 954 bp, Zea mays subsp. mays
  misc_feature (1)..(954): Ceres Seq. ID no. 12343259
  misc_feature (1)..(954): Ortholog of  Ceres SEQ ID NO 14308168 as cited in SEQ ID NO 59069
gccatgttcttgttttagttttccatgctctacatattgtatcaaattgttgcatggatgaggtttccatgctctctagattgatgtaaagatgaaagttaccttacctggagtacatgatgcctctggatttttctagctacttatcagtagcacattgtataccgagatgtgtttgtgatgttattttagtagtgtgataagtgttgtctgttatgctcttaaatggaggcatttgaccatccaatttagcttttctatgtgaagtcaatgaagcagaacctcttttttttgtgtgtgcacaaccacggcaatcctacgagccataaaccagagctagtactgaacaatttcactacacgccttggtcatcgtgttggaaggatgatccagtctctcttccctcaagatcccaatttccgcgggcgccgtgttgtgaccttccacaaccagcgagactacatatttttccgccatcacaggtacatcttcgagacaaaagaaaagaaggttgcttcgaaggaaaagacatctggaagcaaaagcggatctgagaagcagcaagtgatttgtcggcttcaggaatgtgggcctcgcttcaccctcaagctgctcaccttgcagcatgggaccttcgacacgaggagcggggagtacgagtgggttcacaagccggatatggatacgagcaggcggagattcttcttgtgatgccccaactccatcctgcggaacttcttttcttaaaaaaaagactttgacccctgttttgctgaagcagttttgtggaaccatcagtgagcagcaagtgatacggacttttatttttattttttattgttctggtttcggcgccagtgcgttggacaccaaaaccaaaagtgccggatgctccgatcctaaggcctgaacagtctatgcctccgtgatcagattaactcagatgattatccg

SEQ ID NO: 7839 - protein, 146 aa, Zea mays subsp. mays
  peptide (1)..(146): Ceres Seq. ID no. 12343260
MKQNLFFLCVHNHGNPTSHKPELVLNNFTTRLGHRVGRMIQSLFPQDPNFRGRRVVTFHNQRDYIFFRHHRYIFETKEKKVASKEKTSGSKSGSEKQQVICRLQECGPRFTLKLLTLQHGTFDTRSGEYEWVHKPDMDTSRRRFFL

SEQ ID NO: 7840 - protein, 108 aa, Zea mays subsp. mays
  peptide (1)..(108): Ceres Seq. ID no. 12343261
MIQSLFPQDPNFRGRRVVTFHNQRDYIFFRHHRYIFETKEKKVASKEKTSGSKSGSEKQQVICRLQECGPRFTLKLLTLQHGTFDTRSGEYEWVHKPDMDTSRRRFFL

SEQ ID NO: 7841 - protein, 94 aa, Zea mays subsp. mays
  peptide (1)..(94): Ceres Seq. ID no. 12343262
MGPSTRGAGSTSGFTSRIWIRAGGDSSCDAPTPSCGTSFLKKKTLTPVLLKQFCGTISEQQVIRTFIFIFYCSGFGASALDTKTKSAGCSDPKA

SEQ ID NO: 7842 - DNA, 1079 bp, Zea mays subsp. mays
  misc_feature (1)..(1079): Ceres Seq. ID no. 12402905
  misc_feature (1)..(1079): Ortholog of  Ceres SEQ ID NO 15169533 as cited in SEQ ID NO 67374
aagctcttgaggagatgctgcaatgaaacatggctcctctgtctcctagactggtagtgcccgtagacgtgaagaagctgccgcgggagcaaaaggtccctctccacaaccgctggcacccggatatccctcctgtcgctgatgtaaccgaaggggaattgttccgcgttgagatggtcgattggagtggagggcgggttagggatgataactctgcagatgatctgaaattcatggatttcacaattgctcattatcttagtgggcccctaagaatagttgattctgaaggggttccagcttcaccaggtgatcttctcgcggtagaaatctgcaaccttggcccacttcctggcgacgagtggggttacaccgcaatacttgaaagggagaatggaggtggattcttaactgaccacttccctagcgcaagaaaagccatctggtatttcgaaggaatctacgcatgctccccgcagataccaggtgttcgttttccaggattgactcatcctggtgttgtgggaactgcaccgtcacttgagctcctaaatatatggaatgaaagagagaaaagtttgtctgagacaagcccggagactattaaactgtgtgaagttctacaccagaggccccttgctcatttaccgacccctgaaaattgcttacttgggaaggtccaagaagggactgctgaatggcacataattgcaaacgaagcggccagaactattgctggaagggaaaatggcgggaattgcgacataaagaacctaagcagaggctccagaatttatctaccagtgtttgtcgaaggagcaaacctcagcactggtgacatgcacttctcccagggggacggcgagatttcgctgtgtggagcaattgaaatgagcgggttccttgagctcaagtaattctgttcttatttacacttcagcactacatgatagtatgacatctcgcattcatcgagcagacctaagtgcttggttcgaggaatgagctagtccatcatcttatcacatctcacttttttgtttcgtttgtggagtgaaatgagatcataaccttatttc

SEQ ID NO: 7843 - protein, 295 aa, Zea mays subsp. mays
  peptide (1)..(295): Ceres Seq. ID no. 12402906
MAPLSPRLVVPVDVKKLPREQKVPLHNRWHPDIPPVADVTEGELFRVEMVDWSGGRVRDDNSADDLKFMDFTIAHYLSGPLRIVDSEGVPASPGDLLAVEICNLGPLPGDEWGYTAILERENGGGFLTDHFPSARKAIWYFEGIYACSPQIPGVRFPGLTHPGVVGTAPSLELLNIWNEREKSLSETSPETIKLCEVLHQRPLAHLPTPENCLLGKVQEGTAEWHIIANEAARTIAGRENGGNCDIKNLSRGSRIYLPVFVEGANLSTGDMHFSQGDGEISLCGAIEMSGFLELK

SEQ ID NO: 7844 - protein, 247 aa, Zea mays subsp. mays
  peptide (1)..(247): Ceres Seq. ID no. 12402907
MVDWSGGRVRDDNSADDLKFMDFTIAHYLSGPLRIVDSEGVPASPGDLLAVEICNLGPLPGDEWGYTAILERENGGGFLTDHFPSARKAIWYFEGIYACSPQIPGVRFPGLTHPGVVGTAPSLELLNIWNEREKSLSETSPETIKLCEVLHQRPLAHLPTPENCLLGKVQEGTAEWHIIANEAARTIAGRENGGNCDIKNLSRGSRIYLPVFVEGANLSTGDMHFSQGDGEISLCGAIEMSGFLELK

SEQ ID NO: 7845 - protein, 227 aa, Zea mays subsp. mays
  peptide (1)..(227): Ceres Seq. ID no. 12402908
MDFTIAHYLSGPLRIVDSEGVPASPGDLLAVEICNLGPLPGDEWGYTAILERENGGGFLTDHFPSARKAIWYFEGIYACSPQIPGVRFPGLTHPGVVGTAPSLELLNIWNEREKSLSETSPETIKLCEVLHQRPLAHLPTPENCLLGKVQEGTAEWHIIANEAARTIAGRENGGNCDIKNLSRGSRIYLPVFVEGANLSTGDMHFSQGDGEISLCGAIEMSGFLELK

SEQ ID NO: 7846 - DNA, 972 bp, Zea mays subsp. mays
  misc_feature (1)..(972): Ceres Seq. ID no. 12365773
  misc_feature (1)..(972): Ortholog of  Ceres SEQ ID NO 12587306 as cited in SEQ ID NO 62035
agatcactggcagtcgcaagtagcaacccgcatcacgagttcacccacgctccccgcacaggcacagctcactagcgaccagggagttcaaacaagaggcaacaagaacgaacccacgcgaacgccaaagttcgctttgcttggttcgggccgctgcaccgccattgttgatctgttctccttctccttggaggagaaagaagagggggagaggaatgatggggcggacgagcgtggcggcggcggcggccctgctggtgctggcggcgtgcgcggctctgccggcgaggacggcggcgaacaagatcagcatcaactggaagcccaacgtgaactacaccgactggctgaagcagcacagccccttctacaaggacgactggctggtgttctactacacggcgggggcaggcggacgtggtgcaggtggacgaggtgggctacaacaagtgcgactccaccaacgccatctacaactacagcaaggggcgcagcttcgccttccagctcaacgagaccaagacctactacttcatctgcagctacggctactgcttcggcgggatgcgcctcgccatcaaggccgagaagctgccgccgccgtccccgccgccgtccgccagcgaccgctccgccgccgccatcgccgccttcgccaggtcccacgcgcccgtcatttacgccgccgtcgccgtgctcgccgcgctcctcaggatggtctagctgggaagaatctacccgccggccccttcgttggttcgaattgggactccttttttttgttcgttcatcctctccatctttttccgtagtgtgcttgggctctcaagaggagcagtagctggtggcggtgctggagtgctgcgttgggttcattaattaattagcggtgtggatttgccgaagcgattgattgagctgagattgatttttcaagtgtgaagaactctagctgccttgctgaattaaagt

SEQ ID NO: 7847 - protein, 279 aa, Zea mays subsp. mays
  peptide (1)..(279): Ceres Seq. ID no. 12365774
DHWQSQVATRITSSPTLPAQAQLTSDQGVQTRGNKNEPTRTPKFALLGSGRCTAIVDLFSFSLEEKEEGERNDGADERGGGGGPAGAGGVRGSAGEDGGEQDQHQLEAQRELHRLAEAAQPLLQGRLAGVLLHGGGRRTWCRWTRWATTSATPPTPSTTTARGAASPSSSTRPRPTTSSAATATASAGCASPSRPRSCRRRPRRRPPATAPPPPSPPSPGPTRPSFTPPSPCSPRSSGWSSWEESTRRPLRWFELGLLFFVRSSSPSFSVVCLGSQEEQ

SEQ ID NO: 7848 - protein, 198 aa, Zea mays subsp. mays
  peptide (1)..(198): Ceres Seq. ID no. 12365775
MMGRTSVAAAAALLVLAACAALPARTAANKISINWKPNVNYTDWLKQHSPFYKDDWLVFYYTAGAGGRGAGGRGGLQQVRLHQRHLQLQQGAQLRLPAQRDQDLLLHLQLRLLLRRDAPRHQGREAAAAVPAAVRQRPLRRRHRRLRQVPRARHLRRRRRARRAPQDGLAGKNLPAGPFVGSNWDSFFLFVHPLHLFP

SEQ ID NO: 7849 - protein, 197 aa, Zea mays subsp. mays
  peptide (1)..(197): Ceres Seq. ID no. 12365776
MGRTSVAAAAALLVLAACAALPARTAANKISINWKPNVNYTDWLKQHSPFYKDDWLVFYYTAGAGGRGAGGRGGLQQVRLHQRHLQLQQGAQLRLPAQRDQDLLLHLQLRLLLRRDAPRHQGREAAAAVPAAVRQRPLRRRHRRLRQVPRARHLRRRRRARRAPQDGLAGKNLPAGPFVGSNWDSFFLFVHPLHLFP

SEQ ID NO: 7850 - DNA, 1024 bp, Zea mays subsp. mays
  misc_feature (1)..(1024): Ceres Seq. ID no. 13498207
  misc_feature (1)..(1024): Ortholog of  Ceres SEQ ID NO 13639080 as cited in SEQ ID NO 56604
atcagtagctagctgttcgaagctttcagccgagcaccatcgtcacagtcagtagtagctaagcatatttctttctccgagtgatttgcgctgagcgatcagttcatccagagcgagcggantgaagctgagctgagcgagcttgcgtcgttgcttgagagaccctgccatggcttcccaccaggacaaggctagctaccaggccggcgaaaccaaggcccgcaccgaggagaagaccgggcaggcggtgggggcgaccaaggacacggcgcaacgccaaggaccgggcggcggacgcggcggggcacgcggcgggcaagggccaggacgccaaggaggccaccaagcagaaggcgtccgacaccggcagctacctgggcaagaagaccgacgaggccaagcacaaggccggcgagacnacggaggcgaccaancagaaggccggcgagacgacggaggcgaccaagcagaaggccggcgagacgacggaggccgccaggcagaaggcagccgacgccatggaggcagccaagcagaaggccgccgaggccgggcagtacgccaaggacaccgccgtctccggcaaggacaagtccggtggcgtcatccagcaggccactgagcaggtgaagagcgcggcggcgggcgccaaggacgcggtgatgagcacgctggggatgggcggggacgacaagcagggcgacgccaacaccaacaccaacactaacaccaacaccaacaccaacaaggacacctntaccatcaccagggatcactagacgcatgtatgcacacgcacttggtccgatcctgtcgtccgtgaccctgtttgcttgtttcgcgagtccagtatgggttttgtgcatgttcccagtgtcatggtttccttttctacgaatttggtgttgtaattttgatttgcaggtacgttgctgtgttttttctgcgtcatcaagtgtctgtaaacgagtcgggcgggtttgagtgtcctttgttgtgataataaagttggtaaatcgtaatt

SEQ ID NO: 7851 - protein, 150 aa, Zea mays subsp. mays
  peptide (1)..(150): Ceres Seq. ID no. 13498208
  misc_feature (84)..(84): Xaa is any aa, unknown or other
  misc_feature (89)..(89): Xaa is any aa, unknown or other
MASHQDKASYQAGETKARTEEKTGQAVGATKDTAQRQGPGGGRGGARGGQGPGRQGGHQAEGVRHRQLPGQEDRRGQAQGRRDXGGDQXEGRRDDGGDQAEGRRDDGGRQAEGSRRHGGSQAEGRRGRAVRQGHRRLRQGQVRWRHPAGH

SEQ ID NO: 7852 - protein, 86 aa, Zea mays subsp. mays
  peptide (1)..(86): Ceres Seq. ID no. 13498209
  misc_feature (80)..(80): Xaa is any aa, unknown or other
MEAAKQKAAEAGQYAKDTAVSGKDKSGGVIQQATEQVKSAAAGAKDAVMSTLGMGGDDKQGDANTNTNTNTNTNTNKDTXTITRDH

SEQ ID NO: 7853 - DNA, 1045 bp, Zea mays subsp. mays
  misc_feature (1)..(1045): Ceres Seq. ID no. 12402172
  misc_feature (1)..(1045): Ortholog of  Ceres SEQ ID NO 14308320 as cited in SEQ ID NO 59093
  misc_feature (1)..(1045): Ortholog of  Ceres SEQ ID NO 12590628 as cited in SEQ ID NO 0
gaagggtcgaactaggcccgtcagagaatcagagctctgaggctgctcacatcaggccaccaccaacccctcacgtcggcggtggcgtcgtcggcgaaggcagagatggcgtccgtggccgcggcggaggtcgcggcggcggcgctccggtcggtgctgtcgcgcgcgcagcaggcggcggcgcgggcggggcgcgcgccggggtccgtgcgcgtggtggcggtgagcaagaccaagccggtgcctgtcatccggggcgtntacgacgcgggccaccgctgcttcggcgagaactacgtccaggagctcatcgacaaggcgcctcagcttcctgaggatattgagtggcacttcattgggaatctgcaaagcaacaaagccagagccctacttgctggcgtgccaaaccttgatatggttgagagtgtcgatgatgagaagattgctaaccgtcttgatcgagtggtagctgacttggggagaaaacctcttaaggttttggtccaagtcaacactagtggagaagaatcgaaatttggagtagatccctcaggatgcatggaactagcaaagcatgtcaaactgaactgcccgaaccttgtgttctctggtctgatgacaattgggatgcttgattactcctcaacccctgagaatttcaaggcgctggctaactgccgggaagaggtgtgcaaggagcttggaatacccgaagagcagtgcgaattgtctatgggcatgtcggctgattttgaacaagcgattgaaatgggaagcacaaatgtaagagttgggtcaaccatatttggtgcaagagaatacccaaagaagaactagggtgtttaactatatttggtgcccaaagaactagggtgcttatgcattcctgtcatgatggtagtggcacagaatctgcaacagatccaaatctgatgatgcatcatatatgtgcagttgtgtgcccattctactcagcttaaaacattttgacacccttttttggcccaaagtatcaataaggaaagttaataaaaagcattagacc

SEQ ID NO: 7854 - protein, 243 aa, Zea mays subsp. mays
  peptide (1)..(243): Ceres Seq. ID no. 12402173
  misc_feature (52)..(52): Xaa is any aa, unknown or other
MASVAAAEVAAAALRSVLSRAQQAAARAGRAPGSVRVVAVSKTKPVPVIRGXYDAGHRCFGENYVQELIDKAPQLPEDIEWHFIGNLQSNKARALLAGVPNLDMVESVDDEKIANRLDRVVADLGRKPLKVLVQVNTSGEESKFGVDPSGCMELAKHVKLNCPNLVFSGLMTIGMLDYSSTPENFKALANCREEVCKELGIPEEQCELSMGMSADFEQAIEMGSTNVRVGSTIFGAREYPKKN

SEQ ID NO: 7855 - protein, 140 aa, Zea mays subsp. mays
  peptide (1)..(140): Ceres Seq. ID no. 12402174
MVESVDDEKIANRLDRVVADLGRKPLKVLVQVNTSGEESKFGVDPSGCMELAKHVKLNCPNLVFSGLMTIGMLDYSSTPENFKALANCREEVCKELGIPEEQCELSMGMSADFEQAIEMGSTNVRVGSTIFGAREYPKKN

SEQ ID NO: 7856 - DNA, 1115 bp, Zea mays subsp. mays
  misc_feature (1)..(1115): Ceres Seq. ID no. 12353939
  misc_feature (1)..(1115): Ortholog of  Ceres SEQ ID NO 15174311 as cited in SEQ ID NO 0
agtcccgattcccgaacaagagcgaggccgcactcccccacgagtccactctccgaccgcacgctccgcgacgcgatggccgcgctccgcctcgcctccttcaccctccgccccgccgccgccgccgccgcctcttccggcgcgactccatcggctccccggtccgcctctttctccagcgtggcgcgggggctcccctccctccgcctggccccgccccgccgccgccgcggggacctcgccaggccccgcgccgcggccgaggccgcggcggagagctacgcgtccgcgctgtcggaggtggccgtcgagaacggcaccctcgagcagacggtctccgacctcgagaagctggagaagatcttctccgacgaggccgtcgccgagttcttcgacaaccccaccgtcccgcgcgaggagaaggccgagctcatcggcgagatcgccaagtcgtccgagcttcagccgcacgtcgtcaacttcctcaacgtcgtcgtcgacaacttccgcgcgtccatcgtgccgcagatcgtcgtcgagttcgagaacgtctacaactcgctcacgggcaccgaggtcgccaccgtcacctccgtcgtgcagctcgagtcgcaggacctcgcgcagatcgcgcagcacgtccagaagatgaccggcgccaagaacgtccgcctcaagacgcagctcgacccggcgctcatcgccggcttcaccgtgcagtacggccgcgacggctccaacttgatcgacatgagcgtccggaagcagatcgaggagatcgcgtccgagttcgagttgcccgccgtcccgctcgaagtctgaggccggcttgaggcgtccatcctcgccctcgaagctatagctgcggctactgtctcaaggaaccaagcgggaatgttggcactgtccccttcagtcagacctgcggatcaacggcggtggctccaaatctccaatactactacatatgaacggacactatttttgtgcgtttctgttgacgggaacctgtgtagttctttctcctttttttccctgtggttgacagacacagacactgtaatatgtttattaaaaacactcatctatatagctgagtgtgcacctcttctctc

SEQ ID NO: 7857 - protein, 276 aa, Zea mays subsp. mays
  peptide (1)..(276): Ceres Seq. ID no. 12353940
SRFPNKSEAALPHESTLRPHAPRRDGRAPPRLLHPPPRRRRRRLFRRDSIGSPVRLFLQRGAGAPLPPPGPAPPPPRGPRQAPRRGRGRGGELRVRAVGGGRRERHPRADGLRPREAGEDLLRRGRRRVLRQPHRPARGEGRAHRRDRQVVRASAARRQLPQRRRRQLPRVHRAADRRRVRERLQLAHGHRGRHRHLRRAARVAGPRADRAARPEDDRRQERPPQDAARPGAHRRLHRAVRPRRLQLDRHERPEADRGDRVRVRVARRPARSLRPA

SEQ ID NO: 7858 - protein, 273 aa, Zea mays subsp. mays
  peptide (1)..(273): Ceres Seq. ID no. 12353941
SPDSRTRARPHSPTSPLSDRTLRDAMAALRLASFTLRPAAAAAASSGATPSAPRSASFSSVARGLPSLRLAPPRRRRGDLARPRAAAEAAAESYASALSEVAVENGTLEQTVSDLEKLEKIFSDEAVAEFFDNPTVPREEKAELIGEIAKSSELQPHVVNFLNVVVDNFRASIVPQIVVEFENVYNSLTGTEVATVTSVVQLESQDLAQIAQHVQKMTGAKNVRLKTQLDPALIAGFTVQYGRDGSNLIDMSVRKQIEEIASEFELPAVPLEV

SEQ ID NO: 7859 - protein, 248 aa, Zea mays subsp. mays
  peptide (1)..(248): Ceres Seq. ID no. 12353942
MAALRLASFTLRPAAAAAASSGATPSAPRSASFSSVARGLPSLRLAPPRRRRGDLARPRAAAEAAAESYASALSEVAVENGTLEQTVSDLEKLEKIFSDEAVAEFFDNPTVPREEKAELIGEIAKSSELQPHVVNFLNVVVDNFRASIVPQIVVEFENVYNSLTGTEVATVTSVVQLESQDLAQIAQHVQKMTGAKNVRLKTQLDPALIAGFTVQYGRDGSNLIDMSVRKQIEEIASEFELPAVPLEV

SEQ ID NO: 7860 - DNA, 721 bp, Zea mays subsp. mays
  misc_feature (1)..(721): Ceres Seq. ID no. 12403367
  misc_feature (1)..(721): Ortholog of  Ceres SEQ ID NO 13595610 as cited in SEQ ID NO 56731
acggagtcaccacgaacctatcgactttttatctccagatccagattagctaccacggcaccgccagcccggacggctataaagacgaggcccacctcgaaatcgacggcgatgaagaagaccagttcccctctcctgatcgtcctgttcctcacagcagcagccatggcggccgagccggagaagcaggcggcccccgcggcacaggagacggccgtgcacatcgtgtacgttgaccgccccgaggacgccgaccctgaggagttccacatccgcaccctcacccccgtcctcggcagcgaacagaaggccagggacgcagtgctctaccactacaagaacgccgccagcggcttctccgcgaagctcaccccccagcaggtcaaggatctcaaggagcaaccaggtgttctccaggttgtgccgagccagacttaccagctacatggtcctgggtctggcactcaccagggcacgacacacaccttgggccttatgtgaaggcgtatgagaatcaagaagactgtgtttagtatggctgtatggcacaggtctgacgaatgtgtatagtacagtactatgtaagaataagggacgtatcgtctatatactgctttgcgcatgttcagccctgttctaaagcttgtaatgcaccaatgcgtatgtttcaatacaatgacaagtatgctatcttgtttggtgcttgttcgatccgtgtttc

SEQ ID NO: 7861 - protein, 166 aa, Zea mays subsp. mays
  peptide (1)..(166): Ceres Seq. ID no. 12403368
TESPRTYRLFISRSRLATTAPPARTAIKTRPTSKSTAMKKTSSPLLIVLFLTAAAMAAEPEKQAAPAAQETAVHIVYVDRPEDADPEEFHIRTLTPVLGSEQKARDAVLYHYKNAASGFSAKLTPQQVKDLKEQPGVLQVVPSQTYQLHGPGSGTHQGTTHTLGLM

SEQ ID NO: 7862 - protein, 129 aa, Zea mays subsp. mays
  peptide (1)..(129): Ceres Seq. ID no. 12403369
MKKTSSPLLIVLFLTAAAMAAEPEKQAAPAAQETAVHIVYVDRPEDADPEEFHIRTLTPVLGSEQKARDAVLYHYKNAASGFSAKLTPQQVKDLKEQPGVLQVVPSQTYQLHGPGSGTHQGTTHTLGLM

SEQ ID NO: 7863 - protein, 111 aa, Zea mays subsp. mays
  peptide (1)..(111): Ceres Seq. ID no. 12403370
MAAEPEKQAAPAAQETAVHIVYVDRPEDADPEEFHIRTLTPVLGSEQKARDAVLYHYKNAASGFSAKLTPQQVKDLKEQPGVLQVVPSQTYQLHGPGSGTHQGTTHTLGLM

SEQ ID NO: 7864 - DNA, 825 bp, Zea mays subsp. mays
  misc_feature (1)..(825): Ceres Seq. ID no. 12404319
  misc_feature (1)..(825): Ortholog of  Ceres SEQ ID NO 13595292 as cited in SEQ ID NO 55879
  misc_feature (1)..(825): Ortholog of  Ceres SEQ ID NO 12593564 as cited in SEQ ID NO 63168
actctattcccattccaagcccccgctctcggattcccgacgacgagctcagagctcctcctctcctcccctgctcggtgttcgacgcaacagctgccgccatgtctgccgccaaccagctcgccgccctcgtcagcaacatgtacgccacgggtttgcttgacgatcagttccagcagctccagatgctccagaacgccagtactcctgacttcgtctccgaggtcgtcacgctcttctgccaggacggcgagcggatcatcggagagctggccaaactgttggagaaacccaacgtggattttgacagggttgacgcctttgtgcatcagctcaaaggaagcagtgcaagtattggtgctcagaaggttaagaacacttgcattcagttccgcgaatcctgtcagcagaagagcaaagatgggtgcctcaagacactggagacagtgaagattaacttctatgacctgcgtgacaagtttcagaccatgcttcagctgcagcgtcaggtcaatggctgtccccccagcaagtgaacaagatggtggagtggagcttcatgttgggatgatgcgtgcatctttcaagttccagaacattctgaataagctcctcaattggcttctaggaagtctgtaatagcttagcagcaagattagcgttgacaccaccgtagcagaagtcaatgtcgtcgtttttgtgtcaccgtcttagtcgtaagtgtccgtgctgggtgatggatctcctgcaagcagttgcaagtggtccatttactatgtagtagtggctctgaataatctatatcttagcaatgaatttggcaac

SEQ ID NO: 7865 - protein, 177 aa, Zea mays subsp. mays
  peptide (1)..(177): Ceres Seq. ID no. 12404320
SIPIPSPRSRIPDDELRAPPLLPCSVFDATAAAMSAANQLAALVSNMYATGLLDDQFQQLQMLQNASTPDFVSEVVTLFCQDGERIIGELAKLLEKPNVDFDRVDAFVHQLKGSSASIGAQKVKNTCIQFRESCQQKSKDGCLKTLETVKINFYDLRDKFQTMLQLQRQVNGCPPSK

SEQ ID NO: 7866 - protein, 149 aa, Zea mays subsp. mays
  peptide (1)..(149): Ceres Seq. ID no. 12404321
TLFPFQAPALGFPTTSSELLLSSPARCSTQQLPPCLPPTSSPPSSATCTPRVCLTISSSSSRCSRTPVLLTSSPRSSRSSARTASGSSESWPNCWRNPTWILTGLTPLCISSKEAVQVLVLRRLRTLAFSSANPVSRRAKMGASRHWRQ

SEQ ID NO: 7867 - protein, 144 aa, Zea mays subsp. mays
  peptide (1)..(144): Ceres Seq. ID no. 12404322
MSAANQLAALVSNMYATGLLDDQFQQLQMLQNASTPDFVSEVVTLFCQDGERIIGELAKLLEKPNVDFDRVDAFVHQLKGSSASIGAQKVKNTCIQFRESCQQKSKDGCLKTLETVKINFYDLRDKFQTMLQLQRQVNGCPPSK

SEQ ID NO: 7868 - DNA, 1116 bp, Zea mays subsp. mays
  misc_feature (1)..(1116): Ceres Seq. ID no. 13498100
  misc_feature (1)..(1116): Ortholog of  Ceres SEQ ID NO 13599568 as cited in SEQ ID NO 509
  misc_feature (1)..(1116): Ortholog of  Ceres SEQ ID NO 15172903 as cited in SEQ ID NO 51839
  misc_feature (1)..(1116): Ortholog of  Ceres SEQ ID NO 15177108 as cited in SEQ ID NO 52015
  misc_feature (1)..(1116): Ortholog of  Ceres SEQ ID NO 13638595 as cited in SEQ ID NO 52050
  misc_feature (1)..(1116): Ortholog of  Ceres SEQ ID NO 13594748 as cited in SEQ ID NO 52114
  misc_feature (1)..(1116): Ortholog of  Ceres SEQ ID NO 12623490 as cited in SEQ ID NO 61136
  misc_feature (1)..(1116): Ortholog of  Ceres SEQ ID NO 14301870 as cited in SEQ ID NO 61501
  misc_feature (1)..(1116): Ortholog of  Ceres SEQ ID NO 15173596 as cited in SEQ ID NO 63267
  misc_feature (1)..(1116): Ortholog of  Ceres SEQ ID NO 12583993 as cited in SEQ ID NO 68098
gaatgagaccagttgccctctgccccaggcaaagctgcagctgcagctgccacagcggtgaccacgcacgctgcaccgcaccgcaccgacgggtgagacctgctgtgtccaccaaccgtgagcccagcaggcgaccgacgacgctagcttagactaggaaccaacaatggccacgcgccacctgctcctcctcctgctcgccgcgctgctcccggcggcggccacggcggacccggacgcggtgcaggactactgcgtgccggacacgggcggcgggcgcgggcgcgggcgggccgtggatctagcgctgctcccgtcctacccgtgcaggagccccgccaacctgacggcggcggacttcgccttcgcgggcgtgcgcgccgcgggcaacttctccgcggacacggggttcgcgggggtgtcggtgacccccgcgcagttcccggcgctgcacaccctcggcgtgtccttcgcgcgcgccgacctgtccgcggcgggcggggtcaacccgccgcactaccacccgcgcgccaccgagacggcgctggtcctggccggccgcgtctacgcgggattcgtcgactcgggcggccgcgtcttcgccaaggtgctcgagaaaggggaggtcatggtgttcccgcgcgccatggtgcacttccagatgaacgtcggcgacgagccggccacggtgtacggcaccttcaacagcgagaaccccggcatcgtgcgcatcccggcgaccgtgttcgggtccgggatcaaggacgccgtcctcgagagggcgttcggcctcgagccggaggagctccgccggctccagaagaggttcgggcctcctcccaagaccaagacggcggagatggacgattgatcggaagatcaggcactcgcgatcaagggggacatgattaattgattagttatattaagagcagcagactttgtgatctctggaatatatctccttccatttgttaatgtctgtatgaattatttggcggtggacggtggttatcatggaccgataatgccggtacgtacagatgggatgggcatgtggggttaggtgtcacattcaattgtctacgagatgtttatgggtttatatatattgtt

SEQ ID NO: 7869 - protein, 234 aa, Zea mays subsp. mays
  peptide (1)..(234): Ceres Seq. ID no. 13498101
MATRHLLLLLLAALLPAAATADPDAVQDYCVPDTGGGRGRGRAVDLALLPSYPCRSPANLTAADFAFAGVRAAGNFSADTGFAGVSVTPAQFPALHTLGVSFARADLSAAGGVNPPHYHPRATETALVLAGRVYAGFVDSGGRVFAKVLEKGEVMVFPRAMVHFQMNVGDEPATVYGTFNSENPGIVRIPATVFGSGIKDAVLERAFGLEPEELRRLQKRFGPPPKTKTAEMDD

SEQ ID NO: 7870 - DNA, 849 bp, Zea mays subsp. mays
  misc_feature (1)..(849): Ceres Seq. ID no. 13498110
  misc_feature (1)..(849): Ortholog of  Ceres SEQ ID NO 13661065 as cited in SEQ ID NO 60947
acgatctctatttcccatttccgggcggctcccgttctccacctcaattattgcccacccatccccgctccctcctctcctctcctcccgtcccacccatctcctcgcaccagcgccgggggaatggcggccgcgctgtggacgctggtggtggcggtggccctgtcggcggcgctggcctcgaaccgccccgtggngcgggcggcgacggcggcggcggaggcggcgaacgaggtgctccgcgcgcaccagctgccggggggcctgctgccggcggggatcacggcgttccggcacgacgccgccacgggagcgttcgaggcccggctggacgcgccctgcacggcgcgcttcgaggtcggcctccgctacaacgccaccgtctccggggtcatcagccccggccagatcgcccgacatctccggcgtcgccgcgcaggacctcttcatgtggttccccgtccacgacatcaaggtcgacatcccctcctccggcgtcatctacttcaacgtcggcgtcgtcaagaagcacctcccgctcgccgtcttcgacgcgccgccggcttgcacgcccgacccgctcctgcagcggctggaggacgtgggcgagggcggattggccgtggtgggcgccgcggcgtcccggcgatgatgggtggaggagacggaggagggttcgacggcgccggcgagccaggatcacgagcgcagttttgagaggagaacgggcgatcgccggccttcttcgatgcacatagatagcgtgggcatttccatctgttttctttttctgcttcctactagtggctacactagtaaccaacctcgtctatcattgttcgtttcgcc

SEQ ID NO: 7871 - protein, 251 aa, Zea mays subsp. mays
  peptide (1)..(251): Ceres Seq. ID no. 13498111
  misc_feature (65)..(65): Xaa is any aa, unknown or other
DLYFPFPGGSRSPPQLLPTHPRSLLSSPPVPPISSHQRRGNGGRAVDAGGGGGPVGGAGLEPPRXAGGDGGGGGGERGAPRAPAAGGPAAGGDHGVPARRRHGSVRGPAGRALHGALRGRPPLQRHRLRGHQPRPDRPTSPASPRRTSSCGSPSTTSRSTSPPPASSTSTSASSRSTSRSPSSTRRRLARPTRSCSGWRTWARADWPWWAPRRPGDDGWRRRRRVRRRRRARITSAVLRGERAIAGLLRCT

SEQ ID NO: 7872 - protein, 238 aa, Zea mays subsp. mays
  peptide (1)..(238): Ceres Seq. ID no. 13498112
  misc_feature (66)..(66): Xaa is any aa, unknown or other
TISISHFRAAPVLHLNYCPPIPAPSSPLLPSHPSPRTSAGGMAAALWTLVVAVALSAALASNRPVXRAATAAAEAANEVLRAHQLPGGLLPAGITAFRHDAATGAFEARLDAPCTARFEVGLRYNATVSGVISPGQIARHLRRRRAGPLHVVPRPRHQGRHPLLRRHLLQRRRRQEAPPARRLRRAAGLHARPAPAAAGGRGRGRIGRGGRRGVPAMMGGGDGGGFDGAGEPGSRAQF

SEQ ID NO: 7873 - protein, 216 aa, Zea mays subsp. mays
  peptide (1)..(216): Ceres Seq. ID no. 13498113
  misc_feature (66)..(66): Xaa is any aa, unknown or other
RSLFPISGRLPFSTSIIAHPSPLPPLLSSRPTHLLAPAPGEWRPRCGRWWWRWPCRRRWPRTAPWXGRRRRRRRRRTRCSARTSCRGACCRRGSRRSGTTPPRERSRPGWTRPARRASRSASATTPPSPGSSAPARSPDISGVAAQDLFMWFPVHDIKVDIPSSGVIYFNVGVVKKHLPLAVFDAPPACTPDPLLQRLEDVGEGGLAVVGAAASRR

SEQ ID NO: 7874 - protein, 197 aa, Zea mays subsp. mays
  peptide (1)..(197): Ceres Seq. ID no. 13498114
  misc_feature (25)..(25): Xaa is any aa, unknown or other
MAAALWTLVVAVALSAALASNRPVXRAATAAAEAANEVLRAHQLPGGLLPAGITAFRHDAATGAFEARLDAPCTARFEVGLRYNATVSGVISPGQIARHLRRRRAGPLHVVPRPRHQGRHPLLRRHLLQRRRRQEAPPARRLRRAAGLHARPAPAAAGGRGRGRIGRGGRRGVPAMMGGGDGGGFDGAGEPGSRAQF

SEQ ID NO: 7875 - DNA, 1099 bp, Zea mays subsp. mays
  misc_feature (1)..(1099): Ceres Seq. ID no. 12403084
  misc_feature (1)..(1099): Ortholog of  Ceres SEQ ID NO 13595812 as cited in SEQ ID NO 59796
acacttctccattccattgcggttctgcgagcccctacctccctgtggtgcttggccatggcggactaccacttcgtgtataaggacgtggagggggcgagcacagagtgggacgacatccagcgccgcctcgggaacttgcccccgaagccggagcccttcaagccgccgcccttcgccccgaaggttgacgccgacgagcagcccaagtccaaggaatggcttgacgtgcgcgagcccgaagagctcgaggaactagaggacgatctggatgacgaccgcttcctcgagaagtacaggaagatgaggctcgcagagctgagggaagccgcaaaagccgcgcgatttggtactatacttcccatcactggctccgacttcgtgcgggaggtatcgcaggcacaatcagatgtttgggttgtggtcttcctctacaaggatgggatacctgaatgtggattgcttcagaattgtttggaagaattggctactaggtatccagcgacgaagtttgttaaaattatctccacagactgcatccccaactacccagataggaatgttcctacaatactggtgtataacaacagtgctgtcaaagggacttatgttggtttgcagaagtttggtggaaagagatgcacacctgaatctgttgcgttagccctttgccagtcagacccggtactgaatgatgggcatggtggcagcgattcatctcggggcaatgtcttcgaaggtgttcgcaggaagttcatagagaaggttgtggcccagcatgaagagcgggaagaagaggacagtgactaagctaatacttgtgtttgttttccgcagctggcggatccaatttggttccaatgtttactgatcttatgtgatttttgtgggtgaaatttgccagagttttctgatacctggctgtgcggctgaagtttttgaaagttcacgggtcttattgcctacctttcagctgtaacacagctccattattatattgttaagagatcagagatgattagtgcacttgtataattgcatgagaaaaaatccagccaaactttgaatccacagtatttcactatcttgaacatttccc

SEQ ID NO: 7876 - protein, 269 aa, Zea mays subsp. mays
  peptide (1)..(269): Ceres Seq. ID no. 12403085
TLLHSIAVLRAPTSLWCLAMADYHFVYKDVEGASTEWDDIQRRLGNLPPKPEPFKPPPFAPKVDADEQPKSKEWLDVREPEELEELEDDLDDDRFLEKYRKMRLAELREAAKAARFGTILPITGSDFVREVSQAQSDVWVVVFLYKDGIPECGLLQNCLEELATRYPATKFVKIISTDCIPNYPDRNVPTILVYNNSAVKGTYVGLQKFGGKRCTPESVALALCQSDPVLNDGHGGSDSSRGNVFEGVRRKFIEKVVAQHEEREEEDSD

SEQ ID NO: 7877 - protein, 250 aa, Zea mays subsp. mays
  peptide (1)..(250): Ceres Seq. ID no. 12403086
MADYHFVYKDVEGASTEWDDIQRRLGNLPPKPEPFKPPPFAPKVDADEQPKSKEWLDVREPEELEELEDDLDDDRFLEKYRKMRLAELREAAKAARFGTILPITGSDFVREVSQAQSDVWVVVFLYKDGIPECGLLQNCLEELATRYPATKFVKIISTDCIPNYPDRNVPTILVYNNSAVKGTYVGLQKFGGKRCTPESVALALCQSDPVLNDGHGGSDSSRGNVFEGVRRKFIEKVVAQHEEREEEDSD

SEQ ID NO: 7878 - protein, 168 aa, Zea mays subsp. mays
  peptide (1)..(168): Ceres Seq. ID no. 12403087
MRLAELREAAKAARFGTILPITGSDFVREVSQAQSDVWVVVFLYKDGIPECGLLQNCLEELATRYPATKFVKIISTDCIPNYPDRNVPTILVYNNSAVKGTYVGLQKFGGKRCTPESVALALCQSDPVLNDGHGGSDSSRGNVFEGVRRKFIEKVVAQHEEREEEDSD

SEQ ID NO: 7879 - DNA, 1036 bp, Zea mays subsp. mays
  misc_feature (1)..(1036): Ceres Seq. ID no. 12401998
  misc_feature (1)..(1036): Ortholog of  Ceres SEQ ID NO 14304209 as cited in SEQ ID NO 56460
  misc_feature (1)..(1036): Ortholog of  Ceres SEQ ID NO 12586351 as cited in SEQ ID NO 64028
  misc_feature (1)..(1036): Ortholog of  Ceres SEQ ID NO 13654441 as cited in SEQ ID NO 67814
  misc_feature (1)..(1036): Ortholog of  Ceres SEQ ID NO 15177482 as cited in SEQ ID NO 0
actagtagtgctgtgtctaatagttctagtgtcgtgccgggccggacggcagtttggccatctataactgtacaccatatagcaccaatcactccgcagtgcagacgcagcgcatgcaggtagcaatggcgggggagacgaagaagggcctggtgctgctggacttctgggtgagcccgttcgggcagcgctgccgcatcgcgctggcggagaagggcatcgcctacgagtactcggagcaggagctgctgggcggcgccaagagcgacatcctcctccgctccaacccggtgcacaagaagatccccgtgctcctccacgacggccgccccgtctgcgagtccctcgtcatcctcgagtacctcgaggaggccttcccggaggcctcccccaggctgctccccgacgccgcctacgcgcgcgcgcaggcccgcttctgggcggcctactccgacaaggtctacaaggccggcacgcggctgtggaagctcaggggcgacgcgcgggcgcaggcgcgcgccgagatcgtgcaggtggtccggaacctcgacggcgagctaggggacaaggccttcttcggcggcgaggcgttcgggttcgtggacgtggcgctcgtgcccttcgtgccgtggctccccagctacgagcggtacggggacttcagcgtggcggagatcgcgcccaggctggcggcgtgggcgcgccggtgcgcgcagcgggagagcgtggccaggacccttcacccgccggaaaaggtggacgagttcatcaacctgctcaagaagacctacggcatcgagtagtagagcggactactactagcagaggagatggtaccggccgtacgtacgtggctgccatgcagtttttgtttcggtttgtttaaacgggactccatgaatggatggaactcttcttgggctccgtgtgctacatacacatctgtaaaggtgaactaaaatcacggtaaaaactcggaaattagtttgtaaagggtccagcccccctcctttataaatagagaggtatacggctg

SEQ ID NO: 7880 - protein, 229 aa, Zea mays subsp. mays
  peptide (1)..(229): Ceres Seq. ID no. 12401999
MQVAMAGETKKGLVLLDFWVSPFGQRCRIALAEKGIAYEYSEQELLGGAKSDILLRSNPVHKKIPVLLHDGRPVCESLVILEYLEEAFPEASPRLLPDAAYARAQARFWAAYSDKVYKAGTRLWKLRGDARAQARAEIVQVVRNLDGELGDKAFFGGEAFGFVDVALVPFVPWLPSYERYGDFSVAEIAPRLAAWARRCAQRESVARTLHPPEKVDEFINLLKKTYGIE

SEQ ID NO: 7881 - protein, 225 aa, Zea mays subsp. mays
  peptide (1)..(225): Ceres Seq. ID no. 12402000
MAGETKKGLVLLDFWVSPFGQRCRIALAEKGIAYEYSEQELLGGAKSDILLRSNPVHKKIPVLLHDGRPVCESLVILEYLEEAFPEASPRLLPDAAYARAQARFWAAYSDKVYKAGTRLWKLRGDARAQARAEIVQVVRNLDGELGDKAFFGGEAFGFVDVALVPFVPWLPSYERYGDFSVAEIAPRLAAWARRCAQRESVARTLHPPEKVDEFINLLKKTYGIE

SEQ ID NO: 7882 - DNA, 796 bp, Zea mays subsp. mays
  misc_feature (1)..(796): Ceres Seq. ID no. 12595084
  misc_feature (1)..(796): Ortholog of  Ceres SEQ ID NO 12606011 as cited in SEQ ID NO 20354
ccatcgccccccacaccgtctcctccacaacacgctcctcacctcgcggcgactcttgccaggcattcctccgcgaaaaacgcatccgctccaaggggagttgatcgagaagcgttggtggacatgggtcagatccagtactccgagaagtacttcgacgacacctacgagtacaggcacgtcgtcctcccgcccgaggtcgccaagctcctccccaagaaccgtctcctgtccgagaacgagtggcgcgcgatcggagtgcagcagagccgcgggtgggtgcactacgcgatccaccgcccggagccgcacatcatgctgttccgccgcccgatcaactaccagcagcagcaggaggcggctgccgcgcagatgctggccaagtgagcccccggtggccagggcggcgaccaggaacgtttaaaaccctaaccccctttccatctctaaaaggggcgtcgctgttctgttgatcaattcctctatgctgttagttggaaacttcgggtgtagttggtggatttgctggtgtgtgccttgtgttcgtggaaattcctgtgaaggaactgccatgtgttaggctgttaccatgcccattttcttaatactatgtgttgactgtgatcaagatggcactcatgcagggatgatatttaatctgtttgacgtgatctttgtaatggtgtgatctggttagtagcactgatatcatgtttaatctgttatgtgtgatggtcagtatggtcatggtgattttgcatgatgagaattgttacctagtgatctaagtttagtc

SEQ ID NO: 7883 - protein, 140 aa, Zea mays subsp. mays
  peptide (1)..(140): Ceres Seq. ID no. 12595085
HRPPHRLLHNTLLTSRRLLPGIPPRKTHPLQGELIEKRWWTWVRSSTPRSTSTTPTSTGTSSSRPRSPSSSPRTVSCPRTSGARSECSRAAGGCTTRSTARSRTSCCSAARSTTSSSRRRLPRRCWPSEPPVARAATRNV

SEQ ID NO: 7884 - protein, 128 aa, Zea mays subsp. mays
  peptide (1)..(128): Ceres Seq. ID no. 12595086
PSPPTPSPPQHAPHLAATLARHSSAKNASAPRGVDREALVDMGQIQYSEKYFDDTYEYRHVVLPPEVAKLLPKNRLLSENEWRAIGVQQSRGWVHYAIHRPEPHIMLFRRPINYQQQQEAAAAQMLAK

SEQ ID NO: 7885 - protein, 87 aa, Zea mays subsp. mays
  peptide (1)..(87): Ceres Seq. ID no. 12595087
MGQIQYSEKYFDDTYEYRHVVLPPEVAKLLPKNRLLSENEWRAIGVQQSRGWVHYAIHRPEPHIMLFRRPINYQQQQEAAAAQMLAK

SEQ ID NO: 7886 - DNA, 832 bp, Zea mays subsp. mays
  misc_feature (1)..(832): Ceres Seq. ID no. 12404307
  misc_feature (1)..(832): Ortholog of  Ceres SEQ ID NO 15179191 as cited in SEQ ID NO 0
atcctagaaggaaacaggaacaggcagctctgaaagactgaaactcacggccatggccatcctgggcgccctcaggctcgcgccgtctccacccgccctcgccggcgctgcgccaccggctacgtcgccgtctgcggctgtacgctcctccgtgcacttccacctcgccaatgccggcgccgccgcgctcgtcgccgcctcgctcctcgccgccgaccccgccgtggctttcattggaggaggaccgtacgggaagcaggtgacgcgggggcaggacctcaccggcaaggacttcagcggccagacactcatcaagcaggacttcaagacgtctatactgaggcaggcgaacttcaaaggcgcgaacctgctcggcgcgagcttcttcgatgcagacctcacaagcgctgatctctctgacgctgatcttagaggcgctgatttgtcgctggcgaatttaacgaaggcaaacttatcaaatgccaacttagaaggggcacttgccactgggaacacttctttcaaaggtgccgacataactggggcagattttaccgatgtgccgctgcgagatgatcaacgggagtacctctgcaaaatcgctgacggagtaaattcaaccactggaaacccaacaaaggagactctgttctgcagctgatcgacggaaggacctgggacttgtgacttattcaacgtcttgataaacttgcatctgctgctgtaagcacgtgaggaatgtaaattgagttatagagggttcctagaaataataactggtaattacgtgtaaatcaaccaacaataaaagtgtgtgctgccctttgaatgt

SEQ ID NO: 7887 - protein, 202 aa, Zea mays subsp. mays
  peptide (1)..(202): Ceres Seq. ID no. 12404308
MAILGALRLAPSPPALAGAAPPATSPSAAVRSSVHFHLANAGAAALVAASLLAADPAVAFIGGGPYGKQVTRGQDLTGKDFSGQTLIKQDFKTSILRQANFKGANLLGASFFDADLTSADLSDADLRGADLSLANLTKANLSNANLEGALATGNTSFKGADITGADFTDVPLRDDQREYLCKIADGVNSTTGNPTKETLFCS

SEQ ID NO: 7888 - DNA, 666 bp, Zea mays subsp. mays
  misc_feature (1)..(666): Ceres Seq. ID no. 12403251
  misc_feature (1)..(666): Ortholog of  Ceres SEQ ID NO 13622803 as cited in SEQ ID NO 489
gccggtaggagcggaggagacggcgtctcgccgctcgcttcgtttccgccttccccctcccgcaaagtcgccgccggctcgcattcgtggttccgcgtgggggtccggggaaacgcgacgagagaggcggaagcgatggcgaagtcgtgcaaggggttggccatggagctcgtcaagtgtctcagcgagacccactgcgtcaaggtgcagaaaaggccgtacaaggagtgcgctggggagaaggtgcccaacattaccagcgagtgcgctggcctgcgggagacctacttcaactgcaagaggggccaggttgacatgcgggcccgaatacgcgggaacaagggatactagtgatgtgcctgcaatatccacaatcagttttggtttctagccatgcttctgtgacattgaggtgtaatgataacatggtttagtgtgcccgtgttctgtttttgataggtgaggggaactcacaacacacgtggcttcaattgatgaggggagtgcattcatgtctacattctattacatttgatattccctctgttttaaattgtttgacgttttgttactatgatctatgcgtgtagcaaaagttaatctatggtccgtttggtttagctgtagattcctgaaaatctaattctagccgtgaaagttgcagcg

SEQ ID NO: 7889 - protein, 129 aa, Zea mays subsp. mays
  peptide (1)..(129): Ceres Seq. ID no. 12403252
PVGAEETASRRSLRFRLPPPAKSPPARIRGSAWGSGETRRERRKRWRSRARGWPWSSSSVSARPTASRCRKGRTRSALGRRCPTLPASALACGRPTSTARGARLTCGPEYAGTRDTSDVPAISTISFGF

SEQ ID NO: 7890 - protein, 116 aa, Zea mays subsp. mays
  peptide (1)..(116): Ceres Seq. ID no. 12403253
AGRSGGDGVSPLASFPPSPSRKVAAGSHSWFRVGVRGNATREAEAMAKSCKGLAMELVKCLSETHCVKVQKRPYKECAGEKVPNITSECAGLRETYFNCKRGQVDMRARIRGNKGY

SEQ ID NO: 7891 - protein, 71 aa, Zea mays subsp. mays
  peptide (1)..(71): Ceres Seq. ID no. 12403254
MAKSCKGLAMELVKCLSETHCVKVQKRPYKECAGEKVPNITSECAGLRETYFNCKRGQVDMRARIRGNKGY

SEQ ID NO: 7892 - DNA, 832 bp, Zea mays subsp. mays
  misc_feature (1)..(832): Ceres Seq. ID no. 12351256
  misc_feature (1)..(832): Ortholog of  Ceres SEQ ID NO 13598935 as cited in SEQ ID NO 1239
  misc_feature (1)..(832): Ortholog of  Ceres SEQ ID NO 13598171 as cited in SEQ ID NO 61357
  misc_feature (1)..(832): Ortholog of  Ceres SEQ ID NO 13664149 as cited in SEQ ID NO 61490
aacggttcacacttcacagcccacatcaacaaatggccaggaaagaagtgacgctcctgctcttcctcgtgctgcttgtcgcagccgtcgaggcacagctgcacgacgagcctacggcggccgctgtcgggcggcggcgtggcgcgaaggccgccacggcgccgacgcacctccacttcttcttccacgacacggtgagcggcaagtcgccgacggcggtacgcgtggtgagcccgccggcgtcgtcgccgtcgcccgtgttcgggatggtgaacgtgatggacgacccgctgacggaagggccggagcaagggtcggcccccgtcggccgcgcccagggcctgtacatggggtccgaccaggccaagatcggcttcctgcaggccatgaacctcgtgttcaccgcgggggactacaacggcagcacgctcgcgctgctcggccgcaactgcccgctcgacgccgtccgcgagctccccgtcgtcggcggcacgggcgcgttccgcttcgcccgcggctacgcgctgctgcgcacccactggctcgacttcgccaccggcgacgccaccgtcgagtacgacgtctacgtcacggactagctaattaataacgtaccgccttgctagccctcaccctcactgatgagtgccataagcattactacaaagacaggaccacgcaacaacaatggtgccaataaaggctttgaagcatgcttcgccacagagcgcctgctttttcttttaaaaccagcattttcgtttcagcttatatatatatttatagaacgcatgatctgtatccaatacaagcttcagaacccctttatgtt

SEQ ID NO: 7893 - protein, 201 aa, Zea mays subsp. mays
  peptide (1)..(201): Ceres Seq. ID no. 12351257
TVHTSQPTSTNGQERSDAPALPRAACRSRRGTAARRAYGGRCRAAAWREGRHGADAPPLLLPRHGERQVADGGTRGEPAGVVAVARVRDGERDGRPADGRAGARVGPRRPRPGPVHGVRPGQDRLPAGHEPRVHRGGLQRQHARAARPQLPARRRPRAPRRRRHGRVPLRPRLRAAAHPLARLRHRRRHRRVRRLRHGLAN

SEQ ID NO: 7894 - protein, 198 aa, Zea mays subsp. mays
  peptide (1)..(198): Ceres Seq. ID no. 12351258
RFTLHSPHQQMARKEVTLLLFLVLLVAAVEAQLHDEPTAAAVGRRRGAKAATAPTHLHFFFHDTVSGKSPTAVRVVSPPASSPSPVFGMVNVMDDPLTEGPEQGSAPVGRAQGLYMGSDQAKIGFLQAMNLVFTAGDYNGSTLALLGRNCPLDAVRELPVVGGTGAFRFARGYALLRTHWLDFATGDATVEYDVYVTD

SEQ ID NO: 7895 - protein, 188 aa, Zea mays subsp. mays
  peptide (1)..(188): Ceres Seq. ID no. 12351259
MARKEVTLLLFLVLLVAAVEAQLHDEPTAAAVGRRRGAKAATAPTHLHFFFHDTVSGKSPTAVRVVSPPASSPSPVFGMVNVMDDPLTEGPEQGSAPVGRAQGLYMGSDQAKIGFLQAMNLVFTAGDYNGSTLALLGRNCPLDAVRELPVVGGTGAFRFARGYALLRTHWLDFATGDATVEYDVYVTD

SEQ ID NO: 7896 - DNA, 809 bp, Zea mays subsp. mays
  misc_feature (1)..(809): Ceres Seq. ID no. 12352576
  misc_feature (1)..(809): Ortholog of  Ceres SEQ ID NO 12473409 as cited in SEQ ID NO 104
  misc_feature (1)..(809): Ortholog of  Ceres SEQ ID NO 15170477 as cited in SEQ ID NO 52825
  misc_feature (1)..(809): Ortholog of  Ceres SEQ ID NO 13595055 as cited in SEQ ID NO 55744
  misc_feature (1)..(809): Ortholog of  Ceres SEQ ID NO 13662009 as cited in SEQ ID NO 61951
atgatgtccgggaaacaaatcctatccccgccgcctacgccggccgttcgcgctcacctagtcaccacattcgttctcgccgtggacgcgcgcgcgtgaggtgagtgagaccaccacgccagacaagaattaatggccctggagacgtgcttcagagcgtgggcgctgcacgccgcccctgctggcagcaagaacaggctcctcgtctgcagcagcggcggtaacctggtgctgccttcgaagcgggtcgcggccgcgccgctgtccgtcggccgcgtcgccacgcgccgggcgcggcacgtctgccagtccaagaacgccgtggacgaagtgctggtggcggacgagaagaactgggacgggatggtgatggcgtgcgagacgccggtgctggtggagttctgggcgccgtggtgcgggccgtgccggatgatcgcgccggtgatcgacgagctggccaaggactacgccggcaagatcatgtgctgcaaggtgaacacggacgacagccccaacgtggcatccacctacggcatccgcagcatccccaccgtgctcatcttcaagggcggcgagaagaaggagagcgtcatcggcgccgtccccaagtccacgctcaccaccctcatcgacaagtacatcggtagtagctcatgagcgcgcgagagaggcagcccatgtctcgtgatgtgcccccgagctgcatctgcatgcatgggatactgggatcgatgatacatgtgcccagctcgcgcataaacaccatgtatctctagccttgcccttgcatatatatggatggatatatg

SEQ ID NO: 7897 - protein, 174 aa, Zea mays subsp. mays
  peptide (1)..(174): Ceres Seq. ID no. 12352577
MALETCFRAWALHAAPAGSKNRLLVCSSGGNLVLPSKRVAAAPLSVGRVATRRARHVCQSKNAVDEVLVADEKNWDGMVMACETPVLVEFWAPWCGPCRMIAPVIDELAKDYAGKIMCCKVNTDDSPNVASTYGIRSIPTVLIFKGGEKKESVIGAVPKSTLTTLIDKYIGSSS

SEQ ID NO: 7898 - protein, 97 aa, Zea mays subsp. mays
  peptide (1)..(97): Ceres Seq. ID no. 12352578
MVMACETPVLVEFWAPWCGPCRMIAPVIDELAKDYAGKIMCCKVNTDDSPNVASTYGIRSIPTVLIFKGGEKKESVIGAVPKSTLTTLIDKYIGSSS

SEQ ID NO: 7899 - protein, 95 aa, Zea mays subsp. mays
  peptide (1)..(95): Ceres Seq. ID no. 12352579
MACETPVLVEFWAPWCGPCRMIAPVIDELAKDYAGKIMCCKVNTDDSPNVASTYGIRSIPTVLIFKGGEKKESVIGAVPKSTLTTLIDKYIGSSS

SEQ ID NO: 7900 - DNA, 1170 bp, Zea mays subsp. mays
  misc_feature (1)..(1170): Ceres Seq. ID no. 13498164
  misc_feature (1)..(1170): Ortholog of  Ceres SEQ ID NO 13599448 as cited in SEQ ID NO 521
  misc_feature (1)..(1170): Ortholog of  Ceres SEQ ID NO 15227301 as cited in SEQ ID NO 538
  misc_feature (1)..(1170): Ortholog of  Ceres SEQ ID NO 14311918 as cited in SEQ ID NO 51684
  misc_feature (1)..(1170): Ortholog of  Ceres SEQ ID NO 14307472 as cited in SEQ ID NO 54559
  misc_feature (1)..(1170): Ortholog of  Ceres SEQ ID NO 13596408 as cited in SEQ ID NO 62028
acacctgaggctgcggcctttgtgccatccaggggtcgtcgtcgtcactctctccctctcgccctcgccatcgccctcgcggtctcgccgcggcataaacaaaacaagcaaagcaaggcaaaggcaaaggcaaaaccccacctcctcgctccgcacctcgtcgtctgcttttcctcggtgcggaacacaagcccctgccgcctccattaccgggctgtgcctgtgcgaggctgcgagcgtggtggctgtgtctggctttgcggcggcggcggtgatggtggtggagatggacggaggcgtgggagtagcagcaggaggaggaggaggagcgcagacgccggcgccggcgccgccgcggcggtggcgcttggcggacgagcggtgcgacctgcgcgccatggagacggactacgtgcggcggttccaccggcacgagccccgcgaccaccagtgctcctccgccgtcgccaagcacatcaaggcgcctgtccaccttgtctggtccctggtgaggcggttcgaccagccacagctcttcaagcccttcgtgagccggtgtgagatgaaggggaacatcgagatcggtagcgtcagggaggtcaacgtcaagtccgggctgccggccacaagaagcacggagaggctcgagctgttagacgacgacgagcgcattctcagcgtcaggttcgttggaggcgatcacaggctgcagaactactcctccatcctcaccgtccacccggaggtcatcgacggccggccagggacgctcgtcatcgagtccttcgtcgtcgacgtccccgacggcaacaccaaggacgagacctgctacttcgtggaggcgctgctcaagtgcaacctccggtcactcgcggaggtgtccgagggccaggtcatcatggaccagacggagccccttgaccggtgaataatgagtcggaccattatattgcattgcattctgtgtacgcgtagacctgttctccaatgcatggagcccctaggttcttgggaaactgctatgccgcgttcaaagtcaagttctttttcccccctccttgcgattgtgttttgctgttcttctctggcgttgtatgtcgcagagggagaagtgcagagtatgatgtgcttgatgaaaattgaaagaaaaaaaaagaatttagaactgcg

SEQ ID NO: 7901 - protein, 308 aa, Zea mays subsp. mays
  peptide (1)..(308): Ceres Seq. ID no. 13498165
HLRLRPLCHPGVVVVTLSLSPSPSPSRSRRGINKTSKARQRQRQNPTSSLRTSSSAFPRCGTQAPAASITGLCLCEAASVVAVSGFAAAAVMVVEMDGGVGVAAGGGGGAQTPAPAPPRRWRLADERCDLRAMETDYVRRFHRHEPRDHQCSSAVAKHIKAPVHLVWSLVRRFDQPQLFKPFVSRCEMKGNIEIGSVREVNVKSGLPATRSTERLELLDDDERILSVRFVGGDHRLQNYSSILTVHPEVIDGRPGTLVIESFVVDVPDGNTKDETCYFVEALLKCNLRSLAEVSEGQVIMDQTEPLDR

SEQ ID NO: 7902 - protein, 217 aa, Zea mays subsp. mays
  peptide (1)..(217): Ceres Seq. ID no. 13498166
MVVEMDGGVGVAAGGGGGAQTPAPAPPRRWRLADERCDLRAMETDYVRRFHRHEPRDHQCSSAVAKHIKAPVHLVWSLVRRFDQPQLFKPFVSRCEMKGNIEIGSVREVNVKSGLPATRSTERLELLDDDERILSVRFVGGDHRLQNYSSILTVHPEVIDGRPGTLVIESFVVDVPDGNTKDETCYFVEALLKCNLRSLAEVSEGQVIMDQTEPLDR

SEQ ID NO: 7903 - protein, 213 aa, Zea mays subsp. mays
  peptide (1)..(213): Ceres Seq. ID no. 13498167
MDGGVGVAAGGGGGAQTPAPAPPRRWRLADERCDLRAMETDYVRRFHRHEPRDHQCSSAVAKHIKAPVHLVWSLVRRFDQPQLFKPFVSRCEMKGNIEIGSVREVNVKSGLPATRSTERLELLDDDERILSVRFVGGDHRLQNYSSILTVHPEVIDGRPGTLVIESFVVDVPDGNTKDETCYFVEALLKCNLRSLAEVSEGQVIMDQTEPLDR

SEQ ID NO: 7904 - DNA, 978 bp, Zea mays subsp. mays
  misc_feature (1)..(978): Ceres Seq. ID no. 12402449
  misc_feature (1)..(978): Ortholog of  Ceres SEQ ID NO 14302000 as cited in SEQ ID NO 52175
  misc_feature (1)..(978): Ortholog of  Ceres SEQ ID NO 14316371 as cited in SEQ ID NO 60113
tccccgctccccaccacggtgccaccgttcccgtgcgtcgctgcaccaccaccgtagcctcctcctctcacccggacgcggccgagccagaatggttagcgagcaacaagctcctgcgcggaggtggtggtggagggcagcgaggcggcggcggaggtgcccgtggagagcgaggaggcggccgcgcccaaggcggaggagcaactggatgacgaggcgccggtcgtcgaggacgtcaaggaagacgaggacgaggatgaggacgacgacgacgacgacgacgctgacgatgatgacgccgatggaggcgccggcgcaaccgagggcaccaagcagagccggagcgangaagaagagccgcaagncatgatgaagctcggaatgaaacccgtcaccggcgtcaccaggataaccatcaaaagagccaagaacatactgttcgtggtctcgaagccggacgtcttcaagagcccgacgtcggagacgtacgtgatattcggcgaggccaagatagaggacctgagctcccagctgcaggcgcaggccgcgcagcagttcaggatgcaggacctcagcaaggtgatggccaagcaggacgcggccgccgccgcggcggcgccggccgacgaggaggaggaggtcgacgaggccgggatagagccccgcgacatcgacctcgtcatgacgcaggccagcgtcacccgcgccaaggccgtcaaggctctcaaggcgcacgacggcgacatcgtcagcgccatcatggagctcacggcctgatcatgatataccagtgcaatgccgtacggccgtttcttcctcgttattgcagtctgcttcgtccagcgtcgctgttcatttttgggatttgcataaaagacgagctttgaataagagatgtactgtttgttcaccgtatgaacgtttttgcatcatgtcagtttccggattattattattgccactccttaagttgttatg

SEQ ID NO: 7905 - protein, 136 aa, Zea mays subsp. mays
  peptide (1)..(136): Ceres Seq. ID no. 12402450
MMKLGMKPVTGVTRITIKRAKNILFVVSKPDVFKSPTSETYVIFGEAKIEDLSSQLQAQAAQQFRMQDLSKVMAKQDAAAAAAAPADEEEEVDEAGIEPRDIDLVMTQASVTRAKAVKALKAHDGDIVSAIMELTA

SEQ ID NO: 7906 - protein, 135 aa, Zea mays subsp. mays
  peptide (1)..(135): Ceres Seq. ID no. 12402451
MKLGMKPVTGVTRITIKRAKNILFVVSKPDVFKSPTSETYVIFGEAKIEDLSSQLQAQAAQQFRMQDLSKVMAKQDAAAAAAAPADEEEEVDEAGIEPRDIDLVMTQASVTRAKAVKALKAHDGDIVSAIMELTA

SEQ ID NO: 7907 - protein, 131 aa, Zea mays subsp. mays
  peptide (1)..(131): Ceres Seq. ID no. 12402452
MKPVTGVTRITIKRAKNILFVVSKPDVFKSPTSETYVIFGEAKIEDLSSQLQAQAAQQFRMQDLSKVMAKQDAAAAAAAPADEEEEVDEAGIEPRDIDLVMTQASVTRAKAVKALKAHDGDIVSAIMELTA

SEQ ID NO: 7908 - DNA, 1155 bp, Zea mays subsp. mays
  misc_feature (1)..(1155): Ceres Seq. ID no. 12353947
  misc_feature (1)..(1155): Ortholog of  Ceres SEQ ID NO 15177850 as cited in SEQ ID NO 51765
  misc_feature (1)..(1155): Ortholog of  Ceres SEQ ID NO 13595072 as cited in SEQ ID NO 55971
agtaacgcctttctccaagcctgagcactccatccactactttactcaaagtctagagctagctttttgctttgctcaccagacaaaccgcagcagatggcgtcgacgatcatggccgccacctcccgcatcgtcgcggccaagacgccgtttcttggccagggtcgcgccgccgccgccgccgccaatgccagccccctccgcgacgtcgccgccgccgctgctggcggccggatcaccatgggcaacgacctgtggtacggcccggaccgcgtcaagtacctgggccccttctccgcccagacgccctcgtacctgaccggcgagttccccggcgactacggctgggacaccgccgggctgtccgcggacccggaggcgttcgcgcggaacagggcgctggaggtgatccacgggcggtgggcgatgctgggtgcgctgggctgcatcaccccggaggtgctggagaagtgggtgcgcgtggacttcaaggagcccgtgtggttcaaggccggcgcgcagatcttctcggagggcgggctggactacctgggcaaccccaacctggtgcacgcgcagagcatcctggccgtgctcggcttccaggtcatcctcatgggcctcgtcgagggcttccgcatcaacggcctcgacggcgtcggcgagggcaacaacctctaccccggcggccagtacttcgacccgctgggcctcgccgacgaccccgtcaccttcgccgagctcaaggtcaaggagatcaagaacggccgcctcgccatgttctccatgttcggcttcttcgtccaggccatcgtcaccggcaaggggcccctcgagaacctgctcgaccacctcgacgaccccgtcgccaacaacgcctgggtctacgccaccaagttcgcaccagggtcttaagctagctaccgggccgcggcgtgccaggacattgtgttgtacactactcgtttctgtcgtgatctgtaccatgaacgaatgcaaatattcttgtgctctcccagaaggaacgaactggactagttttgctcttccattccatgtatactctgcttcagcatatatgtagttgtgtctactggtttttgcagttgttaactgatttgcgtccatatatgaggttgtgtctacttttttttt

SEQ ID NO: 7909 - protein, 272 aa, Zea mays subsp. mays
  peptide (1)..(272): Ceres Seq. ID no. 12353948
MASTIMAATSRIVAAKTPFLGQGRAAAAAANASPLRDVAAAAAGGRITMGNDLWYGPDRVKYLGPFSAQTPSYLTGEFPGDYGWDTAGLSADPEAFARNRALEVIHGRWAMLGALGCITPEVLEKWVRVDFKEPVWFKAGAQIFSEGGLDYLGNPNLVHAQSILAVLGFQVILMGLVEGFRINGLDGVGEGNNLYPGGQYFDPLGLADDPVTFAELKVKEIKNGRLAMFSMFGFFVQAIVTGKGPLENLLDHLDDPVANNAWVYATKFAPGS

SEQ ID NO: 7910 - protein, 267 aa, Zea mays subsp. mays
  peptide (1)..(267): Ceres Seq. ID no. 12353949
MAATSRIVAAKTPFLGQGRAAAAAANASPLRDVAAAAAGGRITMGNDLWYGPDRVKYLGPFSAQTPSYLTGEFPGDYGWDTAGLSADPEAFARNRALEVIHGRWAMLGALGCITPEVLEKWVRVDFKEPVWFKAGAQIFSEGGLDYLGNPNLVHAQSILAVLGFQVILMGLVEGFRINGLDGVGEGNNLYPGGQYFDPLGLADDPVTFAELKVKEIKNGRLAMFSMFGFFVQAIVTGKGPLENLLDHLDDPVANNAWVYATKFAPGS

SEQ ID NO: 7911 - protein, 224 aa, Zea mays subsp. mays
  peptide (1)..(224): Ceres Seq. ID no. 12353950
MGNDLWYGPDRVKYLGPFSAQTPSYLTGEFPGDYGWDTAGLSADPEAFARNRALEVIHGRWAMLGALGCITPEVLEKWVRVDFKEPVWFKAGAQIFSEGGLDYLGNPNLVHAQSILAVLGFQVILMGLVEGFRINGLDGVGEGNNLYPGGQYFDPLGLADDPVTFAELKVKEIKNGRLAMFSMFGFFVQAIVTGKGPLENLLDHLDDPVANNAWVYATKFAPGS

SEQ ID NO: 7912 - DNA, 804 bp, Zea mays subsp. mays
  misc_feature (1)..(804): Ceres Seq. ID no. 12348060
  misc_feature (1)..(804): Ortholog of  Ceres SEQ ID NO 15180374 as cited in SEQ ID NO 0
gaaaattgaaaaccctataatcctccccaaaggcccaaacctatcgcccgtacgagactgcgccgccgttgccgtctcctcctccgtcccatcactctgctgctcgcgcactctcacctgcccgcgccgtcttcgaccgccaccaagatgaacaaggagaggctcatgaagatggccggcgccgtccgcaccggcggcaagggcaccatgcgcaggaagaagaaggctgtacacaagacggtcaccacggacgacaagaggctgcagggcactctcaagagagtaggggtcaacaccatccctgcaatcgaggaggtgaacatattcaaggacgatctcgtcatccagttcttgaaccccaaagtgcaagcttccatcgcagcaaacacatgggtggtcagtggatctccacagacgaaaaagctacaggatgttctccctgggatcattaaccagcttggccctgacaacatggagcacctgaagaggattgccgaggagatgcagaagcaggtggctgctgccggtgcggcagcacaggtcaaggaagacaacgatgacgatgttccagagcttgttcctggagagacttttgaagaagtagctcaggagacaaaagcctgatcataggctctaaatagtgaaatgttactgcaccaatgctgtgaggtcatggttttcgtgtgatggcactcttcttcctcccctcctaggccagccccagccactctttgtgttcgctgttggaaacttttagtttctccatctcaagcttttacctaaggttgtgcatgttgagatgcc

SEQ ID NO: 7913 - protein, 158 aa, Zea mays subsp. mays
  peptide (1)..(158): Ceres Seq. ID no. 12348061
MNKERLMKMAGAVRTGGKGTMRRKKKAVHKTVTTDDKRLQGTLKRVGVNTIPAIEEVNIFKDDLVIQFLNPKVQASIAANTWVVSGSPQTKKLQDVLPGIINQLGPDNMEHLKRIAEEMQKQVAAAGAAAQVKEDNDDDVPELVPGETFEEVAQETKA

SEQ ID NO: 7914 - protein, 152 aa, Zea mays subsp. mays
  peptide (1)..(152): Ceres Seq. ID no. 12348062
MKMAGAVRTGGKGTMRRKKKAVHKTVTTDDKRLQGTLKRVGVNTIPAIEEVNIFKDDLVIQFLNPKVQASIAANTWVVSGSPQTKKLQDVLPGIINQLGPDNMEHLKRIAEEMQKQVAAAGAAAQVKEDNDDDVPELVPGETFEEVAQETKA

SEQ ID NO: 7915 - protein, 150 aa, Zea mays subsp. mays
  peptide (1)..(150): Ceres Seq. ID no. 12348063
MAGAVRTGGKGTMRRKKKAVHKTVTTDDKRLQGTLKRVGVNTIPAIEEVNIFKDDLVIQFLNPKVQASIAANTWVVSGSPQTKKLQDVLPGIINQLGPDNMEHLKRIAEEMQKQVAAAGAAAQVKEDNDDDVPELVPGETFEEVAQETKA

SEQ ID NO: 7916 - DNA, 1002 bp, Zea mays subsp. mays
  misc_feature (1)..(1002): Ceres Seq. ID no. 12341801
  misc_feature (1)..(1002): Ortholog of  Ceres SEQ ID NO 14316400 as cited in SEQ ID NO 57941
  misc_feature (1)..(1002): Ortholog of  Ceres SEQ ID NO 12624328 as cited in SEQ ID NO 61700
gggatctggatctctcctctctcgtctgcaccgcgagtccgcgactccgcaccaagcaaatcccctgcccccaaaatattgctagggattcgaggggaggaaaatccaggcgcccaggcctggcaatccgttcgtcggagaggccatgagctcggcgcaggatccgttctacatcgtccgggaggagatccaggagtcgattgataaattgcaaagtaacttccaccgctgggagcaaactgcttcaaacacaggagaatatgttcatctgacaaaggagcttctgaccagctgtgaaagcatcgagtggcaggtagatgagctggaaaagacaatctcagttgcatcaagggatccatcatactatggacttgatgaagttgaactttccagacgaagaaactggactggttctgctcataagcaggttggtacagttaagagagctattgaaaagggcaagagcaatgtagcaacttcaaaataccaggatacaagcaggaccaaccactattctgcccaagataatgatgactttatctcttcagaatcagataggcagcttctactcatgaggcagcaggatgaagaacttgacgagctcagtgaaagtgttcaaaggattggtggctaggactaaccatacacgaagagctgtctggacaggaaaggatcctaaacgacttaagcttggagatggagactacttccaacagacttgatttcgtgcagaaaagagtggccatggtgatgaagaaggccggcatcaagggtcagatcatgctgatcgtgttcctggttgttctgttcatcattctttttgttttggtgttcttgacatagccaagtgcaccagggtcctcgattttctccctcccatttgttgtgcctccctccctagtacgaacataagtatacgtgctggagctatcctttataaatcccgattttaatgcattttgttctgcgtgagatcaccgtcattggaacggtgttatggtt

SEQ ID NO: 7917 - protein, 162 aa, Zea mays subsp. mays
  peptide (1)..(162): Ceres Seq. ID no. 12341802
MSSAQDPFYIVREEIQESIDKLQSNFHRWEQTASNTGEYVHLTKELLTSCESIEWQVDELEKTISVASRDPSYYGLDEVELSRRRNWTGSAHKQVGTVKRAIEKGKSNVATSKYQDTSRTNHYSAQDNDDFISSESDRQLLLMRQQDEELDELSESVQRIGG

SEQ ID NO: 7918 - DNA, 629 bp, Zea mays subsp. mays
  misc_feature (1)..(629): Ceres Seq. ID no. 12402244
  misc_feature (1)..(629): Ortholog of  Ceres SEQ ID NO 12585212 as cited in SEQ ID NO 63228
attgcgaagcctcacgtctccagcaccgggccaccggcggcgaggtcgcgcgagcgcaggcaggggtggtactgggaggggaggaggggaagaaggaggtgactgcgatgtcgagccggttctggaggtggtacgcggaccggcagttccacaagtgggagaagacggtgctgtgggacatggtggagccctaccgcccgccgcgctccttcgcgccactcgtcggcacctacgtcgccgccttctacaccggcgtcgtcggggccgccgtcaccgagcagctctacaaggagaagtactgggaggatcaccccggcgaggcggtgccgatcatgccgcccaagttctactgggggccttggagggtgatgaacggagaagttccgcgcttcattcagccgcccgacgaggccaagacggcgtaggagcttcgagcttgcttcaaaacttctcagaagaagcatgtatctggtctcgatcgaaaaaaagaaattggagcccttcttttgtgcctctcccactctcctggttgtacgcctgtacctgtctgtctggaatacacgagtaagataagatcaggagaactgaagacctcaaataaagaaaaaaatcagaaaacgttggcatgg

SEQ ID NO: 7919 - protein, 188 aa, Zea mays subsp. mays
  peptide (1)..(188): Ceres Seq. ID no. 12402245
LRSLTSPAPGHRRRGRASAGRGGTGRGGGEEGGDCDVEPVLEVVRGPAVPQVGEDGAVGHGGALPPAALLRATRRHLRRRLLHRRRRGRRHRAALQGEVLGGSPRRGGADHAAQVLLGALEGDERRSSALHSAARRGQDGVGASSLLQNFSEEACIWSRSKKRNWSPSFVPLPLSWLYACTCLSGIHE

SEQ ID NO: 7920 - protein, 140 aa, Zea mays subsp. mays
  peptide (1)..(140): Ceres Seq. ID no. 12402246
CEASRLQHRATGGEVARAQAGVVLGGEEGKKEVTAMSSRFWRWYADRQFHKWEKTVLWDMVEPYRPPRSFAPLVGTYVAAFYTGVVGAAVTEQLYKEKYWEDHPGEAVPIMPPKFYWGPWRVMNGEVPRFIQPPDEAKTA

SEQ ID NO: 7921 - protein, 105 aa, Zea mays subsp. mays
  peptide (1)..(105): Ceres Seq. ID no. 12402247
MSSRFWRWYADRQFHKWEKTVLWDMVEPYRPPRSFAPLVGTYVAAFYTGVVGAAVTEQLYKEKYWEDHPGEAVPIMPPKFYWGPWRVMNGEVPRFIQPPDEAKTA

SEQ ID NO: 7922 - DNA, 725 bp, Zea mays subsp. mays
  misc_feature (1)..(725): Ceres Seq. ID no. 12402897
  misc_feature (1)..(725): Ortholog of  Ceres SEQ ID NO 12583723 as cited in SEQ ID NO 58297
  misc_feature (1)..(725): Ortholog of  Ceres SEQ ID NO 12623263 as cited in SEQ ID NO 60988
  misc_feature (1)..(725): Ortholog of  Ceres SEQ ID NO 12635807 as cited in SEQ ID NO 0
attgtcatctggggcagggcaggggagggcaggagaagctatctattggccatctatccagcagccgctctccccagccccactctctccatctagagctccctaactgcaccggccgccacaccaccgtaccccgacccctcgacaacaatggccaccgtcctaggcagcccccgcgcgccggccttcttcttctcgccgtcctccctccgtgccgcgccggcgcccaccgccgtggcgctgcctgcggccaaggtgggcatcatgggccgtagcgccagcagcaggggcaggctgcgcgcgcaggccacctacaacgtgaagctgatcacgccggagggggaggtggagctgcaggtgcccgacgacgtgtacatcctggaccaggccgaggaggacggcatcgacctgccctactcctgccgcgcggggtcctgctcctcctgcgccggcaaggtcgtctccggctccgtggaccagtccgaccagagctacctcgacgacggccagatcgccgccggctgggtgctcacctgccacgcctaccccacctctgacgtcgtcatcgagacgcacaaggaggaggagctcaccggcgcataatcattcatgcccatccatctctatctctgtgggtcgtcgttgtgtgtaatttgagtacgcgcgtacacgtactgcttttgtttcatttgagcactgttcgtgtaagcgtcgagttgccctgc

SEQ ID NO: 7923 - protein, 150 aa, Zea mays subsp. mays
  peptide (1)..(150): Ceres Seq. ID no. 12402898
MATVLGSPRAPAFFFSPSSLRAAPAPTAVALPAAKVGIMGRSASSRGRLRAQATYNVKLITPEGEVELQVPDDVYILDQAEEDGIDLPYSCRAGSCSSCAGKVVSGSVDQSDQSYLDDGQIAAGWVLTCHAYPTSDVVIETHKEEELTGA

SEQ ID NO: 7924 - protein, 112 aa, Zea mays subsp. mays
  peptide (1)..(112): Ceres Seq. ID no. 12402899
MGRSASSRGRLRAQATYNVKLITPEGEVELQVPDDVYILDQAEEDGIDLPYSCRAGSCSSCAGKVVSGSVDQSDQSYLDDGQIAAGWVLTCHAYPTSDVVIETHKEEELTGA

SEQ ID NO: 7925 - protein, 90 aa, Zea mays subsp. mays
  peptide (1)..(90): Ceres Seq. ID no. 12402900
CHLGQGRGGQEKLSIGHLSSSRSPQPHSLHLELPNCTGRHTTVPRPLDNNGHRPRQPPRAGLLLLAVLPPCRAGAHRRGAACGQGGHHGP

SEQ ID NO: 7926 - DNA, 877 bp, Zea mays subsp. mays
  misc_feature (1)..(877): Ceres Seq. ID no. 13493480
  misc_feature (1)..(877): Ortholog of  Ceres SEQ ID NO 13654873 as cited in SEQ ID NO 62737
  misc_feature (1)..(877): Ortholog of  Ceres SEQ ID NO 13591072 as cited in SEQ ID NO 67870
aaaaaaaatttagcggccaccgacgaccggccggccgtgcacccttcgcactactactgcgcccgcggacggcgtcagaggagcagcacccagcagcatggcctgcaccaggaggcagttgtggtgggcatgcctgctggcggcgtggtgctgcgccggcgccgccgcggccgcccagccgccggcggcggacgcggacccgctgcagagcaggtgccagggggactttgggaagctgacggactgcatggactacgcgacggggcacgcggcgtcgccctcgtccacctgctgcggcgacgccggcggcacgcagaaggcgcgcccggagtgcctctgctacatcatccagcaggtgcacgcggggcgcgaccaggtgcagtcgctcggcctgcgcttcgaccgcctcctggcgctccccgccgcctgcagcctccccaacgccaacgtctcgctctgcatcaacctgctgaacctgaagccgggctcgccagactacgcgctgttcgccaacgcctccaagatcacgccatcagccggaggcagcccggcgagcgacaccgccgccggcagcgccgttatcaggctccaggctggggtccgaggcagcgtcgcgctcgccgtggtctctgcgatcgtctcgtcagtcttctgatccgaccgatctcctcagaggactagaggagaagcagcggttcttacactccgtgtggattcgtcgttctcatgttgcgttccactcgtcgatgtctattttgtatttgtaccccacataaaaaaaatagatccagatgatacttgtttcccccgtccctgtggctttaactgtaacctcggatgtttgaattagctaattatgtataactctcatcgcgtc

SEQ ID NO: 7927 - protein, 226 aa, Zea mays subsp. mays
  peptide (1)..(226): Ceres Seq. ID no. 13493481
KKNLAATDDRPAVHPSHYYCARGRRQRSSTQQHGLHQEAVVVGMPAGGVVLRRRRRGRPAAGGGRGPAAEQVPGGLWEADGLHGLRDGARGVALVHLLRRRRRHAEGAPGVPLLHHPAGARGARPGAVARPALRPPPGAPRRLQPPQRQRLALHQPAEPEAGLARLRAVRQRLQDHAISRRQPGERHRRRQRRYQAPGWGPRQRRARRGLCDRLVSLLIRPISSED

SEQ ID NO: 7928 - protein, 185 aa, Zea mays subsp. mays
  peptide (1)..(185): Ceres Seq. ID no. 13493482
MACTRRQLWWACLLAAWCCAGAAAAAQPPAADADPLQSRCQGDFGKLTDCMDYATGHAASPSSTCCGDAGGTQKARPECLCYIIQQVHAGRDQVQSLGLRFDRLLALPAACSLPNANVSLCINLLNLKPGSPDYALFANASKITPSAGGSPASDTAAGSAVIRLQAGVRGSVALAVVSAIVSSVF

SEQ ID NO: 7929 - protein, 183 aa, Zea mays subsp. mays
  peptide (1)..(183): Ceres Seq. ID no. 13493483
MPAGGVVLRRRRRGRPAAGGGRGPAAEQVPGGLWEADGLHGLRDGARGVALVHLLRRRRRHAEGAPGVPLLHHPAGARGARPGAVARPALRPPPGAPRRLQPPQRQRLALHQPAEPEAGLARLRAVRQRLQDHAISRRQPGERHRRRQRRYQAPGWGPRQRRARRGLCDRLVSLLIRPISSED

SEQ ID NO: 7930 - DNA, 1067 bp, Zea mays subsp. mays
  misc_feature (1)..(1067): Ceres Seq. ID no. 12345390
  misc_feature (1)..(1067): Ortholog of  Ceres SEQ ID NO 14312777 as cited in SEQ ID NO 55573
  misc_feature (1)..(1067): Ortholog of  Ceres SEQ ID NO 13595190 as cited in SEQ ID NO 55916
  misc_feature (1)..(1067): Ortholog of  Ceres SEQ ID NO 14302004 as cited in SEQ ID NO 63437
  misc_feature (1)..(1067): Ortholog of  Ceres SEQ ID NO 13599456 as cited in SEQ ID NO 0
tcgcattccccctcgatcggcctccctcccccaagatcctccactcgatcccaaacaaaccaacaaatccatccatcgcacatggacgcgttcttctcggcctcctccgcgtcggcgccctacggctacggcgccggcggatggagctacgactcgctcaagaacttccgccagatcacccctgccgtccagacccacctcaagctcgtctacctcaccctgtgcgcggcgctggcctcgtcggcggtgggcgcttacctgcacgtggtctggaacatcggcgggacgctgacaatgctcggttgcgtcggcagcatcgcctggctcttctcggtgcccgtctacgaggagaggaagaggtatgggctgctgatggcggctgccctcctggaaggcgcttcggtcggacccctcgtcaagctcgccgtggaatttgacccaagcatcctggtgacggcgttcgtggggactgccatcgcgttcgcgtgcttctccggcgcggccatggtggccaggcgcagggagtacctctacctgggcgggctgctctcgtcggggctctccatcctgctctggctgcagctcgccgcctccatcttcggccactccgcaaccagcttcatgttcgaggtctacttcgggctgctcatcttcctgggctacatggtgtacgacacgcaggagatcatcgagagggcgcaccgcggcgacatggaccacgtcaagcacgccctcaccctcttcaccgacttcgtggccgtcctcgtccgcgtcctcgtcatcatgctcaagaacgcggccgacaagtcggaggacaagaagaggaagaagaggtcgtgagcgtcgagaacggaagctctcccacatgcataggagtaactgccagggttccttcctggggtggaagtgtggaactgagcttgaatgttaagaagtgttcctttgttctcttcctctcttgatgactctgtaaatagctatgtcaatctggttaagtttggtttggttgcatgtgcctgtgttcgctgccctttggatagaatgcaaattaaagatgttgctattgc

SEQ ID NO: 7931 - protein, 279 aa, Zea mays subsp. mays
  peptide (1)..(279): Ceres Seq. ID no. 12345391
SHSPSIGLPPPRSSTRSQTNQQIHPSHMDAFFSASSASAPYGYGAGGWSYDSLKNFRQITPAVQTHLKLVYLTLCAALASSAVGAYLHVVWNIGGTLTMLGCVGSIAWLFSVPVYEERKRYGLLMAAALLEGASVGPLVKLAVEFDPSILVTAFVGTAIAFACFSGAAMVARRREYLYLGGLLSSGLSILLWLQLAASIFGHSATSFMFEVYFGLLIFLGYMVYDTQEIIERAHRGDMDHVKHALTLFTDFVAVLVRVLVIMLKNAADKSEDKKRKKRS

SEQ ID NO: 7932 - protein, 252 aa, Zea mays subsp. mays
  peptide (1)..(252): Ceres Seq. ID no. 12345392
MDAFFSASSASAPYGYGAGGWSYDSLKNFRQITPAVQTHLKLVYLTLCAALASSAVGAYLHVVWNIGGTLTMLGCVGSIAWLFSVPVYEERKRYGLLMAAALLEGASVGPLVKLAVEFDPSILVTAFVGTAIAFACFSGAAMVARRREYLYLGGLLSSGLSILLWLQLAASIFGHSATSFMFEVYFGLLIFLGYMVYDTQEIIERAHRGDMDHVKHALTLFTDFVAVLVRVLVIMLKNAADKSEDKKRKKRS

SEQ ID NO: 7933 - protein, 181 aa, Zea mays subsp. mays
  peptide (1)..(181): Ceres Seq. ID no. 12345393
MLGCVGSIAWLFSVPVYEERKRYGLLMAAALLEGASVGPLVKLAVEFDPSILVTAFVGTAIAFACFSGAAMVARRREYLYLGGLLSSGLSILLWLQLAASIFGHSATSFMFEVYFGLLIFLGYMVYDTQEIIERAHRGDMDHVKHALTLFTDFVAVLVRVLVIMLKNAADKSEDKKRKKRS

SEQ ID NO: 7934 - DNA, 528 bp, Zea mays subsp. mays
  misc_feature (1)..(528): Ceres Seq. ID no. 13564769
  misc_feature (1)..(528): Ortholog of  Ceres SEQ ID NO 14303656 as cited in SEQ ID NO 61363
gtttctttttaggctgtcgaagtatcaagacggcagaacagggtgagggaatctactgggaatggcgatatggtatcaaaattggaagctgccgagtacaagcttgaagaactgaagtcaaacatggtgggattagggaaggaagctattgcagcaatgtcggctgttgaggctcagcagcaacggttgaccttacagcgtctcattgcactggttgaggctgagagaacttaccatcagagagttctggagatacttgacaaattggaagaagaaatggtgtctgagcgccaaaaaattgaagcacccccgactccagcagctgaaaaattatataccaccaccagcaccaccatcttatgatgaaattaatggagcatttgcatccacttctgttaacgagtcagtccaatctgtcgatttcttccttggagaggcccttgattcatttaatgctgaaagtgagtttgagcttaccttgtcagctggtgacattgtaattgtccgaaagatctcaagcaatggttg

SEQ ID NO: 7935 - protein, 97 aa, Zea mays subsp. mays
  peptide (1)..(97): Ceres Seq. ID no. 13564770
MVSKLEAAEYKLEELKSNMVGLGKEAIAAMSAVEAQQQRLTLQRLIALVEAERTYHQRVLEILDKLEEEMVSERQKIEAPPTPAAEKLYTTTSTTIL

SEQ ID NO: 7936 - protein, 79 aa, Zea mays subsp. mays
  peptide (1)..(79): Ceres Seq. ID no. 13564771
MVGLGKEAIAAMSAVEAQQQRLTLQRLIALVEAERTYHQRVLEILDKLEEEMVSERQKIEAPPTPAAEKLYTTTSTTIL

SEQ ID NO: 7937 - protein, 68 aa, Zea mays subsp. mays
  peptide (1)..(68): Ceres Seq. ID no. 13564772
MSAVEAQQQRLTLQRLIALVEAERTYHQRVLEILDKLEEEMVSERQKIEAPPTPAAEKLYTTTSTTIL

SEQ ID NO: 7938 - DNA, 1192 bp, Zea mays subsp. mays
  misc_feature (1)..(1192): Ceres Seq. ID no. 12376433
  misc_feature (1)..(1192): Ortholog of  Ceres SEQ ID NO 14310616 as cited in SEQ ID NO 55699
  misc_feature (1)..(1192): Ortholog of  Ceres SEQ ID NO 15173907 as cited in SEQ ID NO 62356
  misc_feature (1)..(1192): Ortholog of  Ceres SEQ ID NO 13596519 as cited in SEQ ID NO 62572
  misc_feature (1)..(1192): Ortholog of  Ceres SEQ ID NO 12625108 as cited in SEQ ID NO 68102
gcacgagaccattacctagaacatcctaatcgaaaagtccctgcaccgacgccgcccgcccgcctccgtgcgctgcactgaatctgacagcgcccgtcctgcagcggccggcgaggaagagctctcggcgagagggcgagcgatggcggcggcaatgccggcgctgctgctggtggtggccacggcgatgatgttctcccccgccgccgcccgcattcccggcgtgtacggcggcggcggctggcagagcgcgcacgccacgttctacggcggcagcgacgcctcgggcaccatgggcggcgcctgcgggtacggcaacctgtacagccaggggtacggcgtgaacaacgcggcgctgagcacggcgctgttcaaccaggggctgagctgcggcgcgtgcttcgagatcaagtgcgaggaccagcccgggtggcggtggtgccgcccggggagcccctccatcctggtgacggccaccaacttctgcccgcccaactacgcgctgccctccgacgacggcggctggtgcaacccgccccgcccccacttcgacctcgccatgcccatgttcctccacatcgccgagtaccgcgccggcatcgtccccgtcacctaccgccgggtgccgtgccgcaagtccggcggcgtgcggttcaccatcaacggcttccggtacttcaacctggtgctgatcaccaacgtggccggcgcgggggacgtggtgcgcgcgagcgtgaaggcgtcgggcgccggggagtggatgcccatgtcgcggaactggggccagaactggcagtccagcgccatcctcgtcggccaggcgctctccttccgcgtcaccggcagcgaccgccgcacctccacctcctggaacgccgccccgcgggactggcgcttcggccagaccttcgagggcaagaacttcagggtctgagactctgagctcaggccgcgagtggcggcgagaagaagccagagctcaaggccttcttccgccgtactatatataccgtgattactgctgctagtagtcggtataaagcgcgtgttagggtggtgggaatgtacgtgaatgcccgtttagggtcacgccgtctcgccctggttcaagtactctctggaaaaaaaaggggagcctttttcttctgaacatgtgcggacaaaagggagataagtatggtgattggatgct

SEQ ID NO: 7939 - protein, 263 aa, Zea mays subsp. mays
  peptide (1)..(263): Ceres Seq. ID no. 12376434
MAAAMPALLLVVATAMMFSPAAARIPGVYGGGGWQSAHATFYGGSDASGTMGGACGYGNLYSQGYGVNNAALSTALFNQGLSCGACFEIKCEDQPGWRWCRPGSPSILVTATNFCPPNYALPSDDGGWCNPPRPHFDLAMPMFLHIAEYRAGIVPVTYRRVPCRKSGGVRFTINGFRYFNLVLITNVAGAGDVVRASVKASGAGEWMPMSRNWGQNWQSSAILVGQALSFRVTGSDRRTSTSWNAAPRDWRFGQTFEGKNFRV

SEQ ID NO: 7940 - protein, 259 aa, Zea mays subsp. mays
  peptide (1)..(259): Ceres Seq. ID no. 12376435
MPALLLVVATAMMFSPAAARIPGVYGGGGWQSAHATFYGGSDASGTMGGACGYGNLYSQGYGVNNAALSTALFNQGLSCGACFEIKCEDQPGWRWCRPGSPSILVTATNFCPPNYALPSDDGGWCNPPRPHFDLAMPMFLHIAEYRAGIVPVTYRRVPCRKSGGVRFTINGFRYFNLVLITNVAGAGDVVRASVKASGAGEWMPMSRNWGQNWQSSAILVGQALSFRVTGSDRRTSTSWNAAPRDWRFGQTFEGKNFRV

SEQ ID NO: 7941 - protein, 248 aa, Zea mays subsp. mays
  peptide (1)..(248): Ceres Seq. ID no. 12376436
MMFSPAAARIPGVYGGGGWQSAHATFYGGSDASGTMGGACGYGNLYSQGYGVNNAALSTALFNQGLSCGACFEIKCEDQPGWRWCRPGSPSILVTATNFCPPNYALPSDDGGWCNPPRPHFDLAMPMFLHIAEYRAGIVPVTYRRVPCRKSGGVRFTINGFRYFNLVLITNVAGAGDVVRASVKASGAGEWMPMSRNWGQNWQSSAILVGQALSFRVTGSDRRTSTSWNAAPRDWRFGQTFEGKNFRV

SEQ ID NO: 7942 - DNA, 750 bp, Zea mays subsp. mays
  misc_feature (1)..(750): Ceres Seq. ID no. 12351001
  misc_feature (1)..(750): Ortholog of  Ceres SEQ ID NO 14313575 as cited in SEQ ID NO 58703
agggattaccttacattcttttgcttggggaacagggaggtgaagatggatggtgagtatgaaccttcaggtcgtccgcttgatgggacagactacgctcgggcgcagaatgcacgtcgcttcatgatctacgttcactctaagatgatgatagtcgacgacgaatacatcatcgttggatctgccaacatcaaccagcgctcaatggatgggggcagggactcggagatcgccatgggcgcgtaccagccgtgccacctgaacaccaaaggccaggtcgcccggggtcaggtccacggcttccggatgtcgctgtggtacgagcacctcggcatgctacacgacgatttcctcaacccgggaagcctggagtgtgttcggagggtaaaccagatggcagacaggtattgggacctctacgctggcgacagcctcgacgccgacctccctgggcacctgctcaggtacccagtcaccgtcacgaaggagggcacggtgacagagctcccgggggccaagttcttccccgacacacaggcgcttgtgcttggggcgctatcgaaactgcctcctattctcactacatagagaaaccttctgtactgttgccatgtgacgtttgcgggctgaattggttgaggtttttgctactccgtattatgctacaactggtagtgttattgtatggtttcttcctaataatagtatttatagttttggacttatctaaaatagtatttatatgtgtcc

SEQ ID NO: 7943 - protein, 195 aa, Zea mays subsp. mays
  peptide (1)..(195): Ceres Seq. ID no. 12351002
RDYLTFFCLGNREVKMDGEYEPSGRPLDGTDYARAQNARRFMIYVHSKMMIVDDEYIIVGSANINQRSMDGGRDSEIAMGAYQPCHLNTKGQVARGQVHGFRMSLWYEHLGMLHDDFLNPGSLECVRRVNQMADRYWDLYAGDSLDADLPGHLLRYPVTVTKEGTVTELPGAKFFPDTQALVLGALSKLPPILTT

SEQ ID NO: 7944 - protein, 180 aa, Zea mays subsp. mays
  peptide (1)..(180): Ceres Seq. ID no. 12351003
MDGEYEPSGRPLDGTDYARAQNARRFMIYVHSKMMIVDDEYIIVGSANINQRSMDGGRDSEIAMGAYQPCHLNTKGQVARGQVHGFRMSLWYEHLGMLHDDFLNPGSLECVRRVNQMADRYWDLYAGDSLDADLPGHLLRYPVTVTKEGTVTELPGAKFFPDTQALVLGALSKLPPILTT

SEQ ID NO: 7945 - protein, 154 aa, Zea mays subsp. mays
  peptide (1)..(154): Ceres Seq. ID no. 12351004
MIYVHSKMMIVDDEYIIVGSANINQRSMDGGRDSEIAMGAYQPCHLNTKGQVARGQVHGFRMSLWYEHLGMLHDDFLNPGSLECVRRVNQMADRYWDLYAGDSLDADLPGHLLRYPVTVTKEGTVTELPGAKFFPDTQALVLGALSKLPPILTT

SEQ ID NO: 7946 - DNA, 1130 bp, Zea mays subsp. mays
  misc_feature (1)..(1130): Ceres Seq. ID no. 12388641
  misc_feature (1)..(1130): Ortholog of  Ceres SEQ ID NO 14307896 as cited in SEQ ID NO 66915
  misc_feature (1)..(1130): Ortholog of  Ceres SEQ ID NO 13657008 as cited in SEQ ID NO 69164
aaatcttgttactgacaaactgaactttggggccatgaacatgtggtttttgctgaatccacctggggatgcaacaatccatgtggaaaatgttgatgacttcaaatggttaaactcttcttactgccctgttctgaagcagcttgagtctgcagccatgaaagaatattatttcaaggctgatcgtccgaaaacactctctgctggttcttctaatctgaagtatcgaaacccaaaatatttgtccatgctcaatcatctaagattttacctcccacaagtctatcccaagctgaataaaattcttttcctggatgatgatatagttgtccagagggacctaactggactctgggaggttgatcttaatggaaatgtaaatggagccgtggaaacatgtggagagagttttcaccgatttgataagtacctaaatttctcaaacccaaatattgctcagaattttgatcctaatgcatgtggttgggcttatggaatgaacatgtttgatctggaagaatggaagaagaaagacattactggaatttaccacaaatggcagaacatgaacgagaacaggctgctctggaaactggggacattgccaccagggcttctaactttttacaagctgacacaccctctggacaaatcatggcatgtgcttggcttagggtacaatccaaccattgagcgctcagagatagacaatgctgctgtcatccactacaatggtaacatgaagccctggctggaaattgcaatgataaagtatcggccttactggacaaagtacatcaattatcagcattcctacattcatggatgcaagatcagccaatagaaaccaccctcagatattcttctgtgatgaacattgaagttggatgggactcaaaatgaaatcagtataactatcacatgttctttattcgtgttatattagatttgttagttatcacgtgtatgtagtttcgtcgcccttttgtggtgctttctcccctagctcattgttggttcttgtccctttttgtcatgaaaagaatgatgagctctatgattctcatcagctgataaatgtaatgtctgaatttctgtcggtggcaaattaatgatcccattcaaacggc

SEQ ID NO: 7947 - protein, 280 aa, Zea mays subsp. mays
  peptide (1)..(280): Ceres Seq. ID no. 12388642
NLVTDKLNFGAMNMWFLLNPPGDATIHVENVDDFKWLNSSYCPVLKQLESAAMKEYYFKADRPKTLSAGSSNLKYRNPKYLSMLNHLRFYLPQVYPKLNKILFLDDDIVVQRDLTGLWEVDLNGNVNGAVETCGESFHRFDKYLNFSNPNIAQNFDPNACGWAYGMNMFDLEEWKKKDITGIYHKWQNMNENRLLWKLGTLPPGLLTFYKLTHPLDKSWHVLGLGYNPTIERSEIDNAAVIHYNGNMKPWLEIAMIKYRPYWTKYINYQHSYIHGCKISQ

SEQ ID NO: 7948 - protein, 269 aa, Zea mays subsp. mays
  peptide (1)..(269): Ceres Seq. ID no. 12388643
MNMWFLLNPPGDATIHVENVDDFKWLNSSYCPVLKQLESAAMKEYYFKADRPKTLSAGSSNLKYRNPKYLSMLNHLRFYLPQVYPKLNKILFLDDDIVVQRDLTGLWEVDLNGNVNGAVETCGESFHRFDKYLNFSNPNIAQNFDPNACGWAYGMNMFDLEEWKKKDITGIYHKWQNMNENRLLWKLGTLPPGLLTFYKLTHPLDKSWHVLGLGYNPTIERSEIDNAAVIHYNGNMKPWLEIAMIKYRPYWTKYINYQHSYIHGCKISQ

SEQ ID NO: 7949 - protein, 267 aa, Zea mays subsp. mays
  peptide (1)..(267): Ceres Seq. ID no. 12388644
MWFLLNPPGDATIHVENVDDFKWLNSSYCPVLKQLESAAMKEYYFKADRPKTLSAGSSNLKYRNPKYLSMLNHLRFYLPQVYPKLNKILFLDDDIVVQRDLTGLWEVDLNGNVNGAVETCGESFHRFDKYLNFSNPNIAQNFDPNACGWAYGMNMFDLEEWKKKDITGIYHKWQNMNENRLLWKLGTLPPGLLTFYKLTHPLDKSWHVLGLGYNPTIERSEIDNAAVIHYNGNMKPWLEIAMIKYRPYWTKYINYQHSYIHGCKISQ

SEQ ID NO: 7950 - DNA, 767 bp, Zea mays subsp. mays
  misc_feature (1)..(767): Ceres Seq. ID no. 12353983
  misc_feature (1)..(767): Ortholog of  Ceres SEQ ID NO 13596504 as cited in SEQ ID NO 60622
aataacggagacgaagagagcagaagcgaagagcagcggcgcaaaggaaagggagccatgctcgcctcgccggcgctcgccggcgcccactccttcgcggcgtccgtgtatggaaacatcctcgtcccctcgcctcccgtccccgcgccggcacgtcgcgcggcgctgtccgtcgtcgccaaggtcaaggtggccactccccaggacgaccgcatcgcccgccacgtccgcctccgcaagaaggtaagtggcaccactgagaggccgaggttgagtgttttccgctcaaacaaacatctgtacgctcaagtcatcgacgacacaaagcaatgtactctggcttcagcttcaaccatgcacaaatctctctccaaggaatttgaatactcagctgggccaacgatcgaaatagcacaaaagatcggtgaggtgattgccaagtcttgcttggagaaagggatcaacaaggttgtcttcgaccgaggtggtttcctctaccatggccgcataaaggctctcgctgattctgccagggagcacgggcttgaattctgagtcgtccaggcgtttgttcatatctccaggatcacctgtaatcttcttttttttttctctccatatgccgaacagattgtagtcactcgccttgttctgcatggtgcaaagccatggccactcgttgaccatgtcacgttttttttccatttcgtaagagtcttgtgttctgacgtttatgaggacatatcatgtgcaatcactcattttgg

SEQ ID NO: 7951 - protein, 184 aa, Zea mays subsp. mays
  peptide (1)..(184): Ceres Seq. ID no. 12353984
NNGDEESRSEEQRRKGKGAMLASPALAGAHSFAASVYGNILVPSPPVPAPARRAALSVVAKVKVATPQDDRIARHVRLRKKVSGTTERPRLSVFRSNKHLYAQVIDDTKQCTLASASTMHKSLSKEFEYSAGPTIEIAQKIGEVIAKSCLEKGINKVVFDRGGFLYHGRIKALADSAREHGLEF

SEQ ID NO: 7952 - protein, 165 aa, Zea mays subsp. mays
  peptide (1)..(165): Ceres Seq. ID no. 12353985
MLASPALAGAHSFAASVYGNILVPSPPVPAPARRAALSVVAKVKVATPQDDRIARHVRLRKKVSGTTERPRLSVFRSNKHLYAQVIDDTKQCTLASASTMHKSLSKEFEYSAGPTIEIAQKIGEVIAKSCLEKGINKVVFDRGGFLYHGRIKALADSAREHGLEF

SEQ ID NO: 7953 - DNA, 847 bp, Zea mays subsp. mays
  misc_feature (1)..(847): Ceres Seq. ID no. 12344815
  misc_feature (1)..(847): Ortholog of  Ceres SEQ ID NO 13660639 as cited in SEQ ID NO 67372
agagcttgcaaacaccaccagcgaaaacgtcgtggccagccatcccggtgtcgtctcgcgttctacagcctctgcatcccgcgttctacagccaccgctgtcgtcgccgtcctagactcctagatccgtcagcttaacgagctccattccttcgaggccagccatcccggtgtctcagcagcggcggcggcggcgtcgagctcttgctttctgtgggaggacgcatggcgatgtctgcggggcgtgggctcttggtcctcttcttctctgccgccgtagtggctgagctcgcctctgccgcgaacggtcctttcctgtccgatagcgtcttccagtcgagcgccggatctacagggaggagcttgctgcaggtcaagaatagttgccctgtgaactttgagttccaaaactacacaatcatcacaagcaagtgcaaaggaccgaagtttccagccagccaatgctgtgccgcactcaaggaattcgcgtgcccttttaacaattacctcaatgacgagagcaatgaatgtgcatcgacaatgttcagctacatcaacctctatggcaagtatccaccaggtctgttttccagcgagtgcaaagaaggcaagatggggctttcttgcgcagatgtcccccggaaggacagttccactgcaaacagtggttatcgcgcccaaagcagcttgcttgcgttgattaatgtcttgagtgtgatagcagcgttgttctactgaactacagctccattcatttcccacaaagatggtgtgttacaactgttgaggcttgagttgcaccttttggtgcttatggctatgggttggcttcctgattctttcttttg

SEQ ID NO: 7954 - protein, 170 aa, Zea mays subsp. mays
  peptide (1)..(170): Ceres Seq. ID no. 12344816
MAMSAGRGLLVLFFSAAVVAELASAANGPFLSDSVFQSSAGSTGRSLLQVKNSCPVNFEFQNYTIITSKCKGPKFPASQCCAALKEFACPFNNYLNDESNECASTMFSYINLYGKYPPGLFSSECKEGKMGLSCADVPRKDSSTANSGYRAQSSLLALINVLSVIAALFY

SEQ ID NO: 7955 - protein, 168 aa, Zea mays subsp. mays
  peptide (1)..(168): Ceres Seq. ID no. 12344817
MSAGRGLLVLFFSAAVVAELASAANGPFLSDSVFQSSAGSTGRSLLQVKNSCPVNFEFQNYTIITSKCKGPKFPASQCCAALKEFACPFNNYLNDESNECASTMFSYINLYGKYPPGLFSSECKEGKMGLSCADVPRKDSSTANSGYRAQSSLLALINVLSVIAALFY

SEQ ID NO: 7956 - DNA, 720 bp, Zea mays subsp. mays
  misc_feature (1)..(720): Ceres Seq. ID no. 12402889
  misc_feature (1)..(720): Ortholog of  Ceres SEQ ID NO 14301855 as cited in SEQ ID NO 61528
ctcctgttcccgtccaaagtgtggcgttgtcacttgttgtcaggctaccggaccaaactgcgtgctccggcctccgtgagaggagagagggtagagccagaggagttgggcgcgcagcaggatgagcggggaggaggccgacggctccaagccccaaggaggcggtgtacactacggcaccttccaggggccgcccagctacccgcccccgcgcccgccgccgagcctctccgcccaccaccgcggcgactaccaggccgttcccgctcgagattacgaggcaggtgtgcggggacgtagccatgatcgacttccctgttgtggcattggttttggatggttcctgttcatagtcggtttcttccttggtgccattccctggtacgttggagcctttctgctgtgctgttccagagttgattacagggagaaaccaggttatgtcgcatgtgttgcagcggctatcctcgctacaattgctgttatcattggggcggcagctggaactcatgttctttgattttttttagcttacaaggctatcctcccaaactagcccttactgttatcatttgggcggcagctggaagtggaagtggaactcatgttttttttagcttacattgtattgtcattgtacatacatacagtagtacatggtgtccatgtgtcgaagaaatcgtgcaatcaacatcgtaatggatgtctgttctgcattcg

SEQ ID NO: 7957 - protein, 132 aa, Zea mays subsp. mays
  peptide (1)..(132): Ceres Seq. ID no. 12402890
MSGEEADGSKPQGGGVHYGTFQGPPSYPPPRPPPSLSAHHRGDYQAVPARDYEAGVRGRSHDRLPCCGIGFGWFLFIVGFFLGAIPWYVGAFLLCCSRVDYREKPGYVACVAAAILATIAVIIGAAAGTHVL

SEQ ID NO: 7958 - protein, 99 aa, Zea mays subsp. mays
  peptide (1)..(99): Ceres Seq. ID no. 12402891
LLFPSKVWRCHLLSGYRTKLRAPASVRGERVEPEELGAQQDERGGGRRLQAPRRRCTLRHLPGAAQLPAPAPAAEPLRPPPRRLPGRSRSRLRGRCAGT

SEQ ID NO: 7959 - protein, 83 aa, Zea mays subsp. mays
  peptide (1)..(83): Ceres Seq. ID no. 12402892
MCCSGYPRYNCCYHWGGSWNSCSLIFFSLQGYPPKLALTVIIWAAAGSGSGTHVFFSLHCIVIVHTYSSTWCPCVEEIVQSTS

SEQ ID NO: 7960 - DNA, 946 bp, Zea mays subsp. mays
  misc_feature (1)..(946): Ceres Seq. ID no. 13493291
  misc_feature (1)..(946): Ortholog of  Ceres SEQ ID NO 14316367 as cited in SEQ ID NO 57626
  misc_feature (1)..(946): Ortholog of  Ceres SEQ ID NO 14315039 as cited in SEQ ID NO 57668
  misc_feature (1)..(946): Ortholog of  Ceres SEQ ID NO 13664189 as cited in SEQ ID NO 66834
  misc_feature (1)..(946): Ortholog of  Ceres SEQ ID NO 13654321 as cited in SEQ ID NO 67850
aaggcccagatcaaaagaaaagagcagcggagcggagcatgctcttcctccggtgccagcctcgcgtctcgtccccgtccgcatccgcgtccgcgccgccttttcgtccccgcgtcggcgtcgcggctccactgggcgtacgcgtcaccggcggaaggcgagggcaggcggtggtcgcgatggcgtccgccgacgcgcgcttggcggggattgcctcctccatccgcgtcatccccgacttccccaagccagggatcatgttccaggacatcacgacactgctgctcgaccccaaggcgttgacaccatcgacgtcttcgttgagcggtacaaggaccaagggatcaccgtagttgctggtgtggaagctagagggttcatttttggtcctcctatcgctctagccatcagtgcgaaatttgtacctttgaggaagcctaagaagttgccaggcgaggtgatctccgaagaatattctctggaatacggaactgacaagatagagatgcatgttggagctgtacaggccaacgatcgggctcttgtagtcgatgatcttattgccaccggtggaacactctgtgcagctgtcaaacttattgaacgtgttggagcaaaggttgttgagtgtgcttgcgtcattgaattggcagaactgaagggccgagacaaacttggggacaggccagtttttgttcttgtcgaagcagatgcttgagcggaacttgggacttctcttctcagtgagttagagttggtgctgttgatgctacctctctgtcaacaacaaagtttcccatgttggctatattcttgctgacacgtaataaagtttcattccaaattgtgatcccctgaatgatttgtcaatgtagacatgattgctggtccttgtatactgtggcttattattcacatcaattaaggataatcctgattggagctc

SEQ ID NO: 7961 - protein, 238 aa, Zea mays subsp. mays
  peptide (1)..(238): Ceres Seq. ID no. 13493292
RPRSKEKSSGAEHALPPVPASRLVPVRIRVRAAFSSPRRRRGSTGRTRHRRKARAGGGRDGVRRRALGGDCLLHPRHPRLPQARDHVPGHHDTAARPQGVDTIDVFVERYKDQGITVVAGVEARGFIFGPPIALAISAKFVPLRKPKKLPGEVISEEYSLEYGTDKIEMHVGAVQANDRALVVDDLIATGGTLCAAVKLIERVGAKVVECACVIELAELKGRDKLGDRPVFVLVEADA

SEQ ID NO: 7962 - DNA, 567 bp, Zea mays subsp. mays
  misc_feature (1)..(567): Ceres Seq. ID no. 13491118
  misc_feature (1)..(567): Ortholog of  Ceres SEQ ID NO 14304475 as cited in SEQ ID NO 53438
  misc_feature (1)..(567): Ortholog of  Ceres SEQ ID NO 15170555 as cited in SEQ ID NO 55313
  misc_feature (1)..(567): Ortholog of  Ceres SEQ ID NO 15224695 as cited in SEQ ID NO 65418
gccatctgcaaacctacttctatactttcaggaggatgtatctgtggtagatcattggcttgtcagtggcacgcattatgctagaactagcgaggagtggctaaaacgtatggacaagagcatcacttcagtaaggctgatcttcgaggaaacttatgggaaggaatcgactaccaaatggatagcttattggcggacgttcttcatctcggtagctgaactttttggatacaacaatggagatgaatggatggttgcccattacttgttccgaaagaagtagaggctactgcttggaagtacccaatcaaaaatcaatgttttcagtaattttgtcatgtacactgacgaacaactccttttctggcacgtagttgtatctcgtaccgacttcgtagtggtttcaaaaacaaaatctggaatccctgttgtgaaatttcatcttggacagcgcctgcatatgctttgcagagttacgctaattcttgcaactatgccttcagatgtttgtagagttaggctcattcttgaaagaaaacaaaggattgtttttttagataataatgg

SEQ ID NO: 7963 - protein, 93 aa, Zea mays subsp. mays
  peptide (1)..(93): Ceres Seq. ID no. 13491119
PSANLLLYFQEDVSVVDHWLVSGTHYARTSEEWLKRMDKSITSVRLIFEETYGKESTTKWIAYWRTFFISVAELFGYNNGDEWMVAHYLFRKK

SEQ ID NO: 7964 - protein, 76 aa, Zea mays subsp. mays
  peptide (1)..(76): Ceres Seq. ID no. 13491120
MYTDEQLLFWHVVVSRTDFVVVSKTKSGIPVVKFHLGQRLHMLCRVTLILATMPSDVCRVRLILERKQRIVFLDNN

SEQ ID NO: 7965 - protein, 57 aa, Zea mays subsp. mays
  peptide (1)..(57): Ceres Seq. ID no. 13491121
MDKSITSVRLIFEETYGKESTTKWIAYWRTFFISVAELFGYNNGDEWMVAHYLFRKK

SEQ ID NO: 7966 - DNA, 919 bp, Zea mays subsp. mays; identical to SEQ ID NO: 4468
  misc_feature (1)..(919): Ceres Seq. ID no. 12412873
  misc_feature (1)..(919): Ortholog of  Ceres SEQ ID NO 14315626 as cited in SEQ ID NO 52943
  misc_feature (1)..(919): Ortholog of  Ceres SEQ ID NO 14302742 as cited in SEQ ID NO 66899

SEQ ID NO: 7967 - protein, 209 aa, Zea mays subsp. mays; identical to SEQ ID NO: 4469
  peptide (1)..(209): Ceres Seq. ID no. 12412874

SEQ ID NO: 7968 - protein, 170 aa, Zea mays subsp. mays; identical to SEQ ID NO: 4470
  peptide (1)..(170): Ceres Seq. ID no. 12412875

SEQ ID NO: 7969 - protein, 167 aa, Zea mays subsp. mays; identical to SEQ ID NO: 4471
  peptide (1)..(167): Ceres Seq. ID no. 12412876

SEQ ID NO: 7970 - DNA, 1125 bp, Zea mays subsp. mays
  misc_feature (1)..(1125): Ceres Seq. ID no. 12353975
  misc_feature (1)..(1125): Ortholog of  Ceres SEQ ID NO 13594298 as cited in SEQ ID NO 57803
  misc_feature (1)..(1125): Ortholog of  Ceres SEQ ID NO 13503476 as cited in SEQ ID NO 61978
  misc_feature (1)..(1125): Ortholog of  Ceres SEQ ID NO 12578438 as cited in SEQ ID NO 62201
  misc_feature (1)..(1125): Ortholog of  Ceres SEQ ID NO 12617675 as cited in SEQ ID NO 64656
acttgtttccagcatacgtagctagtgcaactgcaagctccggatcctcctcatatcagctataaattaaaaggtcgtgacaggtgaggccgcgccgcgaggaaccgcgtcgaccttgtcgtcgatgttggcttgcaaggcgagcccgagccggccgtgcgtcgtcccccttgtttgcctgctggtggtggcggccgcagtcgtcgtcgtcgctgcctcggcgccgccggcggaggcggcgttcgacgacaactacgtggcgcagtggggtagagatggttatcaccttgtcgtccggggcacggaggcgaatgtcaccatggaccagagctctggtgccgggttccggtccaagtccacgtacggctcagggttcttccacatgaggatgaagctgccctccgggtacacggccggcgtcgtcacgaccttctacctcatctcgcagccggaggatgggagccgcgacgaggtggacttggagttcctgggcgacaaggccggcgtgcccatcaccctccagaccaacgtcttcgtcgacggccgcggcgacagggagcagcggacgcgcctctggttcgaccccgccgccgacttccacgactacaagatcctctggaacccataccagctcgtgatgttcgtggacgacacgccggtccgggtgctgaggaacctgacgggcgccgtgccggggtacccgttcccggggaagcagacgatgctgatccgcgcgagcgtgtgggacggctccgactgggccacggacggcggccggaccaaggtggactggtccaggggccccttcaccgccggctaccggggcttcgacgtcgacggctgcgccaacaacgggagcgacgcgtgccaatcgcccgacctatggtggaacgccgccgagtaccggaacatcaccgcggagcagcgggcggcgtacgaggacgtgaagaggagttacatgaactacgactactgcgccgataaggccaggtttaacagcaccaccgtacccattgaatgcaactacgcttgagaagccagttaggagtggcggcgttgtatatcaacggtttatatatatatattatatatatatacacacacacgaaaaagatatgtcttctc

SEQ ID NO: 7971 - protein, 302 aa, Zea mays subsp. mays
  peptide (1)..(302): Ceres Seq. ID no. 12353976
MLACKASPSRPCVVPLVCLLVVAAAVVVVAASAPPAEAAFDDNYVAQWGRDGYHLVVRGTEANVTMDQSSGAGFRSKSTYGSGFFHMRMKLPSGYTAGVVTTFYLISQPEDGSRDEVDLEFLGDKAGVPITLQTNVFVDGRGDREQRTRLWFDPAADFHDYKILWNPYQLVMFVDDTPVRVLRNLTGAVPGYPFPGKQTMLIRASVWDGSDWATDGGRTKVDWSRGPFTAGYRGFDVDGCANNGSDACQSPDLWWNAAEYRNITAEQRAAYEDVKRSYMNYDYCADKARFNSTTVPIECNYA

SEQ ID NO: 7972 - protein, 237 aa, Zea mays subsp. mays
  peptide (1)..(237): Ceres Seq. ID no. 12353977
MDQSSGAGFRSKSTYGSGFFHMRMKLPSGYTAGVVTTFYLISQPEDGSRDEVDLEFLGDKAGVPITLQTNVFVDGRGDREQRTRLWFDPAADFHDYKILWNPYQLVMFVDDTPVRVLRNLTGAVPGYPFPGKQTMLIRASVWDGSDWATDGGRTKVDWSRGPFTAGYRGFDVDGCANNGSDACQSPDLWWNAAEYRNITAEQRAAYEDVKRSYMNYDYCADKARFNSTTVPIECNYA

SEQ ID NO: 7973 - protein, 216 aa, Zea mays subsp. mays
  peptide (1)..(216): Ceres Seq. ID no. 12353978
MRMKLPSGYTAGVVTTFYLISQPEDGSRDEVDLEFLGDKAGVPITLQTNVFVDGRGDREQRTRLWFDPAADFHDYKILWNPYQLVMFVDDTPVRVLRNLTGAVPGYPFPGKQTMLIRASVWDGSDWATDGGRTKVDWSRGPFTAGYRGFDVDGCANNGSDACQSPDLWWNAAEYRNITAEQRAAYEDVKRSYMNYDYCADKARFNSTTVPIECNYA

SEQ ID NO: 7974 - DNA, 1023 bp, Zea mays subsp. mays
  misc_feature (1)..(1023): Ceres Seq. ID no. 12340874
  misc_feature (1)..(1023): Ortholog of  Ceres SEQ ID NO 14305871 as cited in SEQ ID NO 57224
atttgcctatttccggtgcaggcagtctggcagagcgagcaggcaggcaactgggccagagtcagacaggcctgcccgccacgccgtcccgacggccatggcccgacccttctcttccccacacatcccgtcttcatcctgggtgactcgccgccctcctccctggacctcctcaccgtccgtctccaccacgagaactagcgcctcgtctattaccgcgtgcagaccgcgccgcagggcagtcgcgccggcggcctccctccacctcggcccgggggagatcgccgagctcgcgcgcaacaaggttttgattgcggcgacagtggcgagcgcgatcgggcagctgtccaagcccttcacctcggtcaagaatgggggcgtcggcgccggccttgacctcaggaccgtcttccgctccggagggatgccctccacccactccgcgagtgttgttgcagttgctacttcgcttgggctagaaagggggtttgcagactccatatttggaatgtcagtggtgtttgcagcaattgtaatgtatgatgctcagggagtaagaagagaagtgggcaaccacgccaagatcttgaacaggttttggatcctcaaagagaaggtacctctggagtattctgaagtggacatggcagctcctgggtttgtttcggtcaccgaggaagcgagctccaacgcgagcccctccttgaagcgcggttctagcaccgaatcaccaagggtgaatgggctccgtgggtcagagcctgagctgacagagctgaagcaggcttgcgtagaggaggattaccggttgagtgaatctgttggccacacggagcttcaggtcacagtcggcgccctgttgggttttgctgtaagcttagcagtgtatgcaacactgtaacggaccttttcatatcacgtccttgattgattacacatttacacttttttttacacagaaacaatacatgcggtttattgttcccaccgtttaaatcagaaatgcctatgctagctcgtttc

SEQ ID NO: 7975 - protein, 299 aa, Zea mays subsp. mays
  peptide (1)..(299): Ceres Seq. ID no. 12340875
FAYFRCRQSGRASRQATGPESDRPARHAVPTAMARPFSSPHIPSSSWVTRRPPPWTSSPSVSTTRTSASSITACRPRRRAVAPAASLHLGPGEIAELARNKVLIAATVASAIGQLSKPFTSVKNGGVGAGLDLRTVFRSGGMPSTHSASVVAVATSLGLERGFADSIFGMSVVFAAIVMYDAQGVRREVGNHAKILNRFWILKEKVPLEYSEVDMAAPGFVSVTEEASSNASPSLKRGSSTESPRVNGLRGSEPELTELKQACVEEDYRLSESVGHTELQVTVGALLGFAVSLAVYATL

SEQ ID NO: 7976 - protein, 267 aa, Zea mays subsp. mays
  peptide (1)..(267): Ceres Seq. ID no. 12340876
MARPFSSPHIPSSSWVTRRPPPWTSSPSVSTTRTSASSITACRPRRRAVAPAASLHLGPGEIAELARNKVLIAATVASAIGQLSKPFTSVKNGGVGAGLDLRTVFRSGGMPSTHSASVVAVATSLGLERGFADSIFGMSVVFAAIVMYDAQGVRREVGNHAKILNRFWILKEKVPLEYSEVDMAAPGFVSVTEEASSNASPSLKRGSSTESPRVNGLRGSEPELTELKQACVEEDYRLSESVGHTELQVTVGALLGFAVSLAVYATL

SEQ ID NO: 7977 - protein, 158 aa, Zea mays subsp. mays
  peptide (1)..(158): Ceres Seq. ID no. 12340877
MPSTHSASVVAVATSLGLERGFADSIFGMSVVFAAIVMYDAQGVRREVGNHAKILNRFWILKEKVPLEYSEVDMAAPGFVSVTEEASSNASPSLKRGSSTESPRVNGLRGSEPELTELKQACVEEDYRLSESVGHTELQVTVGALLGFAVSLAVYATL

SEQ ID NO: 7978 - DNA, 943 bp, Zea mays subsp. mays
  misc_feature (1)..(943): Ceres Seq. ID no. 12403364
  misc_feature (1)..(943): Ortholog of  Ceres SEQ ID NO 13660639 as cited in SEQ ID NO 67372
ggttggaggctagagcttgcaaacaccaccagcgaagacgtcgtggcgcgcatgtgggcggtctctgcaccccgcgtcccaccgccaccgctactgtcgtagtcctagatccgacagcctcacgagctacattccctcgaggccggccttcccggtgtctcagcagcggcggcgcatggcgatggctgcggggcgtgggctcttggccctcttctcggtcgtcgtagtggctgggctcacctctgcggcaaatggtcctttcctgtccgatagcgtcttccagccgagcgccggatctacagggaggagcttactgcaggccaataacagttgccccgtgaactttgagttccaaaactacacaatcatcacaagcaagtgcaaagggccaaagtttccagccggcccatgctgtgccgcactcaaggagttcgcgtgcccttactatacgtacctcaatgacgagagcaacgactgtgcatcgacaatgttcagctacatcaacctgtatggcaagtatccaccgggcctgttctccagcgagtgcaaagaaggcaagcaggggctctcttgcgcagatgtcctcgagagagacagtgccactgcaagcagtggtcatcacgctcaaatcagcttgcttgcgttgattactttcttgagtgtggtagtagcgttgttccactgaactatatatgcattctcccaaatatggtgtgttacaactaatgaggtttgaattgcaccttttggtgctcatggtgggattctaggttcttcctttttgtgtgtaaagtctcacataatgttattcatggcctattgcatactctttttaattcaatttaatatggcagcgggtctgattaaggctatgactagtagatcgtccgtatgaccgtacaaaaatattgtttacattatagactattgttttacattgtgt

SEQ ID NO: 7979 - protein, 169 aa, Zea mays subsp. mays
  peptide (1)..(169): Ceres Seq. ID no. 12403365
MAMAAGRGLLALFSVVVVAGLTSAANGPFLSDSVFQPSAGSTGRSLLQANNSCPVNFEFQNYTIITSKCKGPKFPAGPCCAALKEFACPYYTYLNDESNDCASTMFSYINLYGKYPPGLFSSECKEGKQGLSCADVLERDSATASSGHHAQISLLALITFLSVVVALFH

SEQ ID NO: 7980 - protein, 167 aa, Zea mays subsp. mays
  peptide (1)..(167): Ceres Seq. ID no. 12403366
MAAGRGLLALFSVVVVAGLTSAANGPFLSDSVFQPSAGSTGRSLLQANNSCPVNFEFQNYTIITSKCKGPKFPAGPCCAALKEFACPYYTYLNDESNDCASTMFSYINLYGKYPPGLFSSECKEGKQGLSCADVLERDSATASSGHHAQISLLALITFLSVVVALFH

SEQ ID NO: 7981 - DNA, 874 bp, Zea mays subsp. mays
  misc_feature (1)..(874): Ceres Seq. ID no. 12353951
  misc_feature (1)..(874): Ortholog of  Ceres SEQ ID NO 13596519 as cited in SEQ ID NO 62572
  misc_feature (1)..(874): Ortholog of  Ceres SEQ ID NO 12625108 as cited in SEQ ID NO 68102
gcaatttcgtttgaaacagttcagttctcacaaaaaaaagagaaagccctgaagtttcatggattcaagaatttccatctgcggtggcgcctgcgggtacggcgacctggacatcttcaggtacgggcgctacacgacggggctgagcgcggcgctgttcgggcgcggcggcgcctgcggcggctgctacgagctgcggtgcgtcaaccacatccagtggtgcctccggggcagccccacggtggtggtgacggcgacggacttctgcccggccaacatgggcctcgccgacgacgacgccggcggctggtgcaacttcccgcgggagcacctcgagctgtcggaggcctcgttcctccgcgtcgccaaggccaaggccggcatcgtgccgggtgcagttccggagggtgagctgcgacagggccggcggcatggcggttcaccatcaccggtagcgcccacttcctgcaggtgctcatcaccaacgtggcggcggacggcgaggtggcggccgtgaaggtgaaggggtcgaggacggggtggatcccgatggggcggaactggggccagaactggcagtgcgacgccgacctccgcgcccagccgccttccgggaggccagcttcggccacgccacgctagacatcaagaaccggacgcacgcctactactcgtggcaccgcaaccatgacggcgcgaaggtcgtcgctgacggcgtctggttcaccaacaggtactggatgcccaccgacgacgacacaaactgacgatcaccgccgcagagggaacaaattactgatagatcagcgtagcacgttcctgagctagccccgccccctttatgttctccaattcagtaatgcaatgcgttttt

SEQ ID NO: 7982 - protein, 152 aa, Zea mays subsp. mays
  peptide (1)..(152): Ceres Seq. ID no. 12353952
MDSRISICGGACGYGDLDIFRYGRYTTGLSAALFGRGGACGGCYELRCVNHIQWCLRGSPTVVVTATDFCPANMGLADDDAGGWCNFPREHLELSEASFLRVAKAKAGIVPGAVPEGELRQGRRHGGSPSPVAPTSCRCSSPTWRRTARWRP

SEQ ID NO: 7983 - protein, 136 aa, Zea mays subsp. mays
  peptide (1)..(136): Ceres Seq. ID no. 12353953
AISFETVQFSQKKEKALKFHGFKNFHLRWRLRVRRPGHLQVRALHDGAERGAVRARRRLRRLLRAAVRQPHPVVPPGQPHGGGDGDGLLPGQHGPRRRRRRRLVQLPAGAPRAVGGLVPPRRQGQGRHRAGCSSGG

SEQ ID NO: 7984 - protein, 79 aa, Zea mays subsp. mays
  peptide (1)..(79): Ceres Seq. ID no. 12353954
MGLADDDAGGWCNFPREHLELSEASFLRVAKAKAGIVPGAVPEGELRQGRRHGGSPSPVAPTSCRCSSPTWRRTARWRP

SEQ ID NO: 7985 - DNA, 1980 bp, Zea mays subsp. mays
  misc_feature (1)..(1980): Ceres Seq. ID no. 13567373
  misc_feature (1)..(1980): Ortholog of  Ceres SEQ ID NO 14315241 as cited in SEQ ID NO 52516
  misc_feature (1)..(1980): Ortholog of  Ceres SEQ ID NO 15176457 as cited in SEQ ID NO 55547
  misc_feature (1)..(1980): Ortholog of  Ceres SEQ ID NO 13594349 as cited in SEQ ID NO 58161
  misc_feature (1)..(1980): Ortholog of  Ceres SEQ ID NO 13663419 as cited in SEQ ID NO 66561
  misc_feature (1)..(1980): Ortholog of  Ceres SEQ ID NO 15177892 as cited in SEQ ID NO 0
ctcacgggcggcggctcgcgtgtcccgccagctagccgcacactttcctctctttcagtttcgcttcgcagacttcgcttgcgcttcacccaaccttaaccgcaacggttcccgtgcggagtttttattatgaatgaatgaatacgaattcagagcacgagcgccgttgattggccgctactagtactaccagctaggccactgctcctctgctacccgctaacctcgcgccggagtcgtcgcccacgatggcctaccgatccgcagtgctcttgcccgccctcctactggccgtcgccgtcgtcgtggcctccgccgccgccggggacgggaggtggcgggaggagcaggcgcgggaccgggtgccgcgggtgccggggcaggccttcaacaccagcttcgcgcagtacgccgggtacgtgaccgtcagcgagcagcgcggcgctgcgctcttctactggttctttgaggccgagaaggacccggggtccaagcccctcgtgctctggctcaacggagggcctggatgctcgtccattgcttttggacttggagaagaagtaggacctttccatgttaacgcagatgggaagggggtccatgtcaatccttattcttggaacaaagttgcaaatttactgttccttgattcacctgttggtgttggttactcatattcaaacacctctgatgatgctttaaaaaatggggatgcaagaactgccacggattcattggcattcttactgaagtggcttgaacgctttcctcaatacaaggaacgcgaattttatttgacaggggagagttatgctggtcactatgttcctcaactggctcaagccataaaaaggcaccatgaggctactggtgacaaatcaattaatctaaagggctatatggtagggaatgctctcactgatgatttccatgaccactatggaatatttcaattcatgtggactactggcctgatctctgatcaaacatacaagctgctgaatgttttctgtgactacgagtccttcgtgcattcgtctccacagtgtgataagattatggatattgctagcactgaagctggaaacattgattcatatagcatcttcacacctacatgtcatgcatcttttgcctcttcaaagaacaaagtgatgaaaaggctacattctgctggaaaaatgggagaacagtatgatccatgcactgagaagcattcaactgtatacttcaatctagctgaggttcagaaggcacttcatgttaatacagtcattggaaaatcaaaatgggagacttgcagtgaagctgttaatactcattggggggattgcgaaagatctgtgctgcatatctatcatgaacttatacagtatggcctccgtatatgggtgttcagtggagatacagatgcagtgattccagtgacttcaactagatacagcatcgatgctctcaagcttccaacaataactccatggcatgcttggtacgacgatgacggtgaggtcggtggatggacccaagggtacaggggactcaattttgtgaccgtgaggggagcaggtcacgaagtccctcttcatcgacccaaacaggccctcacgctaatcaaatcgttcttgactgggagcccaatgcctgtgcaatccagcacacacagcaacatgtaatccgtgttgttgcaactgattcacgagatgaatgaacatcccgaagcacccaagtcagccagttgtccaacccggcttgttctgcaacttgctgtagttgtttatgtatcagagctaccggtgccggttaccgcagcagccgtgcttttgtcggccctgttggtgcttgttgcagtaccagttatcccctaaggcaggggacagaaactgcggaatagtttttgtttgcattgacgtgacagcactgtaatcttaaacatcgtaccatagtcctttctatgacaaaggtgtggtttctgatgtctgc

SEQ ID NO: 7986 - protein, 474 aa, Zea mays subsp. mays
  peptide (1)..(474): Ceres Seq. ID no. 13567374
MAYRSAVLLPALLLAVAVVVASAAAGDGRWREEQARDRVPRVPGQAFNTSFAQYAGYVTVSEQRGAALFYWFFEAEKDPGSKPLVLWLNGGPGCSSIAFGLGEEVGPFHVNADGKGVHVNPYSWNKVANLLFLDSPVGVGYSYSNTSDDALKNGDARTATDSLAFLLKWLERFPQYKEREFYLTGESYAGHYVPQLAQAIKRHHEATGDKSINLKGYMVGNALTDDFHDHYGIFQFMWTTGLISDQTYKLLNVFCDYESFVHSSPQCDKIMDIASTEAGNIDSYSIFTPTCHASFASSKNKVMKRLHSAGKMGEQYDPCTEKHSTVYFNLAEVQKALHVNTVIGKSKWETCSEAVNTHWGDCERSVLHIYHELIQYGLRIWVFSGDTDAVIPVTSTRYSIDALKLPTITPWHAWYDDDGEVGGWTQGYRGLNFVTVRGAGHEVPLHRPKQALTLIKSFLTGSPMPVQSSTHSNM

SEQ ID NO: 7987 - protein, 257 aa, Zea mays subsp. mays
  peptide (1)..(257): Ceres Seq. ID no. 13567375
MVGNALTDDFHDHYGIFQFMWTTGLISDQTYKLLNVFCDYESFVHSSPQCDKIMDIASTEAGNIDSYSIFTPTCHASFASSKNKVMKRLHSAGKMGEQYDPCTEKHSTVYFNLAEVQKALHVNTVIGKSKWETCSEAVNTHWGDCERSVLHIYHELIQYGLRIWVFSGDTDAVIPVTSTRYSIDALKLPTITPWHAWYDDDGEVGGWTQGYRGLNFVTVRGAGHEVPLHRPKQALTLIKSFLTGSPMPVQSSTHSNM

SEQ ID NO: 7988 - protein, 238 aa, Zea mays subsp. mays
  peptide (1)..(238): Ceres Seq. ID no. 13567376
MWTTGLISDQTYKLLNVFCDYESFVHSSPQCDKIMDIASTEAGNIDSYSIFTPTCHASFASSKNKVMKRLHSAGKMGEQYDPCTEKHSTVYFNLAEVQKALHVNTVIGKSKWETCSEAVNTHWGDCERSVLHIYHELIQYGLRIWVFSGDTDAVIPVTSTRYSIDALKLPTITPWHAWYDDDGEVGGWTQGYRGLNFVTVRGAGHEVPLHRPKQALTLIKSFLTGSPMPVQSSTHSNM

SEQ ID NO: 7989 - DNA, 897 bp, Zea mays subsp. mays
  misc_feature (1)..(897): Ceres Seq. ID no. 12343263
  misc_feature (1)..(897): Ortholog of  Ceres SEQ ID NO 12608801 as cited in SEQ ID NO 50884
  misc_feature (1)..(897): Ortholog of  Ceres SEQ ID NO 15169930 as cited in SEQ ID NO 55395
  misc_feature (1)..(897): Ortholog of  Ceres SEQ ID NO 12635796 as cited in SEQ ID NO 0
acccacccatcacacgacaaaatccctcaccctcgtgagtcctgacgtcctcgcccgtgctcgcagttggtagggttctagccatggcgtggagcgccgccgccgtctccaggttcgcagccgcctccccacccgcggcacccatctccgtcaggcttggagccgccgcttctcgctcgtccctgtccttctccagtgggcgccgacgccccgtggccgcgtccctctcgacctctgccaccgctgtaaaggaggctgttcagacagagaaggcaccaccagcactaggcccttattctcaggccatcaaagcaaataatcttgtgtttgtttctggagttcttggcttgaatcccgagaccaggaagtttatctctgaaaatgttgaggagcaaactgagcaggttatgaaaaacatgggcgagatattaaaagctagtggtgctaactattcttcagttgtgaagacaacgatcatgttggctgatctgcaggatttcaataaagtaaacgagatctatggcaaatatttcccggtgccagcacctgcacgatcaacctaccaagtggcggcgctgccactgaatgcccggattgagattgagtgcatcgctgctctctaatcagatcatccaaccactcattaaatcatcaataagcacccaggaatttgtggtagaggtacctgtaccagttcagtgtctgaaaactgcgggtaacaaacctttgtgtcccggataagtgatgtgtgtgtgtgtgtgagtgaacagtgcatctagtaggagaattgttgcgtggtttgttacttggattcttcgctctttagacaagaagtaccatggcatcaacatcaatagcctactgttttcttcccaataagaatgaattggcttcccc

SEQ ID NO: 7990 - protein, 179 aa, Zea mays subsp. mays
  peptide (1)..(179): Ceres Seq. ID no. 12343264
MAWSAAAVSRFAAASPPAAPISVRLGAAASRSSLSFSSGRRRPVAASLSTSATAVKEAVQTEKAPPALGPYSQAIKANNLVFVSGVLGLNPETRKFISENVEEQTEQVMKNMGEILKASGANYSSVVKTTIMLADLQDFNKVNEIYGKYFPVPAPARSTYQVAALPLNARIEIECIAAL

SEQ ID NO: 7991 - DNA, 868 bp, Zea mays subsp. mays
  misc_feature (1)..(868): Ceres Seq. ID no. 12402305
  misc_feature (1)..(868): Ortholog of  Ceres SEQ ID NO 13661143 as cited in SEQ ID NO 61139
atcacccaatgacccaatcaatcgctaacaacccaataaaccgcggacgcagcagaaaagaggtagaggggcggcgaccgatggcgcggcggggcacggaggcgttccctaacctgggcgcgcactgcgacaagccggactgcaaccagctcgacttcctgcccttcgactgcgacggctgcggcaaggtcttctgcgccgcgcaccggacctacggggaccacggctgcgccaaggcggcggaccagggccgcaccgtcgtcgtctgcccggactgcggcgacgccatcgagaggctggttccggggcagggcgagcgggagatcctggaggcgcacgtgcggtcgcggcgctgcgacccgggcaagaagcgcaagccccggtgccccgcgcggcggtgcagggagcagctcaccttctccaacacccaggactgcaagggctgcggccggaaggtgtgcctcaagcaccaggttcccggccgaccacgactgcgccgccagcgcaccaggagctgccgcggcggcgaggagggccagcggggagtgcggccgcggcgcgcggaaggaagggagcggcggctgggcgctgccggcgtccatccggagcctcaagatcttctgaggcttgccaatttgccatactgtcacgttgcagccaggtcaccacagcgaaagaaactgttcctcgagatggatgcagcgaacgtatttcatatgttctttggttgatgtataaatgcattttcaggctaagaatctgaaatacagaaactggacattgaaatgttccatcaatactggtttttaaggcagatgtgaagacagacaaatttgcgttcaatatactacgggagttttttttttcc

SEQ ID NO: 7992 - protein, 242 aa, Zea mays subsp. mays
  peptide (1)..(242): Ceres Seq. ID no. 12402306
HPMTQSIANNPINRGRSRKEVEGRRPMARRGTEAFPNLGAHCDKPDCNQLDFLPFDCDGCGKVFCAAHRTYGDHGCAKAADQGRTVVVCPDCGDAIERLVPGQGEREILEAHVRSRRCDPGKKRKPRCPARRCREQLTFSNTQDCKGCGRKVCLKHQVPGRPRLRRQRTRSCRGGEEGQRGVRPRRAEGRERRLGAAGVHPEPQDLLRLANLPYCHVAARSPQRKKLFLEMDAANVFHMFFG

SEQ ID NO: 7993 - protein, 240 aa, Zea mays subsp. mays
  peptide (1)..(240): Ceres Seq. ID no. 12402307
MTQSIANNPINRGRSRKEVEGRRPMARRGTEAFPNLGAHCDKPDCNQLDFLPFDCDGCGKVFCAAHRTYGDHGCAKAADQGRTVVVCPDCGDAIERLVPGQGEREILEAHVRSRRCDPGKKRKPRCPARRCREQLTFSNTQDCKGCGRKVCLKHQVPGRPRLRRQRTRSCRGGEEGQRGVRPRRAEGRERRLGAAGVHPEPQDLLRLANLPYCHVAARSPQRKKLFLEMDAANVFHMFFG

SEQ ID NO: 7994 - protein, 216 aa, Zea mays subsp. mays
  peptide (1)..(216): Ceres Seq. ID no. 12402308
MARRGTEAFPNLGAHCDKPDCNQLDFLPFDCDGCGKVFCAAHRTYGDHGCAKAADQGRTVVVCPDCGDAIERLVPGQGEREILEAHVRSRRCDPGKKRKPRCPARRCREQLTFSNTQDCKGCGRKVCLKHQVPGRPRLRRQRTRSCRGGEEGQRGVRPRRAEGRERRLGAAGVHPEPQDLLRLANLPYCHVAARSPQRKKLFLEMDAANVFHMFFG

SEQ ID NO: 7995 - DNA, 1016 bp, Zea mays subsp. mays
  misc_feature (1)..(1016): Ceres Seq. ID no. 12402434
  misc_feature (1)..(1016): Ortholog of  Ceres SEQ ID NO 12626028 as cited in SEQ ID NO 69063
gtccgatgcctctcatcgccagaagaccttcccggtacgacgccaccgcaccacggaattaacacgagcactgcatcggtgaatctgcaagcccgcccgcccgtcgctcgccaccgccatgttcggcatcgtcttcccggaccacacctttcccctcgacgccaccgctttcgcgcaggtggcgcccaattcctgggtcctcgatctctccactctcgcgctcgccgccgcgccgcgctcggcagtcgtcttcctgctccccgctgccgtgacagcgctgccgcccggcaaggccgtctccgtctacttccaggccgccaccaaccgccccttcgcattcttaggtgcgctcgggcccacgcgcccctcggccagcttcccgcttccggaggccggcgacgagccggagcctgctgtgggccccgctaaactgggtgtcgccgtggaggacgcggccgcgttaccgccgccccctgacgagcagcgtgccgagcgtgtggcgctccgtgtcggcgagaacctgttcaacttcatgcaatcgttctgcggtgccgacggcggcaagctggtagtgcccacggacatcctggaccggtggttccgcaagttccaggagcgagccaagaaagatccagcgtacctcaagagcttcgacttttgagagcaaaggtcattttgcagataccatgtgggaagaatgttggatagcagtatagcagtgttttgtgtctcatctaggccctcctacattgcacacaatgttacgccgtgtcttaggggctgactgaatgaaggtgcatatgcagcttctctatctattgtagagaaggacaacgacaccaaaagcgaccagataggttagatggtggtgcttcaagtccttgcacccgaatgagaagtcttcttagaaacttttacaacaatacatcggatggttctgcttcgaatgtcagtattttgtggataatatctgggaatctcaggactaagatgaatgcgattgagttcttgtcgcg

SEQ ID NO: 7996 - protein, 180 aa, Zea mays subsp. mays
  peptide (1)..(180): Ceres Seq. ID no. 12402435
MFGIVFPDHTFPLDATAFAQVAPNSWVLDLSTLALAAAPRSAVVFLLPAAVTALPPGKAVSVYFQAATNRPFAFLGALGPTRPSASFPLPEAGDEPEPAVGPAKLGVAVEDAAALPPPPDEQRAERVALRVGENLFNFMQSFCGADGGKLVVPTDILDRWFRKFQERAKKDPAYLKSFDF

SEQ ID NO: 7997 - protein, 142 aa, Zea mays subsp. mays
  peptide (1)..(142): Ceres Seq. ID no. 12402436
VRCLSSPEDLPGTTPPHHGINTSTASVNLQARPPVARHRHVRHRLPGPHLSPRRHRFRAGGAQFLGPRSLHSRARRRAALGSRLPAPRCRDSAAARQGRLRLLPGRHQPPLRILRCARAHAPLGQLPASGGRRRAGACCGPR

SEQ ID NO: 7998 - DNA, 968 bp, Zea mays subsp. mays
  misc_feature (1)..(968): Ceres Seq. ID no. 12380992
  misc_feature (1)..(968): Ortholog of  Ceres SEQ ID NO 14304654 as cited in SEQ ID NO 53301
  misc_feature (1)..(968): Ortholog of  Ceres SEQ ID NO 13658153 as cited in SEQ ID NO 66326
  misc_feature (1)..(968): Ortholog of  Ceres SEQ ID NO 14303011 as cited in SEQ ID NO 67226
aaaggaagggcgggggctacatagcaagctccttctctgctaaccgagcgagagcagctgtagcctacactctacagctagcgcaactaacgaccatccacctgaaagagggagaaggcattgggggttcttgaagtgcagtgcaggtccaggcagctagcagtgaccgagagtgagggacagggcaatggcgtcctcactgctccactgccccgacaagctcccgttcttggacgtggaggccatcctccacatgaaagaggggctcggcgagaccagctacgcgcagaactcctcgcttcagaagcgaggcatggacacgctgaggagcctcatcaccagcaccgcgacggacgtgtacgtctcgcagatgccggagcggttcacggtggccgacctcggctgctcctcggggcccaacgcgctgtgcctggcggaggacatcgtggggagcatcggcagggcgtgcggccggtcgtcgcggccgccgcccgagttctcggtgctgctcaacgacctgcccaccaacgacttcaacaccatcttcttcagcctgccggagttcgccgaccggctcgaggccgcggccaggacggacgagtggggccggccgatggtgttcctgtccggggtcccgggctcgttctacgggcggctgttccccaggacgagcgtgcacttcatctgctcctgctccagcctgcactggctctcccaggtccctccggggctcttcgacgagacggacaacaggccggtgaacaaggggaagatgtacatctcgagcaccagccccgcggccgtgccgctggcctacctgaggcagttccggagagacttcggcgtgttcctcaggtcgcgcgcggccgaggtcgtccccggcggccggatggtcctcgccatgcttggccggcagaccgaaggctacgtcgaccggcggacgaccttcctctgggagctcctctccg

SEQ ID NO: 7999 - protein, 260 aa, Zea mays subsp. mays
  peptide (1)..(260): Ceres Seq. ID no. 12380993
MASSLLHCPDKLPFLDVEAILHMKEGLGETSYAQNSSLQKRGMDTLRSLITSTATDVYVSQMPERFTVADLGCSSGPNALCLAEDIVGSIGRACGRSSRPPPEFSVLLNDLPTNDFNTIFFSLPEFADRLEAAARTDEWGRPMVFLSGVPGSFYGRLFPRTSVHFICSCSSLHWLSQVPPGLFDETDNRPVNKGKMYISSTSPAAVPLAYLRQFRRDFGVFLRSRAAEVVPGGRMVLAMLGRQTEGYVDRRTTFLWELLS

SEQ ID NO: 8000 - protein, 238 aa, Zea mays subsp. mays
  peptide (1)..(238): Ceres Seq. ID no. 12380994
MKEGLGETSYAQNSSLQKRGMDTLRSLITSTATDVYVSQMPERFTVADLGCSSGPNALCLAEDIVGSIGRACGRSSRPPPEFSVLLNDLPTNDFNTIFFSLPEFADRLEAAARTDEWGRPMVFLSGVPGSFYGRLFPRTSVHFICSCSSLHWLSQVPPGLFDETDNRPVNKGKMYISSTSPAAVPLAYLRQFRRDFGVFLRSRAAEVVPGGRMVLAMLGRQTEGYVDRRTTFLWELLS

SEQ ID NO: 8001 - protein, 218 aa, Zea mays subsp. mays
  peptide (1)..(218): Ceres Seq. ID no. 12380995
MDTLRSLITSTATDVYVSQMPERFTVADLGCSSGPNALCLAEDIVGSIGRACGRSSRPPPEFSVLLNDLPTNDFNTIFFSLPEFADRLEAAARTDEWGRPMVFLSGVPGSFYGRLFPRTSVHFICSCSSLHWLSQVPPGLFDETDNRPVNKGKMYISSTSPAAVPLAYLRQFRRDFGVFLRSRAAEVVPGGRMVLAMLGRQTEGYVDRRTTFLWELLS

SEQ ID NO: 8002 - DNA, 782 bp, Zea mays subsp. mays
  misc_feature (1)..(782): Ceres Seq. ID no. 12358043
  misc_feature (1)..(782): Ortholog of  Ceres SEQ ID NO 13663563 as cited in SEQ ID NO 66853
cccactccaaacctccctctctcgacctcgacccctcgcccgcaaagccccgcaagccagcggcatcccgcttcctcggcaggcttccaagacccaacccaacagcttccgagcgagtacggcggcggcgacgatggcggccaagtcgcacacacgcaaggcgttcctcctctgcaactacgtcctcctgggcgcctcctccagctgcatcttcctcacgctgtcgctgcgcctgctgccgtccccgtgcggcctgctcctgctcttcctccacgccctcaccgccgtcttctccgcggccggctgctcgggctccttcacggcgcccgccacgcccgcgcagtggcacaacgcgcacaccgcgggagccgcgctcaccgccatcttccagggcgccatcgcgctgctcgcgttcacccgcacctccgacttcctcgccgagctccagtcctacgtccgcgacgaggacggcgccgtcatcctcaagatggtcggagggctcggcaccgccatcttcgtcctcgagtgggccgcgctcgcgcttgccttctccctccgcctcgacgaggatgacgacgacgacgacctccaggccaagaactggcaatcgtaccatgtctgatcccatccactgctggcctgggctccttcaaaatgagattctttgatgtctattctattattgtactattgctgtcattcttttgtactacggtgtactgttatgactgttcaaccaaaataaataaataccaaagcaaatatatattattgcttttgtt

SEQ ID NO: 8003 - protein, 221 aa, Zea mays subsp. mays
  peptide (1)..(221): Ceres Seq. ID no. 12358044
HSKPPSLDLDPSPAKPRKPAASRFLGRLPRPNPTASERVRRRRRWRPSRTHARRSSSATTSSWAPPPAASSSRCRCACCRPRAACSCSSSTPSPPSSPRPAARAPSRRPPRPRSGTTRTPREPRSPPSSRAPSRCSRSPAPPTSSPSSSPTSATRTAPSSSRWSEGSAPPSSSSSGPRSRLPSPSASTRMTTTTTSRPRTGNRTMSDPIHCWPGLLQNEIL

SEQ ID NO: 8004 - protein, 206 aa, Zea mays subsp. mays
  peptide (1)..(206): Ceres Seq. ID no. 12358045
PLQTSLSRPRPLARKAPQASGIPLPRQASKTQPNSFRASTAAATMAAKSHTRKAFLLCNYVLLGASSSCIFLTLSLRLLPSPCGLLLLFLHALTAVFSAAGCSGSFTAPATPAQWHNAHTAGAALTAIFQGAIALLAFTRTSDFLAELQSYVRDEDGAVILKMVGGLGTAIFVLEWAALALAFSLRLDEDDDDDDLQAKNWQSYHV

SEQ ID NO: 8005 - protein, 190 aa, Zea mays subsp. mays
  peptide (1)..(190): Ceres Seq. ID no. 12358046
PTPNLPLSTSTPRPQSPASQRHPASSAGFQDPTQQLPSEYGGGDDGGQVAHTQGVPPLQLRPPGRLLQLHLPHAVAAPAAVPVRPAPALPPRPHRRLLRGRLLGLLHGARHARAVAQRAHRGSRAHRHLPGRHRAARVHPHLRLPRRAPVLRPRRGRRRHPQDGRRARHRHLRPRVGRARACLLPPPRRG

SEQ ID NO: 8006 - protein, 162 aa, Zea mays subsp. mays
  peptide (1)..(162): Ceres Seq. ID no. 12358047
MAAKSHTRKAFLLCNYVLLGASSSCIFLTLSLRLLPSPCGLLLLFLHALTAVFSAAGCSGSFTAPATPAQWHNAHTAGAALTAIFQGAIALLAFTRTSDFLAELQSYVRDEDGAVILKMVGGLGTAIFVLEWAALALAFSLRLDEDDDDDDLQAKNWQSYHV

SEQ ID NO: 8007 - DNA, 902 bp, Zea mays subsp. mays
  misc_feature (1)..(902): Ceres Seq. ID no. 12341316
  misc_feature (1)..(902): Ortholog of  Ceres SEQ ID NO 13594090 as cited in SEQ ID NO 51093
gtacctgtacgtcttctctatagagggagcaattggagagagagaaaagaaagaaagaaacaaagaacggcgaaaaatggtcgatgccggcgacataacggccggagggccgccacgcgctcacgaggaggagcaagcgggaactccggcatacggttcggtggtcctcggcggcacttttgaccgcctccacgacggccaccgccgccttctcaaggcctccgcggatttggggagagaccggatcgtggtgggcgtctgcacgggacctatgctcgccaagaaggagtatgcggagcttattgagcccgtcgacaagcgcatcaagggtgtggaggattacatcaagtctataaagccagaactgatagtacaagtggagcctattgaggacccttatggcccatccataactgatgagaagttggatgccattattgtcagtaaggagacattaaatggtggactggctgtaaataggaaaagagaagagaaagggttcccactgttgaaggttgaggttgttgatctcctttccggcggtgtggagggggaaaaattgagttcttctgctttaaggaaacttgaggcagaacaagctcaacaaagtgaaacaaaatctggtagccttgaagcttcttagggaggaaattgaatactttgatctggttagctgaatgcacaaatacgggggtgatctgctccaagctcagtgtgaacaaaaaatatgatcagagctgacagtttggttacctttctagaggaataatcttcgaacactggcccatggccctgtaacagtattgctctaaccttctaaaatcaacctggcaacatagactctcccctactaaccaaatttacaaattttgtattggcaatgccatctgaatgttaaaagg

SEQ ID NO: 8008 - protein, 213 aa, Zea mays subsp. mays
  peptide (1)..(213): Ceres Seq. ID no. 12341317
YLYVFSIEGAIGEREKKERNKERRKMVDAGDITAGGPPRAHEEEQAGTPAYGSVVLGGTFDRLHDGHRRLLKASADLGRDRIVVGVCTGPMLAKKEYAELIEPVDKRIKGVEDYIKSIKPELIVQVEPIEDPYGPSITDEKLDAIIVSKETLNGGLAVNRKREEKGFPLLKVEVVDLLSGGVEGEKLSSSALRKLEAEQAQQSETKSGSLEAS

SEQ ID NO: 8009 - protein, 188 aa, Zea mays subsp. mays
  peptide (1)..(188): Ceres Seq. ID no. 12341318
MVDAGDITAGGPPRAHEEEQAGTPAYGSVVLGGTFDRLHDGHRRLLKASADLGRDRIVVGVCTGPMLAKKEYAELIEPVDKRIKGVEDYIKSIKPELIVQVEPIEDPYGPSITDEKLDAIIVSKETLNGGLAVNRKREEKGFPLLKVEVVDLLSGGVEGEKLSSSALRKLEAEQAQQSETKSGSLEAS

SEQ ID NO: 8010 - protein, 123 aa, Zea mays subsp. mays
  peptide (1)..(123): Ceres Seq. ID no. 12341319
MLAKKEYAELIEPVDKRIKGVEDYIKSIKPELIVQVEPIEDPYGPSITDEKLDAIIVSKETLNGGLAVNRKREEKGFPLLKVEVVDLLSGGVEGEKLSSSALRKLEAEQAQQSETKSGSLEAS

SEQ ID NO: 8011 - DNA, 1197 bp, Zea mays subsp. mays
  misc_feature (1)..(1197): Ceres Seq. ID no. 12376601
  misc_feature (1)..(1197): Ortholog of  Ceres SEQ ID NO 15174638 as cited in SEQ ID NO 53185
  misc_feature (1)..(1197): Ortholog of  Ceres SEQ ID NO 15169072 as cited in SEQ ID NO 53955
  misc_feature (1)..(1197): Ortholog of  Ceres SEQ ID NO 15224912 as cited in SEQ ID NO 63475
  misc_feature (1)..(1197): Ortholog of  Ceres SEQ ID NO 13659394 as cited in SEQ ID NO 67049
gcacgagaccattacctagaacatcctaatcgaaaaggctggaggctcgcctagctggctctggcagcagcatctaccgttcgcttgctgcaaagagaacttccactggtgatatactgaaggcgttcagtttgtatgtcaaagcatgtccgtttaggatactatcacactatgtcgcaaacacgaccatcttaaacgctacgaagagcgccacaaggctgcacatcatagactacgggataatgtatggtttccagtggccagtcctcatgcagcggctctcaaagagacctggtggccccccgtaccttcggatcactggtatagactttcccctgtcaggattccgccctgcagagcgtgttgaggcgacagggcggcggttgcatgagtatgcccgtatgttcaatgtcccatttgaataccaagccattgctgccaagtgggatactatccaagttaaagatctcaacatgaagagcgatgagttcgtcgtcgttaactgcctctaccggatgaggaacatgatggacgagacggtgaccgatgacagcccgagaacgagggttttgaacacaatcaggaagctgaatccccatctgttcgttcatgggatcgtcaatggtacttacaatgcacccttcttcgtgacgcggtttaaggaggctatgttcttcttctcttcgatctttgatatgctcgaagcgaatgccttacggatggatgagcataggctgctgatagagagagagttctttggccgggaagctgtcaatgtgattgcctgtgagggcacagagaggattgaaaggccagagacctacaagcaatggcagatgaggaacctcagggcaggcttccggcagctagctctggacagggagataatgaagagagcaaggtacaaggtaagcaagagctatcagggggatttcctcgtggacgaagataacaagtggatgctacaaggttggaagggtcgtatcatatatgcactttcagcatggactagctagacttgtaaatattagtgagctactgagctgcttagctgacctcttccattaatttcttgattattcaccatttcattttgctgtattatgtttacgttgttgaatctagccctcttttagaaaccaaagttttgtatgtttgaattgactgcaataatagaatcttgtccgtgtctgcctc

SEQ ID NO: 8012 - protein, 257 aa, Zea mays subsp. mays
  peptide (1)..(257): Ceres Seq. ID no. 12376602
MYGFQWPVLMQRLSKRPGGPPYLRITGIDFPLSGFRPAERVEATGRRLHEYARMFNVPFEYQAIAAKWDTIQVKDLNMKSDEFVVVNCLYRMRNMMDETVTDDSPRTRVLNTIRKLNPHLFVHGIVNGTYNAPFFVTRFKEAMFFFSSIFDMLEANALRMDEHRLLIEREFFGREAVNVIACEGTERIERPETYKQWQMRNLRAGFRQLALDREIMKRARYKVSKSYQGDFLVDEDNKWMLQGWKGRIIYALSAWTS

SEQ ID NO: 8013 - protein, 248 aa, Zea mays subsp. mays
  peptide (1)..(248): Ceres Seq. ID no. 12376603
MQRLSKRPGGPPYLRITGIDFPLSGFRPAERVEATGRRLHEYARMFNVPFEYQAIAAKWDTIQVKDLNMKSDEFVVVNCLYRMRNMMDETVTDDSPRTRVLNTIRKLNPHLFVHGIVNGTYNAPFFVTRFKEAMFFFSSIFDMLEANALRMDEHRLLIEREFFGREAVNVIACEGTERIERPETYKQWQMRNLRAGFRQLALDREIMKRARYKVSKSYQGDFLVDEDNKWMLQGWKGRIIYALSAWTS

SEQ ID NO: 8014 - protein, 204 aa, Zea mays subsp. mays
  peptide (1)..(204): Ceres Seq. ID no. 12376604
MFNVPFEYQAIAAKWDTIQVKDLNMKSDEFVVVNCLYRMRNMMDETVTDDSPRTRVLNTIRKLNPHLFVHGIVNGTYNAPFFVTRFKEAMFFFSSIFDMLEANALRMDEHRLLIEREFFGREAVNVIACEGTERIERPETYKQWQMRNLRAGFRQLALDREIMKRARYKVSKSYQGDFLVDEDNKWMLQGWKGRIIYALSAWTS

SEQ ID NO: 8015 - DNA, 1498 bp, Zea mays subsp. mays
  misc_feature (1)..(1498): Ceres Seq. ID no. 12406527
  misc_feature (1)..(1498): Ortholog of  Ceres SEQ ID NO 15227018 as cited in SEQ ID NO 0
agctcccagacattgacgagacataaacccacttgcccacgcgcacggcaagccggcaaggccacgcgagaaattccatctcgagcagagcgcagcaacacgtgcgcggaggtcacagctccgatcgacaagccggccaagcagccacacatgcctcctcacatggcggcgatctcgcaccggatcgcaggatccggcccgcgcgtcgccgttgtggcgccgcctcgcccgcgggggcgcgctgccgtggtcgcgggtgctgcggcgaagggcgcacatcgggagcggacgctggagggcgcgagtgacgacctgagggccgccgcggctcagtgtctggactgggctcccgcgcggcgtcgggtgcgggccgccttcgcgcccgtgctccccaccctcgaccactgccttttcaagatggctcacaatgaaatccagatggaagagaattacgagaccaattcaaagggcgttgaaatattctggaagagttggctgccaagagagggcactgcaactaaggctgcacttttcttctgccatggatatggggatacctgcactttcttttttgaagggattgctaagaggatagcagctgctggttatgcagtttatgctatggattatcctggttttggcatgtcatatggtctccatggctatattgcaagctttgatggaatggtggaccatgtcattgaacagtatgcacgaataagaggcatgaaagaagtgtgtgagctgccacactttctcttggggcagtcaatgggaggtgcagttgccctgaaagtacacttgaagcaacaacaagaatgggatggtgtgcttcttgtcgcacctatgtgcaagatttcagaagatgtaacaccacctgcacctgtattgaaggcactgagcatattgtcatgtcttcttcctgaggcgaagttatttccgcagaaagatataggagatttggcatttagagatccaaggaaaaggaaagtagctgagtacaatgccatctcatattctgaccaaatgagattaagaacagcagttgaacttttaaaagccacgaaggacattgaatcacagttggaaaagatctcctctccattgctgattcttcacggagccgcagacatggtaaccgatcctcaggtcagcaaattcctttatgagaaagccagcacgaaggacaagaccctcaagctctatgaaggcagctaccattcaatcttagagggagaaccagatgaccggatttcaactgccattaacgacatcatttcatggctagattcacactgttaaatacccctttgtctatagcctctcatgtcctcatccattgttttggatttatagttccttattagagtaccatgggtctctagtgctttaaattttgccatggtgtgcagagataagtatctctcgaattaattagttgtgcttgctatcttgacactgttggttttatgttaattgcggacaccgcattcaatgg

SEQ ID NO: 8016 - protein, 433 aa, Zea mays subsp. mays
  peptide (1)..(433): Ceres Seq. ID no. 12406528
SSQTLTRHKPTCPRARQAGKATREIPSRAERSNTCAEVTAPIDKPAKQPHMPPHMAAISHRIAGSGPRVAVVAPPRPRGRAAVVAGAAAKGAHRERTLEGASDDLRAAAAQCLDWAPARRRVRAAFAPVLPTLDHCLFKMAHNEIQMEENYETNSKGVEIFWKSWLPREGTATKAALFFCHGYGDTCTFFFEGIAKRIAAAGYAVYAMDYPGFGMSYGLHGYIASFDGMVDHVIEQYARIRGMKEVCELPHFLLGQSMGGAVALKVHLKQQQEWDGVLLVAPMCKISEDVTPPAPVLKALSILSCLLPEAKLFPQKDIGDLAFRDPRKRKVAEYNAISYSDQMRLRTAVELLKATKDIESQLEKISSPLLILHGAADMVTDPQVSKFLYEKASTKDKTLKLYEGSYHSILEGEPDDRISTAINDIISWLDSHC

SEQ ID NO: 8017 - protein, 383 aa, Zea mays subsp. mays
  peptide (1)..(383): Ceres Seq. ID no. 12406529
MPPHMAAISHRIAGSGPRVAVVAPPRPRGRAAVVAGAAAKGAHRERTLEGASDDLRAAAAQCLDWAPARRRVRAAFAPVLPTLDHCLFKMAHNEIQMEENYETNSKGVEIFWKSWLPREGTATKAALFFCHGYGDTCTFFFEGIAKRIAAAGYAVYAMDYPGFGMSYGLHGYIASFDGMVDHVIEQYARIRGMKEVCELPHFLLGQSMGGAVALKVHLKQQQEWDGVLLVAPMCKISEDVTPPAPVLKALSILSCLLPEAKLFPQKDIGDLAFRDPRKRKVAEYNAISYSDQMRLRTAVELLKATKDIESQLEKISSPLLILHGAADMVTDPQVSKFLYEKASTKDKTLKLYEGSYHSILEGEPDDRISTAINDIISWLDSHC

SEQ ID NO: 8018 - protein, 379 aa, Zea mays subsp. mays
  peptide (1)..(379): Ceres Seq. ID no. 12406530
MAAISHRIAGSGPRVAVVAPPRPRGRAAVVAGAAAKGAHRERTLEGASDDLRAAAAQCLDWAPARRRVRAAFAPVLPTLDHCLFKMAHNEIQMEENYETNSKGVEIFWKSWLPREGTATKAALFFCHGYGDTCTFFFEGIAKRIAAAGYAVYAMDYPGFGMSYGLHGYIASFDGMVDHVIEQYARIRGMKEVCELPHFLLGQSMGGAVALKVHLKQQQEWDGVLLVAPMCKISEDVTPPAPVLKALSILSCLLPEAKLFPQKDIGDLAFRDPRKRKVAEYNAISYSDQMRLRTAVELLKATKDIESQLEKISSPLLILHGAADMVTDPQVSKFLYEKASTKDKTLKLYEGSYHSILEGEPDDRISTAINDIISWLDSHC

SEQ ID NO: 8019 - DNA, 1420 bp, Zea mays subsp. mays
  misc_feature (1)..(1420): Ceres Seq. ID no. 12402424
  misc_feature (1)..(1420): Ortholog of  Ceres SEQ ID NO 13595861 as cited in SEQ ID NO 58153
  misc_feature (1)..(1420): Ortholog of  Ceres SEQ ID NO 13584292 as cited in SEQ ID NO 63687
gacccttcgtcccgcatcgtttcctcctcctttttccccgttcgtcccctggattggcgtctacccggcgcgacccggaccgaatcctaagtccgcctgccgccgccgccggctcccgttggaaacgagtttggagtaaagaaaccaaccttgcatctgtgttctgtctgtctatgctgctttgctttggattcacaaaaaaataagccttgcatctcactgacttgagataactatgcctaaggacaggagctcccgcgtttcctctcacgagagccgccgggctcgtgcctccccatacttgtcagcgtctcatggacagagcagttcttcacgccggtcacaagagtctcctgcggccgcggcagcgaagcaagctgcagagtgggaggatgttcggtgctcggtctgcatggaccacccgcacaacgctgtcctgctggtctgctcgtcgcacgagaagggctgccgccccttcatgtgcgacaccagctcgcggcactccaattgctatgaccagtaccggaaggcctccaaggactcctccaaggattcagggacagagtgcagcgagtgccagcagcaggtccagctctcgtgcccgctgtgccgtgggccagtcagcgactgcatcaaggactacgacgcacggaggtacatgaacaccaaggtccggtcctgcaccatggagtcgtgcgagttcaggggtgcctaccaggagctgaggaagcatgctagggtggagcacccagcggcgaggccgatggaggtagaccctgaacggcagcgggattggcgccggatggagcagcagcgggaccttggagacttgatgagcatgctgcgttcagggttcaacgccaacgttgaggacaacagcggcgaacttggagccaccgaagaaggggaagaggaagccgcaaggactccggcctccataacaatggtcttcatcatgccgtctagaggctcaatcatgcagtacttaacagaacgtagcagggcgatcattctggtcagccggaggcgagcaagcagtggcagtggtgatgctgaggccacagcaccagacagcgaggaaggtgatgaccctatgttgccatcggcagaggcgtctgctggttcgcagcgttcttccgaagaagaggctgacggtgaccacgcccaatgacagaagtcagctagcaggaggtgtgccatggcccatggcatcttcttggcctgaagatcccgacctgcttggtatgtgatgctgtatgctgggaagaaaacatggatgcaggtgccatcaagcaatggaaaggaaaaaaaacaattgagtggttgcatctatcttgtctgaatggatttctttttccatgcgttgtaattctctctcatatattatcatatgaaatagattcggccgtatttgcactgc

SEQ ID NO: 8020 - protein, 311 aa, Zea mays subsp. mays
  peptide (1)..(311): Ceres Seq. ID no. 12402425
MPKDRSSRVSSHESRRARASPYLSASHGQSSSSRRSQESPAAAAAKQAAEWEDVRCSVCMDHPHNAVLLVCSSHEKGCRPFMCDTSSRHSNCYDQYRKASKDSSKDSGTECSECQQQVQLSCPLCRGPVSDCIKDYDARRYMNTKVRSCTMESCEFRGAYQELRKHARVEHPAARPMEVDPERQRDWRRMEQQRDLGDLMSMLRSGFNANVEDNSGELGATEEGEEEAARTPASITMVFIMPSRGSIMQYLTERSRAIILVSRRRASSGSGDAEATAPDSEEGDDPMLPSAEASAGSQRSSEEEADGDHAQ

SEQ ID NO: 8021 - protein, 252 aa, Zea mays subsp. mays
  peptide (1)..(252): Ceres Seq. ID no. 12402426
MDHPHNAVLLVCSSHEKGCRPFMCDTSSRHSNCYDQYRKASKDSSKDSGTECSECQQQVQLSCPLCRGPVSDCIKDYDARRYMNTKVRSCTMESCEFRGAYQELRKHARVEHPAARPMEVDPERQRDWRRMEQQRDLGDLMSMLRSGFNANVEDNSGELGATEEGEEEAARTPASITMVFIMPSRGSIMQYLTERSRAIILVSRRRASSGSGDAEATAPDSEEGDDPMLPSAEASAGSQRSSEEEADGDHAQ

SEQ ID NO: 8022 - protein, 230 aa, Zea mays subsp. mays
  peptide (1)..(230): Ceres Seq. ID no. 12402427
MCDTSSRHSNCYDQYRKASKDSSKDSGTECSECQQQVQLSCPLCRGPVSDCIKDYDARRYMNTKVRSCTMESCEFRGAYQELRKHARVEHPAARPMEVDPERQRDWRRMEQQRDLGDLMSMLRSGFNANVEDNSGELGATEEGEEEAARTPASITMVFIMPSRGSIMQYLTERSRAIILVSRRRASSGSGDAEATAPDSEEGDDPMLPSAEASAGSQRSSEEEADGDHAQ

SEQ ID NO: 8023 - DNA, 1296 bp, Zea mays subsp. mays
  misc_feature (1)..(1296): Ceres Seq. ID no. 12401934
  misc_feature (1)..(1296): Ortholog of  Ceres SEQ ID NO 13654722 as cited in SEQ ID NO 62078
  misc_feature (1)..(1296): Ortholog of  Ceres SEQ ID NO 14302852 as cited in SEQ ID NO 64814
  misc_feature (1)..(1296): Ortholog of  Ceres SEQ ID NO 13598593 as cited in SEQ ID NO 64978
  misc_feature (1)..(1296): Ortholog of  Ceres SEQ ID NO 14303067 as cited in SEQ ID NO 67078
  misc_feature (1)..(1296): Ortholog of  Ceres SEQ ID NO 13595992 as cited in SEQ ID NO 68401
atcatcagatcatcgtcatcaaccagcaggtgaccgctagctgtacctgtacgacgtgtgaaacgagtagttaagcatgacggagaggcgcgccggcatggcagtggcggtggcggtggcggtggcgctcctgctgtcttcgtcgttcggcgtggcgtcggcggcggggaggggacgacccaccaagaagacgctgaagccaggggagaagccctcgcccaaatccaagttcttcccgctcagccgcaccaagtttgggcacaagcgaaactacgaggcctcctgcgccgacgagggcgggccggcctgctacgtcggatgccccgctgattgccccaactcctgcctcgtcttctgcgaatactgcctcagcttctgccaatgtgacatcttccccggcacctcctgcggcgacccgcgcttcaccggcggcgacggcaacaccttctacttccacggaagcaaggaccaggacttctgcatcgtctccgacgcgggcctccacatcaacgcccacttcatcggcaaccacaacccggccctcaaccgcgacttcacctgggtgcaggcgctgggggtcaccttcgtcgcagcaggcggcgaccaccaccgcctctacgtcggcgcccgcagggccgcggagtgggacgaggacgaggaccacgtccaggtcacattcgacggcgagcccgtcgacgtggacgccgcccggaacgcgcggtgggcgtccaaggcgctcccggggctctccgtcaggcgcaccaaggacgtgaacgccgtcaccgtggagctggacggcgccttcgccatctccgcggcagccgtgcccgtcaccgacgaggacgaccgggtccaccgctacggcaagacgggccgcgacagcctcgtgcacctcgacctcggcttccagttccataacctcaccgccgacgtcgacggcgtgctgggacagacataccgccccggctacgtcaccaagctggacatcagcgccaagatgcccatcatgggcggcgcgcccaagtacctgtccgagggtctcttctccactgactgcgctgtctcccggttccaccaccgccgcgatgccgccggcgctgccgtcgtcaccacatatgcctcttaagttgcatgccgccatgcatgcatgcatgaggaacatgagaaataatcaacaaatggaggcagcccaacaattacatgtactcctaccctgcaagcaagaaataattaagtggtcattccattgaccaaacattatttatattaattataaggagctcaaccaattaattg

SEQ ID NO: 8024 - protein, 349 aa, Zea mays subsp. mays
  peptide (1)..(349): Ceres Seq. ID no. 12401935
MTERRAGMAVAVAVAVALLLSSSFGVASAAGRGRPTKKTLKPGEKPSPKSKFFPLSRTKFGHKRNYEASCADEGGPACYVGCPADCPNSCLVFCEYCLSFCQCDIFPGTSCGDPRFTGGDGNTFYFHGSKDQDFCIVSDAGLHINAHFIGNHNPALNRDFTWVQALGVTFVAAGGDHHRLYVGARRAAEWDEDEDHVQVTFDGEPVDVDAARNARWASKALPGLSVRRTKDVNAVTVELDGAFAISAAAVPVTDEDDRVHRYGKTGRDSLVHLDLGFQFHNLTADVDGVLGQTYRPGYVTKLDISAKMPIMGGAPKYLSEGLFSTDCAVSRFHHRRDAAGAAVVTTYAS

SEQ ID NO: 8025 - protein, 342 aa, Zea mays subsp. mays
  peptide (1)..(342): Ceres Seq. ID no. 12401936
MAVAVAVAVALLLSSSFGVASAAGRGRPTKKTLKPGEKPSPKSKFFPLSRTKFGHKRNYEASCADEGGPACYVGCPADCPNSCLVFCEYCLSFCQCDIFPGTSCGDPRFTGGDGNTFYFHGSKDQDFCIVSDAGLHINAHFIGNHNPALNRDFTWVQALGVTFVAAGGDHHRLYVGARRAAEWDEDEDHVQVTFDGEPVDVDAARNARWASKALPGLSVRRTKDVNAVTVELDGAFAISAAAVPVTDEDDRVHRYGKTGRDSLVHLDLGFQFHNLTADVDGVLGQTYRPGYVTKLDISAKMPIMGGAPKYLSEGLFSTDCAVSRFHHRRDAAGAAVVTTYAS

SEQ ID NO: 8026 - DNA, 1037 bp, Zea mays subsp. mays
  misc_feature (1)..(1037): Ceres Seq. ID no. 12402421
  misc_feature (1)..(1037): Ortholog of  Ceres SEQ ID NO 14305944 as cited in SEQ ID NO 52294
  misc_feature (1)..(1037): Ortholog of  Ceres SEQ ID NO 14307370 as cited in SEQ ID NO 54127
  misc_feature (1)..(1037): Ortholog of  Ceres SEQ ID NO 13596338 as cited in SEQ ID NO 68005
  misc_feature (1)..(1037): Ortholog of  Ceres SEQ ID NO 14302128 as cited in SEQ ID NO 0
  misc_feature (1)..(1037): Ortholog of  Ceres SEQ ID NO 15179357 as cited in SEQ ID NO 0
gtaaaaacgtgtagtgcaggaggaggggtgggagaagaagaagaaatcaactgggggctgccggacgacaaccactacggcaaggcagtagagatacggcgtctcctcttctgacttggccagcgcaacggcagctagttcaattgaaccagagcgctttatagatagaacaaaaatatatactgtagaaatccatcgagaaacaaccgagaagacctgcggctgcggtgaagagagaactcagtggtgaagaagagggaaaaatcaccatgctggaccatctcgtcggactgctgaagctgcgcgtggtgaggggggtgaacctcgccgtccgcgacctccgatccagcgatccctacgtcgtcgttcgcatcggcaaacagaaattgaagacacgggtggtaaagaagagtgtcaatccggaatgggacgacgaactcaccctctctatcgaagaccctgctgttcctattagactggaagtttttgacaaggacactttcgtcgatgatacaatgggtaatgcagaggtggacatccgcccattagtcgagattgtgaagatgaaactccaggacgttgccgacagaaccgtggtaaagaaactggtgcccaacagacagaactgcctagccgaggagagctcgatatatatatcggaggggaaggtgaagcaagacatggttgtacggctgaggaacgtagagagcggggaaatagagctccagcttcagtggatcgacctccctggctctaagggtgtatgagtggggggcggctatgagctctgccttgccctgctgttttcgcggatctccaactctttttctacttgaaaagaagaactagtggtttgcgtgcgctcgctcgcgtagagctgtcagttgtatgtaagaagttatgattgcgttggcgtttagtaaaatatcgtcagggagatgtatgtgcatgaacatctgagaatcaagactataaaaatgtgtacaatgcatgtactaaaggagtgtttggtttctatagattaatttttagtccct

SEQ ID NO: 8027 - protein, 165 aa, Zea mays subsp. mays
  peptide (1)..(165): Ceres Seq. ID no. 12402422
MLDHLVGLLKLRVVRGVNLAVRDLRSSDPYVVVRIGKQKLKTRVVKKSVNPEWDDELTLSIEDPAVPIRLEVFDKDTFVDDTMGNAEVDIRPLVEIVKMKLQDVADRTVVKKLVPNRQNCLAEESSIYISEGKVKQDMVVRLRNVESGEIELQLQWIDLPGSKGV

SEQ ID NO: 8028 - protein, 83 aa, Zea mays subsp. mays
  peptide (1)..(83): Ceres Seq. ID no. 12402423
MGNAEVDIRPLVEIVKMKLQDVADRTVVKKLVPNRQNCLAEESSIYISEGKVKQDMVVRLRNVESGEIELQLQWIDLPGSKGV

SEQ ID NO: 8029 - DNA, 782 bp, Zea mays subsp. mays
  misc_feature (1)..(782): Ceres Seq. ID no. 12351274
  misc_feature (1)..(782): Ortholog of  Ceres SEQ ID NO 15170627 as cited in SEQ ID NO 52703
  misc_feature (1)..(782): Ortholog of  Ceres SEQ ID NO 13655124 as cited in SEQ ID NO 62896
  misc_feature (1)..(782): Ortholog of  Ceres SEQ ID NO 13597493 as cited in SEQ ID NO 64613
  misc_feature (1)..(782): Ortholog of  Ceres SEQ ID NO 14313540 as cited in SEQ ID NO 68110
  misc_feature (1)..(782): Ortholog of  Ceres SEQ ID NO 13596175 as cited in SEQ ID NO 68297
atgtgtgtgtccaacagctgagtggcatggacatggaccaaaggcttcagtgcatgtttaagagagtccgggagacctacgacgctgcgacagaaggcatcaagacaaactactatggcataaagcatgtgatcgaagccttgctgcctctgcttcaagcttcctccgatgggaggatcgttaacgtctcctctgagttcggcctgctaaggctgatcaacaacgaggagctaaggcaggagctaaacgacgtggagaagctcaccgaggagaggctggacgaggtgctggccgcgtacctgagagacttcgacgccggcgaggtgggggcgcgcgggtggccggtggacttctcggcctacaaggtggccaaggtggccatgaacgcgtacacgaggatcctagcgaggaggcacccggggctgcgcgtcaactgcgcgcaccccggctacgtgagcaccgacatgaccgtccacaccgggcctctcacgcccgagcaaggcgcggccaacgtcgtgaaggtggcgctgatgccggagggcggcccgaccggcgcgtacttcgcgttgggagaggaggcgtcctttgtgtgacgaaagcaccgtcgtcgttaagttcgtcgttgttcgccaactccctgtcagtcgatttctaaatcgacgtacaatgaaatacatcatcgctgcaaactcacaaatgaaaacagttaagggaaccttttgtagcaaaaaaaaaagtggacagaataatgaataatcatgtcaaatatcgcttgagtatct

SEQ ID NO: 8030 - protein, 196 aa, Zea mays subsp. mays
  peptide (1)..(196): Ceres Seq. ID no. 12351275
VCVQQLSGMDMDQRLQCMFKRVRETYDAATEGIKTNYYGIKHVIEALLPLLQASSDGRIVNVSSEFGLLRLINNEELRQELNDVEKLTEERLDEVLAAYLRDFDAGEVGARGWPVDFSAYKVAKVAMNAYTRILARRHPGLRVNCAHPGYVSTDMTVHTGPLTPEQGAANVVKVALMPEGGPTGAYFALGEEASFV

SEQ ID NO: 8031 - protein, 188 aa, Zea mays subsp. mays
  peptide (1)..(188): Ceres Seq. ID no. 12351276
MDMDQRLQCMFKRVRETYDAATEGIKTNYYGIKHVIEALLPLLQASSDGRIVNVSSEFGLLRLINNEELRQELNDVEKLTEERLDEVLAAYLRDFDAGEVGARGWPVDFSAYKVAKVAMNAYTRILARRHPGLRVNCAHPGYVSTDMTVHTGPLTPEQGAANVVKVALMPEGGPTGAYFALGEEASFV

SEQ ID NO: 8032 - protein, 186 aa, Zea mays subsp. mays
  peptide (1)..(186): Ceres Seq. ID no. 12351277
MDQRLQCMFKRVRETYDAATEGIKTNYYGIKHVIEALLPLLQASSDGRIVNVSSEFGLLRLINNEELRQELNDVEKLTEERLDEVLAAYLRDFDAGEVGARGWPVDFSAYKVAKVAMNAYTRILARRHPGLRVNCAHPGYVSTDMTVHTGPLTPEQGAANVVKVALMPEGGPTGAYFALGEEASFV

SEQ ID NO: 8033 - DNA, 1257 bp, Zea mays subsp. mays
  misc_feature (1)..(1257): Ceres Seq. ID no. 12402418
  misc_feature (1)..(1257): Ortholog of  Ceres SEQ ID NO 15173624 as cited in SEQ ID NO 60470
agtcctggctgatccggagcattcactcactgctgctgctcagtgctcgcgtccggctcccaccgctctgcagacgactgcctcctctgtccttccttcccttcccagtggcaggcagaggatctgcagtgcctgccgtccagcgccanccgaccgacccctcctgccgcacagcacagagggaggggggaaacgcaggatcatcagctagcatgggtgcagcagtcaaagaagaagaagttccgcggcgtcaggcagcgccactggggctcctggggtctccgagatcaggcacccgctgctcaagaggagggtgtggctgggcaccttcgagaccgcggaggaggcggcgcgggcgtacgacgaggccgccgtcctcatgagcggccgcaacgccaagaccaacttccccgtactgccctgcggcaggacgcgcggcggcggcggcggcggcggctcgtccggcaacaacaccaacgccagcgccagcaccagcaccagcaacctgtcgcaggtcctcagcgccaagctccgcaggtgctgcaaggcgccgtcgccgtcgctcacctgcctccgcctcgacccggagaggtcccacatcggcgtctggcacaagggcgccggcgcgcgcgccgactccagctgggtcatgaccgtccagctcagcgacaaggacgccgcgccggcgcccagcgccacgtcgtcggccacggccacgacgacgacggctgcctcgcatcctccgcctgccacggtggtggtggtggacgacgaggagaggatcgcgctgcagatgatcgaggagctgctgggcggcggcggcggcccggtctcgcaacaaccgcttgggaatgggatgctccagatcgcggcagcaggcggcggcctcgtcatctgaagaccggctaatgcaacaacggaaattgcattgcatgcatgcatggttcgttcagcaagctacaagtttgatcggccggatcaagtatttggtacacaacaagagtcgtcgaaagtagtgtggttggtgcagaaagcagttaagattgcatcataaatacatatgtatctctattactagctagctacatcagtcaagcttattaggagagagaccatatagtaagtaattaatcttaatcacttcatccctgtgaagctctgtatctattaaaaggcttacttgtatgtatatataagcatacagccctttgtataacatgttatacatgtatcaataatatcaggctatatatatct

SEQ ID NO: 8034 - protein, 172 aa, Zea mays subsp. mays
  peptide (1)..(172): Ceres Seq. ID no. 12402419
MSGRNAKTNFPVLPCGRTRGGGGGGGSSGNNTNASASTSTSNLSQVLSAKLRRCCKAPSPSLTCLRLDPERSHIGVWHKGAGARADSSWVMTVQLSDKDAAPAPSATSSATATTTTAASHPPPATVVVVDDEERIALQMIEELLGGGGGPVSQQPLGNGMLQIAAAGGGLVI

SEQ ID NO: 8035 - protein, 126 aa, Zea mays subsp. mays
  peptide (1)..(126): Ceres Seq. ID no. 12402420
  misc_feature (49)..(49): Xaa is any aa, unknown or other
SWLIRSIHSLLLLSARVRLPPLCRRLPPLSFLPFPVAGRGSAVPAVQRXPTDPSCRTAQREGGNAGSSASMGAAVKEEEVPRRQAAPLGLLGSPRSGTRCSRGGCGWAPSRPRRRRRGRTTRPPSS

SEQ ID NO: 8036 - DNA, 1031 bp, Zea mays subsp. mays
  misc_feature (1)..(1031): Ceres Seq. ID no. 12340881
  misc_feature (1)..(1031): Ortholog of  Ceres SEQ ID NO 13638917 as cited in SEQ ID NO 56018
  misc_feature (1)..(1031): Ortholog of  Ceres SEQ ID NO 13663116 as cited in SEQ ID NO 60731
  misc_feature (1)..(1031): Ortholog of  Ceres SEQ ID NO 14316029 as cited in SEQ ID NO 67234
atctctatctcatcgtcatcattagaaaggccgaagccttctccgttcctcctcgacgcgtctcttccacagccgcaacctctatccctcgtctggtatcgtctctcccacacccctctgccccaacccagaaaaaccctcgaaaagcggcggcggcgcgacatggcggaggtcgaggctccagctgctgcggttgcggcggcgacccctgaggtggcgacggtgaccgagggcggagccgctacggaggcgaagggtccgcataagctgcaccgccagtggaccttctggtacgacatccagtccaagcccaagcccggcgctgcgtggggcacctccctcaaaaaggcgtacaccttcgacaccgtcgaggagttttggggcttgtatgatcatgttttccgtccaagcaagttgcctggaactgctgattttcacctattcaaggctggagtagagccaaaatgggaagacccagagtgtgcaaatggtggtaaatggactgtcccatgcaacagaaagccaacctttgagaccatgtggcttgaaacgttgatggctcttgttggggatcagtttgatgaaacagatgacatttgtggaattgttgctagtgtccgtccaagaggagataagcttgcattgtggactaggactgccagcaatgaagctgtccaggtaaacattggcaagaaatggaaggatgtcatcgactacaatgacaagatcatctacactttccatgacgactcgagaagggataagccaagcagaggtggacggtacaccgtgtaagtcgcacacgaagatggtcgttgttcggactggacagaggctgagagtggagttttgtgctgagatcggcaccagctttcatttaatacagcctcagcttacctgaggcaattttcgcacctgttatgatgttgttttgctctcagataggtttatgtagcacaagaaagatatgttggagacgttgacgattttgtatgcaactaaatttctatcttaatatgccccgattcaac

SEQ ID NO: 8037 - protein, 264 aa, Zea mays subsp. mays
  peptide (1)..(264): Ceres Seq. ID no. 12340882
ISISSSSLERPKPSPFLLDASLPQPQPLSLVWYRLSHTPLPQPRKTLEKRRRRDMAEVEAPAAAVAAATPEVATVTEGGAATEAKGPHKLHRQWTFWYDIQSKPKPGAAWGTSLKKAYTFDTVEEFWGLYDHVFRPSKLPGTADFHLFKAGVEPKWEDPECANGGKWTVPCNRKPTFETMWLETLMALVGDQFDETDDICGIVASVRPRGDKLALWTRTASNEAVQVNIGKKWKDVIDYNDKIIYTFHDDSRRDKPSRGGRYTV

SEQ ID NO: 8038 - protein, 210 aa, Zea mays subsp. mays
  peptide (1)..(210): Ceres Seq. ID no. 12340883
MAEVEAPAAAVAAATPEVATVTEGGAATEAKGPHKLHRQWTFWYDIQSKPKPGAAWGTSLKKAYTFDTVEEFWGLYDHVFRPSKLPGTADFHLFKAGVEPKWEDPECANGGKWTVPCNRKPTFETMWLETLMALVGDQFDETDDICGIVASVRPRGDKLALWTRTASNEAVQVNIGKKWKDVIDYNDKIIYTFHDDSRRDKPSRGGRYTV

SEQ ID NO: 8039 - DNA, 1958 bp, Zea mays subsp. mays
  misc_feature (1)..(1958): Ceres Seq. ID no. 13492276
  misc_feature (1)..(1958): Ortholog of  Ceres SEQ ID NO 13532807 as cited in SEQ ID NO 53012
  misc_feature (1)..(1958): Ortholog of  Ceres SEQ ID NO 15176375 as cited in SEQ ID NO 53238
  misc_feature (1)..(1958): Ortholog of  Ceres SEQ ID NO 15170532 as cited in SEQ ID NO 55671
  misc_feature (1)..(1958): Ortholog of  Ceres SEQ ID NO 14316507 as cited in SEQ ID NO 57397
  misc_feature (1)..(1958): Ortholog of  Ceres SEQ ID NO 13663060 as cited in SEQ ID NO 60964
  misc_feature (1)..(1958): Ortholog of  Ceres SEQ ID NO 13598532 as cited in SEQ ID NO 65204
  misc_feature (1)..(1958): Ortholog of  Ceres SEQ ID NO 13656849 as cited in SEQ ID NO 65764
  misc_feature (1)..(1958): Ortholog of  Ceres SEQ ID NO 13500573 as cited in SEQ ID NO 67431
  misc_feature (1)..(1958): Ortholog of  Ceres SEQ ID NO 13656501 as cited in SEQ ID NO 69206
aaaccaaaatcatttcatccccggaaccggacgccgaacggcagtgctgcaaaagtccggacaaagctcgcgccgcccaccgcacccgatccgcctcgcccaggcgtgctgccgtccgctcccttctcccgcgccgtcgcctccgcctacgcccgggccgacccgctggacccagcgtgcgccgctccactcggacgcgccgccgccctctcgggttgaggcggaggtgcttggggacccgcccccatggcgagcgccggcaacagcggcagcggggacgacgatgcaggagggaagctcctggcggatcgctaccagaagggcgaggtcctcggcgagggcacgtatggagtcgtcttcaaggccatcgacaccaagactggaaatacagtcgcggtaaagcgaatccggataggaaaggacaagaaggaaggtgtcaacttcactgcgttgagggaaattaaactacttaaggagctgaaagatcctaatattatagagctgattgattgtttcccttacaaggaaaatttgcaccttgtgtttgagtttatggagaccgatctggaagctctcataaaagataagaacataatactctctccagctgacacaaaatcatatgtccagatgatgttaaaaggtctagcgttctgccataagaaatgggtgctacacagggatatgaaaccaaataatttactcattggtgccgatgggcagctcaagcttgctgacttcggtctggcccgtgtgttcgggagtccaggaaggaacttcactcaccaggtctttgcacgttggtaccgggcaccagaattattatttggctcgaagcagtacggatctggggtggatatttgggccgctggatgtatttttgctgaactgcttactcgcagagcctttctccagggttctagtgacattgatcaacttgggaagattttcgcagcacttgggaccccaaaatcttctcaatggcctgacatggtttatcttcctgattatgttgaataccaatatgttgctgcacctccactacgtacgttgtttccaatggccagcgatgatgctttggatcttctgtcaaaaatgcttacctatgatccaaaagcaagaatcagtgctcagcaggctctagaacacaggtacttttcatcgttacctgcaccaacaagaccatcgcagcttccaaggccacgtcggaaaggagatcaagggaataacaagattcctgatctcaacctgcaggatggccctatggtgctctccccgccaagaaagttacgtagggtgacagcgcatgaagggatggaaggtatgcacaggacagataaagtggacgaacatccttctgggatgaggcacaccgatgacatgcccagtcagagttctagaattccaatgtcagttgatgttggggctgtgtttggcacacgacctgcacctaggccaacattgaacagtgcggacaagtctcgtttaaaacggaaacttgatatggatccagagtttggatacgcggagtagaaggaacacatgtttacatgcaccattcttttcttattggggatgttgatttttaaaataagattctgacacaatcaactgagatgttaccgtcatcgcctcacgaagaggaaaactgaagagagattattctaatttatcccgagtcacatagggtattacagctaaccaattccgtaaggcaggctcttgaaaacagtagactcaatgggatattcattagtggagagtgttatggggaattggaggatggaaaagcttgctccatgcgtgtttgtacgtgttttgccaagattgtgctgaagcatctgatctatctactgattctctattttccgtactgtcaattcccgttcttgtatggacagagctttgagcatgttttcagtcagacaccttaggcagtgattcttattgtacaactc

SEQ ID NO: 8040 - protein, 428 aa, Zea mays subsp. mays
  peptide (1)..(428): Ceres Seq. ID no. 13492277
MASAGNSGSGDDDAGGKLLADRYQKGEVLGEGTYGVVFKAIDTKTGNTVAVKRIRIGKDKKEGVNFTALREIKLLKELKDPNIIELIDCFPYKENLHLVFEFMETDLEALIKDKNIILSPADTKSYVQMMLKGLAFCHKKWVLHRDMKPNNLLIGADGQLKLADFGLARVFGSPGRNFTHQVFARWYRAPELLFGSKQYGSGVDIWAAGCIFAELLTRRAFLQGSSDIDQLGKIFAALGTPKSSQWPDMVYLPDYVEYQYVAAPPLRTLFPMASDDALDLLSKMLTYDPKARISAQQALEHRYFSSLPAPTRPSQLPRPRRKGDQGNNKIPDLNLQDGPMVLSPPRKLRRVTAHEGMEGMHRTDKVDEHPSGMRHTDDMPSQSSRIPMSVDVGAVFGTRPAPRPTLNSADKSRLKRKLDMDPEFGYAE

SEQ ID NO: 8041 - protein, 326 aa, Zea mays subsp. mays
  peptide (1)..(326): Ceres Seq. ID no. 13492278
METDLEALIKDKNIILSPADTKSYVQMMLKGLAFCHKKWVLHRDMKPNNLLIGADGQLKLADFGLARVFGSPGRNFTHQVFARWYRAPELLFGSKQYGSGVDIWAAGCIFAELLTRRAFLQGSSDIDQLGKIFAALGTPKSSQWPDMVYLPDYVEYQYVAAPPLRTLFPMASDDALDLLSKMLTYDPKARISAQQALEHRYFSSLPAPTRPSQLPRPRRKGDQGNNKIPDLNLQDGPMVLSPPRKLRRVTAHEGMEGMHRTDKVDEHPSGMRHTDDMPSQSSRIPMSVDVGAVFGTRPAPRPTLNSADKSRLKRKLDMDPEFGYAE

SEQ ID NO: 8042 - protein, 300 aa, Zea mays subsp. mays
  peptide (1)..(300): Ceres Seq. ID no. 13492279
MMLKGLAFCHKKWVLHRDMKPNNLLIGADGQLKLADFGLARVFGSPGRNFTHQVFARWYRAPELLFGSKQYGSGVDIWAAGCIFAELLTRRAFLQGSSDIDQLGKIFAALGTPKSSQWPDMVYLPDYVEYQYVAAPPLRTLFPMASDDALDLLSKMLTYDPKARISAQQALEHRYFSSLPAPTRPSQLPRPRRKGDQGNNKIPDLNLQDGPMVLSPPRKLRRVTAHEGMEGMHRTDKVDEHPSGMRHTDDMPSQSSRIPMSVDVGAVFGTRPAPRPTLNSADKSRLKRKLDMDPEFGYAE

SEQ ID NO: 8043 - DNA, 1285 bp, Zea mays subsp. mays
  misc_feature (1)..(1285): Ceres Seq. ID no. 12408603
  misc_feature (1)..(1285): Ortholog of  Ceres SEQ ID NO 14311671 as cited in SEQ ID NO 51251
  misc_feature (1)..(1285): Ortholog of  Ceres SEQ ID NO 14304791 as cited in SEQ ID NO 53562
  misc_feature (1)..(1285): Ortholog of  Ceres SEQ ID NO 14307355 as cited in SEQ ID NO 54610
  misc_feature (1)..(1285): Ortholog of  Ceres SEQ ID NO 13594298 as cited in SEQ ID NO 57803
  misc_feature (1)..(1285): Ortholog of  Ceres SEQ ID NO 13503476 as cited in SEQ ID NO 61978
  misc_feature (1)..(1285): Ortholog of  Ceres SEQ ID NO 12578438 as cited in SEQ ID NO 62201
  misc_feature (1)..(1285): Ortholog of  Ceres SEQ ID NO 12617675 as cited in SEQ ID NO 64656
aactagacggaccagaggacgctgccacactatagatcccgtgcttggctgtacaagaacaaccgcactgatgctaccgaccactggtgtccgattaagcagctcatttctaagaagccgacccaggccagccgatatcgagcaccaacgacacaccccattgacgtacagctatgatgcggccgacgtcgacccttgctatggtcgtgccgtcgctcgctgtagccatcctctgcatcctagtccggtccgcctccgcggagttctggctcgacgagttcaccacggacggcgacgtccgcagagactacgaccgttctggccggcaggtggcgtcgcttgtcctcgaccagcgttctggcgctggcttcaactccacgcgcaagtacctcttcggcgagttcagcgtggagatgaagctcgtcggcggcaactccgctgggactgtcacctccttctacctgacgtccggcgagggcgacgagcacgacgagatcgacatggagttcatgggcaactccagcggctccccgacggtgctcaacacgaacgtgtgggccaacggcgacggcaagaaggagcaccagttctacctgtggttcgacccggccgccgacttccacaaatacaagatcgtctggaacgacaagaacatcatcttccaggtggacgacgtgacggtgcgcgtcttcaagcgctacgatgacctgccgtacccggacgccaagcccatggcggtgcacgccacgctgtgggacggcagctactgggccacgcgcaagggcgaggtcaagatcgactggtccagcgcgcccttcgtcgtctcctaccgagactacaccgccaacgcctgcgccgtcgacggccggaacggcggcggcagctcgtcgtgccccgccggtgccaacgagtggatggacaggcagtccgacgacaccgaccgtctcaccgtggcttgggcgcgccggaactgcttgcagtacaactactgcgatgacgggtggcgcttcccgcaggggttccccggagagtgcgcccgcaactgatccaccatctgccctgcagtcgcgagtctccaagtctcgccggcctcatcgcatcctcttaccgcagatataggcatactagatcgagttcattcttggattttatgttcttgtaattgtcttattgtacgtacgtacatcgtctcttccgactcacaaagagcccagcagcgtgcgtcctggatctggatgcatatcgaaggtactagttctgtgacttctaaaagatctttttttct

SEQ ID NO: 8044 - protein, 290 aa, Zea mays subsp. mays
  peptide (1)..(290): Ceres Seq. ID no. 12408604
MMRPTSTLAMVVPSLAVAILCILVRSASAEFWLDEFTTDGDVRRDYDRSGRQVASLVLDQRSGAGFNSTRKYLFGEFSVEMKLVGGNSAGTVTSFYLTSGEGDEHDEIDMEFMGNSSGSPTVLNTNVWANGDGKKEHQFYLWFDPAADFHKYKIVWNDKNIIFQVDDVTVRVFKRYDDLPYPDAKPMAVHATLWDGSYWATRKGEVKIDWSSAPFVVSYRDYTANACAVDGRNGGGSSSCPAGANEWMDRQSDDTDRLTVAWARRNCLQYNYCDDGWRFPQGFPGECARN

SEQ ID NO: 8045 - protein, 289 aa, Zea mays subsp. mays
  peptide (1)..(289): Ceres Seq. ID no. 12408605
MRPTSTLAMVVPSLAVAILCILVRSASAEFWLDEFTTDGDVRRDYDRSGRQVASLVLDQRSGAGFNSTRKYLFGEFSVEMKLVGGNSAGTVTSFYLTSGEGDEHDEIDMEFMGNSSGSPTVLNTNVWANGDGKKEHQFYLWFDPAADFHKYKIVWNDKNIIFQVDDVTVRVFKRYDDLPYPDAKPMAVHATLWDGSYWATRKGEVKIDWSSAPFVVSYRDYTANACAVDGRNGGGSSSCPAGANEWMDRQSDDTDRLTVAWARRNCLQYNYCDDGWRFPQGFPGECARN

SEQ ID NO: 8046 - protein, 281 aa, Zea mays subsp. mays
  peptide (1)..(281): Ceres Seq. ID no. 12408606
MVVPSLAVAILCILVRSASAEFWLDEFTTDGDVRRDYDRSGRQVASLVLDQRSGAGFNSTRKYLFGEFSVEMKLVGGNSAGTVTSFYLTSGEGDEHDEIDMEFMGNSSGSPTVLNTNVWANGDGKKEHQFYLWFDPAADFHKYKIVWNDKNIIFQVDDVTVRVFKRYDDLPYPDAKPMAVHATLWDGSYWATRKGEVKIDWSSAPFVVSYRDYTANACAVDGRNGGGSSSCPAGANEWMDRQSDDTDRLTVAWARRNCLQYNYCDDGWRFPQGFPGECARN

SEQ ID NO: 8047 - DNA, 1990 bp, Zea mays subsp. mays
  misc_feature (1)..(1990): Ceres Seq. ID no. 12372870
  misc_feature (1)..(1990): Ortholog of  Ceres SEQ ID NO 15171430 as cited in SEQ ID NO 51500
  misc_feature (1)..(1990): Ortholog of  Ceres SEQ ID NO 14304944 as cited in SEQ ID NO 53041
  misc_feature (1)..(1990): Ortholog of  Ceres SEQ ID NO 15170354 as cited in SEQ ID NO 54190
  misc_feature (1)..(1990): Ortholog of  Ceres SEQ ID NO 14307253 as cited in SEQ ID NO 54783
  misc_feature (1)..(1990): Ortholog of  Ceres SEQ ID NO 15172476 as cited in SEQ ID NO 54945
  misc_feature (1)..(1990): Ortholog of  Ceres SEQ ID NO 13594213 as cited in SEQ ID NO 57038
  misc_feature (1)..(1990): Ortholog of  Ceres SEQ ID NO 14312300 as cited in SEQ ID NO 58632
  misc_feature (1)..(1990): Ortholog of  Ceres SEQ ID NO 15176106 as cited in SEQ ID NO 60324
  misc_feature (1)..(1990): Ortholog of  Ceres SEQ ID NO 13654989 as cited in SEQ ID NO 63117
  misc_feature (1)..(1990): Ortholog of  Ceres SEQ ID NO 13584744 as cited in SEQ ID NO 69137
gttccaggtcgtggtctttgccaaattcccacgcccctgcccaccctgcccgaatcctctcgccctttacccccgcccgcgaccccattcacactctcgctgctccactccgctccgctcagctcgtcgggacgcgcccccgcctcccatcccatgcccgcccccgcgctcgtcggaggccgctcgcggcggcctcccatcccgccgcgctgacgagagggcctctcggtgggggcgcttcgggtgttcattttgtccgttcggggaaggggagtgcggcgatggggaagcagcaggaggggaagcggcggcgcggggagaaggacgggcagcggaaggggagggggaagacagctgcagcggcggtgccggaggacgcggcgccagtggccgggtgctggatccgcttcccgcgcctccgcggctgcatgccgtcgcgcgccaaggtcgactcctccaccagcgcgcgtggcggcggccgggaaaccaaaccatctactgatgatgcttgccaggaccaatcagtaccaccagcctctggttccgcaacaaccagtaacactggaagtatctcaccttcttccatagttggagaggagctaaaactagctttccaactgcgtagatttacttttagtgaactgaaatgtgccacgagaaacttccgacctgagagtcttcttggcgagggaggttttggctgtgtctttaaaggatggattgaggagaatggaactgctcctgttaagccaggcaccggattaactgttgctgtcaagacactcaaccatgatgggttgcaggggcataaagagtgggtggcagaagttgattttcttggaaaccttcagcatccacatctagtgaaattggttggctactgcattgaagatgaccagaggttgcttgtgtatgaatttatgccccgtggaagtttggagaatcatctttttagaaagtcattgcctctaccatgggccattagaatgaaaattgctcttggtgctgcgaaaagcctcgcttttcttcatgaagaagctgaaagaccagtaatctatcgggacttcaaaacctccaatattcttttagatgcggactataacgcaaaactctctgattttggacttgctaaagatggccctgagggtgataaaacacatgtgtcaactagggtcatgggaacatatggatatgctgcacctgaatatgtaatgacaggtcacctgacatcgaagagtgacgtatatagctttggagttgtactactagagatgatgactggtagaaggtcaatggacaagaacaggccaaacggagaacacaacctggttgaatgggcacgcccttatctgggagaaagacgcagattctataagcttgtagaccctcgtttggatgggaacttctccataaaaggcgcccagaagacggctcagctggcccatgcctgcctcagccgtgaccccaaggctaggcctctgatgagccaggtggtggaggtgctgaagcctctccagaacctcaaggacatggccagctcttcctactacttccagtccatgcaacatgagcggcgcacagcacttgccaacccatatggcagtcaaagcatgaaagcgcagagcacctttgcgcggaacgggcagcagcccatgaggagcctctcgtatggccctcatgcttccccgtatcgccagtcgccaaggcttgacagcaagcggcaatgagtcatggtgcttgtctgtcgaccataacatattttcaagactgaagttgtaaccagaactggtgtatgaactcagccatccaacaagcatctgagctatctattattgtggatgaagcagcaacattgattcgaatttgcatatcatctgcgagtgaatttttttctctcttgttatcgcttacattttagctgtactgtctttacggctctagataccttgacttgaaaggtggaactaaacagggttttgatcggtctttg

SEQ ID NO: 8048 - protein, 574 aa, Zea mays subsp. mays
  peptide (1)..(574): Ceres Seq. ID no. 12372871
SRSWSLPNSHAPAHPARILSPFTPARDPIHTLAAPLRSAQLVGTRPRLPSHARPRARRRPLAAASHPAALTRGPLGGGASGVHFVRSGKGSAAMGKQQEGKRRRGEKDGQRKGRGKTAAAAVPEDAAPVAGCWIRFPRLRGCMPSRAKVDSSTSARGGGRETKPSTDDACQDQSVPPASGSATTSNTGSISPSSIVGEELKLAFQLRRFTFSELKCATRNFRPESLLGEGGFGCVFKGWIEENGTAPVKPGTGLTVAVKTLNHDGLQGHKEWVAEVDFLGNLQHPHLVKLVGYCIEDDQRLLVYEFMPRGSLENHLFRKSLPLPWAIRMKIALGAAKSLAFLHEEAERPVIYRDFKTSNILLDADYNAKLSDFGLAKDGPEGDKTHVSTRVMGTYGYAAPEYVMTGHLTSKSDVYSFGVVLLEMMTGRRSMDKNRPNGEHNLVEWARPYLGERRRFYKLVDPRLDGNFSIKGAQKTAQLAHACLSRDPKARPLMSQVVEVLKPLQNLKDMASSSYYFQSMQHERRTALANPYGSQSMKAQSTFARNGQQPMRSLSYGPHASPYRQSPRLDSKRQ

SEQ ID NO: 8049 - protein, 481 aa, Zea mays subsp. mays
  peptide (1)..(481): Ceres Seq. ID no. 12372872
MGKQQEGKRRRGEKDGQRKGRGKTAAAAVPEDAAPVAGCWIRFPRLRGCMPSRAKVDSSTSARGGGRETKPSTDDACQDQSVPPASGSATTSNTGSISPSSIVGEELKLAFQLRRFTFSELKCATRNFRPESLLGEGGFGCVFKGWIEENGTAPVKPGTGLTVAVKTLNHDGLQGHKEWVAEVDFLGNLQHPHLVKLVGYCIEDDQRLLVYEFMPRGSLENHLFRKSLPLPWAIRMKIALGAAKSLAFLHEEAERPVIYRDFKTSNILLDADYNAKLSDFGLAKDGPEGDKTHVSTRVMGTYGYAAPEYVMTGHLTSKSDVYSFGVVLLEMMTGRRSMDKNRPNGEHNLVEWARPYLGERRRFYKLVDPRLDGNFSIKGAQKTAQLAHACLSRDPKARPLMSQVVEVLKPLQNLKDMASSSYYFQSMQHERRTALANPYGSQSMKAQSTFARNGQQPMRSLSYGPHASPYRQSPRLDSKRQ

SEQ ID NO: 8050 - protein, 432 aa, Zea mays subsp. mays
  peptide (1)..(432): Ceres Seq. ID no. 12372873
MPSRAKVDSSTSARGGGRETKPSTDDACQDQSVPPASGSATTSNTGSISPSSIVGEELKLAFQLRRFTFSELKCATRNFRPESLLGEGGFGCVFKGWIEENGTAPVKPGTGLTVAVKTLNHDGLQGHKEWVAEVDFLGNLQHPHLVKLVGYCIEDDQRLLVYEFMPRGSLENHLFRKSLPLPWAIRMKIALGAAKSLAFLHEEAERPVIYRDFKTSNILLDADYNAKLSDFGLAKDGPEGDKTHVSTRVMGTYGYAAPEYVMTGHLTSKSDVYSFGVVLLEMMTGRRSMDKNRPNGEHNLVEWARPYLGERRRFYKLVDPRLDGNFSIKGAQKTAQLAHACLSRDPKARPLMSQVVEVLKPLQNLKDMASSSYYFQSMQHERRTALANPYGSQSMKAQSTFARNGQQPMRSLSYGPHASPYRQSPRLDSKRQ

SEQ ID NO: 8051 - DNA, 750 bp, Zea mays subsp. mays
  misc_feature (1)..(750): Ceres Seq. ID no. 12356564
  misc_feature (1)..(750): Ortholog of  Ceres SEQ ID NO 12783998 as cited in SEQ ID NO 61535
  misc_feature (1)..(750): Ortholog of  Ceres SEQ ID NO 15174264 as cited in SEQ ID NO 61877
  misc_feature (1)..(750): Ortholog of  Ceres SEQ ID NO 12616383 as cited in SEQ ID NO 63582
aatcaccaatcagtcagtcacagctcacagcaaacaccgcgaagccgcccccgctcccaaacccgaccgagcaaagcgcaaagccccccaaccgcggatcaatccgcagcatcgatggcgcccaaggcggagaaaaagccggcggcgaagaagcccgcggaggaggagcccgcgaccgagaaggcggagaaggctccggcagggaagaagccgaaggcggagaaacgcctccccgcgggcaagtccggcgccggcgagggcaagaagggcaagaagaaagccaagaagagcgtggagacctacaagatctacatcttcaaggtgctcaagcaggtgcaccccgacatcggcatctcgtccaaggccatgtccatcatgaattccttcatcaacgacatcttcgagaagctcgccgcggaggccgccaagctcgcccgctacaacaagaagcccaccatcacctcccgcgagatccagacctccgtccgcctcgtcctacccggcgagctcgccaagcacgccgtctctgaaggcacaaaggcggtcaccaagttcacttcgtcttagattggttgccttccctctcgtttgtactggtgtctggtagtagatctcatctagttgggggtgctgttgctagtcggtcgtgggtccctttggtatgattggccctgttcaatgggtttgcaagtgattagtttgtacatggttgtagtagatctcgtttcagctgtgattctttattactgc

SEQ ID NO: 8052 - protein, 188 aa, Zea mays subsp. mays
  peptide (1)..(188): Ceres Seq. ID no. 12356565
NHQSVSHSSQQTPRSRPRSQTRPSKAQSPPTADQSAASMAPKAEKKPAAKKPAEEEPATEKAEKAPAGKKPKAEKRLPAGKSGAGEGKKGKKKAKKSVETYKIYIFKVLKQVHPDIGISSKAMSIMNSFINDIFEKLAAEAAKLARYNKKPTITSREIQTSVRLVLPGELAKHAVSEGTKAVTKFTSS

SEQ ID NO: 8053 - protein, 175 aa, Zea mays subsp. mays
  peptide (1)..(175): Ceres Seq. ID no. 12356566
SPISQSQLTANTAKPPPLPNPTEQSAKPPNRGSIRSIDGAQGGEKAGGEEARGGGARDREGGEGSGREEAEGGETPPRGQVRRRRGQEGQEESQEERGDLQDLHLQGAQAGAPRHRHLVQGHVHHEFLHQRHLREARRGGRQARPLQQEAHHHLPRDPDLRPPRPTRRARQARRL

SEQ ID NO: 8054 - protein, 150 aa, Zea mays subsp. mays
  peptide (1)..(150): Ceres Seq. ID no. 12356567
MAPKAEKKPAAKKPAEEEPATEKAEKAPAGKKPKAEKRLPAGKSGAGEGKKGKKKAKKSVETYKIYIFKVLKQVHPDIGISSKAMSIMNSFINDIFEKLAAEAAKLARYNKKPTITSREIQTSVRLVLPGELAKHAVSEGTKAVTKFTSS

SEQ ID NO: 8055 - DNA, 1556 bp, Zea mays subsp. mays
  misc_feature (1)..(1556): Ceres Seq. ID no. 12343265
  misc_feature (1)..(1556): Ortholog of  Ceres SEQ ID NO 15225069 as cited in SEQ ID NO 68012
  misc_feature (1)..(1556): Ortholog of  Ceres SEQ ID NO 15179217 as cited in SEQ ID NO 0
ctaatcgaaaaattctagaattgacgaaggtggctgtgccgagttctccacaccgctggagacttccaggtgcttcaggaaaccgagggggcgttgagataggtaaaaaaaaggaactccggcgaggtcgcccccggtagtggccggtgatgagttcgctcgggctccggctccggcttcggcgacctggagcgaggagttcggagatgcagtcttccagcgctcaagcagttttcgacttcgtctcaccgcttcccgcagactcctgagaggaaatttgtgacaaaaatatctgctctggaaatttgtaatgagattgtgaatggccttctacaatctgactctgctccccttcggttattagatgatcctgagaaatgaaccattgtggagaagttgcaagaagaaattgcttaggacaactaacatctgaggcatccaagcaggatttgtgaagcaacgaacacaacgcgcgccaaggcgcgcataagttactagttcgaaaaacaacaacgacctcgccttcttcacgtacgaggagaagcggaagctcgggtacggcacgcagcgggagcgcctgggaaaggactccatcaagcccttcgacgcctgctgcctctgcctcaagccgctcatcggcccgctctgctgccccaagggccacacattctgtaaggagtgcatcctcgagtgcctcctctaccagaagaaggacatcaagcgcaagctagctgcacatgaggtccagaaaaagcaagagaaggaagaggaagaggagaagctaattctgcagaaggctaaggagttggatgcctttgaccagcagaatcatggacctgttccccagtaccatgatcgcagtggttcgcaagacaagaatggttttcatggagcaaataatgtgaaggtcacttcttttgaagacgaagcccttcgcaatatgaaggcattctggctcccttcagctactcctgaagctacggtcaaggtagacgtgccctccatccacactgtttgcccggaggggcaggagaagctcaagttgaaatcgctcttccctatctcgttcacggaagaaactgctgatcagaagagcagtaaggcagtggaaaaaaagagctacatgtgccctagttgcaagtccactatcacaaataccatgtcccttgtggcggtcagcacctgtggccatgtcttctgcaagaaatgttatgacaagtttctagtgaaggataaagcttgcttggagtgcagcaaaccattcagggagaggaatctggttccattggagaaaggaggaaccgggtttgctgcacatgatgaacgcctagaggcaagatatttcaagcatttgggtagtggctctgggttaggactagtgaagcctgcaccagaaacttactaaccttgaataattatagccgttgttgtattgtttaccttggtgtcatgaaattatataacctagaaatgagaactccatcaagttcccaattgccgctgtaacttctatatacatgtatgcagatgttgattttaggtatctttaagacctt

SEQ ID NO: 8056 - protein, 154 aa, Zea mays subsp. mays
  peptide (1)..(154): Ceres Seq. ID no. 12343266
MKAFWLPSATPEATVKVDVPSIHTVCPEGQEKLKLKSLFPISFTEETADQKSSKAVEKKSYMCPSCKSTITNTMSLVAVSTCGHVFCKKCYDKFLVKDKACLECSKPFRERNLVPLEKGGTGFAAHDERLEARYFKHLGSGSGLGLVKPAPETY

SEQ ID NO: 8057 - protein, 93 aa, Zea mays subsp. mays
  peptide (1)..(93): Ceres Seq. ID no. 12343267
MCPSCKSTITNTMSLVAVSTCGHVFCKKCYDKFLVKDKACLECSKPFRERNLVPLEKGGTGFAAHDERLEARYFKHLGSGSGLGLVKPAPETY

SEQ ID NO: 8058 - protein, 81 aa, Zea mays subsp. mays
  peptide (1)..(81): Ceres Seq. ID no. 12343268
MSLVAVSTCGHVFCKKCYDKFLVKDKACLECSKPFRERNLVPLEKGGTGFAAHDERLEARYFKHLGSGSGLGLVKPAPETY

SEQ ID NO: 8059 - DNA, 620 bp, Zea mays subsp. mays
  misc_feature (1)..(620): Ceres Seq. ID no. 13492231
  misc_feature (1)..(620): Ortholog of  Ceres SEQ ID NO 14314461 as cited in SEQ ID NO 52355
  misc_feature (1)..(620): Ortholog of  Ceres SEQ ID NO 14306812 as cited in SEQ ID NO 56361
  misc_feature (1)..(620): Ortholog of  Ceres SEQ ID NO 15168461 as cited in SEQ ID NO 57068
aagagacaaaacaagttattggggctctaaaggagaagggagtgtctgctgttggagctgcagggtattgctggggtgcaaaggttgttgtggagttggcaaaagctcatgagatccaggctgctgtgctgttgcacccttcttttgttaccgttgacgatatcaaagaggtcaagtgcgcaatttctatcctcggagctgagattgacaaaatgtccccaccggagctaatcaagcagttcgagcaggtcctttctttgaactcaggggttggccacttcgtcaagatcttccctggtgtggcgcatggatggagcgtgagatacaaccacgacgacgcagctgccgtgaagagtgctgaggaagcctttgcggacatgctcgactggttcaacaagaatctgaaataaactctgcaattgcatcctgccttgtaataatgcgtgttccagtgccctgggatcgaatctgctgtgtttgggcttttgcatggtcaggctattcagagttgtcatggacttagggttgtgttagtagattggttgcgctgaatctataataaaaacgaggtaaactaggacaatgatgatgtggccgtgtgtatttaatgtattctgttc

SEQ ID NO: 8060 - protein, 135 aa, Zea mays subsp. mays
  peptide (1)..(135): Ceres Seq. ID no. 13492232
ETKQVIGALKEKGVSAVGAAGYCWGAKVVVELAKAHEIQAAVLLHPSFVTVDDIKEVKCAISILGAEIDKMSPPELIKQFEQVLSLNSGVGHFVKIFPGVAHGWSVRYNHDDAAAVKSAEEAFADMLDWFNKNLK

SEQ ID NO: 8061 - DNA, 1046 bp, Zea mays subsp. mays
  misc_feature (1)..(1046): Ceres Seq. ID no. 12345398
  misc_feature (1)..(1046): Ortholog of  Ceres SEQ ID NO 15172948 as cited in SEQ ID NO 51777
  misc_feature (1)..(1046): Ortholog of  Ceres SEQ ID NO 12784416 as cited in SEQ ID NO 61324
aatcacatttgattcgagccagtcagccagccccggagccctggacagcagcagcgaactcgaggccgctccgccacctcgccactcgcctcttctcgctctcgccaccgggccagggaagggaccatccgatcggctccgtcatggctggagctgctgctctcaatgagggtatcctttcttccgtgtccgagaaaaatgttgctgctcacccatggcatgatttggagataggaccagaggctcctgaagtgttcaattgtgtggttgagattcctagaggcagcaaggttaagtatgagttggacaagatatctggtctgatcaaggtggatcgtgtcctttactcctctgttgtttacccacataactatggtttcattccacgcacactctgtgaggatagcgaccccatggacgtcctcgtactgatgcaggaacaagttgtccctgggtgtttcctgcgagctcgtgctattgggctcatgcctatgatcgatcagggtgagaaagatgataagatcatagctgtctgtgctgatgaccctgaattccgtcactacaaggacatctcggacctccccccgcatcgccttcaagagatccgccgcttttttgaagattataaaaagaatgaaaacaaagaagttgcagtgaatgatttcctcccagccgaagatgccatcaaagcaatcgagcactcgatggacctgtatggctcgtacgtcatggaaagcctgaggaggtgatctgctgctgcttgattgtggatgctacgtaattttctcaacagctcatcgagagtaccgtagtccgtagtacggcaaatgttaacacgcacgaactggaatcatgaccaagggatattaccttctgttcatgctgaaacgatcagcagtttctttctttgcatcatatgccacgtcaaatcaaggcacttgcctctgaaatctttgtggtcaagtcaaaccagcacttcgacagaacgattgatggatgcatgtattactgttacataaatgtccatttgctcaacttcatttctg

SEQ ID NO: 8062 - protein, 248 aa, Zea mays subsp. mays
  peptide (1)..(248): Ceres Seq. ID no. 12345399
SHLIRASQPAPEPWTAAANSRPLRHLATRLFSLSPPGQGRDHPIGSVMAGAAALNEGILSSVSEKNVAAHPWHDLEIGPEAPEVFNCVVEIPRGSKVKYELDKISGLIKVDRVLYSSVVYPHNYGFIPRTLCEDSDPMDVLVLMQEQVVPGCFLRARAIGLMPMIDQGEKDDKIIAVCADDPEFRHYKDISDLPPHRLQEIRRFFEDYKKNENKEVAVNDFLPAEDAIKAIEHSMDLYGSYVMESLRR

SEQ ID NO: 8063 - protein, 201 aa, Zea mays subsp. mays
  peptide (1)..(201): Ceres Seq. ID no. 12345400
MAGAAALNEGILSSVSEKNVAAHPWHDLEIGPEAPEVFNCVVEIPRGSKVKYELDKISGLIKVDRVLYSSVVYPHNYGFIPRTLCEDSDPMDVLVLMQEQVVPGCFLRARAIGLMPMIDQGEKDDKIIAVCADDPEFRHYKDISDLPPHRLQEIRRFFEDYKKNENKEVAVNDFLPAEDAIKAIEHSMDLYGSYVMESLRR

SEQ ID NO: 8064 - DNA, 1415 bp, Zea mays subsp. mays
  misc_feature (1)..(1415): Ceres Seq. ID no. 12406615
  misc_feature (1)..(1415): Ortholog of  Ceres SEQ ID NO 12612333 as cited in SEQ ID NO 56421
agggtgtgcactccgatcctgccctctaataacagcagcagcagccgccatggaaggcagcagcaagaagctccagccgttcctcctcacgctgctgctggtgctctccaccgccgtgacgcccatcctctcgctgtcagtgccagacgacgaggtagcctgcgactgcgacaaacccaaggcgcccaagccgtcgcacccgcccaagaccaagccctcccacccgtcgccgtcgccgaagcccaagaaccccaagccacccaggggcagcaccgggtacccagcgccggggcaccaaccgcccaagagcccctcctaccccccggtcgtcggccctcccaagggccccgtcacgcgcccgccagtcacgcgtccgccggtcgtcggtcctcccaagggccccgtcacgcgcccgccggtcacgcgtccgccggttgtcggaccaccggtgacctacccgccgatcaccggccctccgacgacgccgcctgttgtcggaccaccggtgacctacccgccgatcaccggccctccaacaacgccgcctgttgtcggcccaccggtgacctacccaccgatcactggcccgcccgcgacgaggcgccccggtcaccggtccgcccgtaacctacccacccggcggaggcgggggcagctcgacgccgtgcccgccgccaccgagcccgacgccgacgccgtcgtcgccgacgtgcccggcggactcgctgaagctgggcgcgtgcgtggacctgctgggcgggctggtgcatatcggcctcggcgaccccgtggtgaacaagtgctgcccggtgctggaggggctggtggagctggaggcggccgtgtgcctctgcaccaccatcaagctcaggctcctcaacatcaacctctacctgccactggcgctccagctcctcctcacctgcggcaagacgccgccgccgggctacacctgcaccgtctgatctggactagctggcagcccccggcccatgcgtccatttatccgtgaacatgggttttggagtgagctagcatccagttcatcggtcgtttgaagagagatcgacatgagaggatgtcgtctgcttcgtcgttccaagctgaagaaggcacgccggaggaggaagagagtaacaacggccgggtcgatcagctaacgatggatcgatcattttttccccatatttattgtgttgcgtctgctgtagtttctaattttctagatgtgctttcggtttggtctgtagaccctgcagcttgatttggttaagtttgatttgatgcaagggaaatgggtggcggttgattgctaataattcccgttgatatttgtcatgcgtacgtgaacttgataacaaaatgcatgatgtcttctctttgcgtgatttcgagttgattgtcatcaccatggc

SEQ ID NO: 8065 - protein, 336 aa, Zea mays subsp. mays
  peptide (1)..(336): Ceres Seq. ID no. 12406616
GCALRSCPLITAAAAAMEGSSKKLQPFLLTLLLVLSTAVTPILSLSVPDDEVACDCDKPKAPKPSHPPKTKPSHPSPSPKPKNPKPPRGSTGYPAPGHQPPKSPSYPPVVGPPKGPVTRPPVTRPPVVGPPKGPVTRPPVTRPPVVGPPVTYPPITGPPTTPPVVGPPVTYPPITGPPTTPPVVGPPVTYPPITGPPATRRPGHRSARNLPTRRRRGQLDAVPAATEPDADAVVADVPGGLAEAGRVRGPAGRAGAYRPRRPRGEQVLPGAGGAGGAGGGRVPLHHHQAQAPQHQPLPATGAPAPPHLRQDAAAGLHLHRLIWTSWQPPAHASIYP

SEQ ID NO: 8066 - protein, 320 aa, Zea mays subsp. mays
  peptide (1)..(320): Ceres Seq. ID no. 12406617
MEGSSKKLQPFLLTLLLVLSTAVTPILSLSVPDDEVACDCDKPKAPKPSHPPKTKPSHPSPSPKPKNPKPPRGSTGYPAPGHQPPKSPSYPPVVGPPKGPVTRPPVTRPPVVGPPKGPVTRPPVTRPPVVGPPVTYPPITGPPTTPPVVGPPVTYPPITGPPTTPPVVGPPVTYPPITGPPATRRPGHRSARNLPTRRRRGQLDAVPAATEPDADAVVADVPGGLAEAGRVRGPAGRAGAYRPRRPRGEQVLPGAGGAGGAGGGRVPLHHHQAQAPQHQPLPATGAPAPPHLRQDAAAGLHLHRLIWTSWQPPAHASIYP

SEQ ID NO: 8067 - protein, 208 aa, Zea mays subsp. mays
  peptide (1)..(208): Ceres Seq. ID no. 12406618
RVCTPILPSNNSSSSRHGRQQQEAPAVPPHAAAGALHRRDAHPLAVSARRRGSLRLRQTQGAQAVAPAQDQALPPVAVAEAQEPQATQGQHRVPSAGAPTAQEPLLPPGRRPSQGPRHAPASHASAGRRSSQGPRHAPAGHASAGCRTTGDLPADHRPSDDAACCRTTGDLPADHRPSNNAACCRPTGDLPTDHWPARDEAPRSPVRP

SEQ ID NO: 8068 - DNA, 1277 bp, Zea mays subsp. mays
  misc_feature (1)..(1277): Ceres Seq. ID no. 12402410
  misc_feature (1)..(1277): Ortholog of  Ceres SEQ ID NO 15170760 as cited in SEQ ID NO 52747
  misc_feature (1)..(1277): Ortholog of  Ceres SEQ ID NO 15168549 as cited in SEQ ID NO 56976
  misc_feature (1)..(1277): Ortholog of  Ceres SEQ ID NO 14314335 as cited in SEQ ID NO 57305
  misc_feature (1)..(1277): Ortholog of  Ceres SEQ ID NO 15177588 as cited in SEQ ID NO 60367
gcactcatccattccatcatcccctttgcaagtatagtctctctgctaagcgaannnagcttcaagctagtctcggcggctctagaagacgatgggcaaggacgacgtgatcgagagcggcgctggcggcggcgagttcgctgccaaggactacacggaccctcccccggcgccgctgatcgacgcggcggactgggggtcctggtcgctgtaccgcgccgtgatcgccgagttcatcgccacgctgctgttcctgtacatcacggtggccaccgtgatcgggtacaagcaccagacgnacgcgtcggcgtcgggcgccnacgcggcgtgcggcggcgtgggcgtnctgggcatcgcctgggccttcggcggcatgatcttcgtcctcgtctactgcaccgccggcatctcggggggccacatcaaccccgccgtcaccttcggcctcttcctggcgcggcaaggtctccctggtgcgcgcgctgctctacatcgtggcgcagtgcctcggcgccatctgcggcgtcggcctcgtcaaggcgttccagagcgcctacttcgacaggtacggcggcggcgccaactcgctcgcctccggctactcccgcggcaccggcctcggcgccgagatcatcggcaccttcgtgctcgtctacaccgtcttctccgccaccgaccccaagcgcaacgcccgcgactcccacgtcccggttctggctcccctccccatcggcttcgccgtgttcatggtgcacctggccaccatccccgtcaccggcaccggcatcaacccggccaggagcctgggcgccgccgtcatctacaacaaggacaagccctgggacgaccactggatcttctgggtgggccctctcgtgggcgctgccatcgcggccttctaccaccagtacatcctccgggctggcgccatcaaggccctcggctccttcaggagcaacgcgtgatgagcggggcttggctgtggagcaatggcgggcgacctacgggcggggggccgtgagcgaggagaatgccatcattcatcgatcgacttgggtgccggtggttggttcgggtcgcctttttttttgtttcagcagctgctgcgttgcgcgcgtgcgtgagatttggtttggtttcgttcccctgcaatgtaatcatgtcgtgactctcaagggattattccgctctgctcttatggtctctgttttctatttaatgattgttattaccatgtagcagtaaccatcgtcatcagtgagaaccttgttgcttct

SEQ ID NO: 8069 - protein, 412 aa, Zea mays subsp. mays
  peptide (1)..(412): Ceres Seq. ID no. 12402411
  misc_feature (19)..(19): Xaa is any aa, unknown or other
  misc_feature (100)..(100): Xaa is any aa, unknown or other
  misc_feature (107)..(107): Xaa is any aa, unknown or other
  misc_feature (116)..(116): Xaa is any aa, unknown or other
ALIHSIIPFASIVSLLSEXSFKLVSAALEDDGQGRRDRERRWRRRVRCQGLHGPSPGAADRRGGLGVLVAVPRRDRRVHRHAAVPVHHGGHRDRVQAPDXRVGVGRXRGVRRRGRXGHRLGLRRHDLRPRLLHRRHLGGPHQPRRHLRPLPGAARSPWCARCSTSWRSASAPSAASASSRRSRAPTSTGTAAAPTRSPPATPAAPASAPRSSAPSCSSTPSSPPPTPSATPATPTSRFWLPSPSASPCSWCTWPPSPSPAPASTRPGAWAPPSSTTRTSPGTTTGSSGWALSWALPSRPSTTSTSSGLAPSRPSAPSGATRDERGLAVEQWRATYGRGAVSEENAIIHRSTWVPVVGSGRLFFCFSSCCVARVREIWFGFVPLQCNHVVTLKGLFRSALMVSVFYLMIVITM

SEQ ID NO: 8070 - protein, 309 aa, Zea mays subsp. mays
  peptide (1)..(309): Ceres Seq. ID no. 12402412
  misc_feature (70)..(70): Xaa is any aa, unknown or other
  misc_feature (77)..(77): Xaa is any aa, unknown or other
  misc_feature (85)..(85): Xaa is any aa, unknown or other
MGKDDVIESGAGGGEFAAKDYTDPPPAPLIDAADWGSWSLYRAVIAEFIATLLFLYITVATVIGYKHQTXASASGAXAACGGVGXLGIAWAFGGMIFVLVYCTAGISGGHINPAVTFGLFLARQGLPGARAALHRGAVPRRHLRRRPRQGVPERLLRQVRRRRQLARLRLLPRHRPRRRDHRHLRARLHRLLRHRPQAQRPRLPRPGSGSPPHRLRRVHGAPGHHPRHRHRHQPGQEPGRRRHLQQGQALGRPLDLLGGPSRGRCHRGLLPPVHPPGWRHQGPRLLQEQRVMSGAWLWSNGGRPTGGGP

SEQ ID NO: 8071 - protein, 215 aa, Zea mays subsp. mays
  peptide (1)..(215): Ceres Seq. ID no. 12402413
MIFVLVYCTAGISGGHINPAVTFGLFLARQGLPGARAALHRGAVPRRHLRRRPRQGVPERLLRQVRRRRQLARLRLLPRHRPRRRDHRHLRARLHRLLRHRPQAQRPRLPRPGSGSPPHRLRRVHGAPGHHPRHRHRHQPGQEPGRRRHLQQGQALGRPLDLLGGPSRGRCHRGLLPPVHPPGWRHQGPRLLQEQRVMSGAWLWSNGGRPTGGGP

SEQ ID NO: 8072 - DNA, 1622 bp, Zea mays subsp. mays
  misc_feature (1)..(1622): Ceres Seq. ID no. 12384174
  misc_feature (1)..(1622): Ortholog of  Ceres SEQ ID NO 14312212 as cited in SEQ ID NO 54399
  misc_feature (1)..(1622): Ortholog of  Ceres SEQ ID NO 15225341 as cited in SEQ ID NO 55222
  misc_feature (1)..(1622): Ortholog of  Ceres SEQ ID NO 14311755 as cited in SEQ ID NO 57271
  misc_feature (1)..(1622): Ortholog of  Ceres SEQ ID NO 15171156 as cited in SEQ ID NO 58259
  misc_feature (1)..(1622): Ortholog of  Ceres SEQ ID NO 14302212 as cited in SEQ ID NO 66507
  misc_feature (1)..(1622): Ortholog of  Ceres SEQ ID NO 13653980 as cited in SEQ ID NO 69253
attcccatcagagaagagataaccacacgtccacacaccacagaccacacgcacggtacagcctctccgcagctgcaggtgcctgctgttctccgacgagaccccaagaactcgccaacctatcccaattcccagccacccttccctctttcacaatgctggcctccgccgccaccgtcaagccctccaccgccgcggccgcggccacctgcaaggcggccttcaagccgctccacctccctcccctccccgccgccgccggcctcaggccgctctccctctccgtctccgcgcgcccgctgtaccgtcaggagcatgtcctggcatccgtggcggtggcggcggctgggcgcaacgaacgcgccacgtcccccgcgccgccgtccgccaccgctgacggcgcccggccgctggaggtcgccgcgccggcggagacgggtcggcgcgccaagatcggggtctacttccacgtggtgggcgctgaacgttatcttcaacatctacaacaagaaggtcctcaacgcgttcccgtacccgtggctcacgtcgacgctctccctcgccgccggctccgccatcatgctcgcgtcctgggccaccaggatcgccgaggcgccccagacggacctcgatttctggaaggcgctgactcccgttgcgatcgcgcacacgatcgggcacgtggcggcgacggtgagcatggccaaggtggccgtgtcgttcacgcacatcatcaagagcggggagccggcattcagcgtgctcgtctccaggttcttcctcggcgagcacttcccggcgccggtctacttctccctcctccccatcatcggcggatgcgcgctcgccgccgtcaccgagctcaacttcaacatggttggattcatgggggcaatgatctccaacctggcattcgtcgtccggaccatcttctccaagaaggggatgaagggcaagtccgtgagcgggatgaactactacgcctgcctctccatcatgtcgctggtgatcctcctgcccttcgccgtcgccatggaggggcccaaggtgtgggcagcgggctggcagacagcagtcgccgagatcggtcccaacttcgtctggtgggtggcggcgcagagcgtgttctaccacctgtacaaccaggtgtcctacatgtccctggacgagatctcgcccctcaccttctccatcggcaacaccatgaagcgcatctccgtcatcgtcgcgtccatcatcatcttccagacgcccgtccagcccatcaacgcgctcggggccgccatcgccatcctcggaaccttcatctactcccaggccaagcagtagccgcccttggcgcgcgcgtctggctctcaggcctcagttcagttcaccgccgaatcagctcggcgctcgaagatataacagattatataacttttgaggatatctacctagcttgtataatagtattattactagatcctctcttctttttttcgtattttcttttttcctaggactagcttattactagatcatttcgtcgtcgtgttttcactatgactatgatggcgtagagagagagagagagatggatccatctaaataaaaaaaaaggtaccggatcttgttttgtt

SEQ ID NO: 8073 - protein, 499 aa, Zea mays subsp. mays
  peptide (1)..(499): Ceres Seq. ID no. 12384175
SHQRRDNHTSTHHRPHARYSLSAAAGACCSPTRPQELANLSQFPATLPSFTMLASAATVKPSTAAAAATCKAAFKPLHLPPLPAAAGLRPLSLSVSARPLYRQEHVLASVAVAAAGRNERATSPAPPSATADGARPLEVAAPAETGRRAKIGVYFHVVGAERYLQHLQQEGPQRVPVPVAHVDALPRRRLRHHARVLGHQDRRGAPDGPRFLEGADSRCDRAHDRARGGDGEHGQGGRVVHAHHQERGAGIQRARLQVLPRRALPGAGLLLPPPHHRRMRARRRHRAQLQHGWIHGGNDLQPGIRRPDHLLQEGDEGQVRERDELLRLPLHHVAGDPPALRRRHGGAQGVGSGLADSSRRDRSQLRLVGGGAERVLPPVQPGVLHVPGRDLAPHLLHRQHHEAHLRHRRVHHHLPDARPAHQRARGRHRHPRNLHLLPGQAVAALGARVWLSGLSSVHRRISSALEDITDYITFEDIYLACIIVLLLDPLFFFSYFLFS

SEQ ID NO: 8074 - protein, 448 aa, Zea mays subsp. mays
  peptide (1)..(448): Ceres Seq. ID no. 12384176
MLASAATVKPSTAAAAATCKAAFKPLHLPPLPAAAGLRPLSLSVSARPLYRQEHVLASVAVAAAGRNERATSPAPPSATADGARPLEVAAPAETGRRAKIGVYFHVVGAERYLQHLQQEGPQRVPVPVAHVDALPRRRLRHHARVLGHQDRRGAPDGPRFLEGADSRCDRAHDRARGGDGEHGQGGRVVHAHHQERGAGIQRARLQVLPRRALPGAGLLLPPPHHRRMRARRRHRAQLQHGWIHGGNDLQPGIRRPDHLLQEGDEGQVRERDELLRLPLHHVAGDPPALRRRHGGAQGVGSGLADSSRRDRSQLRLVGGGAERVLPPVQPGVLHVPGRDLAPHLLHRQHHEAHLRHRRVHHHLPDARPAHQRARGRHRHPRNLHLLPGQAVAALGARVWLSGLSSVHRRISSALEDITDYITFEDIYLACIIVLLLDPLFFFSYFLFS

SEQ ID NO: 8075 - protein, 442 aa, Zea mays subsp. mays
  peptide (1)..(442): Ceres Seq. ID no. 12384177
IPIREEITTRPHTTDHTHGTASPQLQVPAVLRRDPKNSPTYPNSQPPFPLSQCWPPPPPSSPPPPRPRPPARRPSSRSTSLPSPPPPASGRSPSPSPRARCTVRSMSWHPWRWRRLGATNAPRPPRRRPPPLTAPGRWRSPRRRRRVGAPRSGSTSTWWALNVIFNIYNKKVLNAFPYPWLTSTLSLAAGSAIMLASWATRIAEAPQTDLDFWKALTPVAIAHTIGHVAATVSMAKVAVSFTHIIKSGEPAFSVLVSRFFLGEHFPAPVYFSLLPIIGGCALAAVTELNFNMVGFMGAMISNLAFVVRTIFSKKGMKGKSVSGMNYYACLSIMSLVILLPFAVAMEGPKVWAAGWQTAVAEIGPNFVWWVAAQSVFYHLYNQVSYMSLDEISPLTFSIGNTMKRISVIVASIIIFQTPVQPINALGAAIAILGTFIYSQAKQ

SEQ ID NO: 8076 - DNA, 1353 bp, Zea mays subsp. mays
  misc_feature (1)..(1353): Ceres Seq. ID no. 12407178
  misc_feature (1)..(1353): Ortholog of  Ceres SEQ ID NO 13595351 as cited in SEQ ID NO 55934
  misc_feature (1)..(1353): Ortholog of  Ceres SEQ ID NO 13639645 as cited in SEQ ID NO 57488
gtgtgcaagcaaagcgcaaggccgatccgagggtggactgtggagggccggccatggtgatgatgatgcggtcgtgcctcggcggcggcctgctaccggtggcggtcatgctctgcctcaacgtggtggcggcggtcatggtgtcgctcgtcaaggtggccatggacggcggcatgaaaccgctcgtgatcgtcaccctgcagcagctcaccgccgccgtcttcctcgcgccaatcgcattcttcaaggagaggaagtcgaggccaaagctgacgctggagatcttcgcctacatcttcgtcagtgcggcgctcggggcagctcttcgtcagtacatgatcttcgtggccctgcgctacaccacggccaccttcgtgaccgccttctccaacatcgcccccgtgctcaccttcctcctggccgtcgctacgcggtccgaagcgctggacctcaagagcaggacggggttagcgaagctgctgggcacgctggtgtcgctggccggcgccatggtgctcaccctctacaagggcgtggcgctcacccacgcggcgttccgcctcgcaggaccagcagcagcactcccacggccggttgccgccgagcgccgccgacagccgcggcaagtggacgctgggcaccgtggccatcctgggcaactgcgtctgcctctcctgctggttcctgctccacggccgcctcgccaagaagtacccgcacgtctactcctgcaacgcgctcatgtccttgctcagcttcctccaggtcgccgtcgtcggcctctgcacccagcgcagcatctccccctggatcgtcaccagcaagttcaacatcctcaccgtcctatacgccggcatcgtcggctgcggcgtctcgttcgtgctggtgacatggtgcatcgagaagagaggagccgtgttcgtggccgccttcataccggtggtgcagatcatcgtctccgtcatcgacttctccatcctgcacgagcagctctacctcggaagcgtgctgggatcagtgctagtgataggtggcctttaccttctgctgtggggcaagaggcaggaggccctgcactgtcctcctcctcctccaaaggttgccgaagaagaccctgctgacaaagagcagcagcaagtgcagcagaactgaagacggacagcatcctctgactgtttggtcgtttggttgtaacagtgccagcaataagatctctctgcctccttttcttttcttttggtgtctcaggggggtgggcaatgttccttccttctcagatcgatcaccaacaaagtgtttagattctaatccaaaacagtagaatggtcttaaatacagtactcctgcttactg

SEQ ID NO: 8077 - protein, 372 aa, Zea mays subsp. mays
  peptide (1)..(372): Ceres Seq. ID no. 12407179
VQAKRKADPRVDCGGPAMVMMMRSCLGGGLLPVAVMLCLNVVAAVMVSLVKVAMDGGMKPLVIVTLQQLTAAVFLAPIAFFKERKSRPKLTLEIFAYIFVSAALGAALRQYMIFVALRYTTATFVTAFSNIAPVLTFLLAVATRSEALDLKSRTGLAKLLGTLVSLAGAMVLTLYKGVALTHAAFRLAGPAAALPRPVAAERRRQPRQVDAGHRGHPGQLRLPLLLVPAPRPPRQEVPARLLLQRAHVLAQLPPGRRRRPLHPAQHLPLDRHQQVQHPHRPIRRHRRLRRLVRAGDMVHREERSRVRGRLHTGGADHRLRHRLLHPARAALPRKRAGISASDRWPLPSAVGQEAGGPALSSSSSKGCRRRPC

SEQ ID NO: 8078 - protein, 355 aa, Zea mays subsp. mays
  peptide (1)..(355): Ceres Seq. ID no. 12407180
MVMMMRSCLGGGLLPVAVMLCLNVVAAVMVSLVKVAMDGGMKPLVIVTLQQLTAAVFLAPIAFFKERKSRPKLTLEIFAYIFVSAALGAALRQYMIFVALRYTTATFVTAFSNIAPVLTFLLAVATRSEALDLKSRTGLAKLLGTLVSLAGAMVLTLYKGVALTHAAFRLAGPAAALPRPVAAERRRQPRQVDAGHRGHPGQLRLPLLLVPAPRPPRQEVPARLLLQRAHVLAQLPPGRRRRPLHPAQHLPLDRHQQVQHPHRPIRRHRRLRRLVRAGDMVHREERSRVRGRLHTGGADHRLRHRLLHPARAALPRKRAGISASDRWPLPSAVGQEAGGPALSSSSSKGCRRRPC

SEQ ID NO: 8079 - protein, 353 aa, Zea mays subsp. mays
  peptide (1)..(353): Ceres Seq. ID no. 12407181
MMMRSCLGGGLLPVAVMLCLNVVAAVMVSLVKVAMDGGMKPLVIVTLQQLTAAVFLAPIAFFKERKSRPKLTLEIFAYIFVSAALGAALRQYMIFVALRYTTATFVTAFSNIAPVLTFLLAVATRSEALDLKSRTGLAKLLGTLVSLAGAMVLTLYKGVALTHAAFRLAGPAAALPRPVAAERRRQPRQVDAGHRGHPGQLRLPLLLVPAPRPPRQEVPARLLLQRAHVLAQLPPGRRRRPLHPAQHLPLDRHQQVQHPHRPIRRHRRLRRLVRAGDMVHREERSRVRGRLHTGGADHRLRHRLLHPARAALPRKRAGISASDRWPLPSAVGQEAGGPALSSSSSKGCRRRPC

SEQ ID NO: 8080 - DNA, 1284 bp, Zea mays subsp. mays
  misc_feature (1)..(1284): Ceres Seq. ID no. 12386761
  misc_feature (1)..(1284): Ortholog of  Ceres SEQ ID NO 14308120 as cited in SEQ ID NO 58423
  misc_feature (1)..(1284): Ortholog of  Ceres SEQ ID NO 15177787 as cited in SEQ ID NO 59431
  misc_feature (1)..(1284): Ortholog of  Ceres SEQ ID NO 14307004 as cited in SEQ ID NO 59551
  misc_feature (1)..(1284): Ortholog of  Ceres SEQ ID NO 13661504 as cited in SEQ ID NO 61294
  misc_feature (1)..(1284): Ortholog of  Ceres SEQ ID NO 12617197 as cited in SEQ ID NO 63406
  misc_feature (1)..(1284): Ortholog of  Ceres SEQ ID NO 13597804 as cited in SEQ ID NO 64182
  misc_feature (1)..(1284): Ortholog of  Ceres SEQ ID NO 13598565 as cited in SEQ ID NO 65250
  misc_feature (1)..(1284): Ortholog of  Ceres SEQ ID NO 13598597 as cited in SEQ ID NO 65496
  misc_feature (1)..(1284): Ortholog of  Ceres SEQ ID NO 13596284 as cited in SEQ ID NO 68273
  misc_feature (1)..(1284): Ortholog of  Ceres SEQ ID NO 14308995 as cited in SEQ ID NO 0
  misc_feature (1)..(1284): Ortholog of  Ceres SEQ ID NO 15178902 as cited in SEQ ID NO 0
acgggaaaggagtacggagtaccggagacatcgtcaacgccatggccggaggaggtgcaacggtgtgcgtgaccggagccggcgggttcatcgcctcgtgggtagtgaagctcctgctctcccgcgggtacaccgtgcacggcaccgtccgccacctcagtgacgagaagacaggccacctgaagcgcctggagaatgctgccggaaaccttaggatcttcaaggctgacctgctggactacgacgccatggcagctgcggtcgtcgggtgccagggggttttccatgtggccactcctgtgccttcggaggacctgactgacccagagctacaaatgctgggtcctgctgttaccggcaccacgaatgtgctcaaagctgcctccagcgcgaacgtccagcgagtggtggtggtgtcgtccatggttgccgtcgagatcagccccaaagattggcctgaaggtaaggtccgagatgagaggtgctggtcagaccgagagttctgcaggagcattgagagctggtacccggtggctaagatcatctcagaggaggcggcgctggcgtacgggcagcaaaccgggctcgacgtggtgactatcaatccagggttggtgttcggccccatgctgcagccgacggtcaacacgaccatccagttcctcatctacttcctcaaaggaggccccgacccggtgaagaacaagctctggcacatcgtcgacgtccgcgatgtggccgacgccatgctgctgctctacgaggtgcctgaagcgaccggcagacacatctgcgcgcctcatgttatcagtgcccgcgacctgctggatctgctgaagagcatgtaccctgactacccttgcattgccaacgagagcatacttgacagagaccacccagcgccgatgacctctgacaagctgaagaagatcgggtggagctgccgaccgctggaggagacgatcgtggacaccgtcgagtgctgcctgcgggctggatttctggacgacgtgggtggggagacttcctgtcgcttccctcctcttttaaaccagatctagcctcggcgaaagcatgaattgtgattgcctatgctcttgcttatgttaccgtggacgacgagcgtcagcttttaaataaacgtcattgcatgctgttgtatttcttatattactgtggacaagcatcgatcagagcttttaaattgttaggatcacaggtgaaaaaggagacagagtttaacgtggaaaaaactctctaatttggaggagaaaaaatcacggg

SEQ ID NO: 8081 - protein, 352 aa, Zea mays subsp. mays
  peptide (1)..(352): Ceres Seq. ID no. 12386762
GKGVRSTGDIVNAMAGGGATVCVTGAGGFIASWVVKLLLSRGYTVHGTVRHLSDEKTGHLKRLENAAGNLRIFKADLLDYDAMAAAVVGCQGVFHVATPVPSEDLTDPELQMLGPAVTGTTNVLKAASSANVQRVVVVSSMVAVEISPKDWPEGKVRDERCWSDREFCRSIESWYPVAKIISEEAALAYGQQTGLDVVTINPGLVFGPMLQPTVNTTIQFLIYFLKGGPDPVKNKLWHIVDVRDVADAMLLLYEVPEATGRHICAPHVISARDLLDLLKSMYPDYPCIANESILDRDHPAPMTSDKLKKIGWSCRPLEETIVDTVECCLRAGFLDDVGGETSCRFPPLLNQI

SEQ ID NO: 8082 - protein, 339 aa, Zea mays subsp. mays
  peptide (1)..(339): Ceres Seq. ID no. 12386763
MAGGGATVCVTGAGGFIASWVVKLLLSRGYTVHGTVRHLSDEKTGHLKRLENAAGNLRIFKADLLDYDAMAAAVVGCQGVFHVATPVPSEDLTDPELQMLGPAVTGTTNVLKAASSANVQRVVVVSSMVAVEISPKDWPEGKVRDERCWSDREFCRSIESWYPVAKIISEEAALAYGQQTGLDVVTINPGLVFGPMLQPTVNTTIQFLIYFLKGGPDPVKNKLWHIVDVRDVADAMLLLYEVPEATGRHICAPHVISARDLLDLLKSMYPDYPCIANESILDRDHPAPMTSDKLKKIGWSCRPLEETIVDTVECCLRAGFLDDVGGETSCRFPPLLNQI

SEQ ID NO: 8083 - protein, 270 aa, Zea mays subsp. mays
  peptide (1)..(270): Ceres Seq. ID no. 12386764
MAAAVVGCQGVFHVATPVPSEDLTDPELQMLGPAVTGTTNVLKAASSANVQRVVVVSSMVAVEISPKDWPEGKVRDERCWSDREFCRSIESWYPVAKIISEEAALAYGQQTGLDVVTINPGLVFGPMLQPTVNTTIQFLIYFLKGGPDPVKNKLWHIVDVRDVADAMLLLYEVPEATGRHICAPHVISARDLLDLLKSMYPDYPCIANESILDRDHPAPMTSDKLKKIGWSCRPLEETIVDTVECCLRAGFLDDVGGETSCRFPPLLNQI

SEQ ID NO: 8084 - DNA, 1116 bp, Zea mays subsp. mays
  misc_feature (1)..(1116): Ceres Seq. ID no. 12356519
  misc_feature (1)..(1116): Ortholog of  Ceres SEQ ID NO 15176306 as cited in SEQ ID NO 52784
  misc_feature (1)..(1116): Ortholog of  Ceres SEQ ID NO 13582624 as cited in SEQ ID NO 56287
  misc_feature (1)..(1116): Ortholog of  Ceres SEQ ID NO 14307280 as cited in SEQ ID NO 59443
  misc_feature (1)..(1116): Ortholog of  Ceres SEQ ID NO 14316536 as cited in SEQ ID NO 60272
  misc_feature (1)..(1116): Ortholog of  Ceres SEQ ID NO 13597264 as cited in SEQ ID NO 63897
  misc_feature (1)..(1116): Ortholog of  Ceres SEQ ID NO 13598570 as cited in SEQ ID NO 65434
  misc_feature (1)..(1116): Ortholog of  Ceres SEQ ID NO 13656452 as cited in SEQ ID NO 65745
  misc_feature (1)..(1116): Ortholog of  Ceres SEQ ID NO 13660333 as cited in SEQ ID NO 67464
  misc_feature (1)..(1116): Ortholog of  Ceres SEQ ID NO 13596238 as cited in SEQ ID NO 68834
  misc_feature (1)..(1116): Ortholog of  Ceres SEQ ID NO 15174329 as cited in SEQ ID NO 0
aaaagaccaaaggatgtcgacaccaggagccccgagcctggccacgacagcggcggctgtcctgtgcgtcctggccgcggcgctcgcggtcacggtcgcgagcggccagcagtgcgggcagcaggccggcggcgcaacgtgccgcgactgcctctgctgcagccgcttcggcttttgcggcgacacctccgagtactgcggcgccgggtgccagagccagtgcaccggctgcggcccgcgtcccgcgggccccggcgtggcatccgtcgtgccgagagacctcttcgagcggctgctcctccaccgcaacgacgcggcgtgccctgcgcgcgggttctacacctacgacgcgttcctggccgccgcggccgcgttcccggccttcggcacgacgggcggcgacgagcagcggaaacgggaggtcgcggcgttcctgggccagacctcccacgagaccacgggcgggtggccgaccgcgcccgacgggcccttctcgtggggttactgcttcaagcaggagcgcaacccgccgtcggactactgcgagccgcggccgcagtggccgtgcgcgcccggcaagaagtacttcggccgcggccccatccagatctccttcaactacaactacggcccggcggggcgagccatcggcgtggacctcctcaacaacccggacctcgtcgcgacggaccccgtgatatccttcaagacagcgctgtggttctggatgaacgcgcgggacaacaagccgtcgtgccacgccgtgatcacggggcagtggacgcccacggctgcggacagggcggccggccggggcgcgccagggtacggcgtgatcaccaacatcatcaacggtgggatcgagtgcgggcacgggacggacccccgggtcaccgaccggattggcttctacaagcgctactgcgatgtcttccgcatcggctacgggagcaatctcgattgcgacggccagaggcccttcaatagcggactggcggttgaggtggcggcgcagtgaaaacgtgtgtgtgtgtgtgtgactgtgtgttgcttcgtcggtttgaataaatttcatgtaaaaaccggtgcttcatccgaaaataaggcactttacgt

SEQ ID NO: 8085 - protein, 338 aa, Zea mays subsp. mays
  peptide (1)..(338): Ceres Seq. ID no. 12356520
KDQRMSTPGAPSLATTAAAVLCVLAAALAVTVASGQQCGQQAGGATCRDCLCCSRFGFCGDTSEYCGAGCQSQCTGCGPRPAGPGVASVVPRDLFERLLLHRNDAACPARGFYTYDAFLAAAAAFPAFGTTGGDEQRKREVAAFLGQTSHETTGGWPTAPDGPFSWGYCFKQERNPPSDYCEPRPQWPCAPGKKYFGRGPIQISFNYNYGPAGRAIGVDLLNNPDLVATDPVISFKTALWFWMNARDNKPSCHAVITGQWTPTAADRAAGRGAPGYGVITNIINGGIECGHGTDPRVTDRIGFYKRYCDVFRIGYGSNLDCDGQRPFNSGLAVEVAAQ

SEQ ID NO: 8086 - protein, 334 aa, Zea mays subsp. mays
  peptide (1)..(334): Ceres Seq. ID no. 12356521
MSTPGAPSLATTAAAVLCVLAAALAVTVASGQQCGQQAGGATCRDCLCCSRFGFCGDTSEYCGAGCQSQCTGCGPRPAGPGVASVVPRDLFERLLLHRNDAACPARGFYTYDAFLAAAAAFPAFGTTGGDEQRKREVAAFLGQTSHETTGGWPTAPDGPFSWGYCFKQERNPPSDYCEPRPQWPCAPGKKYFGRGPIQISFNYNYGPAGRAIGVDLLNNPDLVATDPVISFKTALWFWMNARDNKPSCHAVITGQWTPTAADRAAGRGAPGYGVITNIINGGIECGHGTDPRVTDRIGFYKRYCDVFRIGYGSNLDCDGQRPFNSGLAVEVAAQ

SEQ ID NO: 8087 - protein, 328 aa, Zea mays subsp. mays
  peptide (1)..(328): Ceres Seq. ID no. 12356522
KRPKDVDTRSPEPGHDSGGCPVRPGRGARGHGRERPAVRAAGRRRNVPRLPLLQPLRLLRRHLRVLRRRVPEPVHRLRPASRGPRRGIRRAERPLRAAAPPPQRRGVPCARVLHLRRVPGRRGRVPGLRHDGRRRAAETGGRGVPGPDLPRDHGRVADRARRALLVGLLLQAGAQPAVGLLRAAAAVAVRARQEVLRPRPHPDLLQLQLRPGGASHRRGPPQQPGPRRDGPRDILQDSAVVLDERAGQQAVVPRRDHGAVDAHGCGQGGRPGRARVRRDHQHHQRWDRVRARDGPPGHRPDWLLQALLRCLPHRLREQSRLRRPEALQ

SEQ ID NO: 8088 - DNA, 928 bp, Zea mays subsp. mays
  misc_feature (1)..(928): Ceres Seq. ID no. 12365717
  misc_feature (1)..(928): Ortholog of  Ceres SEQ ID NO 12610958 as cited in SEQ ID NO 55963
  misc_feature (1)..(928): Ortholog of  Ceres SEQ ID NO 14309410 as cited in SEQ ID NO 0
ccttctatcctctccggcacgagccgtccagttcagttcacctcggtccgggaccgcgactacaccgacggcggcgcgtccgagcccagccgacgccgagccaatggtgactccagcgacattctccctccgccccagcgcgccccccgcgccgcctcgtgccgggctgccccgcgctcgggcctgtttcgcgcccgccatccgcacctccccttccgtcgccttttcctaccagcctcggcgcttcagtggcatccgccgcgccgtggccgtcgactccgagcagggctcccccgagtctccagagcaggagaagaagcccaagacgtactacttcctggtggcaaacgccaagttcatgctggacgaggaggagcatttccaggagcaactcgccgagaagctgcgcaactacgccgagcgcgacaaggagcaggacttctggctcgtcgtggagcccaagttcctcgacaggttccccaacatcaccaagcgcctcaagcgccccgccgtcgcgcttgtctccaccgacggcaactggatcacattcatgaagttaaggctagacagggtcttacaagaccagttcgacgcagaatcagttgaagaggcattggcttctaaccctgttgagttgaaatttgagaagcctgagaaatggacagctccgtaccctaaatatgggtttggatggtgggaacccttcttgcctccaaagttcagcaatggtacggcatagagataagcagcaatccctatgaggcatgtaagattactcccctgtaagtgatgaatgtaattttaattttgatgatgaggatgtagtacttgaggttgtaccagtacagttagttgaattagttgcacagtttttgtaataccaaataatcagctgttttattttatttgagaaagtcgtggttctgtt

SEQ ID NO: 8089 - protein, 245 aa, Zea mays subsp. mays
  peptide (1)..(245): Ceres Seq. ID no. 12365718
LLSSPARAVQFSSPRSGTATTPTAARPSPADAEPMVTPATFSLRPSAPPAPPRAGLPRARACFAPAIRTSPSVAFSYQPRRFSGIRRAVAVDSEQGSPESPEQEKKPKTYYFLVANAKFMLDEEEHFQEQLAEKLRNYAERDKEQDFWLVVEPKFLDRFPNITKRLKRPAVALVSTDGNWITFMKLRLDRVLQDQFDAESVEEALASNPVELKFEKPEKWTAPYPKYGFGWWEPFLPPKFSNGTA

SEQ ID NO: 8090 - protein, 211 aa, Zea mays subsp. mays
  peptide (1)..(211): Ceres Seq. ID no. 12365719
MVTPATFSLRPSAPPAPPRAGLPRARACFAPAIRTSPSVAFSYQPRRFSGIRRAVAVDSEQGSPESPEQEKKPKTYYFLVANAKFMLDEEEHFQEQLAEKLRNYAERDKEQDFWLVVEPKFLDRFPNITKRLKRPAVALVSTDGNWITFMKLRLDRVLQDQFDAESVEEALASNPVELKFEKPEKWTAPYPKYGFGWWEPFLPPKFSNGTA

SEQ ID NO: 8091 - protein, 201 aa, Zea mays subsp. mays
  peptide (1)..(201): Ceres Seq. ID no. 12365720
PSILSGTSRPVQFTSVRDRDYTDGGASEPSRRRANGDSSDILPPPQRAPRAASCRAAPRSGLFRARHPHLPFRRLFLPASALQWHPPRRGRRLRAGLPRVSRAGEEAQDVLLPGGKRQVHAGRGGAFPGATRREAAQLRRARQGAGLLARRGAQVPRQVPQHHQAPQAPRRRACLHRRQLDHIHEVKARQGLTRPVRRRIS

SEQ ID NO: 8092 - DNA, 795 bp, Zea mays subsp. mays
  misc_feature (1)..(795): Ceres Seq. ID no. 12403108
  misc_feature (1)..(795): Ortholog of  Ceres SEQ ID NO 13595230 as cited in SEQ ID NO 55871
  misc_feature (1)..(795): Ortholog of  Ceres SEQ ID NO 15173160 as cited in SEQ ID NO 64408
aacgcaagcagaagctacaatcctaaaaccatctgcttcagccttcagctagccccaagtttagtcggccgatcgatcactgaagtagtaatggcctccgccaacagctggaccctcgagatcgcgtcgccggtggctccgcagcgcctgttccgcgccgccgtgatggactggcacaccctggcgcccaaggtcgcctcccacgtcgtcgccagcgcgcagcccgtggagggcgacggcggcgttggcagcgtcaggcagttcaacttcacctcagtcatgccgttcagcttcatgaaggagaggctcgagttcctggacgcggacaagtgcgagtgcaagaacacgctcatcgagggcggcggcatcggcgtcgccatcgaaacggcgacgtcgcacatcaaggtggagcccgcggccggcggcgggagcgtggtgaaggtcgaatccacttacaagctgctgccgggcgtggaggtgaaggacgagatcgccaaggccaaggagtccgtcaccgccatcttcaagggtgccgaggcctacctcgtcgccaaccccgacgcctacaactaaaccattggactgggatgagcttcatttcccttccgtcttgtttggatatacaagggtattgtgtacggagattgggttttctttccccttcttttttgttttcatacaaaataaaataaagctgctctaaagcagcgtgcggtttttggactcgagatggtatgattatatatatgtacgtgctgtccttgtgttgtataccgtcatggttttctgtgtggg

SEQ ID NO: 8093 - protein, 190 aa, Zea mays subsp. mays
  peptide (1)..(190): Ceres Seq. ID no. 12403109
NASRSYNPKTICFSLQLAPSLVGRSITEVVMASANSWTLEIASPVAPQRLFRAAVMDWHTLAPKVASHVVASAQPVEGDGGVGSVRQFNFTSVMPFSFMKERLEFLDADKCECKNTLIEGGGIGVAIETATSHIKVEPAAGGGSVVKVESTYKLLPGVEVKDEIAKAKESVTAIFKGAEAYLVANPDAYN

SEQ ID NO: 8094 - protein, 160 aa, Zea mays subsp. mays
  peptide (1)..(160): Ceres Seq. ID no. 12403110
MASANSWTLEIASPVAPQRLFRAAVMDWHTLAPKVASHVVASAQPVEGDGGVGSVRQFNFTSVMPFSFMKERLEFLDADKCECKNTLIEGGGIGVAIETATSHIKVEPAAGGGSVVKVESTYKLLPGVEVKDEIAKAKESVTAIFKGAEAYLVANPDAYN

SEQ ID NO: 8095 - protein, 135 aa, Zea mays subsp. mays
  peptide (1)..(135): Ceres Seq. ID no. 12403111
MDWHTLAPKVASHVVASAQPVEGDGGVGSVRQFNFTSVMPFSFMKERLEFLDADKCECKNTLIEGGGIGVAIETATSHIKVEPAAGGGSVVKVESTYKLLPGVEVKDEIAKAKESVTAIFKGAEAYLVANPDAYN

SEQ ID NO: 8096 - DNA, 1102 bp, Zea mays subsp. mays
  misc_feature (1)..(1102): Ceres Seq. ID no. 12362589
  misc_feature (1)..(1102): Ortholog of  Ceres SEQ ID NO 14313959 as cited in SEQ ID NO 57842
aactccccccatcctccccgccacctctcaccccccgcaagcgagtcagccaagccaagcgacgcccaacccccgcctccattcccgggccggagacgcgcctgcctggccgcgacgccgccagccatgggaatggggccgctcgacaacgccgcgtcggccgcgctggaggccgccgccgccgccgccgccgccccctcgcgggcgggctcgtacgcggtgctgcagtgcggcgaggactcggagtacgtgcggcagaagtacggcggctacttcgccgtcttccgcgcgctgctggaggaggacggcgagaggtggcgggtgtacagcggccgtccgcggggagctccccgccgacgccgaggcagccgggttcgacgggttcgtcatctccgggagctgcgccgacgcgcacggcgacgagccctggatcctcgcgctcgtcgacctcacccgccgcgtccacgccgccggcaagcgcgtcctcggcgtctgcttcggccaccagatcctgtgccgggcgctgggcgggcgcacggggcggtcggccaagggctgggacatcggggtgagctgcatccacccgacggcggcggcggcgcggctgttcgcgccgctgaagctgcccgtgcacatgccggtgatcgagttccaccaggacgaggtgtgggagctgccccccggcgccgaggcgctggcgcggtcggacaagacccgcgtcgagatgttccgcctcggcgcccgcgccatgggcgtccagggccacccggagtacagcaaggacgtcctcatgagcatcgccgaccgcctcctccgccacaaccacatactggactgccaggtggacgtggccaaggcgagcttcgacgtgcggcagccggacaaggagttgtggagcaaggtgtgcaggggcttcctcaagggaaggctccagtcgtcgcagcagcaaggtgtggcgctatagcaggaggaaattggggggcattggatgcctaggttaatccgtcatattgtttgtttttttattatatgtgcttcagaactcaagagttgtacagaaactgctatcttcgtccgaagcattaataaaaaaaaaggaggg

SEQ ID NO: 8097 - protein, 331 aa, Zea mays subsp. mays
  peptide (1)..(331): Ceres Seq. ID no. 12362590
NSPHPPRHLSPPASESAKPSDAQPPPPFPGRRRACLAATPPAMGMGPLDNAASAALEAAAAAAAAPSRAGSYAVLQCGEDSEYVRQKYGGYFAVFRALLEEDGERWRVYSGRPRGAPRRRRGSRVRRVRHLRELRRRARRRALDPRARRPHPPRPRRRQARPRRLLRPPDPVPGAGRAHGAVGQGLGHRGELHPPDGGGGAAVRAAEAARAHAGDRVPPGRGVGAAPRRRGAGAVGQDPRRDVPPRRPRHGRPGPPGVQQGRPHEHRRPPPPPQPHTGLPGGRGQGELRRAAAGQGVVEQGVQGLPQGKAPVVAAARCGAIAGGNWGALDA

SEQ ID NO: 8098 - protein, 320 aa, Zea mays subsp. mays
  peptide (1)..(320): Ceres Seq. ID no. 12362591
TPPILPATSHPPQASQPSQATPNPRLHSRAGDAPAWPRRRQPWEWGRSTTPRRPRWRPPPPPPPPPRGRARTRCCSAARTRSTCGRSTAATSPSSARCWRRTARGGGCTAAVRGELPADAEAAGFDGFVISGSCADAHGDEPWILALVDLTRRVHAAGKRVLGVCFGHQILCRALGGRTGRSAKGWDIGVSCIHPTAAAARLFAPLKLPVHMPVIEFHQDEVWELPPGAEALARSDKTRVEMFRLGARAMGVQGHPEYSKDVLMSIADRLLRHNHILDCQVDVAKASFDVRQPDKELWSKVCRGFLKGRLQSSQQQGVAL

SEQ ID NO: 8099 - protein, 289 aa, Zea mays subsp. mays
  peptide (1)..(289): Ceres Seq. ID no. 12362592
MGMGPLDNAASAALEAAAAAAAAPSRAGSYAVLQCGEDSEYVRQKYGGYFAVFRALLEEDGERWRVYSGRPRGAPRRRRGSRVRRVRHLRELRRRARRRALDPRARRPHPPRPRRRQARPRRLLRPPDPVPGAGRAHGAVGQGLGHRGELHPPDGGGGAAVRAAEAARAHAGDRVPPGRGVGAAPRRRGAGAVGQDPRRDVPPRRPRHGRPGPPGVQQGRPHEHRRPPPPPQPHTGLPGGRGQGELRRAAAGQGVVEQGVQGLPQGKAPVVAAARCGAIAGGNWGALDA

SEQ ID NO: 8100 - DNA, 917 bp, Zea mays subsp. mays
  misc_feature (1)..(917): Ceres Seq. ID no. 13493285
  misc_feature (1)..(917): Ortholog of  Ceres SEQ ID NO 13582184 as cited in SEQ ID NO 56002
  misc_feature (1)..(917): Ortholog of  Ceres SEQ ID NO 15227042 as cited in SEQ ID NO 0
tcttcacccacattataaagatcctccacttcgcactttcgccgccgcctctctccttcccgagcaggaggcggacaaggtaagcagcaatcgcaggaaccctagcgccgccgcacccgcaggaatgggtatcgacctcgtcgccggtgggaggaataagaagaccaagcgcactgcgcccaagtctgacgatgtctacctcaagctcctcgtcaagctctaccgtttcttggtcaggaggaccaagagcaatttcaacgctgtcattctcaagaggcttttcatgagtaaaaccaaccgaccaccaatctccatgcgccgccttgtcaagtttatggaaggaaaggagaagaacattgctgtcattgttggcacagtcacagatgacaaaaggatccaggaggttccagcaatgaaggttactgccctgaggttcacggagacagcaagggccaggattgtcaatgctggtggcgagtgcctcacatttgaccagcttgctcttcgtgctccacttggcgagaacacggtcctcttgaggggccccaagaatgcccgtgaggcagtgaggcactttggcaaggctcctggagtgccgcacagccacaccaagccgtatgtgcgctccaagggaaggaagttcgagaaggctcgtggcaggaggaacagccgtggattcaaggtttaaaacaaattgtggccctccgtgttgccatcagcatagtgcaaccgttgtgtttgatcagtcgacagtaattagtcatcactctgtaccgagattagtagcacaatttgttgtcctggtttgaattttggaagatatttgatgtcgtctccttattatctactcgttactggttgagcacgaagattgttttgtgatactcctacatgatttaagacggttcccgacgttc

SEQ ID NO: 8101 - protein, 228 aa, Zea mays subsp. mays
  peptide (1)..(228): Ceres Seq. ID no. 13493286
LHPHYKDPPLRTFAAASLLPEQEADKVSSNRRNPSAAAPAGMGIDLVAGGRNKKTKRTAPKSDDVYLKLLVKLYRFLVRRTKSNFNAVILKRLFMSKTNRPPISMRRLVKFMEGKEKNIAVIVGTVTDDKRIQEVPAMKVTALRFTETARARIVNAGGECLTFDQLALRAPLGENTVLLRGPKNAREAVRHFGKAPGVPHSHTKPYVRSKGRKFEKARGRRNSRGFKV

SEQ ID NO: 8102 - protein, 187 aa, Zea mays subsp. mays
  peptide (1)..(187): Ceres Seq. ID no. 13493287
MGIDLVAGGRNKKTKRTAPKSDDVYLKLLVKLYRFLVRRTKSNFNAVILKRLFMSKTNRPPISMRRLVKFMEGKEKNIAVIVGTVTDDKRIQEVPAMKVTALRFTETARARIVNAGGECLTFDQLALRAPLGENTVLLRGPKNAREAVRHFGKAPGVPHSHTKPYVRSKGRKFEKARGRRNSRGFKV

SEQ ID NO: 8103 - protein, 134 aa, Zea mays subsp. mays
  peptide (1)..(134): Ceres Seq. ID no. 13493288
MSKTNRPPISMRRLVKFMEGKEKNIAVIVGTVTDDKRIQEVPAMKVTALRFTETARARIVNAGGECLTFDQLALRAPLGENTVLLRGPKNAREAVRHFGKAPGVPHSHTKPYVRSKGRKFEKARGRRNSRGFKV

SEQ ID NO: 8104 - DNA, 1185 bp, Zea mays subsp. mays
  misc_feature (1)..(1185): Ceres Seq. ID no. 12372341
  misc_feature (1)..(1185): Ortholog of  Ceres SEQ ID NO 13599102 as cited in SEQ ID NO 1347
  misc_feature (1)..(1185): Ortholog of  Ceres SEQ ID NO 15176238 as cited in SEQ ID NO 55058
  misc_feature (1)..(1185): Ortholog of  Ceres SEQ ID NO 13598630 as cited in SEQ ID NO 65440
attgctggtaccgacccgtccccaccagtccagtctataagagcgacgggatcacggaaacctgttcaccgctgcgccgcctcactattgactgtcggattccccactcgccggcgacaaccgccgcgcccgatccgtctgctaggtcttgcacctccgggctctggccatggctgccgaagctggcccaatctccaaggtcctcatcgtcgtagcgatgcagacggaggcgatgccgctcgtccacaagttcaagctcgtcgaggcgcccgcccacgaatccacatttcctaaaggtgccccatgggttaggtaccatggcaactacaaaggcctccacattgaccttgtattgcctggaaaggatgctgttttaggagtcgacagtgttggtacggtatcggcagctcttttgactagtttttccattcaaacattgaagccagaccttatcattaatgctggcactgctggtggcttcaaggccaaaggggcaagcattggagatgtattcctggcatcagatgtttcattccatgacaggaggataccaatacctgtttttgacatgtatggaattggagcacggaaaacttctgcagttcctaatatcttgaaggaactcaatttgaagattggcaaattgtcgactggggattctctggatatgtctccccaggatgagaaggtgatactgagcaatgatgctacagtaaaggatatggagggagctgctgtggcatatgtcgccgacatgttttcaacgccagcgatctttgtgaaagctgtgactgatatcgtggatggggataagccaacatctgaggagtttctgcagaacctgattgccgtgacggcggcactggacctggcagtcaccaaagtggtggatttcatcagcgggaaacgcatctctgatctttgaaggctgtcatgaaatacgacacccccactgctctgatgcacgatgctaggctacgaacaatacaacattgggtcaacgattttttgtgaggtgttttctatgtgaggttaaaccttcttaaccctgtgtacaaaattcctgccaattgctatgggccggccatagcgtggaattttatagaataatttgcaaaatgtattttgtggtgcaaatatcgatatataataatatgctgggggacgggatccccgtgggattag

SEQ ID NO: 8105 - protein, 251 aa, Zea mays subsp. mays
  peptide (1)..(251): Ceres Seq. ID no. 12372342
MAAEAGPISKVLIVVAMQTEAMPLVHKFKLVEAPAHESTFPKGAPWVRYHGNYKGLHIDLVLPGKDAVLGVDSVGTVSAALLTSFSIQTLKPDLIINAGTAGGFKAKGASIGDVFLASDVSFHDRRIPIPVFDMYGIGARKTSAVPNILKELNLKIGKLSTGDSLDMSPQDEKVILSNDATVKDMEGAAVAYVADMFSTPAIFVKAVTDIVDGDKPTSEEFLQNLIAVTAALDLAVTKVVDFISGKRISDL

SEQ ID NO: 8106 - protein, 235 aa, Zea mays subsp. mays
  peptide (1)..(235): Ceres Seq. ID no. 12372343
MQTEAMPLVHKFKLVEAPAHESTFPKGAPWVRYHGNYKGLHIDLVLPGKDAVLGVDSVGTVSAALLTSFSIQTLKPDLIINAGTAGGFKAKGASIGDVFLASDVSFHDRRIPIPVFDMYGIGARKTSAVPNILKELNLKIGKLSTGDSLDMSPQDEKVILSNDATVKDMEGAAVAYVADMFSTPAIFVKAVTDIVDGDKPTSEEFLQNLIAVTAALDLAVTKVVDFISGKRISDL

SEQ ID NO: 8107 - protein, 230 aa, Zea mays subsp. mays
  peptide (1)..(230): Ceres Seq. ID no. 12372344
MPLVHKFKLVEAPAHESTFPKGAPWVRYHGNYKGLHIDLVLPGKDAVLGVDSVGTVSAALLTSFSIQTLKPDLIINAGTAGGFKAKGASIGDVFLASDVSFHDRRIPIPVFDMYGIGARKTSAVPNILKELNLKIGKLSTGDSLDMSPQDEKVILSNDATVKDMEGAAVAYVADMFSTPAIFVKAVTDIVDGDKPTSEEFLQNLIAVTAALDLAVTKVVDFISGKRISDL

SEQ ID NO: 8108 - DNA, 1186 bp, Zea mays subsp. mays
  misc_feature (1)..(1186): Ceres Seq. ID no. 12402393
  misc_feature (1)..(1186): Ortholog of  Ceres SEQ ID NO 12557497 as cited in SEQ ID NO 43
  misc_feature (1)..(1186): Ortholog of  Ceres SEQ ID NO 13600601 as cited in SEQ ID NO 497
  misc_feature (1)..(1186): Ortholog of  Ceres SEQ ID NO 13664283 as cited in SEQ ID NO 61283
  misc_feature (1)..(1186): Ortholog of  Ceres SEQ ID NO 12635513 as cited in SEQ ID NO 0
  misc_feature (1)..(1186): Ortholog of  Ceres SEQ ID NO 12635723 as cited in SEQ ID NO 0
  misc_feature (1)..(1186): Ortholog of  Ceres SEQ ID NO 15179044 as cited in SEQ ID NO 0
  misc_feature (1)..(1186): Ortholog of  Ceres SEQ ID NO 15179333 as cited in SEQ ID NO 0
ctcctcctcatggctctgtcgtccgccggctcgttcgtggcctgcagcctccggccaagcggatagcatccatgccccgaggtcgacttcgcacctgaagccgggtgctgcggcggcgtcgttcacgaggacgccgcagcgccgggcgaacgcgaccaagggcggcgtgtccaccgtgtgcgagccgctgggccccgaccggccgatctggttccccggcagctcccctccgccgtggctcgacggaagccttccaggagactttggatttgaccctctcggactaggttcggagccggagctgctgcggtggttcgcgcaggcggagctgatgcacgggcggtgggcgatgctggcggcggcgggcatccttatcccggacctgctggcgcggtggggcttcatcgacgcggggttctcgtggttcgacgccgggtcccgcgagtacttcgcggacccctggacgctgttcgtgtcgcagatggcgctgatggggtgggcggaggggcggcggtgggcggactacctgaggcccgggtgcgtggacatcgagccgcgcttcccgaaccgcaagaacccggtccccgacgtggggtaccccggcgggctgtggttcgactgggccaactggggccgcgggtccccggagcccgtgatggtgctgcgcaccaaggagatcaagaacggccgcctcgccatgctcgccttcgtcggcttctggttccaggccgtgtacacggggcagggccccatcgacaacctgctcgcgcacctcgccgaccccggccactgcaacatcttctccggcgttcacgtcccactgatccgatgttgcttcggagctggcggagagactgcgaagaattaaaaaaaaaagtgcatcctgttgagggagaaagaacttcgcttggtcggtatcattttggccctgctggacatgtcaacattttgtttgtagtacctgcgtagaaatgtcaaaccacctgtacaaacgtacaaataccaccccagggatcgcgatgatgctagccagcagtccagcacacactagcttgtcctgaagatccatgcaacaccgtatacgagacaattgtatttttgggactacaaacagtgtgctttgcaataatgtcattccaaacaattagctcgcagaaatgggattataaagatcttataattgatt

SEQ ID NO: 8109 - protein, 288 aa, Zea mays subsp. mays
  peptide (1)..(288): Ceres Seq. ID no. 12402394
SSSWLCRPPARSWPAASGQADSIHAPRSTSHLKPGAAAASFTRTPQRRANATKGGVSTVCEPLGPDRPIWFPGSSPPPWLDGSLPGDFGFDPLGLGSEPELLRWFAQAELMHGRWAMLAAAGILIPDLLARWGFIDAGFSWFDAGSREYFADPWTLFVSQMALMGWAEGRRWADYLRPGCVDIEPRFPNRKNPVPDVGYPGGLWFDWANWGRGSPEPVMVLRTKEIKNGRLAMLAFVGFWFQAVYTGQGPIDNLLAHLADPGHCNIFSGVHVPLIRCCFGAGGETAKN

SEQ ID NO: 8110 - protein, 178 aa, Zea mays subsp. mays
  peptide (1)..(178): Ceres Seq. ID no. 12402395
MHGRWAMLAAAGILIPDLLARWGFIDAGFSWFDAGSREYFADPWTLFVSQMALMGWAEGRRWADYLRPGCVDIEPRFPNRKNPVPDVGYPGGLWFDWANWGRGSPEPVMVLRTKEIKNGRLAMLAFVGFWFQAVYTGQGPIDNLLAHLADPGHCNIFSGVHVPLIRCCFGAGGETAKN

SEQ ID NO: 8111 - protein, 172 aa, Zea mays subsp. mays
  peptide (1)..(172): Ceres Seq. ID no. 12402396
MLAAAGILIPDLLARWGFIDAGFSWFDAGSREYFADPWTLFVSQMALMGWAEGRRWADYLRPGCVDIEPRFPNRKNPVPDVGYPGGLWFDWANWGRGSPEPVMVLRTKEIKNGRLAMLAFVGFWFQAVYTGQGPIDNLLAHLADPGHCNIFSGVHVPLIRCCFGAGGETAKN

SEQ ID NO: 8112 - DNA, 2092 bp, Zea mays subsp. mays
  misc_feature (1)..(2092): Ceres Seq. ID no. 12359759
  misc_feature (1)..(2092): Ortholog of  Ceres SEQ ID NO 12618176 as cited in SEQ ID NO 64489
  misc_feature (1)..(2092): Ortholog of  Ceres SEQ ID NO 15179231 as cited in SEQ ID NO 0
aaaaaagtgtgggccgagaaacatgtcgtctcacctcgccgcggccgcttccgcccttcctctccctcttcctccgccggcggtcgccgcgccttcccgcgccctccgagctctaatcctgtcccggggcggcgccgccgccgtatgctccagtctgcgccgcggcggcacgccggcatgcctcgtgcgtcgcctgtgctcccaccactccgccgcggcggcggcaacggcgttggaggaggcgcggcgcgggcggaagcagctcggaatgacgcctgcgctctacgactacctcctcgccaacgtccgcgagcaccccattctccgggagcttcgcgaggagaccgcggctatgagagggagccagatgcaggtttctcccgctcaggctcagctgttgtcaatgcttgtgcaaatccttggggcgcgccgttgcattgaagttggtgtgtttactgggtattcatcattagctgttgcactggcccttcctgaatctggtcacttggttgcttgtgagagggatgacagatgcctagaagttgccaagaagtactaccaacgtgctggtgttgcacataagattgatgtgaaacatgctttggctgcggattctctaagatcacttcttgattgcggcgaagcttccagctatgacttcgcatttgttgatgctgacaagagaatgtatgaggaatattatgaacttctactgaagctagtaagagttggtggtttaattgtaatggacaatgtcctttggtatggaagggttgccgatctactggttgatgatcaaaagacgatcagtataaggaacttcaataagaaagttttagaggacaagcgtgttgatatcagcatggtgccaattggagatgggatgacaatttgccggaagctagtagatacttgaattcaatatccatgatatcatcagtatatttgctatggttcgcaaaggttacaagaataacaacattgccaagctttgcgaggatcttgggcttgcagacagggccacaggtttaattgactatatgattggaaatgggcagcatcccgaagtttttcatttggtacaaaattttaatttggaggacaagtatcctccattttctcttctgaagggatacattcagaaggccaagcagacttttgtggagatgtttaaaaagagtcaaacacacgagtccttgaactgggctataccaaaggaactatggattgcacattatctagctgagcagaaactcactgattctaagcaacgcagtgctatcatggcagaaattaaatatttgatgagtggatatgaaaagaaacaaaggtcagaaaatctctcaacatgggcttcacagcatccgccaacggaatctaaaaggaggaacaggaagcgcaaggaggaggagcaggagcaccatgaagcacaatacaaccagcagcagcaggaacagaatgaaaacaagttaattcaaggaaagcggcatcagctgcatcaagaagaaaatatggcgcaagtgacacagcagcagcatatgcaaccgacaacaaggccagctactcttaagcttccgacgcctgctattcctctggttctgaatgcagctcagatccaaaactttgcgcgtccagcttacgccgctgtgcctggagttcacaattaccctgcccagccaggttggcctgcagctcaaggaagtccattcgtaccacagttcatgtcaccgcagtatatgggtctgccatttaatccctttggccttcatcctacttgctatcccagacgcagatagcgtagagagttctggcgttccgcgtccatttgctgagtgaaactgtggtgaagcgtacaagttatatgaaacagaccggtatcggttaactggttttgtgttcgtttgttatgctgtctgatggttccttttcgcgacatggtgatcactttgcattgatttgttgttcagccaagtggtggaatgcttggtgcttgcaatctgaaatgtacgcacggtaacaggaattgtagtacttttcaatcaattacataatggcatttcacaaatacctgaacggtgaacatcaatccctg

SEQ ID NO: 8113 - protein, 304 aa, Zea mays subsp. mays
  peptide (1)..(304): Ceres Seq. ID no. 12359760
KKCGPRNMSSHLAAAASALPLPLPPPAVAAPSRALRALILSRGGAAAVCSSLRRGGTPACLVRRLCSHHSAAAAATALEEARRGRKQLGMTPALYDYLLANVREHPILRELREETAAMRGSQMQVSPAQAQLLSMLVQILGARRCIEVGVFTGYSSLAVALALPESGHLVACERDDRCLEVAKKYYQRAGVAHKIDVKHALAADSLRSLLDCGEASSYDFAFVDADKRMYEEYYELLLKLVRVGGLIVMDNVLWYGRVADLLVDDQKTISIRNFNKKVLEDKRVDISMVPIGDGMTICRKLVDT

SEQ ID NO: 8114 - protein, 297 aa, Zea mays subsp. mays
  peptide (1)..(297): Ceres Seq. ID no. 12359761
MSSHLAAAASALPLPLPPPAVAAPSRALRALILSRGGAAAVCSSLRRGGTPACLVRRLCSHHSAAAAATALEEARRGRKQLGMTPALYDYLLANVREHPILRELREETAAMRGSQMQVSPAQAQLLSMLVQILGARRCIEVGVFTGYSSLAVALALPESGHLVACERDDRCLEVAKKYYQRAGVAHKIDVKHALAADSLRSLLDCGEASSYDFAFVDADKRMYEEYYELLLKLVRVGGLIVMDNVLWYGRVADLLVDDQKTISIRNFNKKVLEDKRVDISMVPIGDGMTICRKLVDT

SEQ ID NO: 8115 - protein, 281 aa, Zea mays subsp. mays
  peptide (1)..(281): Ceres Seq. ID no. 12359762
MVRKGYKNNNIAKLCEDLGLADRATGLIDYMIGNGQHPEVFHLVQNFNLEDKYPPFSLLKGYIQKAKQTFVEMFKKSQTHESLNWAIPKELWIAHYLAEQKLTDSKQRSAIMAEIKYLMSGYEKKQRSENLSTWASQHPPTESKRRNRKRKEEEQEHHEAQYNQQQQEQNENKLIQGKRHQLHQEENMAQVTQQQHMQPTTRPATLKLPTPAIPLVLNAAQIQNFARPAYAAVPGVHNYPAQPGWPAAQGSPFVPQFMSPQYMGLPFNPFGLHPTCYPRRR

SEQ ID NO: 8116 - DNA, 750 bp, Zea mays subsp. mays
  misc_feature (1)..(750): Ceres Seq. ID no. 12341819
  misc_feature (1)..(750): Ortholog of  Ceres SEQ ID NO 12610597 as cited in SEQ ID NO 56210
  misc_feature (1)..(750): Ortholog of  Ceres SEQ ID NO 12597985 as cited in SEQ ID NO 61061
acacctcatcgatatagctttatttcccttgcccttttccagggcacaccccctccagctctccgccgtcggccatgggtcaagcctggggtaatctccaagataggctccaagggcggcggtggaaggagcaccaggtgaggaagatcaccgacaaggtgttcgaccgcctcacggaggacgcccagaagcgcgacaaggaggccctcagattcgaggaggtctacatcgccgtcctctgcgtctacaatgacatcaataagtacttgccggggccgcaccacgaccccccgtccaaggagaagctcagggccatgatggaggagtacgacgtgaacctggacgggctcctggaccgcgaggagttcgcggagttcatccggaagctgaccgcggactcgctgtgctcgatcagcgtgaagctgctgatcacgctggtggcggcgccggcgctggcgatggcgaccaagcgggcgacggagggcgtccccggcgtgggcaaggtggtacgcaaggtgcccaacgcgctctacgcctccgccatcaccctgggcgttgtgctgttgcagagatcaaccgagggcgtcgagtgactcgcgctgctgaaactgcaatgtcgtcggctgtgtagatggagcagcgtatctaggataggtgttggttctttacggcttgtgcggtgaattgatctgtgtatcaattcgatgtgatttatcctggatttgggacaaatagttgtggatccttgtg

SEQ ID NO: 8117 - protein, 172 aa, Zea mays subsp. mays
  peptide (1)..(172): Ceres Seq. ID no. 12341820
MGQAWGNLQDRLQGRRWKEHQVRKITDKVFDRLTEDAQKRDKEALRFEEVYIAVLCVYNDINKYLPGPHHDPPSKEKLRAMMEEYDVNLDGLLDREEFAEFIRKLTADSLCSISVKLLITLVAAPALAMATKRATEGVPGVGKVVRKVPNALYASAITLGVVLLQRSTEGVE

SEQ ID NO: 8118 - protein, 92 aa, Zea mays subsp. mays
  peptide (1)..(92): Ceres Seq. ID no. 12341821
MMEEYDVNLDGLLDREEFAEFIRKLTADSLCSISVKLLITLVAAPALAMATKRATEGVPGVGKVVRKVPNALYASAITLGVVLLQRSTEGVE

SEQ ID NO: 8119 - protein, 91 aa, Zea mays subsp. mays
  peptide (1)..(91): Ceres Seq. ID no. 12341822
MEEYDVNLDGLLDREEFAEFIRKLTADSLCSISVKLLITLVAAPALAMATKRATEGVPGVGKVVRKVPNALYASAITLGVVLLQRSTEGVE

SEQ ID NO: 8120 - DNA, 849 bp, Zea mays subsp. mays
  misc_feature (1)..(849): Ceres Seq. ID no. 12402386
  misc_feature (1)..(849): Ortholog of  Ceres SEQ ID NO 14306406 as cited in SEQ ID NO 1412
  misc_feature (1)..(849): Ortholog of  Ceres SEQ ID NO 14309488 as cited in SEQ ID NO 52755
  misc_feature (1)..(849): Ortholog of  Ceres SEQ ID NO 13661778 as cited in SEQ ID NO 61468
atccctcgtggcctctctcccctcctcacacaggcacacacgcactttctgtcagcttcctcccctgcgccgataagcaagcccgtgagccaacagtggtgccagcggcccgagcggcgaggatgcacagcggagcgaggaagctcatgtgggggaccagcccggacaggcccgacgaccacgacgtggtcatcgtgctcgcctcgctgctgtgcgcgctcatcaccgtcctcggcatcggcctcgtggcgcggtgcgcgtgcgcgcgcgggcccagcgcgcaggcggcggccgccgccaacaggggcgtcaagaagtcggtgctgcgcaggatccccaccgtgccctacgccgcctccgccgccgcctgcagccaaggggaaggggacgacgcggacgagtgcgccatctgcctggcggagttcgaggagggcgagcccacccgcgtgctgccccagtgcggccacgccttccacgccgcctgcgtcgacaggtggctgcgcgcccactcgtcctgcccctcctgccgccggatcctctccctccagctgccgcccggcgagcggtgccgccgctgcggcgcgcggcccctggacgacggggacgctgggtggaagcccacctactacagcgccatgccgccgttcctggcgtaagcggcggaggaatcgcccgatccggaagcaaagcaaagcaaacctgtatcaattaggggatcaattaggttgtttgttgcagctgaaaacactgcactgcagcgtgcgtagtagtagtactagtaccaggctggcgtgtacagtacagtttgtaaatactcaagtaattaatatgcatgcgatgagttttggt

SEQ ID NO: 8121 - protein, 283 aa, Zea mays subsp. mays
  peptide (1)..(283): Ceres Seq. ID no. 12402387
IPRGLSPLLTQAHTHFLSASSPAPISKPVSQQWCQRPERRGCTAERGSSCGGPARTGPTTTTWSSCSPRCCARSSPSSASASWRGARARAGPARRRRPPPTGASRSRCCAGSPPCPTPPPPPPAAKGKGTTRTSAPSAWRSSRRASPPACCPSAATPSTPPASTGGCAPTRPAPPAAGSSPSSCRPASGAAAAARGPWTTGTLGGSPPTTAPCRRSWRKRRRNRPIRKQSKANLYQLGDQLGCLLQLKTLHCSVRSSSTSTRLACTVQFVNTQVINMHAMSFG

SEQ ID NO: 8122 - protein, 217 aa, Zea mays subsp. mays
  peptide (1)..(217): Ceres Seq. ID no. 12402388
PSWPLSPPHTGTHALSVSFLPCADKQAREPTVVPAARAARMHSGARKLMWGTSPDRPDDHDVVIVLASLLCALITVLGIGLVARCACARGPSAQAAAAANRGVKKSVLRRIPTVPYAASAAACSQGEGDDADECAICLAEFEEGEPTRVLPQCGHAFHAACVDRWLRAHSSCPSCRRILSLQLPPGERCRRCGARPLDDGDAGWKPTYYSAMPPFLA

SEQ ID NO: 8123 - protein, 177 aa, Zea mays subsp. mays
  peptide (1)..(177): Ceres Seq. ID no. 12402389
MHSGARKLMWGTSPDRPDDHDVVIVLASLLCALITVLGIGLVARCACARGPSAQAAAAANRGVKKSVLRRIPTVPYAASAAACSQGEGDDADECAICLAEFEEGEPTRVLPQCGHAFHAACVDRWLRAHSSCPSCRRILSLQLPPGERCRRCGARPLDDGDAGWKPTYYSAMPPFLA

SEQ ID NO: 8124 - DNA, 1011 bp, Zea mays subsp. mays
  misc_feature (1)..(1011): Ceres Seq. ID no. 12386530
  misc_feature (1)..(1011): Ortholog of  Ceres SEQ ID NO 13592961 as cited in SEQ ID NO 20522
  misc_feature (1)..(1011): Ortholog of  Ceres SEQ ID NO 13595998 as cited in SEQ ID NO 68161
gaaattgttcctaatgttgttggcgccataagctcgggcatcacggaccttataaatcttggagcaaagaagttagttgttccagggaacttcccaatagggtgtgtcccattatatcttgcaatctttcagagccaaaaggagggttactatgaggaacaaacaggctgcattaagtggctcaatgaatttgctgagtaccataataggatgcttcaggaggagttggagaaactcaggaatcttcaccctgatgtaaccatcatttatgctgattattacggtgctgcattgaacatattccgtgccccactcaagtttggcttcacagtcccactgaatgcgtgctgcggaagtgacgctccgtacaactgttccccttcaatactgtgcgggcgtcctggatctacagtgttccctgacccatcaaaatacatctcatgggatggtctacacttcaccgaggcgagttacaaagttgtcatccaaggagtactaggggggtacgccaaacctcctctttcagaagcctgcaagggtgcggagttcaaagtttctcaacttcaccaatgtacagataatccaacaaacaccgtatcatacgatgccttgagctcttttatttgatctgatgagctcaagtacttttagatttgtgctggtaaaaaaagtgcagtttagagttacagtgggcagtgtagatgctgcaggaccgggtatcttggacacttctcagagcggagaagagatccatcgatctagagtcatgtagttctacaatcaacttggctgctgggaggaggtaaaaaaaggtggggattttgtagtgtggaaatttgcaatcaccgaagggatacaggtggtcatactgctatataggaacctagatctatgattctgcttctgagggcaatgtatgcagatatgggctcagttgccttttaacagatacatgcatatatacagtgtaaatttgttgattcacattaaccaggataataaccgttgtcc

SEQ ID NO: 8125 - protein, 208 aa, Zea mays subsp. mays
  peptide (1)..(208): Ceres Seq. ID no. 12386531
EIVPNVVGAISSGITDLINLGAKKLVVPGNFPIGCVPLYLAIFQSQKEGYYEEQTGCIKWLNEFAEYHNRMLQEELEKLRNLHPDVTIIYADYYGAALNIFRAPLKFGFTVPLNACCGSDAPYNCSPSILCGRPGSTVFPDPSKYISWDGLHFTEASYKVVIQGVLGGYAKPPLSEACKGAEFKVSQLHQCTDNPTNTVSYDALSSFI

SEQ ID NO: 8126 - protein, 138 aa, Zea mays subsp. mays
  peptide (1)..(138): Ceres Seq. ID no. 12386532
MLQEELEKLRNLHPDVTIIYADYYGAALNIFRAPLKFGFTVPLNACCGSDAPYNCSPSILCGRPGSTVFPDPSKYISWDGLHFTEASYKVVIQGVLGGYAKPPLSEACKGAEFKVSQLHQCTDNPTNTVSYDALSSFI

SEQ ID NO: 8127 - DNA, 474 bp, Zea mays subsp. mays
  misc_feature (1)..(474): Ceres Seq. ID no. 1423771
  misc_feature (1)..(474): Ortholog of  Ceres SEQ ID NO 12784228 as cited in SEQ ID NO 66111
accctacctcacaagtccaaatcagtttgtytgctccgcccgttgcccgtggcccgtcggtctctcttgcagtctcgccgctccccttcctcccccgcagaatccgaatcagtaagtccggcgacctaggtctctcggcttgtccgcagcccgccggtcagtaatggcgcaggatgatccggttgtttctgctcagtggctgcacgagcacctagggatgcctgatgttaaggttttggatgcttcctggtacatgccggtagagaacagggatccatggaaagaatatcaggtggcacacatccccggtgcgctattcttcgacttagatggcatagttgatcggacaactgatttaccgcacatgctgccatcagaagaggcttttgcagcagcaatttctgagctggatataaaaaaccaggataaagttattgtctatgatggaagggattcttcagtgcacctcgtgtt

SEQ ID NO: 8128 - protein, 103 aa, Zea mays subsp. mays
  peptide (1)..(103): Ceres Seq. ID no. 1423772
MAQDDPVVSAQWLHEHLGMPDVKVLDASWYMPVENRDPWKEYQVAHIPGALFFDLDGIVDRTTDLPHMLPSEEAFAAAISELDIKNQDKVIVYDGRDSSVHLV

SEQ ID NO: 8129 - protein, 85 aa, Zea mays subsp. mays
  peptide (1)..(85): Ceres Seq. ID no. 1423773
MPDVKVLDASWYMPVENRDPWKEYQVAHIPGALFFDLDGIVDRTTDLPHMLPSEEAFAAAISELDIKNQDKVIVYDGRDSSVHLV

SEQ ID NO: 8130 - protein, 73 aa, Zea mays subsp. mays
  peptide (1)..(73): Ceres Seq. ID no. 1423774
MPVENRDPWKEYQVAHIPGALFFDLDGIVDRTTDLPHMLPSEEAFAAAISELDIKNQDKVIVYDGRDSSVHLV

SEQ ID NO: 8131 - DNA, 789 bp, Zea mays subsp. mays
  misc_feature (1)..(789): Ceres Seq. ID no. 12341823
  misc_feature (1)..(789): Ortholog of  Ceres SEQ ID NO 13584160 as cited in SEQ ID NO 63677
gaactagagaaaagcaacttgcaggcaaaatcaaaggaaactgaagaagctggactcaaaatgctgagaaagagtttaaatttcaaggcaacaccaatgcccagcttttataaggaaccacctccccccaaggttgagttgaagaagatacctacaacaagagctaggtcaccaaagcttggtcgctccaagaacacatcctcaggagggacagaagggaatccaaatcctccagctcgttcagctcgactgagtctcgatgaaagggtctcccaaaatggtgtcaagaaagcacctgctgcaaatgcagcgaagaagccccagcggaaatctctacctaaactgccttcagagcaaacaaccaaagttgacattgcaccatctgttccatctgcagaagagctagaaaacaagttgccgacgaagggtggtcttgatcgagagccgatccgcgctcaaattacacctgacgaacctggactcactgcataggaacctatcaagccgactcctatgaaaggagggagttgtgccccagcttcctttatcacattttgctatttctgcagtaaactgctggctggtattatgtattagaattagtctcagcaccaggagcttgaagagtggcaagtgacaccgtgtattctttatcttagtttctgttgacataccaggtatttgtagttggcagacaggcagaatttcatattattctccagggctaccagtcaattaagttgccgtccaagtaagatatgtacacgattttgcaaagctttgtgattc

SEQ ID NO: 8132 - protein, 163 aa, Zea mays subsp. mays
  peptide (1)..(163): Ceres Seq. ID no. 12341824
ELEKSNLQAKSKETEEAGLKMLRKSLNFKATPMPSFYKEPPPPKVELKKIPTTRARSPKLGRSKNTSSGGTEGNPNPPARSARLSLDERVSQNGVKKAPAANAAKKPQRKSLPKLPSEQTTKVDIAPSVPSAEELENKLPTKGGLDREPIRAQITPDEPGLTA

SEQ ID NO: 8133 - protein, 143 aa, Zea mays subsp. mays
  peptide (1)..(143): Ceres Seq. ID no. 12341825
MLRKSLNFKATPMPSFYKEPPPPKVELKKIPTTRARSPKLGRSKNTSSGGTEGNPNPPARSARLSLDERVSQNGVKKAPAANAAKKPQRKSLPKLPSEQTTKVDIAPSVPSAEELENKLPTKGGLDREPIRAQITPDEPGLTA

SEQ ID NO: 8134 - protein, 131 aa, Zea mays subsp. mays
  peptide (1)..(131): Ceres Seq. ID no. 12341826
MPSFYKEPPPPKVELKKIPTTRARSPKLGRSKNTSSGGTEGNPNPPARSARLSLDERVSQNGVKKAPAANAAKKPQRKSLPKLPSEQTTKVDIAPSVPSAEELENKLPTKGGLDREPIRAQITPDEPGLTA

SEQ ID NO: 8135 - DNA, 476 bp, Zea mays subsp. mays
  misc_feature (1)..(476): Ceres Seq. ID no. 5005895
  misc_feature (1)..(476): Ortholog of  Ceres SEQ ID NO 13594809 as cited in SEQ ID NO 51847
  misc_feature (1)..(476): Ortholog of  Ceres SEQ ID NO 15226273 as cited in SEQ ID NO 64934
  misc_feature (1)..(476): Ortholog of  Ceres SEQ ID NO 12617639 as cited in SEQ ID NO 65219
  misc_feature (1)..(476): Ortholog of  Ceres SEQ ID NO 15173998 as cited in SEQ ID NO 0
  misc_feature (1)..(476): Ortholog of  Ceres SEQ ID NO 15178333 as cited in SEQ ID NO 0
catcacccgcgtccgccaccgccgccgcctttcgtaccgcggcccctaaacccctttcctcgttcccctccgtctctcagttaggcacaatgatgctagctaataagcttggtggtttgctcaagaatgctacgagttcaaagagttcaaatatgtctgtctaccaagcaatcagatgcatgtcatcatccaagctttttgttggagggctttcttatggaaccgatgatcacagtctcagagacgagtttgccaaatatggacaagttattgaagctaagattatccttgatcgtgagtctgggaggtccagaggttttggctttataacttacacgtcttctgaggaggcttcggctgccatcactgccatggatggaaagactctggatggacggaacatacgggttaatcatgctaacgagaggacaggtggcttccgcagcagtggtggcggctatggtggcggtggctat

SEQ ID NO: 8136 - protein, 158 aa, Zea mays subsp. mays
  peptide (1)..(158): Ceres Seq. ID no. 5005896
SPASATAAAFRTAAPKPLSSFPSVSQLGTMMLANKLGGLLKNATSSKSSNMSVYQAIRCMSSSKLFVGGLSYGTDDHSLRDEFAKYGQVIEAKIILDRESGRSRGFGFITYTSSEEASAAITAMDGKTLDGRNIRVNHANERTGGFRSSGGGYGGGGY

SEQ ID NO: 8137 - protein, 129 aa, Zea mays subsp. mays
  peptide (1)..(129): Ceres Seq. ID no. 5005897
MMLANKLGGLLKNATSSKSSNMSVYQAIRCMSSSKLFVGGLSYGTDDHSLRDEFAKYGQVIEAKIILDRESGRSRGFGFITYTSSEEASAAITAMDGKTLDGRNIRVNHANERTGGFRSSGGGYGGGGY

SEQ ID NO: 8138 - protein, 128 aa, Zea mays subsp. mays
  peptide (1)..(128): Ceres Seq. ID no. 5005898
MLANKLGGLLKNATSSKSSNMSVYQAIRCMSSSKLFVGGLSYGTDDHSLRDEFAKYGQVIEAKIILDRESGRSRGFGFITYTSSEEASAAITAMDGKTLDGRNIRVNHANERTGGFRSSGGGYGGGGY

SEQ ID NO: 8139 - DNA, 631 bp, Zea mays subsp. mays
  misc_feature (1)..(631): Ceres Seq. ID no. 12342153
  misc_feature (1)..(631): Ortholog of  Ceres SEQ ID NO 15226449 as cited in SEQ ID NO 58879
  misc_feature (1)..(631): Ortholog of  Ceres SEQ ID NO 13597146 as cited in SEQ ID NO 63311
tgcttaaggttcttgacaaggagaaacgccaggcacattgtgctgatgttggatctcacttgttggagcgtctaaaatcgcttcaggacaagcacgaaattataggtgatgttagaggaaggggactgatgcttggggtggaactcgttacggacagaaaggagaagacccctgccaagtcagaaaccattgaactgtttgagaagctcagagatctcggggtactagttggaaagggcggtctgcatggtaacgtcttcagaataaaaccaccgatgtgcttttcgaaggacgatgcagacttcttggtggactccatggactacgcaatgtcaaggctctgaaggaacatgctctgagttgacaatgtgtctgcgtggaaacaacacttcctgcaaccgcaagatgcatggcctgaaatgaaactgaaaggcagatgatttaatgggcatgctccccgggtggtatgttggtgttatggtgaagtttaatagtccccctcccccgaataaattgatgaaaggggacagaacgtcttgcccagcttgtgaactgtttgtagaagaactgcagttaataaatagaatagcgagcaagcaagcgtgatatcaatctgcatacgtccattttc

SEQ ID NO: 8140 - protein, 113 aa, Zea mays subsp. mays
  peptide (1)..(113): Ceres Seq. ID no. 12342154
LKVLDKEKRQAHCADVGSHLLERLKSLQDKHEIIGDVRGRGLMLGVELVTDRKEKTPAKSETIELFEKLRDLGVLVGKGGLHGNVFRIKPPMCFSKDDADFLVDSMDYAMSRL

SEQ ID NO: 8141 - protein, 71 aa, Zea mays subsp. mays
  peptide (1)..(71): Ceres Seq. ID no. 12342155
MLGVELVTDRKEKTPAKSETIELFEKLRDLGVLVGKGGLHGNVFRIKPPMCFSKDDADFLVDSMDYAMSRL

SEQ ID NO: 8142 - DNA, 832 bp, Zea mays subsp. mays
  misc_feature (1)..(832): Ceres Seq. ID no. 12402043
  misc_feature (1)..(832): Ortholog of  Ceres SEQ ID NO 13599287 as cited in SEQ ID NO 338
  misc_feature (1)..(832): Ortholog of  Ceres SEQ ID NO 15172934 as cited in SEQ ID NO 51783
  misc_feature (1)..(832): Ortholog of  Ceres SEQ ID NO 14314817 as cited in SEQ ID NO 52571
  misc_feature (1)..(832): Ortholog of  Ceres SEQ ID NO 15174056 as cited in SEQ ID NO 0
ataaatcaaccgccggtgaagtctagtcgtctcgtcgctcggtccaccacctcagctccgccgcttgcccgcttttgctctctccctcccggctctcggcttcttctacacgctaccgtctcacagccgtaaacgcccctcccggatcccgctagttcgccaccgccgcccgcccgcccgcctttcgcctcatcatggccgcctcgtcgaccgccacctccgtccacgacttcatcgtcaaggatgcgagcggcaaagacgttgacctcagcacctacaaggggaaggttcttctcattgttaacgtcgcatcccagtgtggcttaaccaactccaactacactgagctggcccagctctatgagaagtacaaggaccaaggctttgaaatcctggctttcccatgcaaccagtttggtgggcaggagcctggtaccaataaggagattgtccagtttgcctgcacacgcttcaaggctgagtaccccatcttcgacaaggttgatgtcaacggtagcaatgctgcgcccatctacaagttcttgaaatctagcaaaggtggccttttcggcgacagcatcaagtggaacttttccaagttcttggttgacaaggagggacgtgttgtggatcgctatgctccaaccacttcacccctgagcattgagaaggatatcaagaagctgcttgggagctcttaatcagtatctgggtgcaaagctgtagaaaaacatgtatcaacaatgccctgagcgataaaatatatgataagttgtattaataaagtattgtcgtacttgagaggttgcagtatctgctctatttcccttgc

SEQ ID NO: 8143 - protein, 168 aa, Zea mays subsp. mays
  peptide (1)..(168): Ceres Seq. ID no. 12402044
MAASSTATSVHDFIVKDASGKDVDLSTYKGKVLLIVNVASQCGLTNSNYTELAQLYEKYKDQGFEILAFPCNQFGGQEPGTNKEIVQFACTRFKAEYPIFDKVDVNGSNAAPIYKFLKSSKGGLFGDSIKWNFSKFLVDKEGRVVDRYAPTTSPLSIEKDIKKLLGSS

SEQ ID NO: 8144 - DNA, 1075 bp, Zea mays subsp. mays
  misc_feature (1)..(1075): Ceres Seq. ID no. 13495182
  misc_feature (1)..(1075): Ortholog of  Ceres SEQ ID NO 15226493 as cited in SEQ ID NO 59078
ctatttgcggaaaggaacttctgttagtgctggccaaacatcaagttcatcaaatggaacaactgcaggagaaaggcctctcctacgtgagaaattgtcaaagggaaaggatggctttgttgctgctgatttcacagctacagaagctcattgtgctgtaccctcgactccaatactttggttccagcaggcagatgagtgcatgcacctatgcatttatcagcacaaaagtctcactatcttactgctggttcctgcttcctcagtgataaatggagaagagggcattactcatgtgaagaaggcgatccttgaaaatgcatcacagaagattgtcactgttgagcagaaattgacacgaggatggggaggagaaaatgcgtatcatgttagtggatatcgttatttgcttgttgatccggagagaagagtatcaagagcctccccacctgggaaagtcaccaccctagcaaaggattctctacttgccctcaacatgctaagacaagaagtagatctagagaagtcaagatacaagagaggcgacccttgtcatgataaggatttcgaagtatgtatcagaacaaaaaacaatgcgtgggttattgctaaaatcagtcaaggaagggagctttacatggctctagagaagggtggtgaaacgcttctatatgcatccacagctgtagagaaattcagcaacaggtactgtgagggagcattctctacagattagaagcaccagagggagatcttagcttttccatacattacctattatgtacatcctgttttttttcccagctgtatcgttgccccctattgttgagagactcggaccactctttgcgaagggaataaggagttcgtatcagttgtacagctgctctgctgtcgtgtgctatctgcaaaagaatagcctagtctgggaataacgcagagcgggatagagtttgtttgttcacttatgcccttccttaacgcagagcattgtgcgtgttttcattttgctgtaacagccggcgatttacctgcagactgggaaagtaacttagcgtttaatttggtattctgc

SEQ ID NO: 8145 - protein, 244 aa, Zea mays subsp. mays
  peptide (1)..(244): Ceres Seq. ID no. 13495183
YLRKGTSVSAGQTSSSSNGTTAGERPLLREKLSKGKDGFVAADFTATEAHCAVPSTPILWFQQADECMHLCIYQHKSLTILLLVPASSVINGEEGITHVKKAILENASQKIVTVEQKLTRGWGGENAYHVSGYRYLLVDPERRVSRASPPGKVTTLAKDSLLALNMLRQEVDLEKSRYKRGDPCHDKDFEVCIRTKNNAWVIAKISQGRELYMALEKGGETLLYASTAVEKFSNRYCEGAFSTD

SEQ ID NO: 8146 - protein, 177 aa, Zea mays subsp. mays
  peptide (1)..(177): Ceres Seq. ID no. 13495184
MHLCIYQHKSLTILLLVPASSVINGEEGITHVKKAILENASQKIVTVEQKLTRGWGGENAYHVSGYRYLLVDPERRVSRASPPGKVTTLAKDSLLALNMLRQEVDLEKSRYKRGDPCHDKDFEVCIRTKNNAWVIAKISQGRELYMALEKGGETLLYASTAVEKFSNRYCEGAFSTD

SEQ ID NO: 8147 - DNA, 1056 bp, Zea mays subsp. mays
  misc_feature (1)..(1056): Ceres Seq. ID no. 12361825
  misc_feature (1)..(1056): Ortholog of  Ceres SEQ ID NO 15175048 as cited in SEQ ID NO 59975
  misc_feature (1)..(1056): Ortholog of  Ceres SEQ ID NO 13597333 as cited in SEQ ID NO 63974
  misc_feature (1)..(1056): Ortholog of  Ceres SEQ ID NO 12407937 as cited in SEQ ID NO 0
  misc_feature (1)..(1056): Ortholog of  Ceres SEQ ID NO 13599307 as cited in SEQ ID NO 0
  misc_feature (1)..(1056): Ortholog of  Ceres SEQ ID NO 15179517 as cited in SEQ ID NO 0
aagctcgtgtaattgctgcggcgacagtgcccaaataaaatcccctaaacctagcgccgccgccgccatgcttcgccgtctcgccgccgtcgcccagcggaccttctcctcctcctcttccccgcacgccccgccgctggctgcgtcgggctacaccccgcgccgcgagtacggcctggtgcccatggtgatcgagcatacctcccgcggggagcgcgcctacgacatcttctcgcgcttgctcaaggagcgcatcgtatgcatccatggccccatcactgacgatacggcgtccctcgtcgtcgcccagctgctcttcctcgaatccgagaaccccgccaagcccgtccacctctacatcaactccccggggggcgtcgtcactgcgggcctcgccatctacgataccatgcagtacatccgctcccccgtcaccacgctctgcatcggtcaggccgcctccatggcgtcgctactcctcgccgctggggcgagcgggcagaggcgggcgctgccgaacgcgcgggtcatgatccaccagccctcgggtggcgcgtcggggcaggcgtcggacatcgccatccacgccaaggagatccttaaggtgcgggaccggctcaacaaaatctacgccaagcacacgggccaggccatcgaccgcatcgagcagtgtatggagagggacatgttcatggacccggaggaggcacatgattgggggctcatcgacgaggtcatcgagcaccgccctgtctctcttgtgtctgatgctgttggcagtgattcgcaaaacctcggtggaggcggagctggggtgaataaaggagcggatgagccatcctcagcgtgatggcattggacagtcgcaaggtgcaatcgttgtcgtgctcctgtagctgtcttatttggatttaaggtttaattcgtacatgaggtgaataccttaattttctggttgctgggctaatccaatagcaacgctgttgttttgatactttaattgatctgttgctgataacgaatgctatctggtatgagccctcaacagcgttgttg

SEQ ID NO: 8148 - protein, 282 aa, Zea mays subsp. mays
  peptide (1)..(282): Ceres Seq. ID no. 12361826
SSCNCCGDSAQIKSPKPSAAAAMLRRLAAVAQRTFSSSSSPHAPPLAASGYTPRREYGLVPMVIEHTSRGERAYDIFSRLLKERIVCIHGPITDDTASLVVAQLLFLESENPAKPVHLYINSPGGVVTAGLAIYDTMQYIRSPVTTLCIGQAASMASLLLAAGASGQRRALPNARVMIHQPSGGASGQASDIAIHAKEILKVRDRLNKIYAKHTGQAIDRIEQCMERDMFMDPEEAHDWGLIDEVIEHRPVSLVSDAVGSDSQNLGGGGAGVNKGADEPSSA

SEQ ID NO: 8149 - protein, 260 aa, Zea mays subsp. mays
  peptide (1)..(260): Ceres Seq. ID no. 12361827
MLRRLAAVAQRTFSSSSSPHAPPLAASGYTPRREYGLVPMVIEHTSRGERAYDIFSRLLKERIVCIHGPITDDTASLVVAQLLFLESENPAKPVHLYINSPGGVVTAGLAIYDTMQYIRSPVTTLCIGQAASMASLLLAAGASGQRRALPNARVMIHQPSGGASGQASDIAIHAKEILKVRDRLNKIYAKHTGQAIDRIEQCMERDMFMDPEEAHDWGLIDEVIEHRPVSLVSDAVGSDSQNLGGGGAGVNKGADEPSSA

SEQ ID NO: 8150 - protein, 221 aa, Zea mays subsp. mays
  peptide (1)..(221): Ceres Seq. ID no. 12361828
MVIEHTSRGERAYDIFSRLLKERIVCIHGPITDDTASLVVAQLLFLESENPAKPVHLYINSPGGVVTAGLAIYDTMQYIRSPVTTLCIGQAASMASLLLAAGASGQRRALPNARVMIHQPSGGASGQASDIAIHAKEILKVRDRLNKIYAKHTGQAIDRIEQCMERDMFMDPEEAHDWGLIDEVIEHRPVSLVSDAVGSDSQNLGGGGAGVNKGADEPSSA

SEQ ID NO: 8151 - DNA, 641 bp, Zea mays subsp. mays
  misc_feature (1)..(641): Ceres Seq. ID no. 12400980
  misc_feature (1)..(641): Ortholog of  Ceres SEQ ID NO 14308991 as cited in SEQ ID NO 0
aatattggctagcttttggctcggcagctaacgacctgcagccaaccatctaccagcgactcagcgagcgagagcagcacacacgcagctagctaggagcagcagcagagcagcggcgatggcggcctccatgatctcctcgtcagctctggcggtggcgcctcagggcctgccgcccctcggccgccgcgcctcctccttcgccgtcgtctgctccaagaagaagatcaagaccgacaagccctacgggattgggggtggcctgaccgtcgacgtcgacgccaacgggagaaagggcaagggcaagggcgtgtaccagttcgtcgacaagtacggcgcgaacgtcgacggatacagcccaatctacaacgaggatgactggtctcccaccggcgacgtctacgtngtggaaccactgggcttctgatctgggccgtcaccctcgctgggatcctcggcggcggcgccctcctcgtctacaacaccagcgccctctccggctaaggatatccaatgcatgcgcttcttgcgattcgtcatgtaaaatcagggtgtctgtctataatctagcctccatggatgctcaaccttcgtcatgtaacaataatcagtgctactcttcattacataattttgatgcc

SEQ ID NO: 8152 - protein, 102 aa, Zea mays subsp. mays
  peptide (1)..(102): Ceres Seq. ID no. 12400981
  misc_feature (96)..(96): Xaa is any aa, unknown or other
MAASMISSSALAVAPQGLPPLGRRASSFAVVCSKKKIKTDKPYGIGGGLTVDVDANGRKGKGKGVYQFVDKYGANVDGYSPIYNEDDWSPTGDVYXVEPLGF

SEQ ID NO: 8153 - protein, 98 aa, Zea mays subsp. mays
  peptide (1)..(98): Ceres Seq. ID no. 12400982
  misc_feature (92)..(92): Xaa is any aa, unknown or other
MISSSALAVAPQGLPPLGRRASSFAVVCSKKKIKTDKPYGIGGGLTVDVDANGRKGKGKGVYQFVDKYGANVDGYSPIYNEDDWSPTGDVYXVEPLGF

SEQ ID NO: 8154 - protein, 89 aa, Zea mays subsp. mays
  peptide (1)..(89): Ceres Seq. ID no. 12400983
  misc_feature (11)..(11): Xaa is any aa, unknown or other
MTGLPPATSTXWNHWASDLGRHPRWDPRRRRPPRLQHQRPLRLRISNACASCDSSCKIRVSVYNLASMDAQPSSCNNNQCYSSLHNFDA

SEQ ID NO: 8155 - DNA, 911 bp, Zea mays subsp. mays
  misc_feature (1)..(911): Ceres Seq. ID no. 12402669
  misc_feature (1)..(911): Ortholog of  Ceres SEQ ID NO 13594244 as cited in SEQ ID NO 57362
gcgatttcccctcgcagtctctcgcacgcgccggcatggcgacgctcgcgcggtggcatctacaacctcctactgcccgccccctcgctcgccggcggatcccgcgtcgggctgcgaccgtggtttccccgcgcgcgttcagccgcgcggacttcgatggcttcgtgcggcgcgcgtggcagggcgccaacgcgggggccgagcgcttcgccttcgaggcacggcaggccgcgcagcggctggacagcaggttctcgatctcccggaggctcgcggacgcttcccgtgccgcccgcgcccgcgccgttgagatcgacgccgagttcggcatcgggaggcggtggcgctccttctccgtcgacttctcccgcaactggcccaggtatcggagggagatcaatgacttcatggaaactcccatcgggagagcattagctacaatattttttctgtggttagcactgtcagggtggttgttcagaattttcatttttggcacgtttgtgctgccatttgctgcccctcttctccttgggacctttgctaacagggttgccattgagggaacatgcccagcatgcaaaaggcgtttcgtgggctaccgcaaccaagtgattcggtgcatgagctgccaaaacattgtatggcagccaaataacagcccatctggtggtgctagaagttcacgaagctcggaacctgatgtgattgatgtagaatatgaagagaagtaagaacattctgccccaccctacaccgaaaagcaaaaatcacgtgggcggaagaagaggcaaggcttcagacacaggctgcaccccatgagctatttgtagatttggttgtttgtgtttttctggtgtacatacattacgtgctcctttcgaaataaaatggaaattctggtgttgtgc

SEQ ID NO: 8156 - protein, 243 aa, Zea mays subsp. mays
  peptide (1)..(243): Ceres Seq. ID no. 12402670
DFPSQSLARAGMATLARWHLQPPTARPLARRRIPRRAATVVSPRAFSRADFDGFVRRAWQGANAGAERFAFEARQAAQRLDSRFSISRRLADASRAARARAVEIDAEFGIGRRWRSFSVDFSRNWPRYRREINDFMETPIGRALATIFFLWLALSGWLFRIFIFGTFVLPFAAPLLLGTFANRVAIEGTCPACKRRFVGYRNQVIRCMSCQNIVWQPNNSPSGGARSSRSSEPDVIDVEYEEK

SEQ ID NO: 8157 - protein, 232 aa, Zea mays subsp. mays
  peptide (1)..(232): Ceres Seq. ID no. 12402671
MATLARWHLQPPTARPLARRRIPRRAATVVSPRAFSRADFDGFVRRAWQGANAGAERFAFEARQAAQRLDSRFSISRRLADASRAARARAVEIDAEFGIGRRWRSFSVDFSRNWPRYRREINDFMETPIGRALATIFFLWLALSGWLFRIFIFGTFVLPFAAPLLLGTFANRVAIEGTCPACKRRFVGYRNQVIRCMSCQNIVWQPNNSPSGGARSSRSSEPDVIDVEYEEK

SEQ ID NO: 8158 - protein, 144 aa, Zea mays subsp. mays
  peptide (1)..(144): Ceres Seq. ID no. 12402672
AISPRSLSHAPAWRRSRGGIYNLLLPAPSLAGGSRVGLRPWFPRARSAARTSMASCGARGRAPTRGPSASPSRHGRPRSGWTAGSRSPGGSRTLPVPPAPAPLRSTPSSASGGGGAPSPSTSPATGPGIGGRSMTSWKLPSGEH

SEQ ID NO: 8159 - DNA, 1022 bp, Zea mays subsp. mays
  misc_feature (1)..(1022): Ceres Seq. ID no. 12402380
  misc_feature (1)..(1022): Ortholog of  Ceres SEQ ID NO 14308225 as cited in SEQ ID NO 59062
  misc_feature (1)..(1022): Ortholog of  Ceres SEQ ID NO 15176615 as cited in SEQ ID NO 0
aagttaggtttctagccagttgtcgcgttgggacaaaatgaaaagggaataaataaaaagagagaataactggctagttgtcgtctgcctctcgatttctgcgtgattcgcctgcctgccttcctgttggttgcttctttctactcgcgctcgcaccaaccagaggagcaaccgagcagtagcgactcctctgcgtgaggcctgccgtcatcccccgtgggccgtggccgtgcgcaaaaaaacaaatcatcctcgattcgaccagaggggaaggagacgcgccgggagaagggggaagagacgcggcgaccatgtctccgatctgggtgttcgggtacggctcgctgatctggaacccaggtttcgcctacgacgaccgcgtcgtcggctttgtcagggactaccgccgcgtcttctaccaagggagcacggaccacaggggcacgccgcagttccccgggaggaccgtcacgctcgagcaccagcccggagcgacttgctggggagttgcttacagaataaaggaggaagatgaggagatagctttggagtatcttgaagtcagggagaagcaatacgatgagaaagtttaccttgacttgtatactgattcatcgcccaaagtaccagctgtcgaaaacgtgatggtatacttcgccaccagtaacaagaagaacaatcaaaactatcttggtcctgcacctctggaagaaatgaccaggcaaatttaccttgctcaaggcccatctggacctaacaaagagtatgtgttcaaactcgaggacgcgttacacaaattaggagttgtagaccaacatgtccaagaactggcaaatgctctgcgtgagtattctgacaccgagctatctaagtgaaagatcacatttaccccttgtttggagggtaaggatttataaataaagttagaattcattcatgcatgtcccaacatggatatattcttgtaagctgcgttttgagtgactacattacgattatattcctgtgcacatgtggtttgc

SEQ ID NO: 8160 - protein, 187 aa, Zea mays subsp. mays
  peptide (1)..(187): Ceres Seq. ID no. 12402381
MSPIWVFGYGSLIWNPGFAYDDRVVGFVRDYRRVFYQGSTDHRGTPQFPGRTVTLEHQPGATCWGVAYRIKEEDEEIALEYLEVREKQYDEKVYLDLYTDSSPKVPAVENVMVYFATSNKKNNQNYLGPAPLEEMTRQIYLAQGPSGPNKEYVFKLEDALHKLGVVDQHVQELANALREYSDTELSK

SEQ ID NO: 8161 - DNA, 987 bp, Zea mays subsp. mays
  misc_feature (1)..(987): Ceres Seq. ID no. 12356601
  misc_feature (1)..(987): Ortholog of  Ceres SEQ ID NO 14312293 as cited in SEQ ID NO 58744
  misc_feature (1)..(987): Ortholog of  Ceres SEQ ID NO 15177596 as cited in SEQ ID NO 59731
atccgcttgtccctaccacctccaccaaccaaaacccccaaccgccgaggtcaccggcgactccgtcctcgccgcgccgcgccgtgaggatgtcgttccactaccacgaccacgggctgtnnatggacgccgcggcagcggcggccgccgccgcgtcgtcgccgaaccctagcggcttctcccccggcatcggcggggaaagggagaaggcggccatcgcggcgcacccgctgtacgagcgcctcctggaggcgcacgtcgcctgcctacgcgtcgccacccccgtcgaccagctcccccgcatcgacgcgcagatcgccgcgcgcccncngccgctcnccgcggccgccggggccgcggccgcgggaggcccgtccggcggggaggagctcgacctcttcatgacgcactatgtattgctcctttgctgatgcaaggngcagttgcagcagcatgtacgtgttcatgcaatggaagcagtgatgggttgctgggagcttgnacaatctttacaaagcctaacaggggcatctccgggtgaaggcactggaggaaccatgtctgacgatgaagataaccaggtggatagtgaagccaacatgttcgatggaaatgatggatcagacggtatgggctttggccccctaatactgacagagggtgaacggtccttagttgagcgtgtacggaaggagctgaagaacgagcttaagcagggttacaaggaaaagcttgtcgatatcagggaagagatcatgcgcaaacgcagggctgggaaacttcctggagataccgcatctgtactgaaagcttggtggcaagctcattcgaagtggccgtacccaactgaagacgacaaggccagactggtgcaggaaacggggttgcagctaaagcagatcaacaactggttcattaaccaacgcaaacggaactggcacagcaacccaacatcctcggctgaaaagaccaaaaaaaaaaaaaaaa

SEQ ID NO: 8162 - protein, 172 aa, Zea mays subsp. mays
  peptide (1)..(172): Ceres Seq. ID no. 12356602
  misc_feature (11)..(11): Xaa is any aa, unknown or other
MEAVMGCWELXQSLQSLTGASPGEGTGGTMSDDEDNQVDSEANMFDGNDGSDGMGFGPLILTEGERSLVERVRKELKNELKQGYKEKLVDIREEIMRKRRAGKLPGDTASVLKAWWQAHSKWPYPTEDDKARLVQETGLQLKQINNWFINQRKRNWHSNPTSSAEKTKKKKK

SEQ ID NO: 8163 - protein, 168 aa, Zea mays subsp. mays
  peptide (1)..(168): Ceres Seq. ID no. 12356603
  misc_feature (7)..(7): Xaa is any aa, unknown or other
MGCWELXQSLQSLTGASPGEGTGGTMSDDEDNQVDSEANMFDGNDGSDGMGFGPLILTEGERSLVERVRKELKNELKQGYKEKLVDIREEIMRKRRAGKLPGDTASVLKAWWQAHSKWPYPTEDDKARLVQETGLQLKQINNWFINQRKRNWHSNPTSSAEKTKKKKK

SEQ ID NO: 8164 - protein, 143 aa, Zea mays subsp. mays
  peptide (1)..(143): Ceres Seq. ID no. 12356604
MSDDEDNQVDSEANMFDGNDGSDGMGFGPLILTEGERSLVERVRKELKNELKQGYKEKLVDIREEIMRKRRAGKLPGDTASVLKAWWQAHSKWPYPTEDDKARLVQETGLQLKQINNWFINQRKRNWHSNPTSSAEKTKKKKK

SEQ ID NO: 8165 - DNA, 726 bp, Zea mays subsp. mays
  misc_feature (1)..(726): Ceres Seq. ID no. 12402116
  misc_feature (1)..(726): Ortholog of  Ceres SEQ ID NO 14301998 as cited in SEQ ID NO 52093
  misc_feature (1)..(726): Ortholog of  Ceres SEQ ID NO 12619783 as cited in SEQ ID NO 69210
atccgccgaattaagttcctgcacgtacgcacgcaccgggacaccagcaacccccaacagcgccactgtccagtgcgcgcgtcaagcttgcttagctagccgccatggcctccctcgccgccgtctccgtgaagcccgtggccatcaagggtctcgccggcagctccatctccggaaggaagctcgccgtcgccaggccgtcggcccgctccatccgcaggccccgcgcagccgccgtggtggccaagtacggcgacaagagcgtctactttgacctcgacgacatcggcaacaccaccggacagtgggacctctacggctctgacgcgccctcgccctacaacccgctacagagcaagttcttcgagacgttcgcggctccgttcaccaagagaggtctgctgctcaagttcctgctgctgggcggcggctcacttctggcctacgtcagcgcgtcggcgtcaccggacctcctgccgatcaagaagggacctcaggagccgccgcagccgggcccgcgcggcaagatctaagctcagcttctccatttgcatggtctagtagtagcttgctttgtactgctagcgccggtcgatccgtcgcaatcgtcatggatcatctctctatcttgttgttacgctgttcataatttggtatatttgccattccgctattgtgtactctttggcatacatacaataattaaaatggcgttgcgtggctttc

SEQ ID NO: 8166 - protein, 142 aa, Zea mays subsp. mays
  peptide (1)..(142): Ceres Seq. ID no. 12402117
MASLAAVSVKPVAIKGLAGSSISGRKLAVARPSARSIRRPRAAAVVAKYGDKSVYFDLDDIGNTTGQWDLYGSDAPSPYNPLQSKFFETFAAPFTKRGLLLKFLLLGGGSLLAYVSASASPDLLPIKKGPQEPPQPGPRGKI

SEQ ID NO: 8167 - protein, 90 aa, Zea mays subsp. mays
  peptide (1)..(90): Ceres Seq. ID no. 12402118
SAELSSCTYARTGTPATPNSATVQCARQACLASRHGLPRRRLREARGHQGSRRQLHLRKEARRRQAVGPLHPQAPRSRRGGQVRRQERLL

SEQ ID NO: 8168 - DNA, 1448 bp, Zea mays subsp. mays
  misc_feature (1)..(1448): Ceres Seq. ID no. 13496092
  misc_feature (1)..(1448): Ortholog of  Ceres SEQ ID NO 14303263 as cited in SEQ ID NO 1224
  misc_feature (1)..(1448): Ortholog of  Ceres SEQ ID NO 13593955 as cited in SEQ ID NO 54278
  misc_feature (1)..(1448): Ortholog of  Ceres SEQ ID NO 13597380 as cited in SEQ ID NO 64054
  misc_feature (1)..(1448): Ortholog of  Ceres SEQ ID NO 12625474 as cited in SEQ ID NO 64169
  misc_feature (1)..(1448): Ortholog of  Ceres SEQ ID NO 13597502 as cited in SEQ ID NO 64681
gcacgagaccattacctagaacatcctaatcgaaaagtgggtgtcgggcgggccagcagctggacaagcaagcaagcaagcaagccaataatggcgtctcactctcatcggtcccggtctcccacggcgccctgtcccagctgggggcacgcccacgcgccgcggtgccggcggcggctcgtccgggcactgctgctcgtagcggcgctggcgctggcggcggcaggtggtggtggtcgtggctccgcggccgccgccgccgccgccacccagcagaggatcccggccatcttcatgttcggcgactccatcgtggacccgggcaacaacaacaaccggctgacggagggccaaggccaacttcccgccgtacgggcaggacttccccggcggcgtcgccacgggggaggttctccaacggcttggtccccggggacctcctagcttccaagctgggcatcaaggagctgctgccgccgttcatcggcaccgacctgcagctcgaggacctgctcaccggcgtggccttcgcctgcggcggcagtggctacgatccgctcacgtccaagctcgcgacgaccctgtcgagcgccgaccagctccagctgttccaggactacaaggataagctggcggccctggccggggaggaggagatggagcgggtcgtctcgcaggccgtctacttcacggtgatgggggcaaacgacatcgtaaacaactacttcatcctccccatcagacgccaccagtacgacctctcgtcctacgtcgacttcctcgtctcctcggcgatcaacttcacaaggactctgaacgacatgggagctcagaggatagcgttcctcggcgtgccgccactaggatgctgcccgtcacagatcacgctcgcggggagcccgtcgcgccagtgcgatccggcaaggaaccaggcgtcggagctgtacaactccagggtctccaaggagatagagcgcctcaacgcggagcggagcggttctggctccaagttcgtctacgtcgacatatactacaacttgctcgacctcatccagaatccagcttcgtacggtttcaaggacgtgagcgaaggttgctgcggcagcacggtgctgaacgccgccatcttcatcgcgtaccacagcgcgtgccccaacgcgcccgactacatattctgggacggcttccaccccacgcagaaggcctacgacatcgtggtggacaagctcatccagcagaactccaagtacctgatgatgtgaagacgcttgctgctgctgcggctgctgcatggcacgagggctctacctttccccgtacaaacacacagccagctgacgtcgaccattcatggacgactccccagtccccacatggcagtggcatttgccaaatgtacgatacatattaacatataaatatactatacatgcctgtgcgccaatatc

SEQ ID NO: 8169 - protein, 201 aa, Zea mays subsp. mays
  peptide (1)..(201): Ceres Seq. ID no. 13496093
MERVVSQAVYFTVMGANDIVNNYFILPIRRHQYDLSSYVDFLVSSAINFTRTLNDMGAQRIAFLGVPPLGCCPSQITLAGSPSRQCDPARNQASELYNSRVSKEIERLNAERSGSGSKFVYVDIYYNLLDLIQNPASYGFKDVSEGCCGSTVLNAAIFIAYHSACPNAPDYIFWDGFHPTQKAYDIVVDKLIQQNSKYLMM

SEQ ID NO: 8170 - protein, 188 aa, Zea mays subsp. mays
  peptide (1)..(188): Ceres Seq. ID no. 13496094
MGANDIVNNYFILPIRRHQYDLSSYVDFLVSSAINFTRTLNDMGAQRIAFLGVPPLGCCPSQITLAGSPSRQCDPARNQASELYNSRVSKEIERLNAERSGSGSKFVYVDIYYNLLDLIQNPASYGFKDVSEGCCGSTVLNAAIFIAYHSACPNAPDYIFWDGFHPTQKAYDIVVDKLIQQNSKYLMM

SEQ ID NO: 8171 - protein, 181 aa, Zea mays subsp. mays
  peptide (1)..(181): Ceres Seq. ID no. 13496095
MLPVTDHARGEPVAPVRSGKEPGVGAVQLQGLQGDRAPQRGAERFWLQVRLRRHILQLARPHPESSFVRFQGRERRLLRQHGAERRHLHRVPQRVPQRARLHILGRLPPHAEGLRHRGGQAHPAELQVPDDVKTLAAAAAAAWHEGSTFPRTNTQPADVDHSWTTPQSPHGSGICQMYDTY

SEQ ID NO: 8172 - DNA, 1621 bp, Zea mays subsp. mays
  misc_feature (1)..(1621): Ceres Seq. ID no. 12367462
  misc_feature (1)..(1621): Ortholog of  Ceres SEQ ID NO 13592768 as cited in SEQ ID NO 20317
  misc_feature (1)..(1621): Ortholog of  Ceres SEQ ID NO 14303656 as cited in SEQ ID NO 61363
acgggctgggctttcgtgggccgggagtgggcgacgaacgatggctggctggccgtccgtgattgttttggaacgggcagcgtgtttggttggtgcctgtgctgtgccgccgttcgtctctgggtagcgtagcgacggcgccacggcggcttccggctcgtgcgcgcgcgcgcgtgtccgggcgagaagagctgccaagggatggaggcgctgaggaagcaggcgagcaagttcaaggagcaggtcgccaagcagcagcaggctgttataaagcaattcagtactactggctatgagcggtcagattccattgtaattgatgaggttgaactacagagacatcaacagcttgagaaattgtatacttctactcgttctgtaagggatttccagaaggacatagttagagcagctgaaggtttggtgtctattggaaacaaacatattgaagtgggaacaaaattttctgaggactgctatagatatggaagcgaaaataatgcaagcgacgaagcccttagaaaagcagcatcactatacggaggtgctttgagaaatattgagaaagagtatgaagatttcaacagaattttatcttctcagactatagacccattgagagcaatggctatgggtagacccctggaagatgctcgtggtcttgcacagcgctatagcaggatgagacatgaagctgagatcctctctactgaaattgctagaagaaaggcacgggtaagagaagctccaattgctgagcacactacaaagcttcagcaatcagaagctagaatgatagagcacaaagcaagcatggccgtgttagggaaggaagcagcagctgcacttgcaactgtcgagtctcaacagcaacgagtgacccttcagaggctggttggcacggcggaagcagaaaagttattccatctgagattagctgctatacttgatgacgttgaggcagagatgtcctctgagaagcaaaggagagaatctgcaccacctatcatatcttcacataagcgtgctgagaaagctcagtacttccttgctgaggtaatgcataatttcaatggaaccacggagaaggaactgagcttaattgttggcgattatgttgttgttcgtcagattgctcccaacggctgggcggaaggagaatgccgagggaaggctggctggtttccggctgcctatgttgagaggcgcgagaatatccccccgaataaagttttccctcaagtataagatcataagaggggtcatctgtttccactgataagcagtttggtttggcattgaggagctgcaaggctgtatctaacttctgattggtttgatgctccgtatggcgtatcttgtgcatcctatgttcttgtggtggtctagacttggaataagatatgtcggcacgtgctctgcgcctgtgcctgcgcgcacattgatgaagatgtcgctttgcatgtgtccgcagtgtgctactgcttgcggcagcgtaggtcatgttgaatgagctttcctttactgacagatttcgagtgtaaattggttcttgcacttttttttcgttagggtgtatcagtagttctgtacaatatgtttttaatgagaccattcggcc

SEQ ID NO: 8173 - protein, 348 aa, Zea mays subsp. mays
  peptide (1)..(348): Ceres Seq. ID no. 12367463
MEALRKQASKFKEQVAKQQQAVIKQFSTTGYERSDSIVIDEVELQRHQQLEKLYTSTRSVRDFQKDIVRAAEGLVSIGNKHIEVGTKFSEDCYRYGSENNASDEALRKAASLYGGALRNIEKEYEDFNRILSSQTIDPLRAMAMGRPLEDARGLAQRYSRMRHEAEILSTEIARRKARVREAPIAEHTTKLQQSEARMIEHKASMAVLGKEAAAALATVESQQQRVTLQRLVGTAEAEKLFHLRLAAILDDVEAEMSSEKQRRESAPPIISSHKRAEKAQYFLAEVMHNFNGTTEKELSLIVGDYVVVRQIAPNGWAEGECRGKAGWFPAAYVERRENIPPNKVFPQV

SEQ ID NO: 8174 - protein, 207 aa, Zea mays subsp. mays
  peptide (1)..(207): Ceres Seq. ID no. 12367464
MAMGRPLEDARGLAQRYSRMRHEAEILSTEIARRKARVREAPIAEHTTKLQQSEARMIEHKASMAVLGKEAAAALATVESQQQRVTLQRLVGTAEAEKLFHLRLAAILDDVEAEMSSEKQRRESAPPIISSHKRAEKAQYFLAEVMHNFNGTTEKELSLIVGDYVVVRQIAPNGWAEGECRGKAGWFPAAYVERRENIPPNKVFPQV

SEQ ID NO: 8175 - protein, 205 aa, Zea mays subsp. mays
  peptide (1)..(205): Ceres Seq. ID no. 12367465
MGRPLEDARGLAQRYSRMRHEAEILSTEIARRKARVREAPIAEHTTKLQQSEARMIEHKASMAVLGKEAAAALATVESQQQRVTLQRLVGTAEAEKLFHLRLAAILDDVEAEMSSEKQRRESAPPIISSHKRAEKAQYFLAEVMHNFNGTTEKELSLIVGDYVVVRQIAPNGWAEGECRGKAGWFPAAYVERRENIPPNKVFPQV

SEQ ID NO: 8176 - DNA, 1475 bp, Zea mays subsp. mays
  misc_feature (1)..(1475): Ceres Seq. ID no. 12367451
  misc_feature (1)..(1475): Ortholog of  Ceres SEQ ID NO 13654166 as cited in SEQ ID NO 68381
  misc_feature (1)..(1475): Ortholog of  Ceres SEQ ID NO 13599720 as cited in SEQ ID NO 0
aatatgttccttttcagctttgccaatatcgtccctgtttcccttcttgtatttcatgatcgaagatctacacgtggccaaaaaagaacaagatattggactgtacgctggttttcttggtgcatcttactttgtcggtcgatttttggtctcgttcttctggggtgtggtggctgatcgtgtcggaaggaagcccatcattatattttcagtcgcttcagtggttgtattcaacacactgtttggattaagtgtacaatattggatggccatcaccacaagattgcttctaggtgctctcaatggcatgcttgcaccaataaaggcttactcaatcgagatttgtcgacctgagcaccatgctcttgggttatcagttgtaagcacggcttggggcctaggtcttattgttggcccgtccattggaggctacttggcgcagcctgcacggcaatatccaaacgtattctctgaggaatcgatttttgggaggttcccgtatctgctgccatgcctaagtatctccattttttctgctgtcgttctagtaagctgcatatggttaccggagacactccataaacataagaatatagacaacgaagtagaaatgtccggacactcaaggactccacaaacagaagacgtagatgcaggcaagagtctatataagaactggccattgatgtcttccatcattgcgtactgtgttttcacgcttcatgacactgcatacaccgagatactttccttgtggaccgtaagtgacaaaaagtatggtgggctaggcttttcttctaagggagttggtcaacttcttgcgattgcaggtcttgggcttattgtgtatcaaatgttcatctacaggccagtccacagatatctcggaagtgtaaattcatgccgtgctgcatctgcgctatccataccacttatcgctgcttttcccttcatgacacacctgtcaggatcaaaacttggactagctctttattttgctactattttgaaagctgctcttgggataactatcctgacaggcacttcacttctgcagaactatgctgtgccacagcatcaaagaggcgccgcaaacggcgtagcggcgactgcaatgtccttctttaaggctattggacctgcaggagcaggcgctttattctcatggacccaaaaacgccaagatgctgccttctttccaggggatcacatgttgttcttcattctgaatttggtccaatgtattgggctcgtgctgacccttaaaacattcctagcagtaccgaaacactataaatgacagctgctcgaacccaagcaatggaataatgatggattagcaaaacatatgtgcccaaaaatacgtttttgagtggcatacaacggaattatgtaaaagctgtcaagaaaaagtagctacaatgattgtgtccgctatctttacatctccttacattgaagttttaatttgagcc

SEQ ID NO: 8177 - protein, 432 aa, Zea mays subsp. mays
  peptide (1)..(432): Ceres Seq. ID no. 12367452
ICSFSALPISSLFPFLYFMIEDLHVAKKEQDIGLYAGFLGASYFVGRFLVSFFWGVVADRVGRKPIIIFSVASVVVFNTLFGLSVQYWMAITTRLLLGALNGMLAPIKAYSIEICRPEHHALGLSVVSTAWGLGLIVGPSIGGYLAQPARQYPNVFSEESIFGRFPYLLPCLSISIFSAVVLVSCIWLPETLHKHKNIDNEVEMSGHSRTPQTEDVDAGKSLYKNWPLMSSIIAYCVFTLHDTAYTEILSLWTVSDKKYGGLGFSSKGVGQLLAIAGLGLIVYQMFIYRPVHRYLGSVNSCRAASALSIPLIAAFPFMTHLSGSKLGLALYFATILKAALGITILTGTSLLQNYAVPQHQRGAANGVAATAMSFFKAIGPAGAGALFSWTQKRQDAAFFPGDHMLFFILNLVQCIGLVLTLKTFLAVPKHYK

SEQ ID NO: 8178 - protein, 414 aa, Zea mays subsp. mays
  peptide (1)..(414): Ceres Seq. ID no. 12367453
MIEDLHVAKKEQDIGLYAGFLGASYFVGRFLVSFFWGVVADRVGRKPIIIFSVASVVVFNTLFGLSVQYWMAITTRLLLGALNGMLAPIKAYSIEICRPEHHALGLSVVSTAWGLGLIVGPSIGGYLAQPARQYPNVFSEESIFGRFPYLLPCLSISIFSAVVLVSCIWLPETLHKHKNIDNEVEMSGHSRTPQTEDVDAGKSLYKNWPLMSSIIAYCVFTLHDTAYTEILSLWTVSDKKYGGLGFSSKGVGQLLAIAGLGLIVYQMFIYRPVHRYLGSVNSCRAASALSIPLIAAFPFMTHLSGSKLGLALYFATILKAALGITILTGTSLLQNYAVPQHQRGAANGVAATAMSFFKAIGPAGAGALFSWTQKRQDAAFFPGDHMLFFILNLVQCIGLVLTLKTFLAVPKHYK

SEQ ID NO: 8179 - protein, 344 aa, Zea mays subsp. mays
  peptide (1)..(344): Ceres Seq. ID no. 12367454
MAITTRLLLGALNGMLAPIKAYSIEICRPEHHALGLSVVSTAWGLGLIVGPSIGGYLAQPARQYPNVFSEESIFGRFPYLLPCLSISIFSAVVLVSCIWLPETLHKHKNIDNEVEMSGHSRTPQTEDVDAGKSLYKNWPLMSSIIAYCVFTLHDTAYTEILSLWTVSDKKYGGLGFSSKGVGQLLAIAGLGLIVYQMFIYRPVHRYLGSVNSCRAASALSIPLIAAFPFMTHLSGSKLGLALYFATILKAALGITILTGTSLLQNYAVPQHQRGAANGVAATAMSFFKAIGPAGAGALFSWTQKRQDAAFFPGDHMLFFILNLVQCIGLVLTLKTFLAVPKHYK

SEQ ID NO: 8180 - DNA, 1265 bp, Zea mays subsp. mays
  misc_feature (1)..(1265): Ceres Seq. ID no. 12423889
  misc_feature (1)..(1265): Ortholog of  Ceres SEQ ID NO 13648488 as cited in SEQ ID NO 20419
  misc_feature (1)..(1265): Ortholog of  Ceres SEQ ID NO 15171378 as cited in SEQ ID NO 51582
gttactccaggtctccagcccaaccaacgccacgtacaggtacagtacctgtagagaggcagaggcagaggcagaggcagaggcaccaaccttttggacatccctcctccactccctaccaacgacctctgctcatcctaagtttgccaatttgccgctccttcacttcacagttacagtagattacctccatctctcagacggaacggaggaggagagccatgtccagccccacgcacgccaggctcgcgcagcaaggcaaggccggcgtggcgctgcgcctgctcctctccgccgcgctcgccggcttcctcctcgtcttcgccgcgcgcaccctggtcacgtcgcctgtcccggcatcgccctcgtactcgtcgcagccgcatccgctgccgctgcccgtggcggaggcgctggtgcactacgccacgtccaacgcgacgccgcagcagacggcggaggagatcggggtggcgctgcgcgtgctacagcggcgcgcgccctgcaacttcctggtgttcggtctgggcctcgacagccccatgtgggcggcgctgaaccacggggggcggaccgtgttcctggaggaggacgcggcgtggatcaccagcgtgcggggcaggcacccggcgctggagtcccaccacgtggcctacgacacggcgctggccgacgccgacgcgctgctagggctccgcgcccacccggcctgcgtcgcgcagcccgacctcgcggcggccgccgccgcgtcctgccgcctcgcgctccggggcctcccgcccgtcttcgccggcctcgactgggacctcgtcatggtggacgcgcccacggggtggacgccccgggcgcccggccgcatgggcgccatctacaccgccggcatggcggcgcgcgcgcgcaggccaggggccggccccacccacgtcttcgtccacgacgtcgaccgccccgtcgaggacgccttctccagggcgttcctgtgcgagggctacctcgccgagcaggtcggacggatcaggcacttcgtcatcccgtcacaccgcgacaaggacggcacgccattctgcccttgatcaagtttgttctgctttggtttggatcccacggtgcccattgccaaactactacagtactattattgctgcatagatgttgctttgcagttgctcattctacactgatgagtgcctgagatttgggtagacgattacaatgtaaaatcgacaacttgctttgtctgttactcggatgaaaaactccagggt

SEQ ID NO: 8181 - protein, 396 aa, Zea mays subsp. mays
  peptide (1)..(396): Ceres Seq. ID no. 12423890
LLQVSSPTNATYRYSTCREAEAEAEAEAPTFWTSLLHSLPTTSAHPKFANLPLLHFTVTVDYLHLSDGTEEESHVQPHARQARAARQGRRGAAPAPLRRARRLPPRLRRAHPGHVACPGIALVLVAAASAAAARGGGAGALRHVQRDAAADGGGDRGGAARATAARALQLPGVRSGPRQPHVGGAEPRGADRVPGGGRGVDHQRAGQAPGAGVPPRGLRHGAGRRRRAARAPRPPGLRRAARPRGGRRRVLPPRAPGPPARLRRPRLGPRHGGRAHGVDAPGARPHGRHLHRRHGGARAQARGRPHPRLRPRRRPPRRGRLLQGVPVRGLPRRAGRTDQALRHPVTPRQGRHAILPLIKFVLLWFGSHGAHCQTTTVLLLLHRCCFAVAHSTLMSA

SEQ ID NO: 8182 - protein, 283 aa, Zea mays subsp. mays
  peptide (1)..(283): Ceres Seq. ID no. 12423891
MSSPTHARLAQQGKAGVALRLLLSAALAGFLLVFAARTLVTSPVPASPSYSSQPHPLPLPVAEALVHYATSNATPQQTAEEIGVALRVLQRRAPCNFLVFGLGLDSPMWAALNHGGRTVFLEEDAAWITSVRGRHPALESHHVAYDTALADADALLGLRAHPACVAQPDLAAAAAASCRLALRGLPPVFAGLDWDLVMVDAPTGWTPRAPGRMGAIYTAGMAARARRPGAGPTHVFVHDVDRPVEDAFSRAFLCEGYLAEQVGRIRHFVIPSHRDKDGTPFCP

SEQ ID NO: 8183 - DNA, 1524 bp, Zea mays subsp. mays
  misc_feature (1)..(1524): Ceres Seq. ID no. 12408587
  misc_feature (1)..(1524): Ortholog of  Ceres SEQ ID NO 14315354 as cited in SEQ ID NO 58232
  misc_feature (1)..(1524): Ortholog of  Ceres SEQ ID NO 13596392 as cited in SEQ ID NO 62136
  misc_feature (1)..(1524): Ortholog of  Ceres SEQ ID NO 13654360 as cited in SEQ ID NO 67980
  misc_feature (1)..(1524): Ortholog of  Ceres SEQ ID NO 13596394 as cited in SEQ ID NO 68561
atttgttccacaatccacattccccaccccccacggcccccgggcccacccaccctctccctcttcttcctcactcctctctccctctctctctctctctctctctctctcgtcctgcgccacacgccgcggccgtctccgggcaggaaggaagggggcgggaagatgatgatgacgcgggcaccgatggggccgatggagggcgcggcggtggacgagatggtgcgccgcctcgtggagggcggccgaggcgggcgccaggtgcagctgtccgaggcggagatccggcagctctgcgtagagggcaagcgggtgctcctctcccagcccaatctcctccgaatccacgccccagtcaagatctgcggtgatatccatggccagtttgtcgaccttctgagattattcgatttgggtggttatcctccagcttcaacttacgtattcctcggagactatgtcgatagaggcaaacagagcctggagactatatgcttgctgctggcgtacaaaatccggtaccccgaaaatattttcctgttgaggggtaaccacgaggatgcaaagatcaacagagtctatggtttttatgacgaatgtaagaggaggttcaatgttcggctgtggaagatattctctgattgcttcaactgcctgcccatcgcagcgctcatcgatgacaagatactgtgcatgcatggtggcctctcgcccgaattgactagtttggaccagataaaagatattgagcgacctgctgagattcctgattatggtctcctgtgtgatctgctttggtctgatcctagccccgatggagaagggtggggggagagtgacaggggtgtctcgtgtacgtttggtgcagataaacttgtagagtttttggagaagaatgatctcgatcttatatgccgagctcatcaggtggttgaagatggctatgagttctttgcacaacgaagattagtgacaatcttttcagctccaaattattgtggagagtttgataatgttggcgctcttttaagcatagatgagagcctaatgtgttcatttcagatcctgaagccaactgatatgggtccaccgcatgcaagaaaacaaattccaaataagccaacaagagggtgaagccttggaccagcatccaatacttccagttccagtatcatgatgatcgtcagtcagctcaaagggggtgatctgttgtttggatagttggatccaccagggcctgacattagacatccatcagccaattaatccctttagccaccctttactcgtgtcttgggaggcggcttggctgtaaaggatattctgtacagcatttagttggattcaacacatcatctgttttactgttcttcctgccggcaagggacctcattggcagcatgacatacaatagatgttagtagtctcaatttgttttccttagcttctgccttgcgtttttttttttttggtgcgggacttgatgtatggtgattttatatctttgtaatatgtagatgttgc

SEQ ID NO: 8184 - protein, 377 aa, Zea mays subsp. mays
  peptide (1)..(377): Ceres Seq. ID no. 12408588
ICSTIHIPHPPRPPGPPTLSLFFLTPLSLSLSLSLSLVLRHTPRPSPGRKEGGGKMMMTRAPMGPMEGAAVDEMVRRLVEGGRGGRQVQLSEAEIRQLCVEGKRVLLSQPNLLRIHAPVKICGDIHGQFVDLLRLFDLGGYPPASTYVFLGDYVDRGKQSLETICLLLAYKIRYPENIFLLRGNHEDAKINRVYGFYDECKRRFNVRLWKIFSDCFNCLPIAALIDDKILCMHGGLSPELTSLDQIKDIERPAEIPDYGLLCDLLWSDPSPDGEGWGESDRGVSCTFGADKLVEFLEKNDLDLICRAHQVVEDGYEFFAQRRLVTIFSAPNYCGEFDNVGALLSIDESLMCSFQILKPTDMGPPHARKQIPNKPTRG

SEQ ID NO: 8185 - protein, 322 aa, Zea mays subsp. mays
  peptide (1)..(322): Ceres Seq. ID no. 12408589
MMMTRAPMGPMEGAAVDEMVRRLVEGGRGGRQVQLSEAEIRQLCVEGKRVLLSQPNLLRIHAPVKICGDIHGQFVDLLRLFDLGGYPPASTYVFLGDYVDRGKQSLETICLLLAYKIRYPENIFLLRGNHEDAKINRVYGFYDECKRRFNVRLWKIFSDCFNCLPIAALIDDKILCMHGGLSPELTSLDQIKDIERPAEIPDYGLLCDLLWSDPSPDGEGWGESDRGVSCTFGADKLVEFLEKNDLDLICRAHQVVEDGYEFFAQRRLVTIFSAPNYCGEFDNVGALLSIDESLMCSFQILKPTDMGPPHARKQIPNKPTRG

SEQ ID NO: 8186 - protein, 321 aa, Zea mays subsp. mays
  peptide (1)..(321): Ceres Seq. ID no. 12408590
MMTRAPMGPMEGAAVDEMVRRLVEGGRGGRQVQLSEAEIRQLCVEGKRVLLSQPNLLRIHAPVKICGDIHGQFVDLLRLFDLGGYPPASTYVFLGDYVDRGKQSLETICLLLAYKIRYPENIFLLRGNHEDAKINRVYGFYDECKRRFNVRLWKIFSDCFNCLPIAALIDDKILCMHGGLSPELTSLDQIKDIERPAEIPDYGLLCDLLWSDPSPDGEGWGESDRGVSCTFGADKLVEFLEKNDLDLICRAHQVVEDGYEFFAQRRLVTIFSAPNYCGEFDNVGALLSIDESLMCSFQILKPTDMGPPHARKQIPNKPTRG

SEQ ID NO: 8187 - DNA, 1353 bp, Zea mays subsp. mays
  misc_feature (1)..(1353): Ceres Seq. ID no. 12374404
  misc_feature (1)..(1353): Ortholog of  Ceres SEQ ID NO 13593855 as cited in SEQ ID NO 53838
  misc_feature (1)..(1353): Ortholog of  Ceres SEQ ID NO 14302247 as cited in SEQ ID NO 62154
  misc_feature (1)..(1353): Ortholog of  Ceres SEQ ID NO 13539874 as cited in SEQ ID NO 64069
ctcccgtccaggttcactccgccactccggccccctcatcttcttcccgtccccctcttcgttgcccccagatcccgcaaaccgcgaaaagaaaccgcatatcagcggacagcgggcgctgctcgttctcatcgcccccctctcgtctctcgcggagccgaccccgtccccattcggacctcagctagccaccaccaccatggcttcttcgaagaggagatttggtgctgccggcggcgcggacaagaaggatctattccatgtcgtccacaaggtgcccgccggcgacagcccgtacgtcgtagccaagcacctccagctcgtggagaagcaaccggatgtggcgatcgtgtggttctggaaggcaatcaactcaggggacagggtggacagcgccctgaaggacatggccatggtgatgaagcagcaggaccgttccgaggaggcaatcgaggccatcaggtccttcaggcacctctgctccaagcaggctcaggaatccctcgacaacctcctcattgacctctacaagaaatgcgggaaagttgaggagcagatcgagctcctgaaacagaagctcaagtcgatataccttggcgaggccttcaacgggaaggcgacgaagaaagcgcggtcccatggcaagaagtttcaggtctcgatccaacaagagacgtctcgtattctgggcaatcttggctgggcttacatgcagcagaacaacttcgaagccgccgagctggtgtaccgcaaggcgcaagctatcgagcccgatgccaacagggcgtgcaaccttgggctgtgcctgatcaagcagggcaggcacgaggaggcacggcaagcactcgaggacgtccgattgcgcagaatctatggatcagaagatgcaaaggtggttgcccgtgcggagcagcttctccgcgagctaaacccgttgcaatgcgtttcatcgccgttccaggttggcctcagcgtccatgaagggatcatgggtgaaccagacctagtagtgatgaacgagtggacgccgttcaggtcgaggaggctgcctgtgtttgaggagatagcaactttccgggaccaaatggcttgttgatgcattactttgcatggtttaatttatctgtcagtgtcacactcacatccctctagaagtttttgttcgtatactgggtgtgggggcgtgacggtgaggaatagagatcagtatatatcatatagctggggttgatgcaaagcgttgcctttaggatagtatttggttcatgttatatcactgtatggttcagatttcagtgaacaaatgttcgtgcgtgccctgatcttgtacaggatttacagttggctgttgtg

SEQ ID NO: 8188 - protein, 364 aa, Zea mays subsp. mays
  peptide (1)..(364): Ceres Seq. ID no. 12374405
SRPGSLRHSGPLIFFPSPSSLPPDPANREKKPHISGQRALLVLIAPLSSLAEPTPSPFGPQLATTTMASSKRRFGAAGGADKKDLFHVVHKVPAGDSPYVVAKHLQLVEKQPDVAIVWFWKAINSGDRVDSALKDMAMVMKQQDRSEEAIEAIRSFRHLCSKQAQESLDNLLIDLYKKCGKVEEQIELLKQKLKSIYLGEAFNGKATKKARSHGKKFQVSIQQETSRILGNLGWAYMQQNNFEAAELVYRKAQAIEPDANRACNLGLCLIKQGRHEEARQALEDVRLRRIYGSEDAKVVARAEQLLRELNPLQCVSSPFQVGLSVHEGIMGEPDLVVMNEWTPFRSRRLPVFEEIATFRDQMAC

SEQ ID NO: 8189 - protein, 298 aa, Zea mays subsp. mays
  peptide (1)..(298): Ceres Seq. ID no. 12374406
MASSKRRFGAAGGADKKDLFHVVHKVPAGDSPYVVAKHLQLVEKQPDVAIVWFWKAINSGDRVDSALKDMAMVMKQQDRSEEAIEAIRSFRHLCSKQAQESLDNLLIDLYKKCGKVEEQIELLKQKLKSIYLGEAFNGKATKKARSHGKKFQVSIQQETSRILGNLGWAYMQQNNFEAAELVYRKAQAIEPDANRACNLGLCLIKQGRHEEARQALEDVRLRRIYGSEDAKVVARAEQLLRELNPLQCVSSPFQVGLSVHEGIMGEPDLVVMNEWTPFRSRRLPVFEEIATFRDQMAC

SEQ ID NO: 8190 - protein, 229 aa, Zea mays subsp. mays
  peptide (1)..(229): Ceres Seq. ID no. 12374407
MAMVMKQQDRSEEAIEAIRSFRHLCSKQAQESLDNLLIDLYKKCGKVEEQIELLKQKLKSIYLGEAFNGKATKKARSHGKKFQVSIQQETSRILGNLGWAYMQQNNFEAAELVYRKAQAIEPDANRACNLGLCLIKQGRHEEARQALEDVRLRRIYGSEDAKVVARAEQLLRELNPLQCVSSPFQVGLSVHEGIMGEPDLVVMNEWTPFRSRRLPVFEEIATFRDQMAC

SEQ ID NO: 8191 - DNA, 1564 bp, Zea mays subsp. mays
  misc_feature (1)..(1564): Ceres Seq. ID no. 12367922
  misc_feature (1)..(1564): Ortholog of  Ceres SEQ ID NO 13582281 as cited in SEQ ID NO 51014
  misc_feature (1)..(1564): Ortholog of  Ceres SEQ ID NO 14315606 as cited in SEQ ID NO 53515
  misc_feature (1)..(1564): Ortholog of  Ceres SEQ ID NO 15176795 as cited in SEQ ID NO 54453
  misc_feature (1)..(1564): Ortholog of  Ceres SEQ ID NO 14310508 as cited in SEQ ID NO 58965
  misc_feature (1)..(1564): Ortholog of  Ceres SEQ ID NO 12617417 as cited in SEQ ID NO 65089
actgtattattgtgtggctcagctcaacaagctcgccgcaccgtcgccatggacgccgccaccggcaactgttcctcctctccgctgcgcatcgtgatctgcccgtggctcgcgttcggccacatgctcccgtgcctggagctcgcggagcgtctggcttcgcggggccaccgcgtgtccttcgtctccacgccgcgcaacctggcgcgcctcccgccgcggcgccacgacgtgcacctcgtgcccctgcccctcccacgcgtggagggcctccccgacggcgtcgagtccaccaacgacgtgccccccgacaagagagacctccactggaaggccttcgacggcctcgccgtccccttcgctgagttcctggccgccgcgtgcgccgacgaggctaccaggccggactgggtcctcgccgacacattctcccattgggcggccgccgtcgccctcgagcacaaggtgccaagcgcgatgcttctcccgagcgccgccatgatcgcctcgtgctggcaccggccgccgtcgcacgccgagcagccgagaagcgcagtgtttgaggagccggcggaacggccggcgggtgtgctcccttacgagtgggataaaagagcgcacttctttgggccccaaagagcgtcgggcatgtccaccgcgcagcgctgcttcctgacactgcagaggtgcaggctgctggccatgcggagctgccccgagtgggagccggagaatttcacggtggcggcggcactcctcggcaagccgctcgtgccgctcggcctcctaccgccgtcgcccaacggtggacgacgacgagaggaggacggcggcagtacggcgcgctgctggctggacgcgcagccgccgagctcggtcgtgtacgtggcgttgggcagcgaagtcccgctgacggtggcgctggtgcacgagctcgcccttgggctggagctcgccggcgcacgcttcctttgggctctccggaagcccagcggcgtcgcggacgacgccgacgtgctcccgccgggattccgggagcgcacctgcggccgcgggctcgtcgccatgggctgggtccctcagatgagcatactggcgcacggcgccgtgggcgggttcctgacgcactgcggccggaactcgctcgtcgaagggctcctgttcggccaccctctcgtcatgctgcccgtcgtcggggaccagggccccaacgcgcgcgccatggagcggaccaaggttgggctgcaggtggcgaggaacggcaaggacgggtcgttcgaccgccacggcgtcgccgccgccgtccgggaagtcatgctggtggaagaagccaggaaggtcttcgtggcgaatgccctggaaatgcagcgtgttgtggccgacaaggaacgccatgagagatacatcgacgagttcatacgccagctgagatcttactccactccgccggcagcgagttaaaaaggcgtacttggtggcttggtgcctcgcactgtatgtctgtatggggtctaggatgtcaacggttacgtacccgtccagtaatattattccatacttacct

SEQ ID NO: 8192 - protein, 486 aa, Zea mays subsp. mays
  peptide (1)..(486): Ceres Seq. ID no. 12367923
TVLLCGSAQQARRTVAMDAATGNCSSSPLRIVICPWLAFGHMLPCLELAERLASRGHRVSFVSTPRNLARLPPRRHDVHLVPLPLPRVEGLPDGVESTNDVPPDKRDLHWKAFDGLAVPFAEFLAAACADEATRPDWVLADTFSHWAAAVALEHKVPSAMLLPSAAMIASCWHRPPSHAEQPRSAVFEEPAERPAGVLPYEWDKRAHFFGPQRASGMSTAQRCFLTLQRCRLLAMRSCPEWEPENFTVAAALLGKPLVPLGLLPPSPNGGRRREEDGGSTARCWLDAQPPSSVVYVALGSEVPLTVALVHELALGLELAGARFLWALRKPSGVADDADVLPPGFRERTCGRGLVAMGWVPQMSILAHGAVGGFLTHCGRNSLVEGLLFGHPLVMLPVVGDQGPNARAMERTKVGLQVARNGKDGSFDRHGVAAAVREVMLVEEARKVFVANALEMQRVVADKERHERYIDEFIRQLRSYSTPPAAS

SEQ ID NO: 8193 - protein, 470 aa, Zea mays subsp. mays
  peptide (1)..(470): Ceres Seq. ID no. 12367924
MDAATGNCSSSPLRIVICPWLAFGHMLPCLELAERLASRGHRVSFVSTPRNLARLPPRRHDVHLVPLPLPRVEGLPDGVESTNDVPPDKRDLHWKAFDGLAVPFAEFLAAACADEATRPDWVLADTFSHWAAAVALEHKVPSAMLLPSAAMIASCWHRPPSHAEQPRSAVFEEPAERPAGVLPYEWDKRAHFFGPQRASGMSTAQRCFLTLQRCRLLAMRSCPEWEPENFTVAAALLGKPLVPLGLLPPSPNGGRRREEDGGSTARCWLDAQPPSSVVYVALGSEVPLTVALVHELALGLELAGARFLWALRKPSGVADDADVLPPGFRERTCGRGLVAMGWVPQMSILAHGAVGGFLTHCGRNSLVEGLLFGHPLVMLPVVGDQGPNARAMERTKVGLQVARNGKDGSFDRHGVAAAVREVMLVEEARKVFVANALEMQRVVADKERHERYIDEFIRQLRSYSTPPAAS

SEQ ID NO: 8194 - protein, 445 aa, Zea mays subsp. mays
  peptide (1)..(445): Ceres Seq. ID no. 12367925
MLPCLELAERLASRGHRVSFVSTPRNLARLPPRRHDVHLVPLPLPRVEGLPDGVESTNDVPPDKRDLHWKAFDGLAVPFAEFLAAACADEATRPDWVLADTFSHWAAAVALEHKVPSAMLLPSAAMIASCWHRPPSHAEQPRSAVFEEPAERPAGVLPYEWDKRAHFFGPQRASGMSTAQRCFLTLQRCRLLAMRSCPEWEPENFTVAAALLGKPLVPLGLLPPSPNGGRRREEDGGSTARCWLDAQPPSSVVYVALGSEVPLTVALVHELALGLELAGARFLWALRKPSGVADDADVLPPGFRERTCGRGLVAMGWVPQMSILAHGAVGGFLTHCGRNSLVEGLLFGHPLVMLPVVGDQGPNARAMERTKVGLQVARNGKDGSFDRHGVAAAVREVMLVEEARKVFVANALEMQRVVADKERHERYIDEFIRQLRSYSTPPAAS

SEQ ID NO: 8195 - DNA, 1296 bp, Zea mays subsp. mays
  misc_feature (1)..(1296): Ceres Seq. ID no. 12413938
  misc_feature (1)..(1296): Ortholog of  Ceres SEQ ID NO 13586839 as cited in SEQ ID NO 690
  misc_feature (1)..(1296): Ortholog of  Ceres SEQ ID NO 14306671 as cited in SEQ ID NO 53809
  misc_feature (1)..(1296): Ortholog of  Ceres SEQ ID NO 13596735 as cited in SEQ ID NO 62904
atacgcgctctcatctctggctggctcagaaaacagccgccaagcgcacacaccactctctcatcatgacctccatataggccccctacattctttgatcagtgatcactctcgctgggtctcaccccctcccgcagacggccaaacagaacccacgcgtgcgcgcgcgcccacgagcgagcgatgcctcccctccgccgcgcgcgctccatcctgctcctcctccactacgtggccgcctcccacctcctgctgcgcgccgccgcggccacattgccggaccccgcgccgctcgacccggcactggtcgcgaccccggtgcagcccgccgccnccgttccggggggcacgatcccggcgttccccgcgcagtcggactcgctggcgggttcctcgtccacgtgcccgctcgccccttccccggcgctcctcccggccgtgcgggcctcctgcgccgccgccgcggcgctgccgccgaggctgcgctgctgccccgcgctggccgcgtggctgttcgcggcctacgcgcccgccgcgctcgcggagcggccgcccgcgaggcctccggccgcggcggcggccgccgtggacatgccgctgccgcccgacgactccgaggcgtgcgcgggcgccgcggaccgcgcgcttcgtgcggcgggggcgacgctgccccgccccaccggcggcaataacgggacgtgcgacgtggcgttctgctactgcggggtcaggctgaggcggctgacgtgcggacccccgccggcagccgagggcgggctgtgggcgccggctgacgacgcggcggcgaggaggctggagagggactgcgcgcagccgggcntccccggctgctccaaatgccttcttgctctgaccatgataaagaacactagtcccggcgntggcgccgccgcggaggcagcgagcaaggagaagcaggccgccgtccggtcgggcgagagtgaccgggactgcgagctcatggggctcatgtggctgctgcagcgcaacgccacgcgctacggagcgacggccacggccgtcatccaggcgctgatggccgtggacgaggcgtccgccgcgggtgtcgcggtggcggcagacgcggggccggccgcggcgtgctcgctgcccgtggacgacatgcccctcccggccgaatacgcgcaggtcggcggggccagcgancgcctcgcggcgtctgctgcttcttctgcctgctcgtgctgttctccgttctaagcttccgctccgtgtactcgctgtagcaattttgtggttcaattgaagttcgtg

SEQ ID NO: 8196 - protein, 352 aa, Zea mays subsp. mays
  peptide (1)..(352): Ceres Seq. ID no. 12413939
  misc_feature (51)..(51): Xaa is any aa, unknown or other
  misc_feature (220)..(220): Xaa is any aa, unknown or other
  misc_feature (240)..(240): Xaa is any aa, unknown or other
  misc_feature (335)..(335): Xaa is any aa, unknown or other
MPPLRRARSILLLLHYVAASHLLLRAAAATLPDPAPLDPALVATPVQPAAXVPGGTIPAFPAQSDSLAGSSSTCPLAPSPALLPAVRASCAAAAALPPRLRCCPALAAWLFAAYAPAALAERPPARPPAAAAAAVDMPLPPDDSEACAGAADRALRAAGATLPRPTGGNNGTCDVAFCYCGVRLRRLTCGPPPAAEGGLWAPADDAAARRLERDCAQPGXPGCSKCLLALTMIKNTSPGXGAAAEAASKEKQAAVRSGESDRDCELMGLMWLLQRNATRYGATATAVIQALMAVDEASAAGVAVAADAGPAAACSLPVDDMPLPAEYAQVGGASXRLAASAASSACSCCSPF

SEQ ID NO: 8197 - protein, 244 aa, Zea mays subsp. mays
  peptide (1)..(244): Ceres Seq. ID no. 12413940
  misc_feature (111)..(111): Xaa is any aa, unknown or other
YALSSLAGSENSRQAHTPLSHHDLHIGPLHSLISDHSRWVSPPPADGQTEPTRARAPTSERCLPSAARAPSCSSSTTWPPPTSCCAPPRPHCRTPRRSTRHWSRPRCSPPXPFRGARSRRSPRSRTRWRVPRPRARSPLPRRSSRPCGPPAPPPRRCRRGCAAAPRWPRGCSRPTRPPRSRSGRPRGLRPRRRPPWTCRCRPTTPRRARAPRTARFVRRGRRCPAPPAAITGRATWRSATAGSG

SEQ ID NO: 8198 - protein, 216 aa, Zea mays subsp. mays
  peptide (1)..(216): Ceres Seq. ID no. 12413941
  misc_feature (84)..(84): Xaa is any aa, unknown or other
  misc_feature (104)..(104): Xaa is any aa, unknown or other
  misc_feature (199)..(199): Xaa is any aa, unknown or other
MPLPPDDSEACAGAADRALRAAGATLPRPTGGNNGTCDVAFCYCGVRLRRLTCGPPPAAEGGLWAPADDAAARRLERDCAQPGXPGCSKCLLALTMIKNTSPGXGAAAEAASKEKQAAVRSGESDRDCELMGLMWLLQRNATRYGATATAVIQALMAVDEASAAGVAVAADAGPAAACSLPVDDMPLPAEYAQVGGASXRLAASAASSACSCCSPF

SEQ ID NO: 8199 - DNA, 1316 bp, Zea mays subsp. mays
  misc_feature (1)..(1316): Ceres Seq. ID no. 12369494
  misc_feature (1)..(1316): Ortholog of  Ceres SEQ ID NO 12474685 as cited in SEQ ID NO 88
  misc_feature (1)..(1316): Ortholog of  Ceres SEQ ID NO 13638574 as cited in SEQ ID NO 51223
  misc_feature (1)..(1316): Ortholog of  Ceres SEQ ID NO 14311531 as cited in SEQ ID NO 51466
  misc_feature (1)..(1316): Ortholog of  Ceres SEQ ID NO 15170465 as cited in SEQ ID NO 52798
  misc_feature (1)..(1316): Ortholog of  Ceres SEQ ID NO 15177112 as cited in SEQ ID NO 55956
  misc_feature (1)..(1316): Ortholog of  Ceres SEQ ID NO 12610790 as cited in SEQ ID NO 56123
  misc_feature (1)..(1316): Ortholog of  Ceres SEQ ID NO 13655636 as cited in SEQ ID NO 63519
  misc_feature (1)..(1316): Ortholog of  Ceres SEQ ID NO 13655896 as cited in SEQ ID NO 64970
gcagatattctgtggctcaaacctttggaggcacgggcacgggcacggggcaccgaagtgttggtatacgcggcagccgggatagcgagcgtatggccacctacttcgtcctcaacaccggcgcgaagatcccgtcggtcgggctcggcacctggcaggccgacaacgggctcgtcggcgacgccgtctatgccgccgtgaaggcaggttacaggcacattgactgtgctcaagcatacaacaacgagaaagaggtcgggttggtctcaggagagtgctggacgagggcatagtcaagcgtgaagatctcttcatcacctccaagctttggaacattaaccatgcggcggaggacgtcccggttgcactgaacggcacactgaaggacttgcaaactgactacgtggatctctacctcatgcattggccggtgaggatgaagaaaggcgccggcttcggcccgcacgccgtcgtcccgtcagacatccccgcgacgtgggccgcgatggaggagctgtacgacgccgggaaggcgcgcgccatcggcgtcagcaacttctcgagcaagaagctggcggacctgctggccgtggcgcgcgtgcgccccgccgtcgaccaggtggagtgccacccggtgtggcggcagggcaggctccgcgcgttctgcgcctcccaagggatacacctctccgcctactcgccgctgggctcgccgggcacggcgacggtgaaggcgggcgcggtgctggagcacccggccgtcgtctcggcggcggagacgctggggaagacgccggcgcaggtggcgctgcgctggggcgtccagatggggcacagcgtgctcccgaagagcaccgacgaggggaggatcagggcgaatctcgacgtcttcggctggtccttgccggaggacctgctcgccaagttctctgagatcgagcaggaaaggctgattcgtgcgggcttctttgttgatcccgacagcgtgttcaaatccatcgaggagttttgggatggcgagatctgaacactgtgtcctgactgggaggagctgagtgacggaattttgccactggcaaggcgtactgtgcctgtggaagaataaatttatgcgtatgaactctgaaaggcagcgtagttttcaggtagtttgtgctcggcactccaataattcctcgacgctcaagtggtctatctatcctctaaaggccatgccgctcaagcggtcttttaagccaaaaaaaaaaaaaaaaaaaaaaaaaaaaaaaaaaaaaagaaaaaaaaaaaaaaaaaacggcacgagaagccggcacgag

SEQ ID NO: 8200 - protein, 202 aa, Zea mays subsp. mays
  peptide (1)..(202): Ceres Seq. ID no. 12369495
MHWPVRMKKGAGFGPHAVVPSDIPATWAAMEELYDAGKARAIGVSNFSSKKLADLLAVARVRPAVDQVECHPVWRQGRLRAFCASQGIHLSAYSPLGSPGTATVKAGAVLEHPAVVSAAETLGKTPAQVALRWGVQMGHSVLPKSTDEGRIRANLDVFGWSLPEDLLAKFSEIEQERLIRAGFFVDPDSVFKSIEEFWDGEI

SEQ ID NO: 8201 - protein, 196 aa, Zea mays subsp. mays
  peptide (1)..(196): Ceres Seq. ID no. 12369496
MKKGAGFGPHAVVPSDIPATWAAMEELYDAGKARAIGVSNFSSKKLADLLAVARVRPAVDQVECHPVWRQGRLRAFCASQGIHLSAYSPLGSPGTATVKAGAVLEHPAVVSAAETLGKTPAQVALRWGVQMGHSVLPKSTDEGRIRANLDVFGWSLPEDLLAKFSEIEQERLIRAGFFVDPDSVFKSIEEFWDGEI

SEQ ID NO: 8202 - protein, 173 aa, Zea mays subsp. mays
  peptide (1)..(173): Ceres Seq. ID no. 12369497
MEELYDAGKARAIGVSNFSSKKLADLLAVARVRPAVDQVECHPVWRQGRLRAFCASQGIHLSAYSPLGSPGTATVKAGAVLEHPAVVSAAETLGKTPAQVALRWGVQMGHSVLPKSTDEGRIRANLDVFGWSLPEDLLAKFSEIEQERLIRAGFFVDPDSVFKSIEEFWDGEI

SEQ ID NO: 8203 - DNA, 1100 bp, Zea mays subsp. mays
  misc_feature (1)..(1100): Ceres Seq. ID no. 12351532
  misc_feature (1)..(1100): Ortholog of  Ceres SEQ ID NO 15172862 as cited in SEQ ID NO 51943
  misc_feature (1)..(1100): Ortholog of  Ceres SEQ ID NO 12784852 as cited in SEQ ID NO 61543
cactcgccgcctcctccccactgcctcgtgtggccgtcgtctcccgttcggaacgccaagccccccctccggcgaaatggcccccaagcgaggtggcagggcgccggtgccggccaagaagaagacggataaagtgacgaaccctctattcgagaagaggccgaagcagttcggcatcggcggcgcgttgccgcccaagaaggacctgcaccggttcgtcaagtggcccaaggtcgtgcgtatccagcggcagcgccgcatcctcaagcagcgcctcaaggtaccaccggcgctcaaccagttcacccgcaccctcgacaagaacctcgctacgaacctgtttaagatgcttctcaagtaccggcctgaagacaaggctgccaagaaggagaggcttctgaagagggcccaagctgagaatgaaggaaaaactgttgagtcgaagaaaccaattgttgtgaagtatggccttaaccatgtgacttacctcattgagcagaacaaggctcagcttgttgtcatcgctcacgacgtggatccgatcgaacttgttgtgtggcttccagccctgtgcaggaagatggaggtcccttactgcattgttaaaggaaaggctcgccttggatcgattgttcacaagaagaatgcatcagtcttgtgtctgaccactgtcaagaacgaggataagcttgagttcagcaagatcttggaggctattaaggcaaacttcaacgacaagttcgatgaggtcaggaagaagtgaggaggtggcatcatgggatccaagtcgcaggccaagaccaaggcccgggaaaagttgctcgccaaggaggctgcgcagcggatgacctagattgtctattgtctactgctgtgtctgccctgtagtttgacggggaagaactgatgaactcgtattgtggtttttctgaatctagtttcatatgtttctgtccaccagaccatgtttagaagctttgcaagacagagttaccatgtttagaagctttgcaagacagagttacagtgtttatgtgatacctcagatccatgcagctttgcttctatttgcctaagagcaaccccaaaagtatttcatg

SEQ ID NO: 8204 - protein, 253 aa, Zea mays subsp. mays
  peptide (1)..(253): Ceres Seq. ID no. 12351533
TRRLLPTASCGRRLPFGTPSPPSGEMAPKRGGRAPVPAKKKTDKVTNPLFEKRPKQFGIGGALPPKKDLHRFVKWPKVVRIQRQRRILKQRLKVPPALNQFTRTLDKNLATNLFKMLLKYRPEDKAAKKERLLKRAQAENEGKTVESKKPIVVKYGLNHVTYLIEQNKAQLVVIAHDVDPIELVVWLPALCRKMEVPYCIVKGKARLGSIVHKKNASVLCLTTVKNEDKLEFSKILEAIKANFNDKFDEVRKK

SEQ ID NO: 8205 - protein, 228 aa, Zea mays subsp. mays
  peptide (1)..(228): Ceres Seq. ID no. 12351534
MAPKRGGRAPVPAKKKTDKVTNPLFEKRPKQFGIGGALPPKKDLHRFVKWPKVVRIQRQRRILKQRLKVPPALNQFTRTLDKNLATNLFKMLLKYRPEDKAAKKERLLKRAQAENEGKTVESKKPIVVKYGLNHVTYLIEQNKAQLVVIAHDVDPIELVVWLPALCRKMEVPYCIVKGKARLGSIVHKKNASVLCLTTVKNEDKLEFSKILEAIKANFNDKFDEVRKK

SEQ ID NO: 8206 - protein, 138 aa, Zea mays subsp. mays
  peptide (1)..(138): Ceres Seq. ID no. 12351535
MLLKYRPEDKAAKKERLLKRAQAENEGKTVESKKPIVVKYGLNHVTYLIEQNKAQLVVIAHDVDPIELVVWLPALCRKMEVPYCIVKGKARLGSIVHKKNASVLCLTTVKNEDKLEFSKILEAIKANFNDKFDEVRKK

SEQ ID NO: 8207 - DNA, 1958 bp, Zea mays subsp. mays
  misc_feature (1)..(1958): Ceres Seq. ID no. 13636500
  misc_feature (1)..(1958): Ortholog of  Ceres SEQ ID NO 15177043 as cited in SEQ ID NO 57425
aaccaacaaatcgacctagctaggcacaagagcgctagacgccgcagcgcagcacgcaccacccaccgagcggcggcggaggcagggcaatccgcaggaagcagaggccgcgcgcgcaggcatgggcgcgccggtgcacggcgccctcgacttgttcctcctgctcctggtgggggcaggggcggcgcccgaggtgacggcgccgcangaacccacattgccagccaccggctccggcgctaccggngcagcggcggtcggagtcaactccaactccgtgctggtggcgctgctggattcgcactacacggagctggcggaactggtggagaaggcgctgctcctgcagacgctggaggacgccgtcgggaagcacaacgtcaccatcttcgcgccgcggaacgaggcgctggagcgggacctggatccggagttcaagcgcttcctgctggagccgcgcaacctcaggtcgctgcaggcgctgctgctctaccacgtcctcccctcgcgcctgccctccgactcctggcccgcggcgtcccaccccacgctgtccggcgaggaggtcgagctcgcccccgccgccggcgccggcatgcgcgtcggccacgccgccgtcacgcgcccggacgccgtgctcaggcccgacggggtcatccacggcatcgagcgcctcctcgtgcccgcgctccgtgcaggaggacttcaaccgccgccgcagcctcgcggcgatctcggccgtgctgcccacgggcgcgcccgaggtggacccgcggacgcaccgcctcaagaagcccgcgccgccggttccccccggcgcgccccccgtgctccccgtctgggacgccatggcgcccggcccctccatcgcccccgcgccggcgcctggcccgggctccgggaagcaccacttcgacgggcacagccaggtcaaggacttcatccagacgctgctcctctacggcggctacaacgagctcgccgacatcctcgtcaacctcacctccctcgccaccgagatgggccgcctcgtctccgagggctacgtcctcaccgtgctcgcccccaacgacgaggccatggcgcgcctcaccacggaccagctcagcgagcccggctcgcccgagaacatcctctactaccacatgatccccgagtaccagaccgaggagtccatgtacaacgccgtgcgccgcttcggcaaggtgcgctacgacacgctgcgcctgccgcacaaggtcgtggcgcgggaggccgacggctccgtcaagttcggccagggcgagggctccgcctacctcttcgacccggacatctacaccgacgggaggatctccgtgcagggcatcgacgccgtgctgttcgcgccggacgacaccaaggccacgcagacagccgaccctaacaggaagcctcccgccatcgtcacccacaagaagaagatcaagctccggcgaggcaagttgttagaggcgacgtgccagatggccgggctcttcggtcagcgatcgcgattcgcgagctgccagtagacggagaaaggatctgttgatctccacgacaccgaaagacgaacgaacgaactgatgggctgccgcaggaggagggggagccgtccacattattgcttgtattttttttcactcttttgtttattgttgagaataataatgaatcaggtgggggatgtaaactctgtgggttgttgttggtgtgtcgtccagatggggaaaaaaatgagaaaaagaaaggcagccaaaaaaaattgtccatacatgaatgaagaagcccaggatcgttgtctttgtataggagaaggaattgaaaccttttgttttttctttttctgccattctttgcttctgttcccgttttgacaatgagaaatatcgggtaaacacacaatcattcttacttattatccattttccttcttttttatatatggtttttcgtcg

SEQ ID NO: 8208 - protein, 427 aa, Zea mays subsp. mays
  peptide (1)..(427): Ceres Seq. ID no. 13636501
  misc_feature (29)..(29): Xaa is any aa, unknown or other
  misc_feature (42)..(42): Xaa is any aa, unknown or other
MGAPVHGALDLFLLLLVGAGAAPEVTAPXEPTLPATGSGATXAAAVGVNSNSVLVALLDSHYTELAELVEKALLLQTLEDAVGKHNVTIFAPRNEALERDLDPEFKRFLLEPRNLRSLQALLLYHVLPSRLPSDSWPAASHPTLSGEEVELAPAAGAGMRVGHAAVTRPDAVLRPDGVIHGIERLLVPALRAGGLQPPPQPRGDLGRAAHGRARGGPADAPPQEARAAGSPRRAPRAPRLGRHGARPLHRPRAGAWPGLREAPLRRAQPGQGLHPDAAPLRRLQRARRHPRQPHLPRHRDGPPRLRGLRPHRARPQRRGHGAPHHGPAQRARLAREHPLLPHDPRVPDRGVHVQRRAPLRQGALRHAAPAAQGRGAGGRRLRQVRPGRGLRLPLRPGHLHRREDLRAGHRRRAVRAGRHQGHADSRP

SEQ ID NO: 8209 - protein, 382 aa, Zea mays subsp. mays
  peptide (1)..(382): Ceres Seq. ID no. 13636502
  misc_feature (70)..(70): Xaa is any aa, unknown or other
  misc_feature (83)..(83): Xaa is any aa, unknown or other
NQQIDLARHKSARRRSAARTTHRAAAEAGQSAGSRGRARRHGRAGARRPRLVPPAPGGGRGGARGDGAAXTHIASHRLRRYRXSGGRSQLQLRAGGAAGFALHGAGGTGGEGAAPADAGGRRREAQRHHLRAAERGAGAGPGSGVQALPAGAAQPQVAAGAAALPRPPLAPALRLLARGVPPHAVRRGGRARPRRRRRHARRPRRRHAPGRRAQARRGHPRHRAPPRARAPCRRTSTAAAASRRSRPCCPRARPRWTRGRTASRSPRRRFPPARPPCSPSGTPWRPAPPSPPRRRLARAPGSTTSTGTARSRTSSRRCSSTAATTSSPTSSSTSPPSPPRWAASSPRATSSPCSPPTTRPWRASPRTSSASPARPRTSSTTT

SEQ ID NO: 8210 - protein, 269 aa, Zea mays subsp. mays
  peptide (1)..(269): Ceres Seq. ID no. 13636503
MRVGHAAVTRPDAVLRPDGVIHGIERLLVPALRAGGLQPPPQPRGDLGRAAHGRARGGPADAPPQEARAAGSPRRAPRAPRLGRHGARPLHRPRAGAWPGLREAPLRRAQPGQGLHPDAAPLRRLQRARRHPRQPHLPRHRDGPPRLRGLRPHRARPQRRGHGAPHHGPAQRARLAREHPLLPHDPRVPDRGVHVQRRAPLRQGALRHAAPAAQGRGAGGRRLRQVRPGRGLRLPLRPGHLHRREDLRAGHRRRAVRAGRHQGHADSRP

SEQ ID NO: 8211 - DNA, 1213 bp, Zea mays subsp. mays
  misc_feature (1)..(1213): Ceres Seq. ID no. 12365777
  misc_feature (1)..(1213): Ortholog of  Ceres SEQ ID NO 13597609 as cited in SEQ ID NO 65216
attaacaaagcacccatcccttcaacaaaccttgagttgggagagagagagagagaggagaggaggcaacaagaggcacgaacaaacagaggcaaaccggctcacgcctgtctcggtgcggtggccggctaatcatggctaccgtggggcagtccggggccctgagaagggtcaccgtgcactacgccagctcgcccacgcgcggcgcggtggtagaggtgagcctcgacgacctcgacgacgagctgctccagtttgtgctcgccgatcttcttcccggccaggagggtttacaccagtcgatcttggaaggagcacacggcagcaaccaggagaactatatgagaggcgcaggatccagtgcgccgtcacaggaataccatgcacagagcagcaccgctgctgcggcagcagctgcttcgtccaggaggaatccaggcacggatgacgcccagatcgcctcggacttcgagtacgccacgaagctgcagcaggagatggagggcctcagcgtcgacgacgacggcgacggtatcagctgcgtgccgtctccgtccgactctgacgacgggcacgaccatcacgacgaagaggacgaggatgaggaggatggtaatggtggtggtgatgatgatgatgatccagacaacatgacttatgagcaaagacaggcacttgtagagtctgtggggtctgaggacagaggcttatccgacgagctcatctcctacctgcagccatggaagtacaaggcatcagggtttttctcccggaaaacaaaccatgacgactgccctatctgcctgtcaactttcaggaaccgagagactatgataacgttgccgtgcatgcatcactaccacgcagcttgcgtcaccaaatggctcagggtcaacaagacatgccctgtatgcaaatatgaactgttcggaccttgctagcatccgacaatggagatggtaagacaaggtgatggggcgtcacactcacatccggctggttgcatcgtctacttttgttttgcaccaagaaaaaagaaaatgaaaaacaatncaaaaagagaagggaaaaaagttaggaagtgtagatcttgatcacacaagaaaaagaagaaaaaaaaactgaaatttatgtcttttttatctttccttcggcttttggaaatgtacgtaagtcacggtcttatatttgtttagaagcttgttttttttct

SEQ ID NO: 8212 - protein, 268 aa, Zea mays subsp. mays
  peptide (1)..(268): Ceres Seq. ID no. 12365778
MATVGQSGALRRVTVHYASSPTRGAVVEVSLDDLDDELLQFVLADLLPGQEGLHQSILEGAHGSNQENYMRGAGSSAPSQEYHAQSSTAAAAAAASSRRNPGTDDAQIASDFEYATKLQQEMEGLSVDDDGDGISCVPSPSDSDDGHDHHDEEDEDEEDGNGGGDDDDDPDNMTYEQRQALVESVGSEDRGLSDELISYLQPWKYKASGFFSRKTNHDDCPICLSTFRNRETMITLPCMHHYHAACVTKWLRVNKTCPVCKYELFGPC

SEQ ID NO: 8213 - protein, 199 aa, Zea mays subsp. mays
  peptide (1)..(199): Ceres Seq. ID no. 12365779
MRGAGSSAPSQEYHAQSSTAAAAAAASSRRNPGTDDAQIASDFEYATKLQQEMEGLSVDDDGDGISCVPSPSDSDDGHDHHDEEDEDEEDGNGGGDDDDDPDNMTYEQRQALVESVGSEDRGLSDELISYLQPWKYKASGFFSRKTNHDDCPICLSTFRNRETMITLPCMHHYHAACVTKWLRVNKTCPVCKYELFGPC

SEQ ID NO: 8214 - protein, 148 aa, Zea mays subsp. mays
  peptide (1)..(148): Ceres Seq. ID no. 12365780
LTKHPSLQQTLSWERERERRGGNKRHEQTEANRLTPVSVRWPANHGYRGAVRGPEKGHRALRQLAHARRGGRGEPRRPRRRAAPVCARRSSSRPGGFTPVDLGRSTRQQPGELYERRRIQCAVTGIPCTEQHRCCGSSCFVQEESRHG

SEQ ID NO: 8215 - DNA, 593 bp, Zea mays subsp. mays
  misc_feature (1)..(593): Ceres Seq. ID no. 12408576
  misc_feature (1)..(593): Ortholog of  Ceres SEQ ID NO 14305840 as cited in SEQ ID NO 52339
acgcctctctctacttaggagtatacttcaaaagcgccgaaccagataggcaggcatctcgatcggcgacggctccagtcaaggggctggttggcatggagggcgagaagaaggcggccgccgtagcggaggatgaggttgtggttgtggctgctggcgatgtcagcctgaaggacctgtcaaagaagctcaacgacttcgccagggagagggactgggagcagttccatagccccaggaacctactgctcgncatgatcgccgaagtcggggagctgtcagagctgttcatgtggagaggggaggtgcggaagggcctcgcgggctgggacgaggccgagaaggagcacctgggcgaggagctctccgacgtgctgctctacctggtccaactctccgacatgtgcggcgtcgacctcggcgacgccgccgtcaggaaggatcggcaagaacgccgtcaagtacccggcgccgccgccgtcggaagaaggaagaagaaggcgcctgatagctttttttcttctggctgtgcatgtttgaaggccaatactacttgatgcagaaattgctcgtctgatagctttcgcctttcg

SEQ ID NO: 8216 - protein, 184 aa, Zea mays subsp. mays
  peptide (1)..(184): Ceres Seq. ID no. 12408577
  misc_feature (84)..(84): Xaa is any aa, unknown or other
ASLYLGVYFKSAEPDRQASRSATAPVKGLVGMEGEKKAAAVAEDEVVVVAAGDVSLKDLSKKLNDFARERDWEQFHSPRNLLLXMIAEVGELSELFMWRGEVRKGLAGWDEAEKEHLGEELSDVLLYLVQLSDMCGVDLGDAAVRKDRQERRQVPGAAAVGRRKKKAPDSFFSSGCACLKANTT

SEQ ID NO: 8217 - protein, 153 aa, Zea mays subsp. mays
  peptide (1)..(153): Ceres Seq. ID no. 12408578
  misc_feature (53)..(53): Xaa is any aa, unknown or other
MEGEKKAAAVAEDEVVVVAAGDVSLKDLSKKLNDFARERDWEQFHSPRNLLLXMIAEVGELSELFMWRGEVRKGLAGWDEAEKEHLGEELSDVLLYLVQLSDMCGVDLGDAAVRKDRQERRQVPGAAAVGRRKKKAPDSFFSSGCACLKANTT

SEQ ID NO: 8218 - protein, 100 aa, Zea mays subsp. mays
  peptide (1)..(100): Ceres Seq. ID no. 12408579
MIAEVGELSELFMWRGEVRKGLAGWDEAEKEHLGEELSDVLLYLVQLSDMCGVDLGDAAVRKDRQERRQVPGAAAVGRRKKKAPDSFFSSGCACLKANTT

SEQ ID NO: 8219 - DNA, 1732 bp, Zea mays subsp. mays
  misc_feature (1)..(1732): Ceres Seq. ID no. 12336960
  misc_feature (1)..(1732): Ortholog of  Ceres SEQ ID NO 13600220 as cited in SEQ ID NO 0
attcttagactaaaaacactatgagttagtgctaccaactgaaggatacgccatggctgttctgacactggttaatatccttatcagcttcgctgcttgtgctgaagctctaaggagagcagacttccctcaaggtttcgtctttggcactgcttcttcagcttaccagtatgaaggtgctgtcaacgagggtcaacgtggacctacaatatgggatactctcacaagacgacccggacgggtgatagatttcagcaatgcagatgttgccgttgatcactaccatcgttataaggaagatgtggacttgattaaggacattggcatggatgcataccggttctctatctcgtggtcacgtatctttccaaatggaactggtgaacctaatgaagaaggattgaattactataacagcctcataaatactctattagacaaaggtatacaaccatatgtaacactctttcactgggaccttccgcaagcactagaagacagatatggtggatggttaaacccccaaatcgtggatgattttgttcactatgcctctacttgcttcaaggaatttggagatagagtgaaacactggatcactttcaatgagccccataattttgcgattgaaggctatgaccttggcatccaggcacctgggaggtgttctattctgtctcatatattttgcagggagggcaaatcatcgactgagccttatgtcgtagctcacaacatactcttagcgcatgctggtgcctttcatacttataagcagcatttcaagaaagaacaaggaggtatcattggcattgcactcgattctaagtggtatgagccactgtcagatgttgatgaggacacagaggcagcagcacgagcaatggactttgagcttggatggttcctggatcccttaatgtttggccactatcctccttctatgcagaaacttgtgggcgacaggctgcctcagttttcagctcgggcttccgatgttagtgtcaggctcactagattttgtgggcataaaccattacaccacactgtatgttaggaacgacagaatgcggatcaggaaacttgtaatgaatgatgcttcaactgatgctgcggtcatacctactgcttatagacatggaaagaaaataggagaaacggcagcgtcaggatggctgcacatagtgccctggggcatgttcaagctgatgaagcacatcaaagaaaagtacgggaatccgcccgtgatcattactgaaaacggcatggatgatgcgaacaaccggttttcgaaattagaggatgatctgcaggatgataaacggatacagtaccacaaggactacatgtctaacctcctagacgcaattaggaaggaaggctgcaacgtccatggctacttcgtctggtcgctgctcgacaactgggagtggaactccgggtacacggtgcggtttgggctctactacatcgactacaacaacaatttgacacggatacccaaggcgtccgtggagtggttcaggcaggtcttggcccagaagacggctggtggagtacagtggttctacagtggccagtagttgagtgtatataacatacacggcacggctaccatcgatctgtacatgcgtacgtagctttagattagattgtgattattctcgatgtatatagactcaccatttggacgaccttcaaccgcacagttgaatgtgtcgttatgcttgct

SEQ ID NO: 8220 - protein, 334 aa, Zea mays subsp. mays
  peptide (1)..(334): Ceres Seq. ID no. 12336961
MAVLTLVNILISFAACAEALRRADFPQGFVFGTASSAYQYEGAVNEGQRGPTIWDTLTRRPGRVIDFSNADVAVDHYHRYKEDVDLIKDIGMDAYRFSISWSRIFPNGTGEPNEEGLNYYNSLINTLLDKGIQPYVTLFHWDLPQALEDRYGGWLNPQIVDDFVHYASTCFKEFGDRVKHWITFNEPHNFAIEGYDLGIQAPGRCSILSHIFCREGKSSTEPYVVAHNILLAHAGAFHTYKQHFKKEQGGIIGIALDSKWYEPLSDVDEDTEAAARAMDFELGWFLDPLMFGHYPPSMQKLVGDRLPQFSARASDVSVRLTRFCGHKPLHHTVC

SEQ ID NO: 8221 - protein, 243 aa, Zea mays subsp. mays
  peptide (1)..(243): Ceres Seq. ID no. 12336962
MDAYRFSISWSRIFPNGTGEPNEEGLNYYNSLINTLLDKGIQPYVTLFHWDLPQALEDRYGGWLNPQIVDDFVHYASTCFKEFGDRVKHWITFNEPHNFAIEGYDLGIQAPGRCSILSHIFCREGKSSTEPYVVAHNILLAHAGAFHTYKQHFKKEQGGIIGIALDSKWYEPLSDVDEDTEAAARAMDFELGWFLDPLMFGHYPPSMQKLVGDRLPQFSARASDVSVRLTRFCGHKPLHHTVC

SEQ ID NO: 8222 - protein, 195 aa, Zea mays subsp. mays
  peptide (1)..(195): Ceres Seq. ID no. 12336963
MLVSGSLDFVGINHYTTLYVRNDRMRIRKLVMNDASTDAAVIPTAYRHGKKIGETAASGWLHIVPWGMFKLMKHIKEKYGNPPVIITENGMDDANNRFSKLEDDLQDDKRIQYHKDYMSNLLDAIRKEGCNVHGYFVWSLLDNWEWNSGYTVRFGLYYIDYNNNLTRIPKASVEWFRQVLAQKTAGGVQWFYSGQ

SEQ ID NO: 8223 - DNA, 1604 bp, Zea mays subsp. mays
  misc_feature (1)..(1604): Ceres Seq. ID no. 12343269
  misc_feature (1)..(1604): Ortholog of  Ceres SEQ ID NO 14314280 as cited in SEQ ID NO 57429
  misc_feature (1)..(1604): Ortholog of  Ceres SEQ ID NO 13595870 as cited in SEQ ID NO 62101
  misc_feature (1)..(1604): Ortholog of  Ceres SEQ ID NO 13590241 as cited in SEQ ID NO 63878
  misc_feature (1)..(1604): Ortholog of  Ceres SEQ ID NO 13657939 as cited in SEQ ID NO 66349
attggcacgtatgaatgctcagccacatgcgtatgtatacatcacggccacgttcacgcttcccccttctgcaagcaaacctaaccaagcctctgcggctcttcttcgaatccaactcctccccgatccccaaaatcgaacccaagtcgaaaccctaacctcggccttctcgatgtcggccgccacaaccgccccaacccctgcggtggccaccccgatggcgccgcctccgtcgtacccggcctcctccacgatctccgcctccgtggccgcgtcggtcgaggaagaggacgacctctatggccgcctcaagtcgctccagcgccacatggagttcgtcgagatccaggaggagtacgttaaagacgaacagaagaacctcaagcgcgaactcctccgtgcgcaggaggaggtcaagcggatccagtccgtaccgctcgtcatcggccagtttatggagatggtcgacggcaacaacggcatcgtgggttctactacgggcagcaactactatgtgcggatcctcagcaccatcaaccgcgagctgctcaagccgtcagcatctgtcgcgttgcatcgtcactccaacgctttagtcgacgtgctgccgcccgaggccgactccagcatctccttgctgggatcgtcggagaagcccaacgtcacctacaacgatattggaggatgcgacatccaaaagcaagaaatacgggaggcggttgagttacccttgactcatcatgagttgtacaagcagattggtattgatcctccaagaggggtgcttctgtatggtcctccgggtactggcaagaccatgcttgccaaagcagtcgcacatcataccaccgctgcttttatcagagtcgttggttcggagtttgtacagaagtacttgggcgagggccctagaatggtgcgtgatgtgttccgtttggctaaggagaatgctccagcaatcattttcattgatgaggttgatgctatagccactgctcgctttgatgctcagactggtgctgaccgagaagttcaacgcattcttatggagctactcaatcagatggatgggtttgatcaaacagtgaatgtgaaggttataatggcaactaatcgggcagacactctagatcctgctctgttgcgtcctggtagacttgacaggaaaattgagttccctttgccagaccggcgtcagaagaggcttgttttccaagtctgcactgccaaaatgaacctgagtgacgaggttgatttggaagactatgtttccagaccggataagatcagtgctgctgatattgctgctatctgtcaagaagctggcatgcatgctgtccgcaaaaaccgatatgtcatcctccccaaggactttgagaagggctaccgaaccaacgtgaaaaagcctgagacggacttcgatttctacaaatgaggcaacctgagtgttgagctcgtttcttgtttatcaattgaatatgttttagcataaagatgagtttcaggatagttgccaatatcaaatgtcgaagttgatggctgtaatgcttgagtcaatctttttacttgaaggtacagcggtgttatggaagttatgattatgc

SEQ ID NO: 8224 - protein, 477 aa, Zea mays subsp. mays
  peptide (1)..(477): Ceres Seq. ID no. 12343270
LARMNAQPHAYVYITATFTLPPSASKPNQASAALLRIQLLPDPQNRTQVETLTSAFSMSAATTAPTPAVATPMAPPPSYPASSTISASVAASVEEEDDLYGRLKSLQRHMEFVEIQEEYVKDEQKNLKRELLRAQEEVKRIQSVPLVIGQFMEMVDGNNGIVGSTTGSNYYVRILSTINRELLKPSASVALHRHSNALVDVLPPEADSSISLLGSSEKPNVTYNDIGGCDIQKQEIREAVELPLTHHELYKQIGIDPPRGVLLYGPPGTGKTMLAKAVAHHTTAAFIRVVGSEFVQKYLGEGPRMVRDVFRLAKENAPAIIFIDEVDAIATARFDAQTGADREVQRILMELLNQMDGFDQTVNVKVIMATNRADTLDPALLRPGRLDRKIEFPLPDRRQKRLVFQVCTAKMNLSDEVDLEDYVSRPDKISAADIAAICQEAGMHAVRKNRYVILPKDFEKGYRTNVKKPETDFDFYK

SEQ ID NO: 8225 - protein, 474 aa, Zea mays subsp. mays
  peptide (1)..(474): Ceres Seq. ID no. 12343271
MNAQPHAYVYITATFTLPPSASKPNQASAALLRIQLLPDPQNRTQVETLTSAFSMSAATTAPTPAVATPMAPPPSYPASSTISASVAASVEEEDDLYGRLKSLQRHMEFVEIQEEYVKDEQKNLKRELLRAQEEVKRIQSVPLVIGQFMEMVDGNNGIVGSTTGSNYYVRILSTINRELLKPSASVALHRHSNALVDVLPPEADSSISLLGSSEKPNVTYNDIGGCDIQKQEIREAVELPLTHHELYKQIGIDPPRGVLLYGPPGTGKTMLAKAVAHHTTAAFIRVVGSEFVQKYLGEGPRMVRDVFRLAKENAPAIIFIDEVDAIATARFDAQTGADREVQRILMELLNQMDGFDQTVNVKVIMATNRADTLDPALLRPGRLDRKIEFPLPDRRQKRLVFQVCTAKMNLSDEVDLEDYVSRPDKISAADIAAICQEAGMHAVRKNRYVILPKDFEKGYRTNVKKPETDFDFYK

SEQ ID NO: 8226 - protein, 420 aa, Zea mays subsp. mays
  peptide (1)..(420): Ceres Seq. ID no. 12343272
MSAATTAPTPAVATPMAPPPSYPASSTISASVAASVEEEDDLYGRLKSLQRHMEFVEIQEEYVKDEQKNLKRELLRAQEEVKRIQSVPLVIGQFMEMVDGNNGIVGSTTGSNYYVRILSTINRELLKPSASVALHRHSNALVDVLPPEADSSISLLGSSEKPNVTYNDIGGCDIQKQEIREAVELPLTHHELYKQIGIDPPRGVLLYGPPGTGKTMLAKAVAHHTTAAFIRVVGSEFVQKYLGEGPRMVRDVFRLAKENAPAIIFIDEVDAIATARFDAQTGADREVQRILMELLNQMDGFDQTVNVKVIMATNRADTLDPALLRPGRLDRKIEFPLPDRRQKRLVFQVCTAKMNLSDEVDLEDYVSRPDKISAADIAAICQEAGMHAVRKNRYVILPKDFEKGYRTNVKKPETDFDFYK

SEQ ID NO: 8227 - DNA, 1058 bp, Zea mays subsp. mays
  misc_feature (1)..(1058): Ceres Seq. ID no. 12346165
  misc_feature (1)..(1058): Ortholog of  Ceres SEQ ID NO 13597908 as cited in SEQ ID NO 64404
ctcacacgccggccgccgcgcaagagccgtggccccgtcgacgtccgcccgcacaggactctccgagtgtgggattgagccgtagttttttttttttggtggctcgggccgatatccggtactgtatgagggttgccaactactagactttaagatcgctgattcaatggaggcctccgaggcagcacctgcagcggcggccaccgtcatggaagcagaggatgtgagcggcgggaagggcgaatggtacgtgcttggggagcgggcgctgatggtgccgtacacgcgggagcacgtgccgcggtaccacgactggatgcaggacccggcgctgctggaggccaccgcgtcggagcccctctccctctcgcaggagttcgaggtccaccgctcatggaccctcgaccctctaaagcacaccttcatagtgttggataaggagctcatagagggagagttcgtgccgggcaacccgcacattgaagctatggttggtgatgtgaacatatatatgaatgactctgatgatgtgcagatcgcggagatagagattatgatagctgaacataagagccgtgggaagggtattggtcaagaagcaatcttactgatgatggcatttgcagtagagaaatatggaattcacacgttcagggcaaaaattagcgaatcaaatatggcatcgcttaagctcttcaggaagttgggcttcaaggatgcttcatacagtgtggtgttcaaggaggtgactctggaggcacccgctgactcactcccgttgagatttcctctgaccattggagactggtgacgtttgacatgccccaagttaattccatgcagacgacacaagaagctaatgctgtttgtctgtactatctgaccaaaatttactcgggctgatattgtatgaaaaaaatgaataaaacagttgcacagttgtgattcaattgcattagaccagtcgggtttttcatgtcactattttgaagaccccatatcttataaacaaatgtagacaagttttatctcataatttttttatagtatctcccgtc

SEQ ID NO: 8228 - protein, 214 aa, Zea mays subsp. mays
  peptide (1)..(214): Ceres Seq. ID no. 12346166
MEASEAAPAAAATVMEAEDVSGGKGEWYVLGERALMVPYTREHVPRYHDWMQDPALLEATASEPLSLSQEFEVHRSWTLDPLKHTFIVLDKELIEGEFVPGNPHIEAMVGDVNIYMNDSDDVQIAEIEIMIAEHKSRGKGIGQEAILLMMAFAVEKYGIHTFRAKISESNMASLKLFRKLGFKDASYSVVFKEVTLEAPADSLPLRFPLTIGDW

SEQ ID NO: 8229 - protein, 200 aa, Zea mays subsp. mays
  peptide (1)..(200): Ceres Seq. ID no. 12346167
MEAEDVSGGKGEWYVLGERALMVPYTREHVPRYHDWMQDPALLEATASEPLSLSQEFEVHRSWTLDPLKHTFIVLDKELIEGEFVPGNPHIEAMVGDVNIYMNDSDDVQIAEIEIMIAEHKSRGKGIGQEAILLMMAFAVEKYGIHTFRAKISESNMASLKLFRKLGFKDASYSVVFKEVTLEAPADSLPLRFPLTIGDW

SEQ ID NO: 8230 - protein, 179 aa, Zea mays subsp. mays
  peptide (1)..(179): Ceres Seq. ID no. 12346168
MVPYTREHVPRYHDWMQDPALLEATASEPLSLSQEFEVHRSWTLDPLKHTFIVLDKELIEGEFVPGNPHIEAMVGDVNIYMNDSDDVQIAEIEIMIAEHKSRGKGIGQEAILLMMAFAVEKYGIHTFRAKISESNMASLKLFRKLGFKDASYSVVFKEVTLEAPADSLPLRFPLTIGDW

SEQ ID NO: 8231 - DNA, 1726 bp, Zea mays subsp. mays
  misc_feature (1)..(1726): Ceres Seq. ID no. 12359767
  misc_feature (1)..(1726): Ortholog of  Ceres SEQ ID NO 13596816 as cited in SEQ ID NO 62287
aatcaggccacaggggggctcccacttcttcctcctcgacagtcctcagtcctccgtgcgaaatctgttcgcactcgcagtcgcagtcaccactgttctccagggatggcgccgtgttgcctgctccagatcggttggtgtctcgagcgcccccgtggctttcgcctcgccgcggcgctgtgcgcggctgtggtcgcgctggcgctggcgcccgccttggatgccacgtcggcgtcgcttctgggcatcaactacggccgcgtggggaacaacctcccgccgcctcagtccgtcatgccgctgctcgagggcctcggtattggccgcgtgcggatgtacgacgccgaccccaccgtgctgcgcgcgttcgcccggaccggggtcgagctcatcgtcggcgtgcccgacgagtgcctggccgccgtggccgacccgagcggcgcggcacagtggctcaaggagaacgtcgcgcctttcctgccggacacgaagatctccgtgctcgccgtcggcaacgaggtgctcaccggcgccaacagctccacgctgtcgcgcaccctcctcccggcgatgcagtccctgcacggcgcggtggccgcgctcggcctcgacaagcagatcaccgtcacctcggcgcacaacctcggcgtgctcgggacgtcgtacccgccctcggcgggggccttccgcaaggacctgctcccgtacctctgccccatcctggactaccatgccaggaccggctcgccgttcctcgtgaaacgcgtatccctacttcgcctactccagcgaccccaggggcgtgcagcttgactacgcgctgctcgacccgggcttcgccggcgtgcaggaccccaactccaggctgcactaccccaacctcctcgtggcgcaggtggacgcggtgtaccacgccatcgcggcggccaataccgcggcgtcgcgggtggtggaggtgcgggtctcggagaccggctggccctccgcgggggccgccaacgagacggccgcgacgccgcagaacgcggcgcgctacaacagcaacgcgatgcgcctggtggcggaggacaagggcacgccgctcaagcccggggcgccgctccgcgcctacgtgttcgcgctcttcaacgagaacctcaagcccgggttggcgtctgagcgctactacggcctcttcaagcccgacggcacgccggcgtacgagctctccttcaagctaccgcgcgacaactccacgtttggtcacggcgataccggcaagggcggtggcggaatcggcggtaacggcaatggcaatggcagcagctggaacaatagcggcggcggaaacagcggctactatgacatctcggcttcagcacgtgacactacgggtcactggcggatgtgggcgcaggcggccatggcaggagcagtagccgtcctgacactgtagcgccaagggtaggatcaggaatggagcggagttgccgtcctggggcagcggcctgatttggtgctcctcgtatgctgtagtttctgagaccgacctgtgactgtgagtgaccttgtgcttccggaaatctggtggcatctaaagcactcctagttttaagcagcgctggatcaggtttgcctgcctgcttgaaatgaaaccctttccaaatactggtagcaccctggtaaaaatcctctaaaatagtgctgcgctgcttcgttttagacaacgctgttaattccggtcttt

SEQ ID NO: 8232 - protein, 471 aa, Zea mays subsp. mays
  peptide (1)..(471): Ceres Seq. ID no. 12359768
SGHRGAPTSSSSTVLSPPCEICSHSQSQSPLFSRDGAVLPAPDRLVSRAPPWLSPRRGAVRGCGRAGAGARLGCHVGVASGHQLRPRGEQPPAASVRHAAARGPRYWPRADVRRRPHRAARVRPDRGRAHRRRARRVPGRRGRPERRGTVAQGERRAFPAGHEDLRARRRQRGAHRRQQLHAVAHPPPGDAVPARRGGRARPRQADHRHLGAQPRRARDVVPALGGGLPQGPAPVPLPHPGLPCQDRLAVPRETRIPTSPTPATPGACSLTTRCSTRASPACRTPTPGCTTPTSSWRRWTRCTTPSRRPIPRRRGWWRCGSRRPAGPPRGPPTRRPRRRRTRRATTATRCAWWRRTRARRSSPGRRSAPTCSRSSTRTSSPGWRLSATTASSSPTARRRTSSPSSYRATTPRLVTAIPARAVAESAVTAMAMAAAGTIAAAETAATMTSRLQHVTLRVTGGCGRRRPWQEQ

SEQ ID NO: 8233 - protein, 270 aa, Zea mays subsp. mays
  peptide (1)..(270): Ceres Seq. ID no. 12359769
NQATGGLPLLPPRQSSVLRAKSVRTRSRSHHCSPGMAPCCLLQIGWCLERPRGFRLAAALCAAVVALALAPALDATSASLLGINYGRVGNNLPPPQSVMPLLEGLGIGRVRMYDADPTVLRAFARTGVELIVGVPDECLAAVADPSGAAQWLKENVAPFLPDTKISVLAVGNEVLTGANSSTLSRTLLPAMQSLHGAVAALGLDKQITVTSAHNLGVLGTSYPPSAGAFRKDLLPYLCPILDYHARTGSPFLVKRVSLLRLLQRPQGRAA

SEQ ID NO: 8234 - protein, 252 aa, Zea mays subsp. mays
  peptide (1)..(252): Ceres Seq. ID no. 12359770
IRPQGGSHFFLLDSPQSSVRNLFALAVAVTTVLQGWRRVACSRSVGVSSAPVAFASPRRCARLWSRWRWRPPWMPRRRRFWASTTAAWGTTSRRLSPSCRCSRASVLAACGCTTPTPPCCARSPGPGSSSSSACPTSAWPPWPTRAARHSGSRRTSRLSCRTRRSPCSPSATRCSPAPTAPRCRAPSSRRCSPCTARWPRSASTSRSPSPRRTTSACSGRRTRPRRGPSARTCSRTSAPSWTTMPGPARRSS

SEQ ID NO: 8235 - DNA, 1105 bp, Zea mays subsp. mays
  misc_feature (1)..(1105): Ceres Seq. ID no. 12404952
  misc_feature (1)..(1105): Ortholog of  Ceres SEQ ID NO 13597551 as cited in SEQ ID NO 65266
accagccgaaaccgaggctgacgctgcgcgagccaaccggcggtgatgcaggcggcagtcggccaccgcggcgccaaccttggctccccgtcactctcgcgcttccggtatggctcccgcctccccggccggtcccgcctcttctctgagggcgtggcggtggcgccactccgcgtcggctctctgccccagccacggacccatggcagcggcggtttcgcgcacctcggggccatggatggggaggcgccgaggctgccgcacgccctcaggagaatgcttatcgatcatcagaaaatggcatgtcccaaccttctgaaagctgctgtactttcaaccatgacattgcttgctgtacctcttgaggcgtcagcggagatgtgccagccacctagttctttcgccaatatgccaatttttattgttgtagctctaataggagctgctgttggcggattattagcacgccaaagaaaggcggaattgaagcggctcaataatcaacttcgccagatcaatgcagcacttagaaggcaggcacagattgagtcatttgcgcctggccttacttatgcgccagttgggagaacaaatgaaactgatgttattgttgacccaaggaagcagcagttggtcacaaacctgagaaatgggaagaattacatgaggaatcaagatcttgataaggctatagtggagttcagaacagctctggagcttgcagagagcataggtgatcgttttgaagaaaagaaagctgcccgaggactagaggctcgggaagtaccgagaagcaatgagacagtacagcaaggttctggagctgtccaaggagacaggtgaagattccggctgcaccgaggcctacggtgccatagcggactgctacaccgagctgggcgacctggagcgagcggcgaaggtgtatgacaagtacatatcgaggctgcagcccggcgagtaaggtagatttctttacagacgagacagcgagttccttcccgttcgttgagttttgtgttttgtcggtcttgttaaactcactgcaggtattggattgttttgagaacggttttaatattcgtatataaataactattgattt

SEQ ID NO: 8236 - protein, 265 aa, Zea mays subsp. mays
  peptide (1)..(265): Ceres Seq. ID no. 12404953
MQAAVGHRGANLGSPSLSRFRYGSRLPGRSRLFSEGVAVAPLRVGSLPQPRTHGSGGFAHLGAMDGEAPRLPHALRRMLIDHQKMACPNLLKAAVLSTMTLLAVPLEASAEMCQPPSSFANMPIFIVVALIGAAVGGLLARQRKAELKRLNNQLRQINAALRRQAQIESFAPGLTYAPVGRTNETDVIVDPRKQQLVTNLRNGKNYMRNQDLDKAIVEFRTALELAESIGDRFEEKKAARGLEAREVPRSNETVQQGSGAVQGDR

SEQ ID NO: 8237 - protein, 202 aa, Zea mays subsp. mays
  peptide (1)..(202): Ceres Seq. ID no. 12404954
MDGEAPRLPHALRRMLIDHQKMACPNLLKAAVLSTMTLLAVPLEASAEMCQPPSSFANMPIFIVVALIGAAVGGLLARQRKAELKRLNNQLRQINAALRRQAQIESFAPGLTYAPVGRTNETDVIVDPRKQQLVTNLRNGKNYMRNQDLDKAIVEFRTALELAESIGDRFEEKKAARGLEAREVPRSNETVQQGSGAVQGDR

SEQ ID NO: 8238 - protein, 188 aa, Zea mays subsp. mays
  peptide (1)..(188): Ceres Seq. ID no. 12404955
MLIDHQKMACPNLLKAAVLSTMTLLAVPLEASAEMCQPPSSFANMPIFIVVALIGAAVGGLLARQRKAELKRLNNQLRQINAALRRQAQIESFAPGLTYAPVGRTNETDVIVDPRKQQLVTNLRNGKNYMRNQDLDKAIVEFRTALELAESIGDRFEEKKAARGLEAREVPRSNETVQQGSGAVQGDR

SEQ ID NO: 8239 - DNA, 1701 bp, Zea mays subsp. mays
  misc_feature (1)..(1701): Ceres Seq. ID no. 12406634
  misc_feature (1)..(1701): Ortholog of  Ceres SEQ ID NO 13594151 as cited in SEQ ID NO 58886
gttctcccggggctcttctccgtccgtaaggcaccgccgccgcgtctcggctggaccgacagttcggccgatccgtcttctcatcctcctcctccacctgcggctgtgcaggtcggcttcggggacgatggcggcgagggcggctgatgagaacagaaggccgggggtggggaggcccgcgccatgcgtccgagacatggggagccggcgcgcgctcacggacatcaagaacctcgtcggggttgccccgaacccctgcgccgtcgccaagaagcccgtgctgcagaagagcagaaaggacgaaaagaagacagcgttgccaagcagccggccaatgacaaggaaattcgtcgcctccttggcgagcaaagagcaacctaaatgtcagccgaccggagctgatccagaacccggagttgatcaacggaaggaaccaatcgttgatggcaccgttgatatcgacgtggaactgggcgagccggtcgacgatagtgatggtgacatcgacatgggtgatgagacagagaacaaggacattatgaaccaagatgaatcgctcatggatattgatagtgcagactcggggaacccgcttgcagcaacagaatatgttgaagagctttacaagttttacagagaaaatgaggctaagagttgtgtaaaccctgattacatgtccagtcagcaagatataaatgcaaagatgagagcaattctgattgactggctaattgaggttcactacaagtttgaactgatggatgagacgctatttcttacggtaaacgtaatagatagattcttggaaaaggaagtggttccaaggaagaagctacaactggttggaatcacagctctgcttcttgcttgcaaatatgaggaggtctcagttccagttgttgaggaccttgtgctcatttctgaccgtgcctacacaaaagggcaaattctagaaatggaaaagttgattctgaacacgctgcaattcaacatgtctgttccaacaccttatgtcttcatgaagaggtttctgaaagcagcagacgcagataaacagtttgagctagtgtcatttttcatgctggagctctgcttggtagagtaccaaatgctgaactataggccttcacatctggctgctgctgcggtttatactgcacaatgtgctattaaccgttgccagcagtggacaaaggtttgcgagtcacatagcagatacactggcgaccaactcctggagtgctcgaggatgattgtagactttcaccagaaggctggaaccggcaagctcactggcgtgcacaggaagtacagtacctacaagtttgggtgcgcggccaagattgtgcctgcgcagttcatgctggagtcaggagggacagcaccgcctccttcaggtgcaatctaattgaatcgccctgttttaactgggtgggggtttttttttttaaaagattttagcatattctccgtgaacaaaagatgcagaaaacatcgtgttgatgttgcccaaaagtgcatcgaattttcttggagaattatgattaactgttttttttctatccgtgtcctgaatgacgagtgacggactgttttttgttatactgcggctaataacgaactgtcctgttcaggaatgttgttggaaccttgtaaagaaaaacaagttctgaatcaaatggtcaaatggatcctttgtcc

SEQ ID NO: 8240 - protein, 468 aa, Zea mays subsp. mays
  peptide (1)..(468): Ceres Seq. ID no. 12406635
FSRGSSPSVRHRRRVSAGPTVRPIRLLILLLHLRLCRSASGTMAARAADENRRPGVGRPAPCVRDMGSRRALTDIKNLVGVAPNPCAVAKKPVLQKSRKDEKKTALPSSRPMTRKFVASLASKEQPKCQPTGADPEPGVDQRKEPIVDGTVDIDVELGEPVDDSDGDIDMGDETENKDIMNQDESLMDIDSADSGNPLAATEYVEELYKFYRENEAKSCVNPDYMSSQQDINAKMRAILIDWLIEVHYKFELMDETLFLTVNVIDRFLEKEVVPRKKLQLVGITALLLACKYEEVSVPVVEDLVLISDRAYTKGQILEMEKLILNTLQFNMSVPTPYVFMKRFLKAADADKQFELVSFFMLELCLVEYQMLNYRPSHLAAAAVYTAQCAINRCQQWTKVCESHSRYTGDQLLECSRMIVDFHQKAGTGKLTGVHRKYSTYKFGCAAKIVPAQFMLESGGTAPPPSGAI

SEQ ID NO: 8241 - protein, 426 aa, Zea mays subsp. mays
  peptide (1)..(426): Ceres Seq. ID no. 12406636
MAARAADENRRPGVGRPAPCVRDMGSRRALTDIKNLVGVAPNPCAVAKKPVLQKSRKDEKKTALPSSRPMTRKFVASLASKEQPKCQPTGADPEPGVDQRKEPIVDGTVDIDVELGEPVDDSDGDIDMGDETENKDIMNQDESLMDIDSADSGNPLAATEYVEELYKFYRENEAKSCVNPDYMSSQQDINAKMRAILIDWLIEVHYKFELMDETLFLTVNVIDRFLEKEVVPRKKLQLVGITALLLACKYEEVSVPVVEDLVLISDRAYTKGQILEMEKLILNTLQFNMSVPTPYVFMKRFLKAADADKQFELVSFFMLELCLVEYQMLNYRPSHLAAAAVYTAQCAINRCQQWTKVCESHSRYTGDQLLECSRMIVDFHQKAGTGKLTGVHRKYSTYKFGCAAKIVPAQFMLESGGTAPPPSGAI

SEQ ID NO: 8242 - protein, 403 aa, Zea mays subsp. mays
  peptide (1)..(403): Ceres Seq. ID no. 12406637
MGSRRALTDIKNLVGVAPNPCAVAKKPVLQKSRKDEKKTALPSSRPMTRKFVASLASKEQPKCQPTGADPEPGVDQRKEPIVDGTVDIDVELGEPVDDSDGDIDMGDETENKDIMNQDESLMDIDSADSGNPLAATEYVEELYKFYRENEAKSCVNPDYMSSQQDINAKMRAILIDWLIEVHYKFELMDETLFLTVNVIDRFLEKEVVPRKKLQLVGITALLLACKYEEVSVPVVEDLVLISDRAYTKGQILEMEKLILNTLQFNMSVPTPYVFMKRFLKAADADKQFELVSFFMLELCLVEYQMLNYRPSHLAAAAVYTAQCAINRCQQWTKVCESHSRYTGDQLLECSRMIVDFHQKAGTGKLTGVHRKYSTYKFGCAAKIVPAQFMLESGGTAPPPSGAI

SEQ ID NO: 8243 - DNA, 831 bp, Zea mays subsp. mays
  misc_feature (1)..(831): Ceres Seq. ID no. 12373480
  misc_feature (1)..(831): Ortholog of  Ceres SEQ ID NO 15171235 as cited in SEQ ID NO 52469
  misc_feature (1)..(831): Ortholog of  Ceres SEQ ID NO 15172705 as cited in SEQ ID NO 56069
  misc_feature (1)..(831): Ortholog of  Ceres SEQ ID NO 12627215 as cited in SEQ ID NO 60976
  misc_feature (1)..(831): Ortholog of  Ceres SEQ ID NO 13654980 as cited in SEQ ID NO 63094
  misc_feature (1)..(831): Ortholog of  Ceres SEQ ID NO 15178542 as cited in SEQ ID NO 65410
  misc_feature (1)..(831): Ortholog of  Ceres SEQ ID NO 15174852 as cited in SEQ ID NO 67166
  misc_feature (1)..(831): Ortholog of  Ceres SEQ ID NO 12589584 as cited in SEQ ID NO 0
  misc_feature (1)..(831): Ortholog of  Ceres SEQ ID NO 12635657 as cited in SEQ ID NO 0
  misc_feature (1)..(831): Ortholog of  Ceres SEQ ID NO 12635879 as cited in SEQ ID NO 0
  misc_feature (1)..(831): Ortholog of  Ceres SEQ ID NO 13599649 as cited in SEQ ID NO 0
  misc_feature (1)..(831): Ortholog of  Ceres SEQ ID NO 14309205 as cited in SEQ ID NO 0
  misc_feature (1)..(831): Ortholog of  Ceres SEQ ID NO 14309404 as cited in SEQ ID NO 0
  misc_feature (1)..(831): Ortholog of  Ceres SEQ ID NO 15177492 as cited in SEQ ID NO 0
aagatcagatcacactcgtagagagaaggaaaaatatccccaaaccctagctcccgatctcgatggcgaaccctcgcgtcttcttcgacatgaccgtcggcggcgccccggcgggccggatcgtgatggagctgtacgccaacgaggtgcccaagaccgcggagaacttccgcgcgctgtgcacgggcgagaagggcgtgggcaagtccgggaagccgctccactacaagggctccaccttccaccgcgtcatccccgagttcatgtgccagggcggcgacttcacccgcggcaacggcaccggcggcgagtccatctacggcgagaagttccccgacgagaagttcgtgcgcaagcacaccgctcccggtgtgctctccatggccaacgccgggcccaacaccaacggctcccagttcttcatctgcaccgtcgcgaccccttggctcgacggcaagcacgtcgtcttcggccaggtcgtcgagggcatggacgtcgtcaaggccatcgagaaggtgggcacccgcaacggctccacctccaaggtggtcaaggtcgctgactgcggacagctctcctagatctctctgatctggtctgttcggccgccctccctccgtcatcgtcgactccccctgcgtccgttcctttggatctgaataagatggtggtgatctgagtggtggtcttagtttatcatgtatcgctcgcagtttaatttagcggtttaggtgtggatctgtgaaccccatggcgcctctgcttgattcgtgtttcacctgttatgttctgagattcatgataatgctatgagaactgaaattcccgttt

SEQ ID NO: 8244 - protein, 186 aa, Zea mays subsp. mays
  peptide (1)..(186): Ceres Seq. ID no. 12373481
RSDHTRREKEKYPQTLAPDLDGEPSRLLRHDRRRRPGGPDRDGAVRQRGAQDRGELPRAVHGREGRGQVREAAPLQGLHLPPRHPRVHVPGRRLHPRQRHRRRVHLRREVPRREVRAQAHRSRCALHGQRRAQHQRLPVLHLHRRDPLARRQARRLRPGRRGHGRRQGHREGGHPQRLHLQGGQGR

SEQ ID NO: 8245 - protein, 172 aa, Zea mays subsp. mays
  peptide (1)..(172): Ceres Seq. ID no. 12373482
MANPRVFFDMTVGGAPAGRIVMELYANEVPKTAENFRALCTGEKGVGKSGKPLHYKGSTFHRVIPEFMCQGGDFTRGNGTGGESIYGEKFPDEKFVRKHTAPGVLSMANAGPNTNGSQFFICTVATPWLDGKHVVFGQVVEGMDVVKAIEKVGTRNGSTSKVVKVADCGQLS

SEQ ID NO: 8246 - protein, 163 aa, Zea mays subsp. mays
  peptide (1)..(163): Ceres Seq. ID no. 12373483
MTVGGAPAGRIVMELYANEVPKTAENFRALCTGEKGVGKSGKPLHYKGSTFHRVIPEFMCQGGDFTRGNGTGGESIYGEKFPDEKFVRKHTAPGVLSMANAGPNTNGSQFFICTVATPWLDGKHVVFGQVVEGMDVVKAIEKVGTRNGSTSKVVKVADCGQLS

SEQ ID NO: 8247 - DNA, 1573 bp, Zea mays subsp. mays
  misc_feature (1)..(1573): Ceres Seq. ID no. 12344354
  misc_feature (1)..(1573): Ortholog of  Ceres SEQ ID NO 15169979 as cited in SEQ ID NO 51586
ataccgggatgggcgccatgggcatcgtcgtcagagcgtgggcgcctcccgctcttgccgccgcggccgcgccggcaccctccggctccagggacaccggtcaggcccagcggaggagcaagccctcgaggaccggccgcgtgcgcgtgctcggcggcactggccgtgtcggaggatccacggccaccgcactctccaaactccgccccaagcttggcatcctcgtcggtggcaggaaccgggagaaaggcgagtccattgcagccaagcttgggggccagtctgagttcgtccaggtcgacacccgcaacacaggcatgttggaggaagcgctgcaggtggtagctgttcgcggagttgccaaaccggaggcagctgcgacgccggcgaggcgctcgcgccccatccctctggcttccgtggccgtgtggagtctggttgccactggcgccgcaaatgctgccgagctatgggaccccttggccctgcacggatcatcaggactcgtcttggctgaccttggcattggagattggtttgggggtttgctgttttcagctgggcagcaggctaatgaggctgtccaagatcagttgtctgctcttagtttctctagcctagcagttatttttggtgctggacttgtaactagtttatctccttgtacactaagtgttctaccactaactctaggatatataggtgcatttggctcagggaaaagccgatccgaggttgttgggaattcaattgcattttcactaggactagcaacaaccttagccattcttggtgttgctgcttcttttgctggaaaggcttatggtcaggtaggacaagggctcccagtggctgcttccggtttggccattatcatgggattgaaccttctggaggtacttgaattgcaacttccctcatttttcagcgattttgaccctcgcgctgctgcagctaacctcccttcaggtgtacaagcataccttgctggtcttacatttgcattggcagcatcaccttgcagcacacctgttcttgctacccttctgggatatgtcgccacttcaagagacccaattattggaggaagtttattgttgacatacacaacgggctatgttgcgcctcttcttattgcagcttcatttgctggagcactgcagagtttgttgtcattcagaagatattcggcatggataaacccaatcagtggtgcatttctacttggtggaggtgtttataccctactggacagggtgtttccagcaacatcaatggccatgtagaccatcgttggacaagaattgataggcaccagtctgtttggcgtgcgaatgatatttggatgtgaagtagtgaaatgatggcaacaaagtttagccagatctctcagcgttgtataggcacgcaggacattttgatcgggacaagcaaagcaccttgacctaagtacagtagtctgcatcactgtatctgtatgggcctcgatacttggggccggtctaccctactaaaatgtatttctgggacagattgaaagagtatgaaatccatataagggtttgttcgttcc

SEQ ID NO: 8248 - protein, 427 aa, Zea mays subsp. mays
  peptide (1)..(427): Ceres Seq. ID no. 12344355
TGMGAMGIVVRAWAPPALAAAAAPAPSGSRDTGQAQRRSKPSRTGRVRVLGGTGRVGGSTATALSKLRPKLGILVGGRNREKGESIAAKLGGQSEFVQVDTRNTGMLEEALQVVAVRGVAKPEAAATPARRSRPIPLASVAVWSLVATGAANAAELWDPLALHGSSGLVLADLGIGDWFGGLLFSAGQQANEAVQDQLSALSFSSLAVIFGAGLVTSLSPCTLSVLPLTLGYIGAFGSGKSRSEVVGNSIAFSLGLATTLAILGVAASFAGKAYGQVGQGLPVAASGLAIIMGLNLLEVLELQLPSFFSDFDPRAAAANLPSGVQAYLAGLTFALAASPCSTPVLATLLGYVATSRDPIIGGSLLLTYTTGYVAPLLIAASFAGALQSLLSFRRYSAWINPISGAFLLGGGVYTLLDRVFPATSMAM

SEQ ID NO: 8249 - protein, 425 aa, Zea mays subsp. mays
  peptide (1)..(425): Ceres Seq. ID no. 12344356
MGAMGIVVRAWAPPALAAAAAPAPSGSRDTGQAQRRSKPSRTGRVRVLGGTGRVGGSTATALSKLRPKLGILVGGRNREKGESIAAKLGGQSEFVQVDTRNTGMLEEALQVVAVRGVAKPEAAATPARRSRPIPLASVAVWSLVATGAANAAELWDPLALHGSSGLVLADLGIGDWFGGLLFSAGQQANEAVQDQLSALSFSSLAVIFGAGLVTSLSPCTLSVLPLTLGYIGAFGSGKSRSEVVGNSIAFSLGLATTLAILGVAASFAGKAYGQVGQGLPVAASGLAIIMGLNLLEVLELQLPSFFSDFDPRAAAANLPSGVQAYLAGLTFALAASPCSTPVLATLLGYVATSRDPIIGGSLLLTYTTGYVAPLLIAASFAGALQSLLSFRRYSAWINPISGAFLLGGGVYTLLDRVFPATSMAM

SEQ ID NO: 8250 - protein, 422 aa, Zea mays subsp. mays
  peptide (1)..(422): Ceres Seq. ID no. 12344357
MGIVVRAWAPPALAAAAAPAPSGSRDTGQAQRRSKPSRTGRVRVLGGTGRVGGSTATALSKLRPKLGILVGGRNREKGESIAAKLGGQSEFVQVDTRNTGMLEEALQVVAVRGVAKPEAAATPARRSRPIPLASVAVWSLVATGAANAAELWDPLALHGSSGLVLADLGIGDWFGGLLFSAGQQANEAVQDQLSALSFSSLAVIFGAGLVTSLSPCTLSVLPLTLGYIGAFGSGKSRSEVVGNSIAFSLGLATTLAILGVAASFAGKAYGQVGQGLPVAASGLAIIMGLNLLEVLELQLPSFFSDFDPRAAAANLPSGVQAYLAGLTFALAASPCSTPVLATLLGYVATSRDPIIGGSLLLTYTTGYVAPLLIAASFAGALQSLLSFRRYSAWINPISGAFLLGGGVYTLLDRVFPATSMAM

SEQ ID NO: 8251 - DNA, 473 bp, Zea mays subsp. mays
  misc_feature (1)..(473): Ceres Seq. ID no. 1424194
  misc_feature (1)..(473): Ortholog of  Ceres SEQ ID NO 15169537 as cited in SEQ ID NO 64197
atcgattcttggcatcgcctctctctaaaccccaactcctcgactcgagcaatccctaggtctccgcgcgaggcgtggcggctgtgaggggattttgattgatttggctcgagatggcggaggacaaggtgcggcggatcttcgtcggcgggttgtcctggaagaccacggagcgcacgctcgagcgcaccttcggtcagtacggcaatgtcatcgaggcacaggttgtagtgaaaagggaaacaggccgctcgaggggatttggatttgtcacattctcagaacctcgggctgtggatgctgccattcgtggaatgcataatgcggaactggatggccgtaatatttctgtgaacaaagctcatcctaggattgctgacgatgactatggctatggtggtggtggtggtggtggttactcgtctggtgctagaggtggatatcgtagtggcggtgatgtagttccagcagtg

SEQ ID NO: 8252 - protein, 120 aa, Zea mays subsp. mays
  peptide (1)..(120): Ceres Seq. ID no. 1424195
MAEDKVRRIFVGGLSWKTTERTLERTFGQYGNVIEAQVVVKRETGRSRGFGFVTFSEPRAVDAAIRGMHNAELDGRNISVNKAHPRIADDDYGYGGGGGGGYSSGARGGYRSGGDVVPAV

SEQ ID NO: 8253 - DNA, 1457 bp, Zea mays subsp. mays
  misc_feature (1)..(1457): Ceres Seq. ID no. 12352588
  misc_feature (1)..(1457): Ortholog of  Ceres SEQ ID NO 14310390 as cited in SEQ ID NO 59715
gaacgatttgggggaggaggtgttctattacacaaaagaggcaaaaaacaaaagccggtaacggaaaccctaatccccccaaatcccgaatccctctcgaatttctatttaatgttcctgttcttcccctccgatccgatgtccccaactgcgctcccgtcggcgatcaaacaccggatcgcggcactcgccgccgttgaggaggaggtttccggcgctgcttccagcgccttgccgtcagcaccatgaggaagaagctggacacgcgtttccccgctcctcggattaaaaagatcatgcaaacagatgaagacgtcggcaagattgctcaagctgtacctgttctagtgtccaaagcattggagctatttctgcaagatttatgtgataggacatatgatattacaattcggaagggggtcaagactgtgggttcttcccatttgaaacaatgcatacaaacgtacaacgtctatgacttcttgagggaagtagtcagcaaagttccagacattggtccttctgatgttattgctgatgataagcttggcaaaaggaggaaagccgaagaagatggaagtgaggaagaattgaagaggacaagaaatgagacagaaagctatacaagcaatggcagaggccgtgggagaggtcgtgggagaggtcgccgtggtgtacgtggagcttggcgggaggtggtcacaagtcctgagcaattcaaggaggagaatcaatctagcaaggtagccagcctaaaggtggaggtagcagatgaggtctcgaatgtaactgaagcaaaacaggacactacaccaatgagcaacgccaggccttccttaaggaacattgacttgaatttagatccaaccgatgaagaggatgaggttacagtgccaccccaaccccagctgtcagctccagcaactagttgcgatgcagccactgcagcacctggaccatctgttccacggttaagggaaggagcaaaactcaaggacttctttggtgcttgggaactggctgacatgaacaagatggagatggaccctgtccagtttgctctgtcaacaaaccatagattggaggaggacgaggattatgacaatgaagactagctccgccgttatatagcttcagagttgatgagtaggaatagcaggacaactgtaggttcagcttaactctgtagcagttctcatgtatcatatagccgccaaagctgccgatgtagcttataatgtcccagaggttaaggtcgtttgactagttgactgtaatgttctcaagttaggttctattagcagctattgctttcgcagatagtaccgtttgtacattccagttgctctccagttttatgttatctatccttctgctttcttggatagctgagacctgttggcggatgtatcatgtatggcaagttggcaacaaaaagcaagaaggctttcagattc

SEQ ID NO: 8254 - protein, 289 aa, Zea mays subsp. mays
  peptide (1)..(289): Ceres Seq. ID no. 12352589
MRKKLDTRFPAPRIKKIMQTDEDVGKIAQAVPVLVSKALELFLQDLCDRTYDITIRKGVKTVGSSHLKQCIQTYNVYDFLREVVSKVPDIGPSDVIADDKLGKRRKAEEDGSEEELKRTRNETESYTSNGRGRGRGRGRGRRGVRGAWREVVTSPEQFKEENQSSKVASLKVEVADEVSNVTEAKQDTTPMSNARPSLRNIDLNLDPTDEEDEVTVPPQPQLSAPATSCDAATAAPGPSVPRLREGAKLKDFFGAWELADMNKMEMDPVQFALSTNHRLEEDEDYDNED

SEQ ID NO: 8255 - protein, 272 aa, Zea mays subsp. mays
  peptide (1)..(272): Ceres Seq. ID no. 12352590
MQTDEDVGKIAQAVPVLVSKALELFLQDLCDRTYDITIRKGVKTVGSSHLKQCIQTYNVYDFLREVVSKVPDIGPSDVIADDKLGKRRKAEEDGSEEELKRTRNETESYTSNGRGRGRGRGRGRRGVRGAWREVVTSPEQFKEENQSSKVASLKVEVADEVSNVTEAKQDTTPMSNARPSLRNIDLNLDPTDEEDEVTVPPQPQLSAPATSCDAATAAPGPSVPRLREGAKLKDFFGAWELADMNKMEMDPVQFALSTNHRLEEDEDYDNED

SEQ ID NO: 8256 - DNA, 640 bp, Zea mays subsp. mays
  misc_feature (1)..(640): Ceres Seq. ID no. 12412545
  misc_feature (1)..(640): Ortholog of  Ceres SEQ ID NO 15179455 as cited in SEQ ID NO 0
tcactcgtcacatgcgctgacgcgcatccccccggcgtggcgtgcgctttgatctagctcttcttctcgaatccagcccgaggcctttttcttctgcggtttcatccgtacccatcctgcacacgaagcctagaatagccctcccctgctccgccacctcctcggatcccgaccaccccacccccaccccagacaacaggttgatggaggctaagatgggacgcttcttcgagtccgtgagcaatttcttcaccggaggcgaccacatcccctggtgcgaccgcgacctcatcgccggctgtgaaggagagcttgtcaatgctgtaaatgaggaacaaaggaatgaaagccttatgaggttgtcatgggcccttgtgcactccaggcagacagacgatgtaaaccgtggaatcagcatgcttcaagcttctttggataattctgccagtcctctgcagactagggaaaagctgtacttgttggctgttggattctacaggattggcgactactcaaaaagcaggcaacttgcagatcgttgtttggagattcaagcggattggcggcaggccatatcgctgaagaaggcaatagaagataaaattgccaaagatggtctgattggaataggaattgcgac

SEQ ID NO: 8257 - protein, 145 aa, Zea mays subsp. mays
  peptide (1)..(145): Ceres Seq. ID no. 12412546
MEAKMGRFFESVSNFFTGGDHIPWCDRDLIAGCEGELVNAVNEEQRNESLMRLSWALVHSRQTDDVNRGISMLQASLDNSASPLQTREKLYLLAVGFYRIGDYSKSRQLADRCLEIQADWRQAISLKKAIEDKIAKDGLIGIGIA

SEQ ID NO: 8258 - protein, 141 aa, Zea mays subsp. mays
  peptide (1)..(141): Ceres Seq. ID no. 12412547
MGRFFESVSNFFTGGDHIPWCDRDLIAGCEGELVNAVNEEQRNESLMRLSWALVHSRQTDDVNRGISMLQASLDNSASPLQTREKLYLLAVGFYRIGDYSKSRQLADRCLEIQADWRQAISLKKAIEDKIAKDGLIGIGIA

SEQ ID NO: 8259 - protein, 95 aa, Zea mays subsp. mays
  peptide (1)..(95): Ceres Seq. ID no. 12412548
MRLSWALVHSRQTDDVNRGISMLQASLDNSASPLQTREKLYLLAVGFYRIGDYSKSRQLADRCLEIQADWRQAISLKKAIEDKIAKDGLIGIGIA

SEQ ID NO: 8260 - DNA, 1246 bp, Zea mays subsp. mays
  misc_feature (1)..(1246): Ceres Seq. ID no. 12358706
  misc_feature (1)..(1246): Ortholog of  Ceres SEQ ID NO 13581848 as cited in SEQ ID NO 51340
  misc_feature (1)..(1246): Ortholog of  Ceres SEQ ID NO 13595392 as cited in SEQ ID NO 56164
  misc_feature (1)..(1246): Ortholog of  Ceres SEQ ID NO 14316412 as cited in SEQ ID NO 59209
  misc_feature (1)..(1246): Ortholog of  Ceres SEQ ID NO 12618341 as cited in SEQ ID NO 64256
aaaaaaccctatttcatgtgacgtgaacccctttcgctcgctccgagtgcggaggaaggggagctcgacgcacccaagtcgcccgcccacggaacgcgccgccgccgccgccgccatcacatcacagaggcctcgccgtcgtctcggatattccccgccgtaggaccagtttccctccagctgccggagaccatgtcgggcggcctggacatgtccctggacgacctcatcaagcagtccaagtcccgacccaaggacagcccggcgtccttgtcggggcctgcccgccgcgcgccacaccccgcccgcgccgcgccctacccaccggccgctcccaaggcccgtgccgccgccgactcgccctacggggtctactccaagcacatcgccgcgatagcgccgcccccgctggccaaagcaaggtcgcttgagacgggaacgaagctgcacatctccaaccttgactccggcgtcaccatcgaggatgtccaggaactcttctcagaagttggggagctcaagcgttattctatgaattatgacaaggatgggagatctaaggggactgtggaagttgtctttgcaaggaaagtggatgctttggatgctatcaagagatacaatggtgttctacttgatgggaagccaatgaatctagagctcattggaaacaatgtcgaaccacctcccatgccaccagtaatacacagtcgtcctttgcagaactataatgatatccatagcagtatgcctcaatcccaaagaggtggtcagcgaagagtaccccaaggcaacggtcggggtggacgcagtagtcaaagcagtggtggccggggacaggggaaaggccgaggccaggaccggaatcgcaccaccatttctgctgcagatcttgacgccgaacttgacaagtaccatgcagcggcagtgaaggaggaatgaggctctggcgttctgtttactaaacagctggtaaggcgccgggacagtgtggccttctgctttagaagcatgaagtttgctatcttagtcctagtgttttatgctagaaattttttttggcccatgtacaaccgcgtctctgcgtcaagattcctggtgttttatgtgtagcatgaagttgtggtcctactttgcaggaactatcaatcatatttacagctctgcgggcacgattgagaacaattggaaactaaggggtgtttggtttgaagagtcaatccattctagatgagttggtgaaatc

SEQ ID NO: 8261 - protein, 249 aa, Zea mays subsp. mays
  peptide (1)..(249): Ceres Seq. ID no. 12358707
MSGGLDMSLDDLIKQSKSRPKDSPASLSGPARRAPHPARAAPYPPAAPKARAAADSPYGVYSKHIAAIAPPPLAKARSLETGTKLHISNLDSGVTIEDVQELFSEVGELKRYSMNYDKDGRSKGTVEVVFARKVDALDAIKRYNGVLLDGKPMNLELIGNNVEPPPMPPVIHSRPLQNYNDIHSSMPQSQRGGQRRVPQGNGRGGRSSQSSGGRGQGKGRGQDRNRTTISAADLDAELDKYHAAAVKEE

SEQ ID NO: 8262 - protein, 243 aa, Zea mays subsp. mays
  peptide (1)..(243): Ceres Seq. ID no. 12358708
MSLDDLIKQSKSRPKDSPASLSGPARRAPHPARAAPYPPAAPKARAAADSPYGVYSKHIAAIAPPPLAKARSLETGTKLHISNLDSGVTIEDVQELFSEVGELKRYSMNYDKDGRSKGTVEVVFARKVDALDAIKRYNGVLLDGKPMNLELIGNNVEPPPMPPVIHSRPLQNYNDIHSSMPQSQRGGQRRVPQGNGRGGRSSQSSGGRGQGKGRGQDRNRTTISAADLDAELDKYHAAAVKEE

SEQ ID NO: 8263 - protein, 136 aa, Zea mays subsp. mays
  peptide (1)..(136): Ceres Seq. ID no. 12358709
MNYDKDGRSKGTVEVVFARKVDALDAIKRYNGVLLDGKPMNLELIGNNVEPPPMPPVIHSRPLQNYNDIHSSMPQSQRGGQRRVPQGNGRGGRSSQSSGGRGQGKGRGQDRNRTTISAADLDAELDKYHAAAVKEE

SEQ ID NO: 8264 - DNA, 1619 bp, Zea mays subsp. mays
  misc_feature (1)..(1619): Ceres Seq. ID no. 13498683
  misc_feature (1)..(1619): Ortholog of  Ceres SEQ ID NO 13582281 as cited in SEQ ID NO 51014
  misc_feature (1)..(1619): Ortholog of  Ceres SEQ ID NO 14315606 as cited in SEQ ID NO 53515
  misc_feature (1)..(1619): Ortholog of  Ceres SEQ ID NO 15176795 as cited in SEQ ID NO 54453
  misc_feature (1)..(1619): Ortholog of  Ceres SEQ ID NO 14310508 as cited in SEQ ID NO 58965
  misc_feature (1)..(1619): Ortholog of  Ceres SEQ ID NO 13597574 as cited in SEQ ID NO 64677
  misc_feature (1)..(1619): Ortholog of  Ceres SEQ ID NO 12617417 as cited in SEQ ID NO 65089
  misc_feature (1)..(1619): Ortholog of  Ceres SEQ ID NO 13597678 as cited in SEQ ID NO 65375
  misc_feature (1)..(1619): Ortholog of  Ceres SEQ ID NO 12779098 as cited in SEQ ID NO 67698
  misc_feature (1)..(1619): Ortholog of  Ceres SEQ ID NO 13596180 as cited in SEQ ID NO 67941
taatcgaaaaaacaaaactgcaattatctcagtctccttcaaacaactgttttttccattgttagactcaaagcctatccccttcacggagctcgccaagcgctatgggggacgccaacggcggcagtatgcacgttgtgatgctgccatggctggcgttcggccacatcctccccttcacggagctcgccaagcgcatagctaggcagggccaccgggtcaccctcttctccacgccaagaaacacccggcggttaatccgcatccctccagaactcgcggggcatatccgcgtcgtggacatcgcgctgccgcgcgtggagcgcctgccggaggactgcgaggcgagcatagacctgccatccgacgacctccgcccgtacctccgcgtagcctacgacgccgccttcgccgacaaactctcggccatcctgcaggagccgcggccggagaggccggactgggttctcatcgactacgccgcgtactgggcgcccgcggccgcggcgaggcacggcgtgccgtgcgccttcctgagcctgttcggcgccgcgaccctcagtttctatgggcccccggaggggctcatgggacgcggcaagtacgccaggacgaagccggaggacctcaccgtagtacccgactacgtgccgttcccaacaaccgtcgcgcaccgcggcttcgaggcgcgcgagctattcaagccaggccttgtcccggacgactccggcgtgtcggagggccacaggttcggcgtgtccatcggagagagccagatcgtaggcatcaggagcagaacagagctcgagtcggagtggctgcaggtgcttggcaagctctacaagaagccggtgatcccgatcggcctgttccctccgccgcccacgcaagacatcgccggccacgaggcgactttgcggtggctggacagacaggctcagggctccgtcgtgtacgcggccttcggcagcgaggcgaagctgacgagcgcgcagctccaaacaattgcgctaggtttggaggcttccggcctgccgttcctctgggcattcaggccgccaaccgacgccgcaccaggacaaggcacgggcgggttgcccgaaggcttcaaggagcgtgtcaatggccggggattggtctgccgcggctgggtgcctcaacccaggctgttggctcatgaatcggttggtgggtttctgacccacgccggctggaactccatcgccgaaggcctctcgcggggcgtcacgatggtgctgttgccgctgatgttcgatcagggcctcaacgccaggcttcttgtggataagaagatcgggattgaggtggagagggacgaagacgacggcacgttcgcgcccaaagacatcgcggatgctctgaggacggccatggcggagaaccaagacgggactagggtcaaggaactggccgaggtgtttggaaatgacgaggccaatgatcagtgcctgcgagatttcctccggtatctgttagaatacatcaggcagcatcaaggttagttccagtccatttcgaggctaatgttaatgcagaaaagggcaaagaaatggtagtgagtcacgtcacgctatcaaaaaaaaaaaatccttccaggt

SEQ ID NO: 8265 - protein, 472 aa, Zea mays subsp. mays
  peptide (1)..(472): Ceres Seq. ID no. 13498684
MGDANGGSMHVVMLPWLAFGHILPFTELAKRIARQGHRVTLFSTPRNTRRLIRIPPELAGHIRVVDIALPRVERLPEDCEASIDLPSDDLRPYLRVAYDAAFADKLSAILQEPRPERPDWVLIDYAAYWAPAAAARHGVPCAFLSLFGAATLSFYGPPEGLMGRGKYARTKPEDLTVVPDYVPFPTTVAHRGFEARELFKPGLVPDDSGVSEGHRFGVSIGESQIVGIRSRTELESEWLQVLGKLYKKPVIPIGLFPPPPTQDIAGHEATLRWLDRQAQGSVVYAAFGSEAKLTSAQLQTIALGLEASGLPFLWAFRPPTDAAPGQGTGGLPEGFKERVNGRGLVCRGWVPQPRLLAHESVGGFLTHAGWNSIAEGLSRGVTMVLLPLMFDQGLNARLLVDKKIGIEVERDEDDGTFAPKDIADALRTAMAENQDGTRVKELAEVFGNDEANDQCLRDFLRYLLEYIRQHQG

SEQ ID NO: 8266 - protein, 464 aa, Zea mays subsp. mays
  peptide (1)..(464): Ceres Seq. ID no. 13498685
MHVVMLPWLAFGHILPFTELAKRIARQGHRVTLFSTPRNTRRLIRIPPELAGHIRVVDIALPRVERLPEDCEASIDLPSDDLRPYLRVAYDAAFADKLSAILQEPRPERPDWVLIDYAAYWAPAAAARHGVPCAFLSLFGAATLSFYGPPEGLMGRGKYARTKPEDLTVVPDYVPFPTTVAHRGFEARELFKPGLVPDDSGVSEGHRFGVSIGESQIVGIRSRTELESEWLQVLGKLYKKPVIPIGLFPPPPTQDIAGHEATLRWLDRQAQGSVVYAAFGSEAKLTSAQLQTIALGLEASGLPFLWAFRPPTDAAPGQGTGGLPEGFKERVNGRGLVCRGWVPQPRLLAHESVGGFLTHAGWNSIAEGLSRGVTMVLLPLMFDQGLNARLLVDKKIGIEVERDEDDGTFAPKDIADALRTAMAENQDGTRVKELAEVFGNDEANDQCLRDFLRYLLEYIRQHQG

SEQ ID NO: 8267 - protein, 460 aa, Zea mays subsp. mays
  peptide (1)..(460): Ceres Seq. ID no. 13498686
MLPWLAFGHILPFTELAKRIARQGHRVTLFSTPRNTRRLIRIPPELAGHIRVVDIALPRVERLPEDCEASIDLPSDDLRPYLRVAYDAAFADKLSAILQEPRPERPDWVLIDYAAYWAPAAAARHGVPCAFLSLFGAATLSFYGPPEGLMGRGKYARTKPEDLTVVPDYVPFPTTVAHRGFEARELFKPGLVPDDSGVSEGHRFGVSIGESQIVGIRSRTELESEWLQVLGKLYKKPVIPIGLFPPPPTQDIAGHEATLRWLDRQAQGSVVYAAFGSEAKLTSAQLQTIALGLEASGLPFLWAFRPPTDAAPGQGTGGLPEGFKERVNGRGLVCRGWVPQPRLLAHESVGGFLTHAGWNSIAEGLSRGVTMVLLPLMFDQGLNARLLVDKKIGIEVERDEDDGTFAPKDIADALRTAMAENQDGTRVKELAEVFGNDEANDQCLRDFLRYLLEYIRQHQG

SEQ ID NO: 8268 - DNA, 924 bp, Zea mays subsp. mays
  misc_feature (1)..(924): Ceres Seq. ID no. 12367187
  misc_feature (1)..(924): Ortholog of  Ceres SEQ ID NO 15175411 as cited in SEQ ID NO 60150
  misc_feature (1)..(924): Ortholog of  Ceres SEQ ID NO 12617472 as cited in SEQ ID NO 64543
agtttttcatgggctgacccggttatgtggccttgttagttttcgcctaatttcaaataacagcaatttcttagtggcccgtacactctgcagcagtgcggtgcgggcgtgcggcctccctttttttctccagttcctccggcggcggcgtgcttggcggtgcgccaggtgcccagatctccaccatcttagtcgccggcgacgagcatcaccaggttcccgatgaccatggcgcagcgcacgatgtgcctgcttcggcggtccattgggtttacagcgccgcaggcacagagagccctgagtaccactgccgcaccagcggcggagggtgcggccgtggctgaagctacggcgaaggaggcgaagaggaggaggaagaatctgtttgacgtagtgcagttcctgccagagtggggcattggatacaaggttgccaagaccacctggcgtgacgtctcctatcagatcaccaagatcaacctgtacaaggatggtcggcatggaaaggcgtgggggcttcggtacaaggcaggtgtgcaagctgcagacaccccaactaggatcagcggtgttaacaaacgtgggtggaagtacataaaagaatcacagaagaaactacaagaagcccccaaagtagacgtagctgttgctgctgcctagttcgtagttacatgcatgtttgttgtaagatgattcggtaaatctttagatggctgttgccagggtgagaacagggaaccacttttttttggatcgactctatacttttttgtcgatgacgactgaacctctctgcaacatgtccagtttcttttcttttccttatggaacgaacctttaccgtaatgtactgatgcagaagaactgcgttgattgtggcgatctagttttcattcaaacgcaagccttgtttcattctgagcc

SEQ ID NO: 8269 - protein, 145 aa, Zea mays subsp. mays
  peptide (1)..(145): Ceres Seq. ID no. 12367188
MTMAQRTMCLLRRSIGFTAPQAQRALSTTAAPAAEGAAVAEATAKEAKRRRKNLFDVVQFLPEWGIGYKVAKTTWRDVSYQITKINLYKDGRHGKAWGLRYKAGVQAADTPTRISGVNKRGWKYIKESQKKLQEAPKVDVAVAAA

SEQ ID NO: 8270 - protein, 143 aa, Zea mays subsp. mays
  peptide (1)..(143): Ceres Seq. ID no. 12367189
MAQRTMCLLRRSIGFTAPQAQRALSTTAAPAAEGAAVAEATAKEAKRRRKNLFDVVQFLPEWGIGYKVAKTTWRDVSYQITKINLYKDGRHGKAWGLRYKAGVQAADTPTRISGVNKRGWKYIKESQKKLQEAPKVDVAVAAA

SEQ ID NO: 8271 - protein, 138 aa, Zea mays subsp. mays
  peptide (1)..(138): Ceres Seq. ID no. 12367190
MCLLRRSIGFTAPQAQRALSTTAAPAAEGAAVAEATAKEAKRRRKNLFDVVQFLPEWGIGYKVAKTTWRDVSYQITKINLYKDGRHGKAWGLRYKAGVQAADTPTRISGVNKRGWKYIKESQKKLQEAPKVDVAVAAA

SEQ ID NO: 8272 - DNA, 1189 bp, Zea mays subsp. mays
  misc_feature (1)..(1189): Ceres Seq. ID no. 13498621
  misc_feature (1)..(1189): Ortholog of  Ceres SEQ ID NO 12611392 as cited in SEQ ID NO 56826
  misc_feature (1)..(1189): Ortholog of  Ceres SEQ ID NO 13660872 as cited in SEQ ID NO 60830
attatcgaccagcaccctcatctatatccatcaacatcgatccatccatccatcatggcggcggagcagcagcatcagctggatctgccggggttccggttccacccgacggaggaggagctgctggagttctacctgaagcaggcggcgcgcgggaggaagctcaagttcgacatcatccccacggtgcacctgtaccggcacgacccctgggagctgccgagcctggcgcgcgtcgttggcgagcgcgagtggtacttcttcgtgccccgcgacggcggcgggcgggcggccaagcagcagcccggctccggcggccggcctagccgcaccacggagcgcgggttctggaaggccacggggtcggaccgcgccgtgcggtgcgccgccgaccccaagcgcctcatcgggctcaagaagacgctcgtctactacgagggccgcgcgccgcggggcaccaagacggactgggtcatgaacgagtaccgcctccccgacgctgccgacgctagcagcgacgcgcgcgtgccgcaggtggacgtggtgctgtgcaaggtctaccgcaaggccgtgtcgctcaaggagctggagcagcgggtggccatggaggagctcgcgcgcgccaccgccacgccgtccgcgtcccacagcaccggctcccccgccgactccatgtcgtcgtcggagatcgtgatggtgcccgtgggcggcgtctcgctctcaccgtcagctgcgatgagcatgaagagagaggaggcggcgaagaatcagcagcagcaggaccccttcctgacgcagctgcggagcccacggatggagagctggtggtctgcctactacgccagcgtcctcaacttctaaccaaaatccacacaatccaacagctttatatgtaaagcgaaggcccacgctcacagtcgtcggcccaactgatgcccgtgcgccgcgcgctgggccgcacggcccaagagctaccaagcgcgggcacgcaccgcggcagcccaaggatctctccaccttatctccctgctcgggactcgggacctttacctatcttcttcgttcttccatgggagcgagctagagagagggcgccatggatcagcagcttctcgtggatgactccaatcatattaacgatatactaacttataatgtgccgatcgttgaacaccgtttattttgattc

SEQ ID NO: 8273 - protein, 286 aa, Zea mays subsp. mays
  peptide (1)..(286): Ceres Seq. ID no. 13498622
IIDQHPHLYPSTSIHPSIMAAEQQHQLDLPGFRFHPTEEELLEFYLKQAARGRKLKFDIIPTVHLYRHDPWELPSLARVVGEREWYFFVPRDGGGRAAKQQPGSGGRPSRTTERGFWKATGSDRAVRCAADPKRLIGLKKTLVYYEGRAPRGTKTDWVMNEYRLPDAADASSDARVPQVDVVLCKVYRKAVSLKELEQRVAMEELARATATPSASHSTGSPADSMSSSEIVMVPVGGVSLSPSAAMSMKREEAAKNQQQQDPFLTQLRSPRMESWWSAYYASVLNF

SEQ ID NO: 8274 - protein, 268 aa, Zea mays subsp. mays
  peptide (1)..(268): Ceres Seq. ID no. 13498623
MAAEQQHQLDLPGFRFHPTEEELLEFYLKQAARGRKLKFDIIPTVHLYRHDPWELPSLARVVGEREWYFFVPRDGGGRAAKQQPGSGGRPSRTTERGFWKATGSDRAVRCAADPKRLIGLKKTLVYYEGRAPRGTKTDWVMNEYRLPDAADASSDARVPQVDVVLCKVYRKAVSLKELEQRVAMEELARATATPSASHSTGSPADSMSSSEIVMVPVGGVSLSPSAAMSMKREEAAKNQQQQDPFLTQLRSPRMESWWSAYYASVLNF

SEQ ID NO: 8275 - DNA, 1672 bp, Zea mays subsp. mays
  misc_feature (1)..(1672): Ceres Seq. ID no. 12367459
  misc_feature (1)..(1672): Ortholog of  Ceres SEQ ID NO 13598635 as cited in SEQ ID NO 64865
  misc_feature (1)..(1672): Ortholog of  Ceres SEQ ID NO 12625120 as cited in SEQ ID NO 67706
  misc_feature (1)..(1672): Ortholog of  Ceres SEQ ID NO 13595999 as cited in SEQ ID NO 68173
gcactccgcaattccgcatcacgcaccccaccccaccgcccgcaaccgcaagctcagattccctcccaccccaccccaccgtcccgctcactccagcccagcccgcgtccccacagcccagcgacagcgagcaccggcggcatccagccatgtgcggcggcgccatcctgtcggacatcatcccgccgccgccgccgcggcgtgtcacggcgggccacctctggcccgagagcaagaagccgaggagggctgcagccggcaggaggagagcccccgtggagcaggagcaggaggaggatttcgaggccgacttcgaggagttcgaggtggagtccggcgagtcggagctcgagtccgaggacgagcccaagcccaagcccttcgccgcccccagcagcgcgctcgccagaggtggactaaacactggtgcagctggtgtcgatggccctgctgcaaattcagttaaaaggaagaggaagaaccagttcaggggtatccgccggcgcccgtggggcaaatgggctgctgagatcagagatcctcgcaagggcgtgcgcgtctggctcggtacattcaactctcccgaagaagctgccagagcttacgacgccgaggcacgcaggatccgcggcaagaaggctaaagtcaacttcccggatgaggttcctacggcggtttctcagaagcgccgtgctgctgggcttgcctctctgaaagcgcctaagatggacgttgaggaggagaagccgatcatcaagctcgcagtgaacaatatgaccaactcaaacgcatatcactaccctgccgtcgtcggccaccacaacatcatacccgagccattcatgcagactcagaacatgccattcgctcctctggtgaattatgctgccctcgtgaacctgtcttcacaccaaggcagcaactcgttcggttgctcggacttcagcctcgagaacgactccaggacccctgacataacttcggtgcctgcgcccgttgccaccttggccgccgttggagagtctgcgttcgtccagaacacggccggccatgctgtggcgcctcctgcgacggggaacactggtgttgatctcgctgagttggagccgtatatggatttcctgatggacggtggttcagacgactcgatcagcactctcttgagctgtgatggatcccaggacgtggtcagcaacatggacctttggagcttcgacgacatgcccatgtctgctggtttctactgaggctgaggcccagcgactggtgcttgactgcttgtgtacatagggggggacaaagggtaagagcctgcagtaacagagattggctctttctggtacttgcaatttctatcccttcaactctttcttccgcccccgtgtttcaggaataatgttctggagatgaagaatcgcttgcgtgggcgtgcctgcaggcacgcgtgtagtagctgcggtattagtatatatgcttagatgttcagtcactttctttaagtacaatttggcgctggacatgtaccttattttactatgtatccgtgacaacagctatgtgtctgctccttttattttcttgtctttgcttcaaaaaaatggctctgaacattgcgagtttgtactttgtagacaatatatatatatgtgtgtgtatgtgcttggtttgcttc

SEQ ID NO: 8276 - protein, 414 aa, Zea mays subsp. mays
  peptide (1)..(414): Ceres Seq. ID no. 12367460
TPQFRITHPTPPPATASSDSLPPHPTVPLTPAQPASPQPSDSEHRRHPAMCGGAILSDIIPPPPPRRVTAGHLWPESKKPRRAAAGRRRAPVEQEQEEDFEADFEEFEVESGESELESEDEPKPKPFAAPSSALARGGLNTGAAGVDGPAANSVKRKRKNQFRGIRRRPWGKWAAEIRDPRKGVRVWLGTFNSPEEAARAYDAEARRIRGKKAKVNFPDEVPTAVSQKRRAAGLASLKAPKMDVEEEKPIIKLAVNNMTNSNAYHYPAVVGHHNIIPEPFMQTQNMPFAPLVNYAALVNLSSHQGSNSFGCSDFSLENDSRTPDITSVPAPVATLAAVGESAFVQNTAGHAVAPPATGNTGVDLAELEPYMDFLMDGGSDDSISTLLSCDGSQDVVSNMDLWSFDDMPMSAGFY

SEQ ID NO: 8277 - protein, 365 aa, Zea mays subsp. mays
  peptide (1)..(365): Ceres Seq. ID no. 12367461
MCGGAILSDIIPPPPPRRVTAGHLWPESKKPRRAAAGRRRAPVEQEQEEDFEADFEEFEVESGESELESEDEPKPKPFAAPSSALARGGLNTGAAGVDGPAANSVKRKRKNQFRGIRRRPWGKWAAEIRDPRKGVRVWLGTFNSPEEAARAYDAEARRIRGKKAKVNFPDEVPTAVSQKRRAAGLASLKAPKMDVEEEKPIIKLAVNNMTNSNAYHYPAVVGHHNIIPEPFMQTQNMPFAPLVNYAALVNLSSHQGSNSFGCSDFSLENDSRTPDITSVPAPVATLAAVGESAFVQNTAGHAVAPPATGNTGVDLAELEPYMDFLMDGGSDDSISTLLSCDGSQDVVSNMDLWSFDDMPMSAGFY

SEQ ID NO: 8278 - DNA, 1572 bp, Zea mays subsp. mays
  misc_feature (1)..(1572): Ceres Seq. ID no. 12405446
  misc_feature (1)..(1572): Ortholog of  Ceres SEQ ID NO 14312216 as cited in SEQ ID NO 53930
  misc_feature (1)..(1572): Ortholog of  Ceres SEQ ID NO 13656404 as cited in SEQ ID NO 65806
  misc_feature (1)..(1572): Ortholog of  Ceres SEQ ID NO 12779935 as cited in SEQ ID NO 66774
  misc_feature (1)..(1572): Ortholog of  Ceres SEQ ID NO 13598695 as cited in SEQ ID NO 67368
  misc_feature (1)..(1572): Ortholog of  Ceres SEQ ID NO 13591174 as cited in SEQ ID NO 68289
attgggttccccgctctgctcctcagctcagccctcttgctcctgacctgccgtcctcctccttccctccccgtgagtcgccgtacggcggtacggggatcgccaccgcggcgtccagggatggcggacgggagcctctacgcctggtggtgttgtgccttgggctgggcgctggcgcttgtcgcagcggacggcttcctcgtggacatcacctatgtggaaagcgccgtggccaaaggagcagtgtgtttggatggtagtgcgccggcgtaccatctcgcccgcggctccggctccggtgagaagagctggctggtccatttcgaggggggaggctggtgcaacaatgtcaccacctgcctgcaacggaagcgcactcggttgggttcgtccaaggagatggcgacggcagattgccttctccggaatcctgagtgacacgccggatgacaacccagatttttacaattggaacaaggtcaaggttcggtactgtgatggttcatctttcactggagatgttgaagaagttgaccctgcaacaaagctacattatagaggtgcgaggatatggcaagctgtcatggacgacctgcttgccaaagggatggacaaagctgaaaatgctctaatttcaggctgttctgctggtggtttaacctccatactacactgtgacagatttcatgaccttctgccgccggctgcgagggttaagtgcctttctgatgctgggttcttcattaatgagaaagacgttgcaggagttgggtacattgctgcctttttcaacgacgtcgttacaacacatgggtcagcaaagaatttgccgccttcatgcacttcgacgttacctccaggaacgtgctttttcccccagaacgaggtgaaacagatacagacacctctgttcatcctcaacgcagcatatgattcatggcaggtaaggaacattttggtgccaggagtagctgaccctcatggaaaatggcatagctgtaagcatgatatagaccagtgctctgcatcgcagctacgggtattgcagggattcaggggtgattttctgaaggaagtggcagaactagggaactccgactcgagagggttgttcataaactcatgcttcgtgcactgccagtctgagatacaggagctatggttctcatctgactcccccgtgctcggaaacacaacagtagcaaacgctgttggcgactggttcttcgaccgcagctccttccagaagatagactgcccatacccttgtgactcgacctgtcacaatcggatctacgatgactcatcacaagcatagcaattacagtggcctcacttcgtactgccattcaccatgttattacatttgacgcttccagcattgctaacagtagggcaatgcgttgatagccattgattttttttttctttttacgaataagatcaggtgccggcggctttaactcggttgctaccggaaagtgagcgtgcatcttccgacggtacatggcatggtttatctggatggatgaatcgataatcataaattcttaaaaacacaataaatattct

SEQ ID NO: 8279 - protein, 367 aa, Zea mays subsp. mays
  peptide (1)..(367): Ceres Seq. ID no. 12405447
MWKAPWPKEQCVWMVVRRRTISPAAPAPVRRAGWSISRGEAGATMSPPACNGSALGWVRPRRWRRQIAFSGILSDTPDDNPDFYNWNKVKVRYCDGSSFTGDVEEVDPATKLHYRGARIWQAVMDDLLAKGMDKAENALISGCSAGGLTSILHCDRFHDLLPPAARVKCLSDAGFFINEKDVAGVGYIAAFFNDVVTTHGSAKNLPPSCTSTLPPGTCFFPQNEVKQIQTPLFILNAAYDSWQVRNILVPGVADPHGKWHSCKHDIDQCSASQLRVLQGFRGDFLKEVAELGNSDSRGLFINSCFVHCQSEIQELWFSSDSPVLGNTTVANAVGDWFFDRSSFQKIDCPYPCDSTCHNRIYDDSSQA

SEQ ID NO: 8280 - protein, 354 aa, Zea mays subsp. mays
  peptide (1)..(354): Ceres Seq. ID no. 12405448
MVVRRRTISPAAPAPVRRAGWSISRGEAGATMSPPACNGSALGWVRPRRWRRQIAFSGILSDTPDDNPDFYNWNKVKVRYCDGSSFTGDVEEVDPATKLHYRGARIWQAVMDDLLAKGMDKAENALISGCSAGGLTSILHCDRFHDLLPPAARVKCLSDAGFFINEKDVAGVGYIAAFFNDVVTTHGSAKNLPPSCTSTLPPGTCFFPQNEVKQIQTPLFILNAAYDSWQVRNILVPGVADPHGKWHSCKHDIDQCSASQLRVLQGFRGDFLKEVAELGNSDSRGLFINSCFVHCQSEIQELWFSSDSPVLGNTTVANAVGDWFFDRSSFQKIDCPYPCDSTCHNRIYDDSSQA

SEQ ID NO: 8281 - protein, 323 aa, Zea mays subsp. mays
  peptide (1)..(323): Ceres Seq. ID no. 12405449
MSPPACNGSALGWVRPRRWRRQIAFSGILSDTPDDNPDFYNWNKVKVRYCDGSSFTGDVEEVDPATKLHYRGARIWQAVMDDLLAKGMDKAENALISGCSAGGLTSILHCDRFHDLLPPAARVKCLSDAGFFINEKDVAGVGYIAAFFNDVVTTHGSAKNLPPSCTSTLPPGTCFFPQNEVKQIQTPLFILNAAYDSWQVRNILVPGVADPHGKWHSCKHDIDQCSASQLRVLQGFRGDFLKEVAELGNSDSRGLFINSCFVHCQSEIQELWFSSDSPVLGNTTVANAVGDWFFDRSSFQKIDCPYPCDSTCHNRIYDDSSQA

SEQ ID NO: 8282 - DNA, 1298 bp, Zea mays subsp. mays
  misc_feature (1)..(1298): Ceres Seq. ID no. 12376925
  misc_feature (1)..(1298): Ortholog of  Ceres SEQ ID NO 14311989 as cited in SEQ ID NO 54997
gagggagacgacgacgacggcgatggcctggctgcggcggacggagacgctggtgctgctgctcgtggtgcttctggcctccgcttcatcccccgcggcggctgcggcggcgggagaggaggaggaaagagtgatcaggctgaagcgctgtgatggtggttattcttataaccatactctggctcatattcttgtcgaatacgcgtctgcggtgtacacatctgacttgacatcacttttctcatggacctgtccaaggtgcaaaggccacacaaagggatttgaggtgatagagatcatagtagatgtggagaactgcttacaggcgtttgttggagttgcacctgaccctcgatccataatcattgcttttagaggcactcaacagcacagtgtctcaaattggatcgaagatcttttctggaagcagcttgatgtgacatacccaggcatgccggatgcaatggtccatcatgggttttattctgcatattataatacaactctgcgatatgagatcctgaagtctattaaatgggcaagaaaaacatatggaaatctacccataaatgttgtgggacactccatgggaggggctttagcttcgttttgtgcccttgatctatctgttaaatttggatcgcaggaggttgaactcatgacctttggacagcctcggataggcaatcctgcatttgctgtatactttggtgaacaagtcccaagaacaatccgtgtgacccatcagaatgatattgtgccgcatttaccaccgtattattattacctaggtgaatggacataccaccacttcgctagagaggtttggcttcatgagagcatagatggaaatgtagttaccagaaacgagacggtatgtgatgattctggtgaagacccgacctgtagcaggtcggtctatgggatgagcgtagcagatcatcttgagtactatgatgtcacactacatgctgattcaagaggaacctgtcaattcgtgattggtgcagccaaccaagtatacaactacgttcgtgaagttgatggatccatcatcctgtcaagatacccgcaagaaccacaagctctagaatctatgtgactttgtatgccacggaatgcacccctgtacagtatttttcattttcattttgtgtacagctcatgaaatgctgggcgctcctggagctctccagaggataaggagaggctcacctttttaaatgtgtcccctttgctcaagtgagaatcgtgcatgtaagctccataagattgtccgcacaattcaatttgtgtat

SEQ ID NO: 8283 - protein, 366 aa, Zea mays subsp. mays
  peptide (1)..(366): Ceres Seq. ID no. 12376926
RETTTTAMAWLRRTETLVLLLVVLLASASSPAAAAAAGEEEERVIRLKRCDGGYSYNHTLAHILVEYASAVYTSDLTSLFSWTCPRCKGHTKGFEVIEIIVDVENCLQAFVGVAPDPRSIIIAFRGTQQHSVSNWIEDLFWKQLDVTYPGMPDAMVHHGFYSAYYNTTLRYEILKSIKWARKTYGNLPINVVGHSMGGALASFCALDLSVKFGSQEVELMTFGQPRIGNPAFAVYFGEQVPRTIRVTHQNDIVPHLPPYYYYLGEWTYHHFAREVWLHESIDGNVVTRNETVCDDSGEDPTCSRSVYGMSVADHLEYYDVTLHADSRGTCQFVIGAANQVYNYVREVDGSIILSRYPQEPQALESM

SEQ ID NO: 8284 - protein, 359 aa, Zea mays subsp. mays
  peptide (1)..(359): Ceres Seq. ID no. 12376927
MAWLRRTETLVLLLVVLLASASSPAAAAAAGEEEERVIRLKRCDGGYSYNHTLAHILVEYASAVYTSDLTSLFSWTCPRCKGHTKGFEVIEIIVDVENCLQAFVGVAPDPRSIIIAFRGTQQHSVSNWIEDLFWKQLDVTYPGMPDAMVHHGFYSAYYNTTLRYEILKSIKWARKTYGNLPINVVGHSMGGALASFCALDLSVKFGSQEVELMTFGQPRIGNPAFAVYFGEQVPRTIRVTHQNDIVPHLPPYYYYLGEWTYHHFAREVWLHESIDGNVVTRNETVCDDSGEDPTCSRSVYGMSVADHLEYYDVTLHADSRGTCQFVIGAANQVYNYVREVDGSIILSRYPQEPQALESM

SEQ ID NO: 8285 - protein, 216 aa, Zea mays subsp. mays
  peptide (1)..(216): Ceres Seq. ID no. 12376928
MPDAMVHHGFYSAYYNTTLRYEILKSIKWARKTYGNLPINVVGHSMGGALASFCALDLSVKFGSQEVELMTFGQPRIGNPAFAVYFGEQVPRTIRVTHQNDIVPHLPPYYYYLGEWTYHHFAREVWLHESIDGNVVTRNETVCDDSGEDPTCSRSVYGMSVADHLEYYDVTLHADSRGTCQFVIGAANQVYNYVREVDGSIILSRYPQEPQALESM

SEQ ID NO: 8286 - DNA, 2013 bp, Zea mays subsp. mays
  misc_feature (1)..(2013): Ceres Seq. ID no. 12594603
  misc_feature (1)..(2013): Ortholog of  Ceres SEQ ID NO 14314585 as cited in SEQ ID NO 59345
agtgtgagagctcgattcgttgccgtccacttgtctcacggcctgtcgccatctccttcctggttttttcatccgaccatccccggctcctccgcgccgtcggcgacgactccatcgagtcactcggccgcagcaaccggcgaccatgtaccgagtcgcctccgggctcggcgccctcaagaggcatggggcaaatgctcaaatgatgaatgctgcaattaggtgtgccagcacaagtgttgcacagaggtcttccggtggcttgtggacctggttgactggtgcgcgttcaaatgaaatacctcctccagatttcacacttccgggagtgactattcctcctccgctgcctgaccatgtggaggctggcaaaacaagagtcacaacacttcccaatggtgttaaaatagcctctgagacatctgcgggatcatcttgttctgttggagtttatgttgattgtggttctgtatatgaagcacctgaaacaacaggtgccagtcaactgttgaagacaatggccttcacaaccactgccaacaggagtgagttgcgggttgtgcgtgaaattgaggcaataggtggcagtgccaaagcatctgctagccgtgagatgatgagctacacttacggagccctgaagacttacatgcctgaaatggttgaggtgcttattgattgtgtacgcaaccctgcttttcttgattgggaggtaaaggaacagattttgaggctacaggcagagcttgcaaaatcatcaagttatcctgaaaattttcttttggaggctcttcattctactggctattctggtgctttagcaaacccactaattgttccagaatattcagttagcagattgaatgcagatgtcctggagcaatttataactgagaactacactgcttcccgaattgttctagctgcatcaggtgttgatcatgatgaattggtatctattgccgaaccccttctgtctgacattcccagtgtatctggaacaacaaggccaaaatcaacctacattggtggagaatacagaagaagtgcagattcatcgaacacagacgttgcattggcattcgaggtcccaagtggttggctcaaagaaaaagattgcgtcactgtatcagttcttcaggcacttctgggtggtggtggcaagttttcttggggaaggcaaggaaaggggttacattcacgtctaaaccgcctcgtaaatgaatttgatcagatcaagtcaatctctgctttcaaggatgttcacagtaatactggcatctttggaatccatacatctactgatgcatcatttgttcctaaagctattgacctagcagccagagagctcacttcccttgcaactcctggacaagttgaccaaagccaactggaccgtgctaaagcctcagctaaatctgccatactggcaaatttggaatcacaggcatcgctaacagaggacatggggcgccaagttttggcatttggtgaaaggaaacctgccgagcaccttctcaaggctgtagatggtgttactatgaaagatataacgtctgttgctgaaaagatcatttcatccccattgacaatggcatctcatggaaacgttctgaatatgcctacttatgagtcagtcagtggcaagttccgctcaaaatgaggagtacatgacccttcccttcattttatcaccttgtttgctggacaagttttaccagtcccttgtcattcacgtctaggccatggttcttggtcagtttcagaagaaataaggaacctcatgcagttttgttcgtgaaacctgtgatcacttcacaattattcccttttctcattcttttgcggaacattcgtgtggttaatgctggtgatagaccagtaacgtgcttgtaaatttaactgaaccctggcccctcattcggtaccaaggccccccagagaatgtacaaaattgtcgtaaaactcttgacaaaaatgttgtcgcacatgaataatgattctacagaactg

SEQ ID NO: 8287 - protein, 505 aa, Zea mays subsp. mays
  peptide (1)..(505): Ceres Seq. ID no. 12594604
MYRVASGLGALKRHGANAQMMNAAIRCASTSVAQRSSGGLWTWLTGARSNEIPPPDFTLPGVTIPPPLPDHVEAGKTRVTTLPNGVKIASETSAGSSCSVGVYVDCGSVYEAPETTGASQLLKTMAFTTTANRSELRVVREIEAIGGSAKASASREMMSYTYGALKTYMPEMVEVLIDCVRNPAFLDWEVKEQILRLQAELAKSSSYPENFLLEALHSTGYSGALANPLIVPEYSVSRLNADVLEQFITENYTASRIVLAASGVDHDELVSIAEPLLSDIPSVSGTTRPKSTYIGGEYRRSADSSNTDVALAFEVPSGWLKEKDCVTVSVLQALLGGGGKFSWGRQGKGLHSRLNRLVNEFDQIKSISAFKDVHSNTGIFGIHTSTDASFVPKAIDLAARELTSLATPGQVDQSQLDRAKASAKSAILANLESQASLTEDMGRQVLAFGERKPAEHLLKAVDGVTMKDITSVAEKIISSPLTMASHGNVLNMPTYESVSGKFRSK

SEQ ID NO: 8288 - protein, 486 aa, Zea mays subsp. mays
  peptide (1)..(486): Ceres Seq. ID no. 12594605
MMNAAIRCASTSVAQRSSGGLWTWLTGARSNEIPPPDFTLPGVTIPPPLPDHVEAGKTRVTTLPNGVKIASETSAGSSCSVGVYVDCGSVYEAPETTGASQLLKTMAFTTTANRSELRVVREIEAIGGSAKASASREMMSYTYGALKTYMPEMVEVLIDCVRNPAFLDWEVKEQILRLQAELAKSSSYPENFLLEALHSTGYSGALANPLIVPEYSVSRLNADVLEQFITENYTASRIVLAASGVDHDELVSIAEPLLSDIPSVSGTTRPKSTYIGGEYRRSADSSNTDVALAFEVPSGWLKEKDCVTVSVLQALLGGGGKFSWGRQGKGLHSRLNRLVNEFDQIKSISAFKDVHSNTGIFGIHTSTDASFVPKAIDLAARELTSLATPGQVDQSQLDRAKASAKSAILANLESQASLTEDMGRQVLAFGERKPAEHLLKAVDGVTMKDITSVAEKIISSPLTMASHGNVLNMPTYESVSGKFRSK

SEQ ID NO: 8289 - protein, 485 aa, Zea mays subsp. mays
  peptide (1)..(485): Ceres Seq. ID no. 12594606
MNAAIRCASTSVAQRSSGGLWTWLTGARSNEIPPPDFTLPGVTIPPPLPDHVEAGKTRVTTLPNGVKIASETSAGSSCSVGVYVDCGSVYEAPETTGASQLLKTMAFTTTANRSELRVVREIEAIGGSAKASASREMMSYTYGALKTYMPEMVEVLIDCVRNPAFLDWEVKEQILRLQAELAKSSSYPENFLLEALHSTGYSGALANPLIVPEYSVSRLNADVLEQFITENYTASRIVLAASGVDHDELVSIAEPLLSDIPSVSGTTRPKSTYIGGEYRRSADSSNTDVALAFEVPSGWLKEKDCVTVSVLQALLGGGGKFSWGRQGKGLHSRLNRLVNEFDQIKSISAFKDVHSNTGIFGIHTSTDASFVPKAIDLAARELTSLATPGQVDQSQLDRAKASAKSAILANLESQASLTEDMGRQVLAFGERKPAEHLLKAVDGVTMKDITSVAEKIISSPLTMASHGNVLNMPTYESVSGKFRSK

SEQ ID NO: 8290 - DNA, 1421 bp, Zea mays subsp. mays
  misc_feature (1)..(1421): Ceres Seq. ID no. 12352595
  misc_feature (1)..(1421): Ortholog of  Ceres SEQ ID NO 13599162 as cited in SEQ ID NO 698
ctcacatgcatatgcatgcattagcttttccccaccagcatgcactagctgactagcatctgtgtaatcggtgaccgctcttgacttgttggctcctcgctcccacggtagctaaagctagctaggtgggtggtagcaccaccatggcctcgcccaagcattctcatcgccatcatcgtgcggcggcgacgaagcatcgtcggccgctggcgctgcggcgtgcgatgctgcattcgtgcgtgtgcttcctggtgggtctcgtgaccggcctggccccttccgactggacggacgccgcctcgcgcgcggccgtgcacgcgaacggcgcggccacggcgcaggtgttccgcgcgctgcacgccatgaaccagacggcggcggcgggggcactgggccagctgctggcgctgcagcactaccagcagcagccagtggtggagaaggagaaggagaaggagaagcctctggatctggtggtggtggtgacgactacgacaacgtcgacggggctgtcggagcgcgagcggcggtcggcgggtctgacgcgcacggcgcacgcgctgcgtctggtgtcccctcccctggtgtggctggtggtggaggcggcccgggaggctggtcccacggcacggctgctgcggcgcacgggggtggtgtaccggcacctgacctacgcggagaacttcacatcggaggcctgggaggaggagcggcaccaccagaggaaccaggcgctagcgcacattgagcggcaccgcctgcgcggcgtcgtcctcttcgcggggctcgccgacgtgtacgacggccgcctcctggagcagctcaggcggcacatcaggacaaggagtgtgggcgcgtgggcagtggcgacagtatgggagcaggagaagagggtggccgtggaagggcccgtcgtcgtctgcaacaccaccaccagcaccagcgcagcatccacagcatgtgcatggttctccgcctccgactccacattattggcggcagcggcagcggcagcgcccccagtgacggtcgacgactccgtccacggctttgccttcgccagtgacctcctctgggacccttccaggtgggaccgcttccccacatccgagcccgaccagtcgcaggattcgatcaagttcgtgcaaaggttggtgatggcggagtacaacaaaacgagggccatcatccctgcagacgacgattactcctccaaccgttctcaaatcatggtgtggcgtgtcgacacaacgctgctctagctagccctcttgccacgctaagagcgatagataaagatgcatgcatgcttaaaataaacattccatgacttattacatagtaatgccatacacgtacgtatgtatatgtataaagggaaaagaatggcaagcagcagtctgcatcagtcgttgtcgtcg

SEQ ID NO: 8291 - protein, 372 aa, Zea mays subsp. mays
  peptide (1)..(372): Ceres Seq. ID no. 12352596
MASPKHSHRHHRAAATKHRRPLALRRAMLHSCVCFLVGLVTGLAPSDWTDAASRAAVHANGAATAQVFRALHAMNQTAAAGALGQLLALQHYQQQPVVEKEKEKEKPLDLVVVVTTTTTSTGLSERERRSAGLTRTAHALRLVSPPLVWLVVEAAREAGPTARLLRRTGVVYRHLTYAENFTSEAWEEERHHQRNQALAHIERHRLRGVVLFAGLADVYDGRLLEQLRRHIRTRSVGAWAVATVWEQEKRVAVEGPVVVCNTTTSTSAASTACAWFSASDSTLLAAAAAAAPPVTVDDSVHGFAFASDLLWDPSRWDRFPTSEPDQSQDSIKFVQRLVMAEYNKTRAIIPADDDYSSNRSQIMVWRVDTTLL

SEQ ID NO: 8292 - protein, 345 aa, Zea mays subsp. mays
  peptide (1)..(345): Ceres Seq. ID no. 12352597
MLHSCVCFLVGLVTGLAPSDWTDAASRAAVHANGAATAQVFRALHAMNQTAAAGALGQLLALQHYQQQPVVEKEKEKEKPLDLVVVVTTTTTSTGLSERERRSAGLTRTAHALRLVSPPLVWLVVEAAREAGPTARLLRRTGVVYRHLTYAENFTSEAWEEERHHQRNQALAHIERHRLRGVVLFAGLADVYDGRLLEQLRRHIRTRSVGAWAVATVWEQEKRVAVEGPVVVCNTTTSTSAASTACAWFSASDSTLLAAAAAAAPPVTVDDSVHGFAFASDLLWDPSRWDRFPTSEPDQSQDSIKFVQRLVMAEYNKTRAIIPADDDYSSNRSQIMVWRVDTTLL

SEQ ID NO: 8293 - protein, 299 aa, Zea mays subsp. mays
  peptide (1)..(299): Ceres Seq. ID no. 12352598
MNQTAAAGALGQLLALQHYQQQPVVEKEKEKEKPLDLVVVVTTTTTSTGLSERERRSAGLTRTAHALRLVSPPLVWLVVEAAREAGPTARLLRRTGVVYRHLTYAENFTSEAWEEERHHQRNQALAHIERHRLRGVVLFAGLADVYDGRLLEQLRRHIRTRSVGAWAVATVWEQEKRVAVEGPVVVCNTTTSTSAASTACAWFSASDSTLLAAAAAAAPPVTVDDSVHGFAFASDLLWDPSRWDRFPTSEPDQSQDSIKFVQRLVMAEYNKTRAIIPADDDYSSNRSQIMVWRVDTTLL

SEQ ID NO: 8294 - DNA, 1658 bp, Zea mays subsp. mays
  misc_feature (1)..(1658): Ceres Seq. ID no. 12362642
  misc_feature (1)..(1658): Ortholog of  Ceres SEQ ID NO 13664395 as cited in SEQ ID NO 67508
ccctttccctttctggccgcattccctcgtcctccggcagccgtcgccagcttccgatggtccggaaggagacggccatgaggctgcccccgcagcaccagggcctggaggtcaagatccccagcttcttccgctgccccatctcgctggacgtcatgcgctcgcccgttagcctctgcaccggcgtcacctacgaccgcgcctccatccagcagtggctcgactccggcaacaccacgtgcccggccaccatgctcccgctcccctccaccgacctcgtccccaacctcactctccgcagcctcatcgcccactgggccgcctccgccgcctcctgttcccccaccgccgccggcggcgccggagtcgccgactcctcttcggcacgtacttcttctcccgcgagcctcgtccgccaggtggcttcgtccggcgtggacccctcgccggccctccgcgagctggcagcctatctctccgacgacgacgtcgacgacttcgaaaagaacgcgcttgtgggcgccggccgcgccgccgagaccgtcgcgtcagttcttcggagaagagccgaggaaaccggcgtcgaaggcgtggaggcggccacgagagtgctagccttgatcttggcctcggacggcatcgacgactcgaacaagaagcgggtggccactggcctcgccgcggacgcggcggcctcgaccgcgtcgctggcgcgcgtgatgcgcggcgggagcgacctggaggcgaggatcgacgcggccaagctggcggagctgttgctcgccaatgcggccggcgaggcgaaggcggcggcgaccaaatcgtccgagttgctggccgagctggtacgcctcgtgggcaccgtcgacgagacgggcgccctggacaggaacgccgtggacgccggcctctcctgcctggccgccatctgcgggtcgtgccgtgccgcgcgtggcgagatggtgcgccttggcgcggtcccggccgctgtgcgcgctctgcgcgcctcgacggagtccggcgcgtccgcgaaggcgctccgggtcctcgagtccgccgtgggctgcgccgagggccgtgccgcgctgtgcgccaacgcggaggacgccatccctgcggtggtgggcaagatgatgaaggctgggcgcgacggcgcggaggccgccgtggccgtgctctgggcggtctgccaccggtaccaggaccgccgggcggcggacgcggctgcggcggccgagggcgggctgacgaggctgctcctcctgatgcagagcgggtgctcgccggcggcgagacagatggcgctggagctgctgaagatatacagggtgaacgccaagagctgtctcgccggctacgactccaagaccacccacatcatgccgttctgaggaaccgaagcggacgagagtggtttgccgcgatcctgggtggctgttttgacatgatgaaatggattcaattcagtgaatcaattaaatcgcatggaacaggggaatgtgttcttgttcctgtgatgtttattgatttccactcccccctcctcttttctttggatgtaagtcggtagagaaacaaacaagaattagttcacgaggtgagatgaagaataatctgtacagacatgatcagaacaggcatagtggacaatttaaccg

SEQ ID NO: 8295 - protein, 462 aa, Zea mays subsp. mays
  peptide (1)..(462): Ceres Seq. ID no. 12362643
LSLSGRIPSSSGSRRQLPMVRKETAMRLPPQHQGLEVKIPSFFRCPISLDVMRSPVSLCTGVTYDRASIQQWLDSGNTTCPATMLPLPSTDLVPNLTLRSLIAHWAASAASCSPTAAGGAGVADSSSARTSSPASLVRQVASSGVDPSPALRELAAYLSDDDVDDFEKNALVGAGRAAETVASVLRRRAEETGVEGVEAATRVLALILASDGIDDSNKKRVATGLAADAAASTASLARVMRGGSDLEARIDAAKLAELLLANAAGEAKAAATKSSELLAELVRLVGTVDETGALDRNAVDAGLSCLAAICGSCRAARGEMVRLGAVPAAVRALRASTESGASAKALRVLESAVGCAEGRAALCANAEDAIPAVVGKMMKAGRDGAEAAVAVLWAVCHRYQDRRAADAAAAAEGGLTRLLLLMQSGCSPAARQMALELLKIYRVNAKSCLAGYDSKTTHIMPF

SEQ ID NO: 8296 - protein, 444 aa, Zea mays subsp. mays
  peptide (1)..(444): Ceres Seq. ID no. 12362644
MVRKETAMRLPPQHQGLEVKIPSFFRCPISLDVMRSPVSLCTGVTYDRASIQQWLDSGNTTCPATMLPLPSTDLVPNLTLRSLIAHWAASAASCSPTAAGGAGVADSSSARTSSPASLVRQVASSGVDPSPALRELAAYLSDDDVDDFEKNALVGAGRAAETVASVLRRRAEETGVEGVEAATRVLALILASDGIDDSNKKRVATGLAADAAASTASLARVMRGGSDLEARIDAAKLAELLLANAAGEAKAAATKSSELLAELVRLVGTVDETGALDRNAVDAGLSCLAAICGSCRAARGEMVRLGAVPAAVRALRASTESGASAKALRVLESAVGCAEGRAALCANAEDAIPAVVGKMMKAGRDGAEAAVAVLWAVCHRYQDRRAADAAAAAEGGLTRLLLLMQSGCSPAARQMALELLKIYRVNAKSCLAGYDSKTTHIMPF

SEQ ID NO: 8297 - protein, 437 aa, Zea mays subsp. mays
  peptide (1)..(437): Ceres Seq. ID no. 12362645
MRLPPQHQGLEVKIPSFFRCPISLDVMRSPVSLCTGVTYDRASIQQWLDSGNTTCPATMLPLPSTDLVPNLTLRSLIAHWAASAASCSPTAAGGAGVADSSSARTSSPASLVRQVASSGVDPSPALRELAAYLSDDDVDDFEKNALVGAGRAAETVASVLRRRAEETGVEGVEAATRVLALILASDGIDDSNKKRVATGLAADAAASTASLARVMRGGSDLEARIDAAKLAELLLANAAGEAKAAATKSSELLAELVRLVGTVDETGALDRNAVDAGLSCLAAICGSCRAARGEMVRLGAVPAAVRALRASTESGASAKALRVLESAVGCAEGRAALCANAEDAIPAVVGKMMKAGRDGAEAAVAVLWAVCHRYQDRRAADAAAAAEGGLTRLLLLMQSGCSPAARQMALELLKIYRVNAKSCLAGYDSKTTHIMPF

SEQ ID NO: 8298 - DNA, 1440 bp, Zea mays subsp. mays
  misc_feature (1)..(1440): Ceres Seq. ID no. 12408549
  misc_feature (1)..(1440): Ortholog of  Ceres SEQ ID NO 12474685 as cited in SEQ ID NO 88
  misc_feature (1)..(1440): Ortholog of  Ceres SEQ ID NO 13638574 as cited in SEQ ID NO 51223
  misc_feature (1)..(1440): Ortholog of  Ceres SEQ ID NO 14311531 as cited in SEQ ID NO 51466
  misc_feature (1)..(1440): Ortholog of  Ceres SEQ ID NO 15170465 as cited in SEQ ID NO 52798
  misc_feature (1)..(1440): Ortholog of  Ceres SEQ ID NO 15177112 as cited in SEQ ID NO 55956
  misc_feature (1)..(1440): Ortholog of  Ceres SEQ ID NO 12610790 as cited in SEQ ID NO 56123
  misc_feature (1)..(1440): Ortholog of  Ceres SEQ ID NO 14315399 as cited in SEQ ID NO 57112
  misc_feature (1)..(1440): Ortholog of  Ceres SEQ ID NO 13655636 as cited in SEQ ID NO 63519
  misc_feature (1)..(1440): Ortholog of  Ceres SEQ ID NO 13655896 as cited in SEQ ID NO 64970
gacgcgcacccgcaccagcctctagtcggccagtcgggacgaagcctctcgaacgagcgaggccacgaggtgcccgccgcgcccagccggcctcgccgaccgggcccgccggcccctatataggcaggcgccacttcctcctcgcaaccaccagacgccagtccaccaccgcttcccgtgcagcgccctccctctacgttcccccatttcctgtgttggcggcgatggcgcggcacttcgtgctcaacaccggcgccaagatcccctccgtggggctcggcacctggcagtctgaccccggcgtcgttggcaacgctgtctacgccgccgtcaaggcgggttaccgacatatcgattgtgccagagtttacggcaacgaaaaggagattggtttggcgctgaagaagctatttgaagagggtgtagtgaagcgagaagatctgtttatcacctctaagctatggaatgatcatcatgctcctgaagatgtgcctgaggcactaaatgacagcctgaatgatttgcagcttgagtacctggatctttatcttatccattggccatttagagtcaacaagggaacaaataccagccctgaaaattttgttacacctgacttccctgctacttggggggcaatggaaaagttatatgatgctggcaaagctcgcgctattggtgtgagtaacttctcctcaaagaaattgggtgacttgcttgctgtagctcgtgtacctccagctgttgatcaggtggaatgtcatcctggttggcagcaaactaagctccatagcttttgtcagtcaactggtgttcatctaactgcttactcaccactaggttcacctggtacaacttggatgaatggtaatgtccttaaagaaccaataatcatctcaatagctgagaaactcgggaaaacttctgcacaagtggctctgcgctggaacattcagatgggtcacagtgttcttccaaagagcacgaatgaagaaaggataaagcaaaaccttgatgtttatgattggtcaattccagatgacttgcttgcaaagttctctgagattaagcaggctaggctacttagaggcaacttcattgttaatccagagagcgtttacaagacccatgaggagctctgggatggtgaactttaagaaggacgccgttgtccctcctgactcctgagcagggagcaagcagcgttccattagggctcgtcagatcatttcacctccaaagttgctcttttgaaatgaaggttcagtgctcggaagctctggtgccatcctgtatcacgaactattgagaaatttgtcggtgattttactttgtgctacgggatgtgctgctgcagtctgtcctagtgtcagttgatttttctggtaaaactgtgaccaaataagttaattcgccaggcatcattactattggaatttc

SEQ ID NO: 8299 - protein, 384 aa, Zea mays subsp. mays
  peptide (1)..(384): Ceres Seq. ID no. 12408550
RAPAPASSRPVGTKPLERARPRGARRAQPASPTGPAGPYIGRRHFLLATTRRQSTTASRAAPSLYVPPFPVLAAMARHFVLNTGAKIPSVGLGTWQSDPGVVGNAVYAAVKAGYRHIDCARVYGNEKEIGLALKKLFEEGVVKREDLFITSKLWNDHHAPEDVPEALNDSLNDLQLEYLDLYLIHWPFRVNKGTNTSPENFVTPDFPATWGAMEKLYDAGKARAIGVSNFSSKKLGDLLAVARVPPAVDQVECHPGWQQTKLHSFCQSTGVHLTAYSPLGSPGTTWMNGNVLKEPIIISIAEKLGKTSAQVALRWNIQMGHSVLPKSTNEERIKQNLDVYDWSIPDDLLAKFSEIKQARLLRGNFIVNPESVYKTHEELWDGEL

SEQ ID NO: 8300 - protein, 310 aa, Zea mays subsp. mays
  peptide (1)..(310): Ceres Seq. ID no. 12408551
MARHFVLNTGAKIPSVGLGTWQSDPGVVGNAVYAAVKAGYRHIDCARVYGNEKEIGLALKKLFEEGVVKREDLFITSKLWNDHHAPEDVPEALNDSLNDLQLEYLDLYLIHWPFRVNKGTNTSPENFVTPDFPATWGAMEKLYDAGKARAIGVSNFSSKKLGDLLAVARVPPAVDQVECHPGWQQTKLHSFCQSTGVHLTAYSPLGSPGTTWMNGNVLKEPIIISIAEKLGKTSAQVALRWNIQMGHSVLPKSTNEERIKQNLDVYDWSIPDDLLAKFSEIKQARLLRGNFIVNPESVYKTHEELWDGEL

SEQ ID NO: 8301 - DNA, 1527 bp, Zea mays subsp. mays
  misc_feature (1)..(1527): Ceres Seq. ID no. 12352599
  misc_feature (1)..(1527): Ortholog of  Ceres SEQ ID NO 15174863 as cited in SEQ ID NO 51281
  misc_feature (1)..(1527): Ortholog of  Ceres SEQ ID NO 12614972 as cited in SEQ ID NO 61986
  misc_feature (1)..(1527): Ortholog of  Ceres SEQ ID NO 14302317 as cited in SEQ ID NO 63244
  misc_feature (1)..(1527): Ortholog of  Ceres SEQ ID NO 12625706 as cited in SEQ ID NO 64144
  misc_feature (1)..(1527): Ortholog of  Ceres SEQ ID NO 13584933 as cited in SEQ ID NO 65009
  misc_feature (1)..(1527): Ortholog of  Ceres SEQ ID NO 12634984 as cited in SEQ ID NO 0
  misc_feature (1)..(1527): Ortholog of  Ceres SEQ ID NO 13599377 as cited in SEQ ID NO 0
actgcttcccgtagtcctttgtcgcgagctgctgtgctgtgtcctgtgtgcccgcaccatcgcctgaggcctgagggtgcgtgctgcaggtatttattggacgcttcccggatcaaagcaatgtcgagtggcgacagtcggcggtgggcgcgcatgcagtgggtggcgacgcgaccgagtgcggtggtggtacggcgagcgagcgagcgacacgagctgagtgagtgccctgcaagcccaagctcgtgacagagataggacttcagctcgactcgcgcggtcgccttgcctgctgcacacgagccgtcgccaactcgatcctcaccggtgacccctaccgcagctcatatcatcctgttcttgctcttcatcttactgttaatttcctgccaatttaatcccaccggccatcgttctcctgaaccaaagccatggcgcaagctgcttccggctccagcaagatcgacaccaaagctcccacctcagccgacgaggccgctcaacccaagagctacggcgacctggtatccactctcccggctagaggcgggtgggtatcgctcgtgcagtaccagaactactggctgaaccccggcaggctccagaacatcatncccgtgaaagagctctacaagcctcgcgccgacgacatcgtcctcgccacctacctgaaatgcgggaccacgtggctgaaggcgctggccttcgccatcacgacccgcggccgccaccaccaggccttcgccgccgccgaccaccccctgctcaccgtgcacccgcaggaggccgtgccgcacctggaggtgcacacgccagggcagggcctggcagacatcgagaggctgccgtcgccgaggctgctcgggacgcacctgcccctctccctgctcccgccggccgtggccacctccggctgccgcgtcgtgtacctgtgccggcagcccaaggacgtgttcgtctcgctctggcacttcgtgaagggcatgcgcgggggcaggtcccccgtggagctggacgccgcgctggccatgttctgcgagggggtctcgcctttcgggcccgtctgggagcactacctcgagtactggaaggagagcctggcgaggcctgagcgggtccttttcctcaggtacgaggagatggtggcggacccggtgcgtgccgtgaggacgctcgccggcttcttcgccgtcccgttcaccgacgaggaagaggggcgaggggtcccggaggagattgtgaggctgtgcagcttcgagatgctgagcggcttggaaagcaatcggaccggagatcttgattgcggagacaacacggtgatcggaaaatctaccttcttcaggaagggcaaggttggggactgggagaaccacttgacaaaagagatgggcaagaaggtcgacgccgttttcgaagacaagctccagggatctggtctcgtgttttgaattttgattactatccatgcatggcttttgtttgtgtgatgctgtttgtccagaataactaatcgtttgcgcatgttgc

SEQ ID NO: 8302 - protein, 338 aa, Zea mays subsp. mays
  peptide (1)..(338): Ceres Seq. ID no. 12352600
  misc_feature (61)..(61): Xaa is any aa, unknown or other
MAQAASGSSKIDTKAPTSADEAAQPKSYGDLVSTLPARGGWVSLVQYQNYWLNPGRLQNIXPVKELYKPRADDIVLATYLKCGTTWLKALAFAITTRGRHHQAFAAADHPLLTVHPQEAVPHLEVHTPGQGLADIERLPSPRLLGTHLPLSLLPPAVATSGCRVVYLCRQPKDVFVSLWHFVKGMRGGRSPVELDAALAMFCEGVSPFGPVWEHYLEYWKESLARPERVLFLRYEEMVADPVRAVRTLAGFFAVPFTDEEEGRGVPEEIVRLCSFEMLSGLESNRTGDLDCGDNTVIGKSTFFRKGKVGDWENHLTKEMGKKVDAVFEDKLQGSGLVF

SEQ ID NO: 8303 - DNA, 1436 bp, Zea mays subsp. mays
  misc_feature (1)..(1436): Ceres Seq. ID no. 12352544
  misc_feature (1)..(1436): Ortholog of  Ceres SEQ ID NO 13597747 as cited in SEQ ID NO 69071
gaaacaaattgcgcattttcttctcctgcggtccttccttcgcttccccgttcttccagaatcctgtcgagacctgaatccaccctcacccagcggtccccatggcctccggcgaaggtgtagttgaccaaccgcctctcttctgttgatcctcgcatcggccaactcccccatctccgcaagctctcattccgccagaacctcctcgacgatgacgccgtcgcgccactcacgtcctgggaggctattgccgggttgaaggagttcgtccttagagataacaaacttacaaggattcctgatgctggcatattcaaggatcttctggtgttcgatgtatctttcaatgagatatcttctttgactggtctgtccaaggtttccatcaaattgaaggaactttatgtttcaaaaaatgaagttgcaaagatggaagagcttgaacatttccatgcgctggaaattcttgaacttggtagcaacagattacgggtaatggaaaatcttgaaaccttgacaaatctacaagaactgtggttgggaagaaatcgaattcgagctgtcaacttgtgtggtttgaagctaattaagaaaataagtttgcaaagcaacagactgacttcaatgcatgggtttcaggaatgtgctgcattagaggagttatacctcagccataatggaatccaaaagatggaaggcctctctactttgcataacctccgcattttggatgtttcagctaacaagctaacgactatagaaaatatcgaaaccttaaccaggctggaggacctgtggttgaatgacaaccaaataccatctctagagggtatagagacagctttggctggttcgcgggagaagttgacgacaatctatctcgaacgaaatccctgtgcaaaaactccagattactcgtcgacgttgaggaaaatatttccaaatctcgaacaaattgattcagatatcatagcatgataactagctaatccttgcccagatactaaggcaaagaaggctttggggttccccggagaagtcattaacagcaatcaacttgtgaggcgaacaatagacagtaatttgatccttaaagtcttcattgccaactctgctcgtgttgtggaagacattggttcggagtttgtagccttgagccgttacgggcttaatatagtgattggtaaccaaataattagaggtgtacgaggattgtcacaggatccatatccgtgttactagttttaagatgtttcatttcagttctctagattagtgttgatttttttttctctccaaatgaggctaggaacagccagcagttcatttctgtaagttgaatgcagacatctctgtgttgcatatcaacttgcaaggatgtgtcagcctgttgagaacccgaaattatcttttatttgaattttatttattactcc

SEQ ID NO: 8304 - protein, 182 aa, Zea mays subsp. mays
  peptide (1)..(182): Ceres Seq. ID no. 12352545
MEELEHFHALEILELGSNRLRVMENLETLTNLQELWLGRNRIRAVNLCGLKLIKKISLQSNRLTSMHGFQECAALEELYLSHNGIQKMEGLSTLHNLRILDVSANKLTTIENIETLTRLEDLWLNDNQIPSLEGIETALAGSREKLTTIYLERNPCAKTPDYSSTLRKIFPNLEQIDSDIIA

SEQ ID NO: 8305 - protein, 160 aa, Zea mays subsp. mays
  peptide (1)..(160): Ceres Seq. ID no. 12352546
MENLETLTNLQELWLGRNRIRAVNLCGLKLIKKISLQSNRLTSMHGFQECAALEELYLSHNGIQKMEGLSTLHNLRILDVSANKLTTIENIETLTRLEDLWLNDNQIPSLEGIETALAGSREKLTTIYLERNPCAKTPDYSSTLRKIFPNLEQIDSDIIA

SEQ ID NO: 8306 - protein, 117 aa, Zea mays subsp. mays
  peptide (1)..(117): Ceres Seq. ID no. 12352547
MHGFQECAALEELYLSHNGIQKMEGLSTLHNLRILDVSANKLTTIENIETLTRLEDLWLNDNQIPSLEGIETALAGSREKLTTIYLERNPCAKTPDYSSTLRKIFPNLEQIDSDIIA

SEQ ID NO: 8307 - DNA, 1701 bp, Zea mays subsp. mays
  misc_feature (1)..(1701): Ceres Seq. ID no. 12356548
  misc_feature (1)..(1701): Ortholog of  Ceres SEQ ID NO 15170461 as cited in SEQ ID NO 52853
  misc_feature (1)..(1701): Ortholog of  Ceres SEQ ID NO 14313666 as cited in SEQ ID NO 54618
  misc_feature (1)..(1701): Ortholog of  Ceres SEQ ID NO 13595351 as cited in SEQ ID NO 55934
  misc_feature (1)..(1701): Ortholog of  Ceres SEQ ID NO 13595513 as cited in SEQ ID NO 56663
  misc_feature (1)..(1701): Ortholog of  Ceres SEQ ID NO 13639645 as cited in SEQ ID NO 57488
ttcagctcgaggccttgtcttgagttctctagctcgtccacaggcctggccagctagctagctagcactgacactgaccgagaccctgcagctagcagctgatcgatccatccatggccatgggctgctgctacggtgatttcttcgacaaggccaagccttacctcgccatgatctccctgcagttcggctatgccggcatgaacgtcatcaccaaggtctccctcaaccacggcatgagccactacgtgctcgtcgtctaccgccacgcctttgccaccgtctctattgcaccgtttgctctcatccttgagaggaaggtgaggcccaacatgacgtggtccgtcttcctccagatcttcgtgttggcactgctcgggcctgtgatagaccagaacttctactacgccggcctcaagttcaccgggccgaccttcgcgtgcgccatgagcaacatccttcctgccatgaccttcgtcatggccgtgattttcaggatggagaaggtggacctgaagaagatgcggtgccagggcgaaggtggccgggacgctggtgaccgtggccggcgcgatgatgatgacgctgtacaagggcccgctgatgaagatggcgtggaccagcagcggccacgcgcacggcggcggcggcggcgccgaggcggccgtcatcgaccccagcggcagggagtggttcctgggctcgctcttcgtcatcgtcgccaccctcgcctgggcctcgctcttcatcctccaggcgcacaccctgaagcagtacgcggcgccgctctccctcaccaccctcatctgcttcgtcggcaccctacaggccatcgtcgtcaccttcgccatggagcaccgcccctccgtctggaccatcggcttcgacatgaacctcctcgccgccgcatacgccggcattgtcacgtcgagcatagcgtactacgtgcaaggcctggtgatccagaagaccgggcccgtgttcgcgtcggcgttcagcccgctgatgatgatcatcgtggccgtcatgggctccttcatcctcgccgagaagatattcctcggcggcgtcctcggcgccgtcctcatcgtcatcgggctctactcggtgctctggggcaagcacaaggagacgcaggacaaggaggacgatgagactacagagctgcccgtcgtggcaataatggcatccaaaaccaatggagtcgtctacgacgacgacgatgacgtcgtcttcgtcaaggagatcgccgccgccggcgctggcgctgttggaggagatgactcggagtgcaggaaggcgactggggtggtgaagtcatcctcccgtggacacggagctgctggtgcagtttgatggaacatgcatggaagaggcggtgtccaactgctaacttcctttccttgcattgccatgtgtgtcccctagtatctactgacgttgcatgcatcacagggtcgggtgattgagagaggcagctgcgatgcagagtggaaggactggaataattttgttctgtgcccttttgaattttgctacctttttgtacctaagatgtatctactagtatatttaacttgtattttcttatgctttaatttctgtggagaaaaaagtgatgttccgggacttaagcgaaggacatatatatatgtatgtatcacatcggcttttgccatgtaatatattattgcttttctt

SEQ ID NO: 8308 - protein, 346 aa, Zea mays subsp. mays
  peptide (1)..(346): Ceres Seq. ID no. 12356549
MAMGCCYGDFFDKAKPYLAMISLQFGYAGMNVITKVSLNHGMSHYVLVVYRHAFATVSIAPFALILERKVRPNMTWSVFLQIFVLALLGPVIDQNFYYAGLKFTGPTFACAMSNILPAMTFVMAVIFRMEKVDLKKMRCQGEGGRDAGDRGRRDDDDAVQGPADEDGVDQQRPRARRRRRRRGGRHRPQRQGVVPGLALRHRRHPRLGLALHPPGAHPEAVRGAALPHHPHLLRRHPTGHRRHLRHGAPPLRLDHRLRHEPPRRRIRRHCHVEHSVLRARPGDPEDRARVRVGVQPADDDHRGRHGLLHPRREDIPRRRPRRRPHRHRALLGALGQAQGDAGQGGR

SEQ ID NO: 8309 - protein, 344 aa, Zea mays subsp. mays
  peptide (1)..(344): Ceres Seq. ID no. 12356550
MGCCYGDFFDKAKPYLAMISLQFGYAGMNVITKVSLNHGMSHYVLVVYRHAFATVSIAPFALILERKVRPNMTWSVFLQIFVLALLGPVIDQNFYYAGLKFTGPTFACAMSNILPAMTFVMAVIFRMEKVDLKKMRCQGEGGRDAGDRGRRDDDDAVQGPADEDGVDQQRPRARRRRRRRGGRHRPQRQGVVPGLALRHRRHPRLGLALHPPGAHPEAVRGAALPHHPHLLRRHPTGHRRHLRHGAPPLRLDHRLRHEPPRRRIRRHCHVEHSVLRARPGDPEDRARVRVGVQPADDDHRGRHGLLHPRREDIPRRRPRRRPHRHRALLGALGQAQGDAGQGGR

SEQ ID NO: 8310 - protein, 327 aa, Zea mays subsp. mays
  peptide (1)..(327): Ceres Seq. ID no. 12356551
MISLQFGYAGMNVITKVSLNHGMSHYVLVVYRHAFATVSIAPFALILERKVRPNMTWSVFLQIFVLALLGPVIDQNFYYAGLKFTGPTFACAMSNILPAMTFVMAVIFRMEKVDLKKMRCQGEGGRDAGDRGRRDDDDAVQGPADEDGVDQQRPRARRRRRRRGGRHRPQRQGVVPGLALRHRRHPRLGLALHPPGAHPEAVRGAALPHHPHLLRRHPTGHRRHLRHGAPPLRLDHRLRHEPPRRRIRRHCHVEHSVLRARPGDPEDRARVRVGVQPADDDHRGRHGLLHPRREDIPRRRPRRRPHRHRALLGALGQAQGDAGQGGR

SEQ ID NO: 8311 - DNA, 1422 bp, Zea mays subsp. mays
  misc_feature (1)..(1422): Ceres Seq. ID no. 12406840
  misc_feature (1)..(1422): Ortholog of  Ceres SEQ ID NO 15172792 as cited in SEQ ID NO 52134
  misc_feature (1)..(1422): Ortholog of  Ceres SEQ ID NO 13502622 as cited in SEQ ID NO 56443
  misc_feature (1)..(1422): Ortholog of  Ceres SEQ ID NO 12624901 as cited in SEQ ID NO 62597
tcagataccaccagaccagaccagatccgtcccgcgaatctaaggtcaaaccaaccgcgatccgcgaatccgcggagaggaggggaggggaggggaagggcgcgggggcatggagttcctgcagggccagaggctggagaccacgctggccgtcgcggccgccgtcgttgccgtcgcagccggctccgcctacctcttcctccgcagtaggaagcccaggggatgcctagaccccgagaacttcaaggagttcaaacttgttgagaagaggcagctgagtcataatgttgccaagttcaagtttgcgctcccaacacctacttctgtattgggtcttccaatcggacagcatataagctgcagaggacaggatgcttctggcgaggaagtgatcaagccttatactccaactactctggactctgatgttggatcttttgagcttgttataaagatgtatccccaaggaagaatgtctcatcatttccgtgagatgaaagttggtgattatatgtctgtgaagggacctaagggccgtttcaagtacctacctggacaagtgagagcattaggaatggtagctggaggatcaggcattactccaatgttccaagtcacaagggcaattcttgagaacccaaaggacaacacgaaagtacacttaatctatgcaaatgtcacgtatgaggatattcttctgaaggaagaacttgacggcatggccaaaaactatcctgatcgtttcaagatctactatgtcttgaatcagcctcctgaagtctgggacggtagcgtcgggttcgtgtcgaaggaaatgatccagactcattgcccagcgcctgccgccgacattcaggtattgcgatgtggacctcctcccatgaacaaagccatggccgcgcacctggacgaccttggctacacgaaggagatgcagttccagttctaagcgttacattctctctaccagtaccagaataaacgggggtggaacaagtttcgtcgcctctttgagcagacgaagcctgaccatatcgccatataggctccaaacagacgcggtttgccactgacagtcacagagcgtcgtacttaaggggtgtttggtttatagggactaaactttagtctctccactttattccattttagttcataaattattaaatagggaaacttaaatagagttttagtttctatatttagtaatttagggactaaaatggaataaaatagaggactaaaaattagtccctagaaaccaaacacccctttactctacctggatgaaagcagcagtacagtacccacctaatttgtatcggtgtcgggacattgtaccatgccgttcttttgtatcggtttgtcactcactcactccgcgagccagcagcccagcacacgatccatcgtgtcattttg

SEQ ID NO: 8312 - protein, 279 aa, Zea mays subsp. mays
  peptide (1)..(279): Ceres Seq. ID no. 12406841
MEFLQGQRLETTLAVAAAVVAVAAGSAYLFLRSRKPRGCLDPENFKEFKLVEKRQLSHNVAKFKFALPTPTSVLGLPIGQHISCRGQDASGEEVIKPYTPTTLDSDVGSFELVIKMYPQGRMSHHFREMKVGDYMSVKGPKGRFKYLPGQVRALGMVAGGSGITPMFQVTRAILENPKDNTKVHLIYANVTYEDILLKEELDGMAKNYPDRFKIYYVLNQPPEVWDGSVGFVSKEMIQTHCPAPAADIQVLRCGPPPMNKAMAAHLDDLGYTKEMQFQF

SEQ ID NO: 8313 - protein, 164 aa, Zea mays subsp. mays
  peptide (1)..(164): Ceres Seq. ID no. 12406842
MYPQGRMSHHFREMKVGDYMSVKGPKGRFKYLPGQVRALGMVAGGSGITPMFQVTRAILENPKDNTKVHLIYANVTYEDILLKEELDGMAKNYPDRFKIYYVLNQPPEVWDGSVGFVSKEMIQTHCPAPAADIQVLRCGPPPMNKAMAAHLDDLGYTKEMQFQF

SEQ ID NO: 8314 - protein, 158 aa, Zea mays subsp. mays
  peptide (1)..(158): Ceres Seq. ID no. 12406843
MSHHFREMKVGDYMSVKGPKGRFKYLPGQVRALGMVAGGSGITPMFQVTRAILENPKDNTKVHLIYANVTYEDILLKEELDGMAKNYPDRFKIYYVLNQPPEVWDGSVGFVSKEMIQTHCPAPAADIQVLRCGPPPMNKAMAAHLDDLGYTKEMQFQF

SEQ ID NO: 8315 - DNA, 1391 bp, Zea mays subsp. mays
  misc_feature (1)..(1391): Ceres Seq. ID no. 12405442
  misc_feature (1)..(1391): Ortholog of  Ceres SEQ ID NO 15169515 as cited in SEQ ID NO 60939
  misc_feature (1)..(1391): Ortholog of  Ceres SEQ ID NO 13584665 as cited in SEQ ID NO 65545
attgctaccactgccacttctcccgatcgattcgtcgctgaggaatacctggtcaccacctgcgggctcaccccagcgcaagcgggcagggcgtccaaggggctcacccacctcaagtctccggttaagcccgacgccgtcgtcgcctttctcgtgggcgtcggtctcgccaaagacgacatcaccgccggtatcgccaggtacccgcggctcctctgctccaaggtggacaaaaccctaacccctcgcttcgctcagctcatgagccttgggctatccccttcccaaatctcccgcctcattaccatcgtccccaacatcttcgtcgctcccaaaaagatctcccacctccagttctatctctccttcatgggttgcttcgatcgggttcactccgccatcaggatcaatccaatgctcctcagtcggaaccttgaggatgtggtcaagcctaacatagcattcctactgcagtgcggtctaactgtttctaatgttctagagttcccattgctgataggcatgaggcccgagagtgtcagggaaagggtggcatgcgctgagaagcttggtgtgccgcgcaatacagggatgttcaagagtgccctgtgggccgtctattgcgttggtcccaactccattggtgcaaaattggatgtcatcaaggcgactcttggatgctctgaggcggagctgacccttgtggtgcgcaagtcacctccaattctgaggatgtcagaaggcaagctgagtcgcgcattgaagttcctgaaggtggatgttgggttgaagcttcagtacatcttgcttaggccagcaatacttgcctttagcatgcagaggcggctgatgcccagacattatttcatcaagattctgaaggcgaaggggcttgtgaaggaaaatgttgacttttataatgctctttgtttaactgaaaagagatttgcccagaagtttattgatccttacaaccagagtattgcagggcttgcagatgcttatgctgctgcttgtgctgggaaaatgcctcatgaagattaggcgcattagcagcagcatgctagggatcatggtgaagcaaaggcagagatagtcggttcaggtcttctctgcatgtacttgaacagcccctcgccaaactattgtgcagttccttgatgcataccaatgcttgcaacagatgctgcctttgtgtgttgaaatgaaattagttcttccttaagaccggtgttgtgacctatcatttcaggtaagccattggctattttcagatgggtataatgatatgttactctgttctttctgtgtttcaggtctaaatattgtctgtacttgaagtcttgaattaattatgtattgaacttgtcacacagttaattatttgattt

SEQ ID NO: 8316 - protein, 347 aa, Zea mays subsp. mays
  peptide (1)..(347): Ceres Seq. ID no. 12405443
IATTATSPDRFVAEEYLVTTCGLTPAQAGRASKGLTHLKSPVKPDAVVAFLVGVGLAKDDITAGIARYPRLLCSKVDKTLTPRFAQLMSLGLSPSQISRLITIVPNIFVAPKKISHLQFYLSFMGCFDRVHSAIRINPMLLSRNLEDVVKPNIAFLLQCGLTVSNVLEFPLLIGMRPESVRERVACAEKLGVPRNTGMFKSALWAVYCVGPNSIGAKLDVIKATLGCSEAELTLVVRKSPPILRMSEGKLSRALKFLKVDVGLKLQYILLRPAILAFSMQRRLMPRHYFIKILKAKGLVKENVDFYNALCLTEKRFAQKFIDPYNQSIAGLADAYAAACAGKMPHED

SEQ ID NO: 8317 - protein, 260 aa, Zea mays subsp. mays
  peptide (1)..(260): Ceres Seq. ID no. 12405444
MSLGLSPSQISRLITIVPNIFVAPKKISHLQFYLSFMGCFDRVHSAIRINPMLLSRNLEDVVKPNIAFLLQCGLTVSNVLEFPLLIGMRPESVRERVACAEKLGVPRNTGMFKSALWAVYCVGPNSIGAKLDVIKATLGCSEAELTLVVRKSPPILRMSEGKLSRALKFLKVDVGLKLQYILLRPAILAFSMQRRLMPRHYFIKILKAKGLVKENVDFYNALCLTEKRFAQKFIDPYNQSIAGLADAYAAACAGKMPHED

SEQ ID NO: 8318 - protein, 224 aa, Zea mays subsp. mays
  peptide (1)..(224): Ceres Seq. ID no. 12405445
MGCFDRVHSAIRINPMLLSRNLEDVVKPNIAFLLQCGLTVSNVLEFPLLIGMRPESVRERVACAEKLGVPRNTGMFKSALWAVYCVGPNSIGAKLDVIKATLGCSEAELTLVVRKSPPILRMSEGKLSRALKFLKVDVGLKLQYILLRPAILAFSMQRRLMPRHYFIKILKAKGLVKENVDFYNALCLTEKRFAQKFIDPYNQSIAGLADAYAAACAGKMPHED

SEQ ID NO: 8319 - DNA, 1606 bp, Zea mays subsp. mays
  misc_feature (1)..(1606): Ceres Seq. ID no. 12406836
  misc_feature (1)..(1606): Ortholog of  Ceres SEQ ID NO 13598609 as cited in SEQ ID NO 65569
  misc_feature (1)..(1606): Ortholog of  Ceres SEQ ID NO 13657780 as cited in SEQ ID NO 66258
atccagctagctgctcacgcccgccacgcctctctttgtctctttcacccagtgacagcgcacagctcccaacctgctcgaagctcggctcagccgatccagtgcgccatggccggccgcgaggcaggcgactgcggcggagaggagccggcccgcgagatccccgacgacatcacgggcgagatcctgctccgcctgccgtcgcgctcggcgctggcgcgcgccgcggtggcgagctgcgccttccacgcgctcgtcgcctccccgcgcttcctccgccgccaccgctcgctgcatagggatcccggatcgctcctcggggtcttcaccttccctctcgtccccgacggcggcagaggtggaggcgacggctcggggcttccaccccaccgagcccccgcacccggcggcgtccaccgccagcgccgtcgccgctgcggccgacttctcgtttgggttcctcccagcggacccctccgccacggctgggtctgaggctgccgagtggatggtccgggactaccgcgacggccgcttcctcctcgaccgcgtgccttcgggaaccgggagcaccgtcttcaccgagctcgccgtctgcgacccgctgtcccgacgctacgtcctgctcccgcccattccggaggacctcgccgacaccgtccacagcgtgctcaccgtcttcggcggccgccgcgcgtgcgagcccttcctcgcgcccgccgagacctgcggcgcggacgacgtcgacgcggacccacctctcaccgtgttctggacggcccgctccccgaggaagatggtggccttcgccttctcgtcgcgcgacggacgatggcgtgcgctcgagtcgccgaactgcttcatctggcgcaggcaccgctccccgttcagctgccccatggcccccatcagcaccgtctggaaccgccgccactacgcgcacggctgcttctactgggtggactgcctcaccagccgctggctcgtgctcgacgggcgcaccatggagctctccctcgcgatgatcccgtcgccggccggctactgggaggagcacgtcgcagtcgtggaggccccggacgggaagcttggcgtattcgcgcacggtttccaccaccccgacggcaaagccaatctacactactatacgatcgtgcacgacaaggaagccgccggcgacacgaagcggtggcagctggagaagacgatccagctgccgtggccgtcagaccaccggtctttctgcctccggggcacggccaacgggtgcctcaacgttggcctcatcattgaagtcggcgagaagaagtcggtattcatgggaagccaccgcatcagggacgccgagctattcaagatcgacgtcaagagtttccagctccaaaagatctgccgagcacggtgcgccggcagtgctgccggcgagtgctgctggccatacttcggcttcccgccgtcgctgtccttgcccactgtgtgagaagcttgatgttactgagacaaaatgaattatgttacagcttcagagccgtccgtctgtatgtaacatgtataagcaacacttgtactcgtccagtttgtttacaaatgcaacgcatacatacat

SEQ ID NO: 8320 - protein, 323 aa, Zea mays subsp. mays
  peptide (1)..(323): Ceres Seq. ID no. 12406837
MVRDYRDGRFLLDRVPSGTGSTVFTELAVCDPLSRRYVLLPPIPEDLADTVHSVLTVFGGRRACEPFLAPAETCGADDVDADPPLTVFWTARSPRKMVAFAFSSRDGRWRALESPNCFIWRRHRSPFSCPMAPISTVWNRRHYAHGCFYWVDCLTSRWLVLDGRTMELSLAMIPSPAGYWEEHVAVVEAPDGKLGVFAHGFHHPDGKANLHYYTIVHDKEAAGDTKRWQLEKTIQLPWPSDHRSFCLRGTANGCLNVGLIIEVGEKKSVFMGSHRIRDAELFKIDVKSFQLQKICRARCAGSAAGECCWPYFGFPPSLSLPTV

SEQ ID NO: 8321 - protein, 227 aa, Zea mays subsp. mays
  peptide (1)..(227): Ceres Seq. ID no. 12406838
MVAFAFSSRDGRWRALESPNCFIWRRHRSPFSCPMAPISTVWNRRHYAHGCFYWVDCLTSRWLVLDGRTMELSLAMIPSPAGYWEEHVAVVEAPDGKLGVFAHGFHHPDGKANLHYYTIVHDKEAAGDTKRWQLEKTIQLPWPSDHRSFCLRGTANGCLNVGLIIEVGEKKSVFMGSHRIRDAELFKIDVKSFQLQKICRARCAGSAAGECCWPYFGFPPSLSLPTV

SEQ ID NO: 8322 - protein, 193 aa, Zea mays subsp. mays
  peptide (1)..(193): Ceres Seq. ID no. 12406839
MAPISTVWNRRHYAHGCFYWVDCLTSRWLVLDGRTMELSLAMIPSPAGYWEEHVAVVEAPDGKLGVFAHGFHHPDGKANLHYYTIVHDKEAAGDTKRWQLEKTIQLPWPSDHRSFCLRGTANGCLNVGLIIEVGEKKSVFMGSHRIRDAELFKIDVKSFQLQKICRARCAGSAAGECCWPYFGFPPSLSLPTV

SEQ ID NO: 8323 - DNA, 1475 bp, Zea mays subsp. mays
  misc_feature (1)..(1475): Ceres Seq. ID no. 12425146
  misc_feature (1)..(1475): Ortholog of  Ceres SEQ ID NO 14307022 as cited in SEQ ID NO 54437
  misc_feature (1)..(1475): Ortholog of  Ceres SEQ ID NO 14301932 as cited in SEQ ID NO 67747
acactgccccactctcctctacctccgcgccaatgcgcctccccaacatttaaacggccaaaccagcccaaaccccaaccccaaacccacagcagtaacaggggcacactagctaagctaaacctcgccacggcacagcaatggcgccgctccccgcttccctcctgccctgcctctggctcttcctctgcctcctcgccgcgccgtgccccacagcgcgggcggcgcggttcgcgtgcaacgccacggcgccgcgagcgtccacgtgccaggcgctcgtctcctacgcgccgcccaacgggacggncacgcccacgctggccgccgtgcgcgcgctcttccagctccgctcccaccgcgcgctgctggccgccaacggcctcccgctctccacgccgcccacggcgcccgcgcccgtgccgctgctgggtccgcctgccctgcctctgctcggggggcgccggggccacgttccagcggcccacgtaccgggtccgcgccggggacacgctcgacgccgtcgcgcggggcgtcttcgcgggcctcgtcacctaccaggacatcgccgccgccaacaacgtctccgaccccaacagggtcgccgtcggccagcagctctggatccccgtgccctgcagctgcgaccccgtgggcggccaacccgtcgtgcacttcacctacgtcgtgccggccgggggctccgtgtccggcatcgcggaggagttcggcaccacggaggagacgattctcacgctgaacaagatgcccgacgccaagtcccttctcgccggccaggttcttgacgtgccacttcgagcttgtagttctgccattagcagcacagccattgaccgcaaccttctcgtgccaaatggaagctacatcctcaccgccaacaactgcgtcaagtgtggctgcagctctagcacctggcagttggactgccagccaacacagggactgagctcgtcgttctgccctgcggccaagtgcggagacatgttcctcggcaacacatcctcctccacctcatcctgcgagagcacagcatgctcctacgccgggtacaccaacagcacatcgttcgccatcctcgccaatgtgaccaccagcaacgtgtgtaacgctgggatgactccgacggcgcagccggctcactcttcggcgtttcggttggagccggtgtggctgagatggacggagctggttgccttgtctctcttcacgctgtctttcttcgtctaggctatctgcggcaaaggctgaacgttgttgccatgcgtctgtcgttagaatctggccctctgattcctagtttgatgttgtgagtaatatctgcagtgtttgcgcgacttcgatctgtaactggttggatttgtaagggcaaactctagggtaacactgatctgtgttagacggtaaatcaggaaacatttgtacttcgtcaaacttttgcaaagataatttcttctgtt

SEQ ID NO: 8324 - protein, 414 aa, Zea mays subsp. mays
  peptide (1)..(414): Ceres Seq. ID no. 12425147
  misc_feature (103)..(103): Xaa is any aa, unknown or other
TLPHSPLPPRQCASPTFKRPNQPKPQPQTHSSNRGTLAKLNLATAQQWRRSPLPSCPASGSSSASSPRRAPQRGRRGSRATPRRRERPRARRSSPTRRPTGRXRPRWPPCARSSSSAPTARCWPPTASRSPRRPRRPRPCRCWVRLPCLCSGGAGATFQRPTYRVRAGDTLDAVARGVFAGLVTYQDIAAANNVSDPNRVAVGQQLWIPVPCSCDPVGGQPVVHFTYVVPAGGSVSGIAEEFGTTEETILTLNKMPDAKSLLAGQVLDVPLRACSSAISSTAIDRNLLVPNGSYILTANNCVKCGCSSSTWQLDCQPTQGLSSSFCPAAKCGDMFLGNTSSSTSSCESTACSYAGYTNSTSFAILANVTTSNVCNAGMTPTAQPAHSSAFRLEPVWLRWTELVALSLFTLSFFV

SEQ ID NO: 8325 - protein, 220 aa, Zea mays subsp. mays
  peptide (1)..(220): Ceres Seq. ID no. 12425148
  misc_feature (56)..(56): Xaa is any aa, unknown or other
MAPLPASLLPCLWLFLCLLAAPCPTARAARFACNATAPRASTCQALVSYAPPNGTXTPTLAAVRALFQLRSHRALLAANGLPLSTPPTAPAPVPLLGPPALPLLGGRRGHVPAAHVPGPRRGHARRRRAGRLRGPRHLPGHRRRQQRLRPQQGRRRPAALDPRALQLRPRGRPTRRALHLRRAGRGLRVRHRGGVRHHGGDDSHAEQDARRQVPSRRPGS

SEQ ID NO: 8326 - DNA, 1562 bp, Zea mays subsp. mays; identical to SEQ ID NO: 5323
  misc_feature (1)..(1562): Ceres Seq. ID no. 12341687
  misc_feature (1)..(1562): Ortholog of  Ceres SEQ ID NO 12609146 as cited in SEQ ID NO 52118
  misc_feature (1)..(1562): Ortholog of  Ceres SEQ ID NO 14316158 as cited in SEQ ID NO 52413
  misc_feature (1)..(1562): Ortholog of  Ceres SEQ ID NO 13594056 as cited in SEQ ID NO 55691
  misc_feature (1)..(1562): Ortholog of  Ceres SEQ ID NO 13638136 as cited in SEQ ID NO 58644
  misc_feature (1)..(1562): Ortholog of  Ceres SEQ ID NO 13596868 as cited in SEQ ID NO 62806
  misc_feature (1)..(1562): Ortholog of  Ceres SEQ ID NO 12587035 as cited in SEQ ID NO 63605
  misc_feature (1)..(1562): Ortholog of  Ceres SEQ ID NO 14301886 as cited in SEQ ID NO 64201
  misc_feature (1)..(1562): Ortholog of  Ceres SEQ ID NO 13595885 as cited in SEQ ID NO 69265
  misc_feature (1)..(1562): Ortholog of  Ceres SEQ ID NO 12566239 as cited in SEQ ID NO 0
  misc_feature (1)..(1562): Ortholog of  Ceres SEQ ID NO 13599119 as cited in SEQ ID NO 0
  misc_feature (1)..(1562): Ortholog of  Ceres SEQ ID NO 14308987 as cited in SEQ ID NO 0
  misc_feature (1)..(1562): Ortholog of  Ceres SEQ ID NO 15179992 as cited in SEQ ID NO 0

SEQ ID NO: 8327 - protein, 357 aa, Zea mays subsp. mays; identical to SEQ ID NO: 5324
  peptide (1)..(357): Ceres Seq. ID no. 12341688

SEQ ID NO: 8328 - protein, 303 aa, Zea mays subsp. mays; identical to SEQ ID NO: 5325
  peptide (1)..(303): Ceres Seq. ID no. 12341689

SEQ ID NO: 8329 - protein, 302 aa, Zea mays subsp. mays; identical to SEQ ID NO: 5326
  peptide (1)..(302): Ceres Seq. ID no. 12341690

SEQ ID NO: 8330 - DNA, 1135 bp, Zea mays subsp. mays
  misc_feature (1)..(1135): Ceres Seq. ID no. 12408545
  misc_feature (1)..(1135): Ortholog of  Ceres SEQ ID NO 12557497 as cited in SEQ ID NO 43
  misc_feature (1)..(1135): Ortholog of  Ceres SEQ ID NO 14303417 as cited in SEQ ID NO 54923
  misc_feature (1)..(1135): Ortholog of  Ceres SEQ ID NO 15169084 as cited in SEQ ID NO 59115
  misc_feature (1)..(1135): Ortholog of  Ceres SEQ ID NO 12635513 as cited in SEQ ID NO 0
  misc_feature (1)..(1135): Ortholog of  Ceres SEQ ID NO 12635723 as cited in SEQ ID NO 0
  misc_feature (1)..(1135): Ortholog of  Ceres SEQ ID NO 15179044 as cited in SEQ ID NO 0
aaaggaccaacgtgctcgatctccatctcgaccgtcgctcaccgggaagctacgctacgacgaagcatggcgtccgtcaccgcccgcgccccggtcgcagccctgcgcccgtcgtcgtcgtcggccttccttggccactctagccgcctcggccgcactgctaccgcgtcgccgacgaggcgcagcctcaaggcggaggccaagggcgagtggctcccgggccttccctcccccgcctacctcgacggcagcctgccgggtgacaatggcttcgacccgttgggcctggcggaggacccggagaacctgaggtggtacgtgcaggcggagctggtgaacgggcggtgggcgatgctgggcgtggccgggatgctgatcccggaggtgctgaccaaggccgggctgatcaacgcgccgcagtggtacgacgccggcaagtcggagtacttcgcgtcgtcgtcgacgctgttcgtgatcgagttcatcctgtttcactacgtggagatccggcggtggcaggacatcaagaaccccggcagcgtcaaccaggaccccatcttcaagagctacagcctgccgccgcacgagtgcggctaccccggcagcgtcttcaacccgctcaacttcgcgcccacgctcgaggccaaggagaaggagctcgccaacgggaggctggccatgctggcgttcctggccttcctgatccagcacaacgtcaccggcaaggggcccttcgacaacctgctgcagcacctgtccgacccatggcacaacaccatcatccagaccctgtcgggttgagtcgacggtccatcaggtcatgtgatccgagctgaaataaaggaagacaaatcttgaaacgcgatcgatgttacgttcctttctgggccggatcagttcgtgtgatgcgttcttaatcgactgagggctaaggaatgtgacgtactggtatatgtacattagttgaagcggaggctataaagggtgtagagattgtttcatcagtgtatatcatctgtcccgatgggttttgttttgtgcttttcacgattcattgtggaagcacatgtattattagtacaagaactgctagtagatatataggcttataattaagcacgacttctaaaacctc

SEQ ID NO: 8331 - protein, 266 aa, Zea mays subsp. mays
  peptide (1)..(266): Ceres Seq. ID no. 12408546
KGPTCSISISTVAHREATLRRSMASVTARAPVAALRPSSSSAFLGHSSRLGRTATASPTRRSLKAEAKGEWLPGLPSPAYLDGSLPGDNGFDPLGLAEDPENLRWYVQAELVNGRWAMLGVAGMLIPEVLTKAGLINAPQWYDAGKSEYFASSSTLFVIEFILFHYVEIRRWQDIKNPGSVNQDPIFKSYSLPPHECGYPGSVFNPLNFAPTLEAKEKELANGRLAMLAFLAFLIQHNVTGKGPFDNLLQHLSDPWHNTIIQTLSG

SEQ ID NO: 8332 - protein, 244 aa, Zea mays subsp. mays
  peptide (1)..(244): Ceres Seq. ID no. 12408547
MASVTARAPVAALRPSSSSAFLGHSSRLGRTATASPTRRSLKAEAKGEWLPGLPSPAYLDGSLPGDNGFDPLGLAEDPENLRWYVQAELVNGRWAMLGVAGMLIPEVLTKAGLINAPQWYDAGKSEYFASSSTLFVIEFILFHYVEIRRWQDIKNPGSVNQDPIFKSYSLPPHECGYPGSVFNPLNFAPTLEAKEKELANGRLAMLAFLAFLIQHNVTGKGPFDNLLQHLSDPWHNTIIQTLSG

SEQ ID NO: 8333 - protein, 149 aa, Zea mays subsp. mays
  peptide (1)..(149): Ceres Seq. ID no. 12408548
MLGVAGMLIPEVLTKAGLINAPQWYDAGKSEYFASSSTLFVIEFILFHYVEIRRWQDIKNPGSVNQDPIFKSYSLPPHECGYPGSVFNPLNFAPTLEAKEKELANGRLAMLAFLAFLIQHNVTGKGPFDNLLQHLSDPWHNTIIQTLSG

SEQ ID NO: 8334 - DNA, 1498 bp, Zea mays subsp. mays
  misc_feature (1)..(1498): Ceres Seq. ID no. 13493669
  misc_feature (1)..(1498): Ortholog of  Ceres SEQ ID NO 13646680 as cited in SEQ ID NO 20737
ctttccgcctcggcacctccccacccctctcgccttcgcttcgtcgccacggcgagccccacgccgccgatcggggcgccgccagcggcggcggcgcccgatccgatggaagcggaggtggggccgccgaatccgccgcggccggagccagccggatcggagcccgacgacgcgcgcctctccccgcctcctcctgctcctgctccgccgcctccgcccccgcctcctcccgccgccgaggctgccgccgcgcccaccgcctccgcggccttctcgctgcaggctccagctccggcgccggcggaggcgaacggcagctccgacaggaagaggaggaggaaggcggaggacggggacgggtgcaagacctgcagctgcaagaagtccaggtgcctcaagctttactgtgtgtgctttgcttctgggttacattgtactgaatcatgtggatgtgaaccttgtcataacaagccacaattgcaaggtactctgcggatggcaacagttttacctctgaaacctgtccaaacattcgaagctggccaagatatagtggaacaagtcataaggtctcctatggatcttattagaagaaaatgcacatgcaagaagtcaggctgccttaagaagtactgcgactgctaccagggaggggcaggatgctccatcaactgtaaatgcgatgattgtagaaacccatttgggagaaaagtcggcgttattttggacggtaaaagcagtcttactgcacctatactgcacgaaagaaacgggactgaagttgactcaagcgacgaggaagacgacttctacatgaatcgacagctctccccaatacctccgtctccggtgtctagggagtcttcgttccaacaggagactctagtcggcgtcgaggtccagaccatgaacgggcacctgtaccccaaaccactgacccaggtgcgccccgagccgtcgtcctggcagctctcccggaggcccatcgaggaaccgcgcggggagatatggcgcttctcgaggaggccgagcgaggacgggacctctgatgccatggaagtgcacgccgtcgccccgagagagagcaagaaggcggcagaggtccgcggggacaggttcggcatcccgcggtgcatcgaggtgatgagcgccatggcggagctgtcgccggtggagaagtcgctggcgcccgacgtcttcttggacgcgagcaaccgggagatcttcctctcgctgagtgtagatattaggccaatctggctgaggcgcaagatgaagagccttgtctagctagacgctacaacagagatagcctgaggaattttcgtcgtcggcgtatacctaataaacccgtgctgtactgtagatatataatatatgtgccttagattcagagttgagttctggaccgatgggtgtaatataccttagtgctaatttatggtgcatgctgttatattggagttcttcctatggtaagttcgttatgatttcagcc

SEQ ID NO: 8335 - protein, 429 aa, Zea mays subsp. mays
  peptide (1)..(429): Ceres Seq. ID no. 13493670
LSASAPPHPSRLRFVATASPTPPIGAPPAAAAPDPMEAEVGPPNPPRPEPAGSEPDDARLSPPPPAPAPPPPPPPPPAAEAAAAPTASAAFSLQAPAPAPAEANGSSDRKRRRKAEDGDGCKTCSCKKSRCLKLYCVCFASGLHCTESCGCEPCHNKPQLQGTLRMATVLPLKPVQTFEAGQDIVEQVIRSPMDLIRRKCTCKKSGCLKKYCDCYQGGAGCSINCKCDDCRNPFGRKVGVILDGKSSLTAPILHERNGTEVDSSDEEDDFYMNRQLSPIPPSPVSRESSFQQETLVGVEVQTMNGHLYPKPLTQVRPEPSSWQLSRRPIEEPRGEIWRFSRRPSEDGTSDAMEVHAVAPRESKKAAEVRGDRFGIPRCIEVMSAMAELSPVEKSLAPDVFLDASNREIFLSLSVDIRPIWLRRKMKSLV

SEQ ID NO: 8336 - protein, 394 aa, Zea mays subsp. mays
  peptide (1)..(394): Ceres Seq. ID no. 13493671
MEAEVGPPNPPRPEPAGSEPDDARLSPPPPAPAPPPPPPPPPAAEAAAAPTASAAFSLQAPAPAPAEANGSSDRKRRRKAEDGDGCKTCSCKKSRCLKLYCVCFASGLHCTESCGCEPCHNKPQLQGTLRMATVLPLKPVQTFEAGQDIVEQVIRSPMDLIRRKCTCKKSGCLKKYCDCYQGGAGCSINCKCDDCRNPFGRKVGVILDGKSSLTAPILHERNGTEVDSSDEEDDFYMNRQLSPIPPSPVSRESSFQQETLVGVEVQTMNGHLYPKPLTQVRPEPSSWQLSRRPIEEPRGEIWRFSRRPSEDGTSDAMEVHAVAPRESKKAAEVRGDRFGIPRCIEVMSAMAELSPVEKSLAPDVFLDASNREIFLSLSVDIRPIWLRRKMKSLV

SEQ ID NO: 8337 - protein, 264 aa, Zea mays subsp. mays
  peptide (1)..(264): Ceres Seq. ID no. 13493672
MATVLPLKPVQTFEAGQDIVEQVIRSPMDLIRRKCTCKKSGCLKKYCDCYQGGAGCSINCKCDDCRNPFGRKVGVILDGKSSLTAPILHERNGTEVDSSDEEDDFYMNRQLSPIPPSPVSRESSFQQETLVGVEVQTMNGHLYPKPLTQVRPEPSSWQLSRRPIEEPRGEIWRFSRRPSEDGTSDAMEVHAVAPRESKKAAEVRGDRFGIPRCIEVMSAMAELSPVEKSLAPDVFLDASNREIFLSLSVDIRPIWLRRKMKSLV

SEQ ID NO: 8338 - DNA, 2002 bp, Zea mays subsp. mays
  misc_feature (1)..(2002): Ceres Seq. ID no. 12374270
  misc_feature (1)..(2002): Ortholog of  Ceres SEQ ID NO 15179739 as cited in SEQ ID NO 62016
gccaggatgacaaaatttcccactccactcgaattaaaaccctagcggcaaaaccttcgctctgcgccgccgtcgcctgctcccgtcccgccaccacatccgcccaggagctcgccgtcggggaggctgctcgaggagccgcgctgtctctcccgcgccgcgaccttcgccctcgccgccgccatgatctgcgcgatctccggtgaggtgccggacgagccggtggtgtcgaagaagtcggggcttctcttcgagcggcggctcatcgagcgctacattgaggaccatggcaagtgccccatcaccaaggatgagcttactatggatgatatcgtgccggtcaataccaacaaggtcgtgaagcccaggcctttgcaggctgcaagcattccaggactccttgggatttttcagaacgagtgggatgctctcatgctttctaattttgctttggagcagcagctacacacagcaagacaagaacttagtcatgcactctaccagcatgacgctgcctgccgtgttatagccaggttgaagaaggaaagagatgaggctagagcacttttggctcaagctgagagacagattccagcatcagttgcaggagctgctcctgcagctgttgtttccaatggaaaaagagcaatggaagatgaaattggccctgacggaaagaagattcgtcctggtatcaaccctgtcatgattgatgaacttacagagtgtaataccatgctttcagcacagcgtaagaaaagacaggttcctccaactctggcaccattagatgcactcgagagatacactcaaatctccagccatccccttcataagacaaacaaaccaggcattttgtccatggatgttcatccttcaaaggatgttgttgcaactgggggtatcgatacaaatgcagtaatctttgatcggtcatctggtcaaatcttgtgcacgcttactggtcactcaaagaagataaccactttaaagtttgttccacgggatcaactctttgtaactggatcagcagataagactgttcgcatttggcaagagaacgagaatggaaactataactgcgtccatacattgaaagatcatactgctgaggttgaagctgttacagtacatgcgactcagaagtattttgtgagtgcttccaaggataattcgtggtgcttctatgatatttcaacaggatcttgcctgacacaggttggcgaggcttcaggacaagagggatatacatccgcgtctttccatccagatggtcttatccttggaacaggaactactgatgctgttgttaaaatttgggatgtgaagactcagtcgaatgtcgcgaagtttgaggggcatgtaggaccagtcactgctatgtccttctctgaaaatggttacttcctagcgactgctgctcatgatggtgtcaagctttgggatcttcggaaattaagaaattttaggaccttctctccctatgattcagatacgccaacaaatactgtggaatttgattttagtggaaactatcttgccattggtggttcagatataagggtctaccaagtagctaatgttaaggccgaatggaatctcatcaagacattaccagatttatctggaacagggaaagtaacttcggtaaagttcggagcagatgctaagtacatagccgtaggttctatggaccgcaatctacggatatttggcctccctggagacgaccaaatggaggaatcaaccacagcggcagagtgaggaaaatccatggtacctaatttcctcctcctggtatactccgcaatatgttctgatgatgggtagactgagtgcaaatggatacatcacgagagaagggtcctcgcggcgatgaactggcttgagcttcggtcggtgtaaacaagctgtgacattattgtattgtaggcctcactaattcttctgatggggatacaatttgttttgatgagtacgagtgtacgacgctaaacagcct

SEQ ID NO: 8339 - protein, 526 aa, Zea mays subsp. mays
  peptide (1)..(526): Ceres Seq. ID no. 12374271
MICAISGEVPDEPVVSKKSGLLFERRLIERYIEDHGKCPITKDELTMDDIVPVNTNKVVKPRPLQAASIPGLLGIFQNEWDALMLSNFALEQQLHTARQELSHALYQHDAACRVIARLKKERDEARALLAQAERQIPASVAGAAPAAVVSNGKRAMEDEIGPDGKKIRPGINPVMIDELTECNTMLSAQRKKRQVPPTLAPLDALERYTQISSHPLHKTNKPGILSMDVHPSKDVVATGGIDTNAVIFDRSSGQILCTLTGHSKKITTLKFVPRDQLFVTGSADKTVRIWQENENGNYNCVHTLKDHTAEVEAVTVHATQKYFVSASKDNSWCFYDISTGSCLTQVGEASGQEGYTSASFHPDGLILGTGTTDAVVKIWDVKTQSNVAKFEGHVGPVTAMSFSENGYFLATAAHDGVKLWDLRKLRNFRTFSPYDSDTPTNTVEFDFSGNYLAIGGSDIRVYQVANVKAEWNLIKTLPDLSGTGKVTSVKFGADAKYIAVGSMDRNLRIFGLPGDDQMEESTTAAE

SEQ ID NO: 8340 - protein, 480 aa, Zea mays subsp. mays
  peptide (1)..(480): Ceres Seq. ID no. 12374272
MDDIVPVNTNKVVKPRPLQAASIPGLLGIFQNEWDALMLSNFALEQQLHTARQELSHALYQHDAACRVIARLKKERDEARALLAQAERQIPASVAGAAPAAVVSNGKRAMEDEIGPDGKKIRPGINPVMIDELTECNTMLSAQRKKRQVPPTLAPLDALERYTQISSHPLHKTNKPGILSMDVHPSKDVVATGGIDTNAVIFDRSSGQILCTLTGHSKKITTLKFVPRDQLFVTGSADKTVRIWQENENGNYNCVHTLKDHTAEVEAVTVHATQKYFVSASKDNSWCFYDISTGSCLTQVGEASGQEGYTSASFHPDGLILGTGTTDAVVKIWDVKTQSNVAKFEGHVGPVTAMSFSENGYFLATAAHDGVKLWDLRKLRNFRTFSPYDSDTPTNTVEFDFSGNYLAIGGSDIRVYQVANVKAEWNLIKTLPDLSGTGKVTSVKFGADAKYIAVGSMDRNLRIFGLPGDDQMEESTTAAE

SEQ ID NO: 8341 - protein, 443 aa, Zea mays subsp. mays
  peptide (1)..(443): Ceres Seq. ID no. 12374273
MLSNFALEQQLHTARQELSHALYQHDAACRVIARLKKERDEARALLAQAERQIPASVAGAAPAAVVSNGKRAMEDEIGPDGKKIRPGINPVMIDELTECNTMLSAQRKKRQVPPTLAPLDALERYTQISSHPLHKTNKPGILSMDVHPSKDVVATGGIDTNAVIFDRSSGQILCTLTGHSKKITTLKFVPRDQLFVTGSADKTVRIWQENENGNYNCVHTLKDHTAEVEAVTVHATQKYFVSASKDNSWCFYDISTGSCLTQVGEASGQEGYTSASFHPDGLILGTGTTDAVVKIWDVKTQSNVAKFEGHVGPVTAMSFSENGYFLATAAHDGVKLWDLRKLRNFRTFSPYDSDTPTNTVEFDFSGNYLAIGGSDIRVYQVANVKAEWNLIKTLPDLSGTGKVTSVKFGADAKYIAVGSMDRNLRIFGLPGDDQMEESTTAAE

SEQ ID NO: 8342 - DNA, 916 bp, Zea mays subsp. mays; identical to SEQ ID NO: 5212
  misc_feature (1)..(916): Ceres Seq. ID no. 13625767
  misc_feature (1)..(916): Ortholog of  Ceres SEQ ID NO 12610334 as cited in SEQ ID NO 56235
  misc_feature (1)..(916): Ortholog of  Ceres SEQ ID NO 13654825 as cited in SEQ ID NO 62409

SEQ ID NO: 8343 - protein, 269 aa, Zea mays subsp. mays; identical to SEQ ID NO: 5213
  peptide (1)..(269): Ceres Seq. ID no. 13625768
  misc_feature (42)..(42): Xaa is any aa, unknown or other

SEQ ID NO: 8344 - protein, 183 aa, Zea mays subsp. mays; identical to SEQ ID NO: 5214
  peptide (1)..(183): Ceres Seq. ID no. 13625769

SEQ ID NO: 8345 - DNA, 1255 bp, Zea mays subsp. mays
  misc_feature (1)..(1255): Ceres Seq. ID no. 12404948
  misc_feature (1)..(1255): Ortholog of  Ceres SEQ ID NO 15179015 as cited in SEQ ID NO 0
  misc_feature (1)..(1255): Ortholog of  Ceres SEQ ID NO 15179613 as cited in SEQ ID NO 0
atggcagatgcacaggtagtagtaactgcagctgcaaagctggcagtgtcggtgtcggtgtcgtcgtcggcgtcggtgctggggagcgggcgagcggcgcgtcgcatgattctgtcctcctgacgtggcagctaacgattccgattccctttggttgcagtgcgacgacattgacatggacatggcgcagctggagtggctgtcggggctcttcgacgacgcatccatcccgcacgagccggcgttccccggcgcggcgcccatcatcaagagctccgcgctggcggccggcgcgctgctgccgccggacaagatgggggacgcgctgctgttccgcagctccagccccatctcggtgctggagcacggcagcttcaacaacgccaacggcggtggcggcggctgctccgcgtcgtcggagtcgtcctcggcgtcctcgtcctcggagtctttctccggcagcgggagcggcgaaggccatgcgtggtcggcgcccgtgtcgccgccacccgtgctcgtcataccggcgcgcgcgcggagcaagcgctcccgcccgtccgcgttcacgcgcgccggggcggaggcgcccaccatcctcgtgccgacgcccatgtactcgtccgggccgtcccactcggaccccgagagcatcgctgagtccagcccgcacccggcgccgcccatgaagaaaaagaagaaggccaagaagccgccggcgccgcccgcgcccgcctcttccgacgacaacgacggcgacgccgactacgaggaaggcggcgagcgcacggagccgcagggctgcgccgtcaggaggtgcacgcactgccagatcgagaagacgccgcagtggcgcgcggggccgctggggcccaagaccctctgcaacgcctgtggcgtgcgctacaagtccggccgcctgttcccggagtaccgtcccgcggcgagccccaccttcgtgccgtccatccactccaactcgcacaagaaggtggtggagatgcgccagaaggctgtccggagcggtgacccgtcgtgcgacctcctgcagttcatccgccgccgggattgacgtcccggcacggtgtcgccggactgtcggtcggtctcgtcccccttatagctagctatatagtatatgtatacatgctagtatgtatgcatgcatggttgcttcagcagtcgttggtcgtcgtcgtccatcatggtcatcatcaccacttcaccggtcaccgccatggcatggatcccacccctc

SEQ ID NO: 8346 - protein, 297 aa, Zea mays subsp. mays
  peptide (1)..(297): Ceres Seq. ID no. 12404949
MDMAQLEWLSGLFDDASIPHEPAFPGAAPIIKSSALAAGALLPPDKMGDALLFRSSSPISVLEHGSFNNANGGGGGCSASSESSSASSSSESFSGSGSGEGHAWSAPVSPPPVLVIPARARSKRSRPSAFTRAGAEAPTILVPTPMYSSGPSHSDPESIAESSPHPAPPMKKKKKAKKPPAPPAPASSDDNDGDADYEEGGERTEPQGCAVRRCTHCQIEKTPQWRAGPLGPKTLCNACGVRYKSGRLFPEYRPAASPTFVPSIHSNSHKKVVEMRQKAVRSGDPSCDLLQFIRRRD

SEQ ID NO: 8347 - protein, 295 aa, Zea mays subsp. mays
  peptide (1)..(295): Ceres Seq. ID no. 12404950
MAQLEWLSGLFDDASIPHEPAFPGAAPIIKSSALAAGALLPPDKMGDALLFRSSSPISVLEHGSFNNANGGGGGCSASSESSSASSSSESFSGSGSGEGHAWSAPVSPPPVLVIPARARSKRSRPSAFTRAGAEAPTILVPTPMYSSGPSHSDPESIAESSPHPAPPMKKKKKAKKPPAPPAPASSDDNDGDADYEEGGERTEPQGCAVRRCTHCQIEKTPQWRAGPLGPKTLCNACGVRYKSGRLFPEYRPAASPTFVPSIHSNSHKKVVEMRQKAVRSGDPSCDLLQFIRRRD

SEQ ID NO: 8348 - protein, 251 aa, Zea mays subsp. mays
  peptide (1)..(251): Ceres Seq. ID no. 12404951
MGDALLFRSSSPISVLEHGSFNNANGGGGGCSASSESSSASSSSESFSGSGSGEGHAWSAPVSPPPVLVIPARARSKRSRPSAFTRAGAEAPTILVPTPMYSSGPSHSDPESIAESSPHPAPPMKKKKKAKKPPAPPAPASSDDNDGDADYEEGGERTEPQGCAVRRCTHCQIEKTPQWRAGPLGPKTLCNACGVRYKSGRLFPEYRPAASPTFVPSIHSNSHKKVVEMRQKAVRSGDPSCDLLQFIRRRD

SEQ ID NO: 8349 - DNA, 1614 bp, Zea mays subsp. mays; identical to SEQ ID NO: 1798
  misc_feature (1)..(1614): Ceres Seq. ID no. 12410981
  misc_feature (1)..(1614): Ortholog of  Ceres SEQ ID NO 13598492 as cited in SEQ ID NO 63882
  misc_feature (1)..(1614): Ortholog of  Ceres SEQ ID NO 13654367 as cited in SEQ ID NO 67993

SEQ ID NO: 8350 - protein, 352 aa, Zea mays subsp. mays; identical to SEQ ID NO: 1799
  peptide (1)..(352): Ceres Seq. ID no. 12410982
  misc_feature (108)..(108): Xaa is any aa, unknown or other
  misc_feature (109)..(109): Xaa is any aa, unknown or other

SEQ ID NO: 8351 - protein, 344 aa, Zea mays subsp. mays; identical to SEQ ID NO: 1800
  peptide (1)..(344): Ceres Seq. ID no. 12410983
  misc_feature (77)..(77): Xaa is any aa, unknown or other
  misc_feature (78)..(78): Xaa is any aa, unknown or other

SEQ ID NO: 8352 - DNA, 1567 bp, Zea mays subsp. mays
  misc_feature (1)..(1567): Ceres Seq. ID no. 12407394
  misc_feature (1)..(1567): Ortholog of  Ceres SEQ ID NO 12593464 as cited in SEQ ID NO 69039
gaacatcctaatcgaaaaaagccccagcagtttgccactcccacgcgaaacagaagccccagcagggcggcactcccgacgcgacgcccctgcttgccggccgggaggctcactcgactctgcctccacttcctcgtctgtccgttggagcacggcgccgatggcggcggcgccagcgctcgcgcgggagctgctggacgcggcgcgggagccggagttcgcggagtggcagcgcggcgtgcggcgccggatccaccagcacccggagctggccttccaggagcaccgcaccagcgcgctcgtgcgcgccgagctcgacgcgatcggcgtcccgtacgcctggcccgtcgcgcagacgggcgtcgtggccaccatcaccggccccgccgcgggccccgtgttcgcgctccgcgccgacatggacgcgctccccatccaggaaatggtagaatgggagttcaagagcaaggaagacgggaagatgcatgcgtgcggccatgacgcccacgtggcgatgcttcttggagcagctaggttgcttcagtctcggagggacgatttaaagggtacagtgaagctcgtcttccagccagccgaggagggacacgccggcgcataccacgtcctcaaggaaggcgtcctggacaacgtgcaggccatcttcggcgtgcacgtggacacggcgttgccggtggggctcgtcgggtccaggccagggccgttcctcgccggatcggcgcggttcacggcgaccatcacggggaaaggcgggcacgcagcggggccgcagcacgtcgtcgacccgatcgtcgcggcgtcctccgccgtgctcagcctccagcagctcgtcgcccgcgagaccgacccgctacagggcgcagttgtgtcggtgaccttcatcaaaggaggaggcggagctttcaatgtcatcccagaatccgtcaccatgggcggcaccttgaggagcatgacgaacgatggcatgtcctatctcgtgaaaagaatcagagaggtgatacaaggacaagccgccgtgagccgctgcgccgctacggtggacttgatggaggagaggatgaggccgtacccggccaccgtgaacgacgaggccatgtactcccacgccaaggcggtggcggagagcatgctgggcgaggccagcgtgatgctgtgcccccagttcatggcggcggaggacttcggcttctacgcgcagcggatcccggcggccttcttcagcgtcggcgtccgcgacgaggcgacggggaaggtccaccacgtgcactcaccgcacctggacatcgacgaggccgcgctccccgtcggagccgcgttgcacgccgccttggctatggagtacctgaacaaacacgcaccatgcaaataaacacaaggctctggccatcccgataatacatgtcattcttattgaagtgactgcatgccgcaaaatcttccctccttggagcggtaagaatttgctaccccgcatccgtgctctgtacgtcgaaaataaatgtgtccagacatccctgaaagattggtttggttgtactgcgcctgttcc

SEQ ID NO: 8353 - protein, 461 aa, Zea mays subsp. mays
  peptide (1)..(461): Ceres Seq. ID no. 12407395
NILIEKSPSSLPLPRETEAPAGRHSRRDAPACRPGGSLDSASTSSSVRWSTAPMAAAPALARELLDAAREPEFAEWQRGVRRRIHQHPELAFQEHRTSALVRAELDAIGVPYAWPVAQTGVVATITGPAAGPVFALRADMDALPIQEMVEWEFKSKEDGKMHACGHDAHVAMLLGAARLLQSRRDDLKGTVKLVFQPAEEGHAGAYHVLKEGVLDNVQAIFGVHVDTALPVGLVGSRPGPFLAGSARFTATITGKGGHAAGPQHVVDPIVAASSAVLSLQQLVARETDPLQGAVVSVTFIKGGGGAFNVIPESVTMGGTLRSMTNDGMSYLVKRIREVIQGQAAVSRCAATVDLMEERMRPYPATVNDEAMYSHAKAVAESMLGEASVMLCPQFMAAEDFGFYAQRIPAAFFSVGVRDEATGKVHHVHSPHLDIDEAALPVGAALHAALAMEYLNKHAPCK

SEQ ID NO: 8354 - protein, 408 aa, Zea mays subsp. mays
  peptide (1)..(408): Ceres Seq. ID no. 12407396
MAAAPALARELLDAAREPEFAEWQRGVRRRIHQHPELAFQEHRTSALVRAELDAIGVPYAWPVAQTGVVATITGPAAGPVFALRADMDALPIQEMVEWEFKSKEDGKMHACGHDAHVAMLLGAARLLQSRRDDLKGTVKLVFQPAEEGHAGAYHVLKEGVLDNVQAIFGVHVDTALPVGLVGSRPGPFLAGSARFTATITGKGGHAAGPQHVVDPIVAASSAVLSLQQLVARETDPLQGAVVSVTFIKGGGGAFNVIPESVTMGGTLRSMTNDGMSYLVKRIREVIQGQAAVSRCAATVDLMEERMRPYPATVNDEAMYSHAKAVAESMLGEASVMLCPQFMAAEDFGFYAQRIPAAFFSVGVRDEATGKVHHVHSPHLDIDEAALPVGAALHAALAMEYLNKHAPCK

SEQ ID NO: 8355 - protein, 322 aa, Zea mays subsp. mays
  peptide (1)..(322): Ceres Seq. ID no. 12407397
MDALPIQEMVEWEFKSKEDGKMHACGHDAHVAMLLGAARLLQSRRDDLKGTVKLVFQPAEEGHAGAYHVLKEGVLDNVQAIFGVHVDTALPVGLVGSRPGPFLAGSARFTATITGKGGHAAGPQHVVDPIVAASSAVLSLQQLVARETDPLQGAVVSVTFIKGGGGAFNVIPESVTMGGTLRSMTNDGMSYLVKRIREVIQGQAAVSRCAATVDLMEERMRPYPATVNDEAMYSHAKAVAESMLGEASVMLCPQFMAAEDFGFYAQRIPAAFFSVGVRDEATGKVHHVHSPHLDIDEAALPVGAALHAALAMEYLNKHAPCK

SEQ ID NO: 8356 - DNA, 1390 bp, Zea mays subsp. mays
  misc_feature (1)..(1390): Ceres Seq. ID no. 12412584
  misc_feature (1)..(1390): Ortholog of  Ceres SEQ ID NO 13597559 as cited in SEQ ID NO 65274
aaaagcccacttctgtagctgtagactgtagttctgttcctccccactcactcctgcgcttcctcgccgcgcggttccttctccctgatcctcctttggcttcgcggttcatggcgatgtggagggccgccgctaggcagctggtcgaccgggcgctcggctcaagggccgcgcacacgtctacaggcagcaaaaagatagtcggggtgttctacaaggccggggagtatgccgacaagaaccccaacttcgtcggctgcgtcgagggtgcactcggcatccgcggctggctcgagtcgcagggccatcagtacattgtcaccgatgacaaggaaggccccaactgtgaactggagaagcacattgaagacatgcatgtcctgattaccaccccattccacccagcttatgtcactgcagagaggataaagaacgcgaagaatcttgagcttcttctcacggcaggaattggctcagatcatattgatcttccagcagctgctgctgcgggcttaactgtggctgaggtcactggaagcaacactgtctctgtggcagaagatgagctcttgcgcattctgattctgctcaggaacttcttgcctgggtaccaacaggtagttcaaggcgaatggaacgtagcaggcattgcccatagagcttatgatcttgaaggaaaaactgttgggactgttggggctggtcgtattggcaggctcttgcttcagcgtcttaagccctttaactgcaacctgctttaccatgacagacttcagattgacccagagcttgagaaagaaattggggccaaatttgaggaggacctggatgctatgcttccagagtgtgatgtgattgtgatcaacacacctcttacggagaaaacaagaggcatgtttaacaaagagaggattgcaaagatgaagaaaggtgtaattgttgtgaataatgctcgaggagcaatcatggatgctcaagcagtcgcagatgcatgttctagcggtcacattgctggatacggtggtgatgtgtggttcccccaaccagcacccaaggatcacccctggcgctacatgccaaaccatgccatgacccctcacatctctgggactacaattgatgcgcagctgcggtatgcggatggtgtgagggacatgctgaataggtatttcaagggcgaggacttccccgtgcagaactacatcgtcaaggaaggccagcttgccagtcagtaccagtgaccgcgcgagatgttgctgtgccgtgtaggcttttctggtgagaagctgcgaggaagaaactcctgttgcgtacttgcgttactgtatgagtagctctgagaaacctgtcagcggccacctgtaataaaagaatgccttgctggtatcgc

SEQ ID NO: 8357 - protein, 412 aa, Zea mays subsp. mays
  peptide (1)..(412): Ceres Seq. ID no. 12412585
KPTSVAVDCSSVPPHSLLRFLAARFLLPDPPLASRFMAMWRAAARQLVDRALGSRAAHTSTGSKKIVGVFYKAGEYADKNPNFVGCVEGALGIRGWLESQGHQYIVTDDKEGPNCELEKHIEDMHVLITTPFHPAYVTAERIKNAKNLELLLTAGIGSDHIDLPAAAAAGLTVAEVTGSNTVSVAEDELLRILILLRNFLPGYQQVVQGEWNVAGIAHRAYDLEGKTVGTVGAGRIGRLLLQRLKPFNCNLLYHDRLQIDPELEKEIGAKFEEDLDAMLPECDVIVINTPLTEKTRGMFNKERIAKMKKGVIVVNNARGAIMDAQAVADACSSGHIAGYGGDVWFPQPAPKDHPWRYMPNHAMTPHISGTTIDAQLRYADGVRDMLNRYFKGEDFPVQNYIVKEGQLASQYQ

SEQ ID NO: 8358 - protein, 376 aa, Zea mays subsp. mays
  peptide (1)..(376): Ceres Seq. ID no. 12412586
MAMWRAAARQLVDRALGSRAAHTSTGSKKIVGVFYKAGEYADKNPNFVGCVEGALGIRGWLESQGHQYIVTDDKEGPNCELEKHIEDMHVLITTPFHPAYVTAERIKNAKNLELLLTAGIGSDHIDLPAAAAAGLTVAEVTGSNTVSVAEDELLRILILLRNFLPGYQQVVQGEWNVAGIAHRAYDLEGKTVGTVGAGRIGRLLLQRLKPFNCNLLYHDRLQIDPELEKEIGAKFEEDLDAMLPECDVIVINTPLTEKTRGMFNKERIAKMKKGVIVVNNARGAIMDAQAVADACSSGHIAGYGGDVWFPQPAPKDHPWRYMPNHAMTPHISGTTIDAQLRYADGVRDMLNRYFKGEDFPVQNYIVKEGQLASQYQ

SEQ ID NO: 8359 - protein, 374 aa, Zea mays subsp. mays
  peptide (1)..(374): Ceres Seq. ID no. 12412587
MWRAAARQLVDRALGSRAAHTSTGSKKIVGVFYKAGEYADKNPNFVGCVEGALGIRGWLESQGHQYIVTDDKEGPNCELEKHIEDMHVLITTPFHPAYVTAERIKNAKNLELLLTAGIGSDHIDLPAAAAAGLTVAEVTGSNTVSVAEDELLRILILLRNFLPGYQQVVQGEWNVAGIAHRAYDLEGKTVGTVGAGRIGRLLLQRLKPFNCNLLYHDRLQIDPELEKEIGAKFEEDLDAMLPECDVIVINTPLTEKTRGMFNKERIAKMKKGVIVVNNARGAIMDAQAVADACSSGHIAGYGGDVWFPQPAPKDHPWRYMPNHAMTPHISGTTIDAQLRYADGVRDMLNRYFKGEDFPVQNYIVKEGQLASQYQ

SEQ ID NO: 8360 - DNA, 1482 bp, Zea mays subsp. mays
  misc_feature (1)..(1482): Ceres Seq. ID no. 12369082
  misc_feature (1)..(1482): Ortholog of  Ceres SEQ ID NO 14304969 as cited in SEQ ID NO 53193
  misc_feature (1)..(1482): Ortholog of  Ceres SEQ ID NO 14314851 as cited in SEQ ID NO 54014
  misc_feature (1)..(1482): Ortholog of  Ceres SEQ ID NO 14307442 as cited in SEQ ID NO 54239
  misc_feature (1)..(1482): Ortholog of  Ceres SEQ ID NO 15227214 as cited in SEQ ID NO 55368
  misc_feature (1)..(1482): Ortholog of  Ceres SEQ ID NO 13638897 as cited in SEQ ID NO 55839
  misc_feature (1)..(1482): Ortholog of  Ceres SEQ ID NO 14302561 as cited in SEQ ID NO 56543
  misc_feature (1)..(1482): Ortholog of  Ceres SEQ ID NO 15177758 as cited in SEQ ID NO 57504
  misc_feature (1)..(1482): Ortholog of  Ceres SEQ ID NO 15177710 as cited in SEQ ID NO 59217
  misc_feature (1)..(1482): Ortholog of  Ceres SEQ ID NO 13596958 as cited in SEQ ID NO 63319
  misc_feature (1)..(1482): Ortholog of  Ceres SEQ ID NO 12614573 as cited in SEQ ID NO 68344
  misc_feature (1)..(1482): Ortholog of  Ceres SEQ ID NO 12614814 as cited in SEQ ID NO 68816
gacattattgccccctcttcccttcccaacccaacccattgcatttgcaagcccttttacattgcagagcgccagagcctcgctcgctctcggaacagagctaggcagctaacagacgaagaagaagcaagccaagcagaattgagagagaggcgaggacgtggcgacgacggcagccgcgatggcgacgacgacggacctggggttcgaggcgacggagctccgcctgggcctgcccggcgggggaggtggaggggagccggcgctgggcggcgaggggaggagctcttcctccgcctccggcaagaggggcttcgccgagaccatcgacctgaagctgaagctggagccagcggccgtcgtggaggcggaggaggaggaggaggaccacggcgttgctgttgcccttgagaaggaggaggaggccgggaagatgaagcggtccccgagccagagcagcgtcgccgccgccgccgccgccgtgctggctgaccccgccgagaagccgcgcgccgccaaggctcaggtggtgggatggccaccggtccggtcgttccggaagaacatcatgtccgtgcagtccgacaagggcgccggcaaagacgccgccgccgccaacggcgacaagtcctcggcggcggcaggcggcggtgccgcgttcgtgaaggtgagcttggacggcgcgccctacctgcgcaaagtggacctcaagatgtacaggagctaccagcagctgtccaaggcgctcgagaacatgttcagctccttcaccatcggaagctgtgggtctcaagggatgaacggcatgaacgagagcaagctggtggatctgctcaacggctccgagtacgtgccgacctacgaggacaaggacggggactggatgctcgtcggcgacgtgccgtgggagatgttcgtcgaatcatgcaagcgccttcggatcatgaaaggatcagaagccattggcctggcgccaagggccatggagaaatgcaagaacagaagctgaggagaagacggacggacggaagcttgcatctcagcaccaccaggggtggatggatgcaagaagaacaaatctccatggcttttgcagctctgctcgtctctgtatcatactcgtcgtccctgcccttcaggcctctgtatctccctgatcaatgaagtcgttttggtgtgtcaactgttctctccgtgcccagcttgtcagtgaaagagtcagtcagtgtccatcaagtctcatcttgtcctatacagaagagagaagccatgcatgaacatgtacctgtcctataacaatgtctttttttgctacctgtttttttttctctctctctctttttttggcacaagatgcaaaggcaccctgctcctgatcaaagggccttttgcatcataagctgtttgattataattaccatggtgtgtcagtggaacaaataactgttgcaaggtgttaaaaaaaagttgtattgtaatatg

SEQ ID NO: 8361 - protein, 275 aa, Zea mays subsp. mays
  peptide (1)..(275): Ceres Seq. ID no. 12369083
MATTTDLGFEATELRLGLPGGGGGGEPALGGEGRSSSSASGKRGFAETIDLKLKLEPAAVVEAEEEEEDHGVAVALEKEEEAGKMKRSPSQSSVAAAAAAVLADPAEKPRAAKAQVVGWPPVRSFRKNIMSVQSDKGAGKDAAAANGDKSSAAAGGGAAFVKVSLDGAPYLRKVDLKMYRSYQQLSKALENMFSSFTIGSCGSQGMNGMNESKLVDLLNGSEYVPTYEDKDGDWMLVGDVPWEMFVESCKRLRIMKGSEAIGLAPRAMEKCKNRS

SEQ ID NO: 8362 - protein, 209 aa, Zea mays subsp. mays
  peptide (1)..(209): Ceres Seq. ID no. 12369084
MATGPVVPEEHHVRAVRQGRRQRRRRRQRRQVLGGGRRRCRVREGELGRRALPAQSGPQDVQELPAAVQGAREHVQLLHHRKLWVSRDERHEREQAGGSAQRLRVRADLRGQGRGLDARRRRAVGDVRRIMQAPSDHERIRSHWPGAKGHGEMQEQKLRRRRTDGSLHLSTTRGGWMQEEQISMAFAALLVSVSYSSSLPFRPLYLPDQ

SEQ ID NO: 8363 - protein, 191 aa, Zea mays subsp. mays
  peptide (1)..(191): Ceres Seq. ID no. 12369085
MKRSPSQSSVAAAAAAVLADPAEKPRAAKAQVVGWPPVRSFRKNIMSVQSDKGAGKDAAAANGDKSSAAAGGGAAFVKVSLDGAPYLRKVDLKMYRSYQQLSKALENMFSSFTIGSCGSQGMNGMNESKLVDLLNGSEYVPTYEDKDGDWMLVGDVPWEMFVESCKRLRIMKGSEAIGLAPRAMEKCKNRS

SEQ ID NO: 8364 - DNA, 1630 bp, Zea mays subsp. mays
  misc_feature (1)..(1630): Ceres Seq. ID no. 12356575
  misc_feature (1)..(1630): Ortholog of  Ceres SEQ ID NO 13659033 as cited in SEQ ID NO 66372
  misc_feature (1)..(1630): Ortholog of  Ceres SEQ ID NO 13655724 as cited in SEQ ID NO 68973
  misc_feature (1)..(1630): Ortholog of  Ceres SEQ ID NO 12625899 as cited in SEQ ID NO 69079
gcggccaccggcttattcaagagcaccaaaagagtttcggcatggatggatagcacacagcgagcgagcgagagcggtgagcccggccaccagcgccggaggccgtcgtcgtcttactagccgacgctcgacttgggcatgaattgctagccgcgcgggtgagagattgctaggtagccagctaggtacggtgtggggagttgaatcggaggtctgccgctcgaggcggcggcggcagaaggccggtaggatgaagaagctccactggctggtgcggttcctgttcgggccggtgccggtctacttctcggcgctggccatcctcatcgtgctcaccaacgcgcagtacttcgggctggtgggcgtcggcgtggcgccgcgcaccgcgaagctggcctcctcggcgcccgtggtcagcgtcatgaagtactgcgacatcttccgcggcgagtgggtgccggacgcggaggcgccctactacaaccacaagacgtgccacatgatccaggagcaccagaactgcctcaagtacggccgccccgacctgggcttcctcaagtggcggtggcggccctccggatgcgagctgccgcgcttcgacccgctgcagttcctgcagttcgcccgcgggaagtcgctggccttcgtcggggactcgctggcgcggaaccacatgcagtcgctgctctgcctcctgtcccaggtggcgtatcccaaggacctgtcggcgaacccgtcggaccagaacaaggtgtaccactaccgggcgtacaacttcaccatcagcatgttctggtcgccgttcctggtgcgcgcccgggagcccgaccacgacggccccgcgcacacgggccactggagcctctacctggacgagcccgacgacaagtgggtgtcccagatgccccgcttcgactacgtgctggtgtcggcggccaactggttctcccgcccctccctcttctacgagcggcggcgcctcgtcgggtgcagcttctgcagccgccagtacggcgtgcccgacctgacgctctactactcgcagcgccgcgcgtggcgcgtggcgctgcgcgccatcaacgacctggagcgcctgcgagggcgcgtcatcctgcgcatgctctccccgatgtcgcacttcgagaacgggacctgggaccacggcggcgactgcaggcgcacgcagccgctgcgggcgaaccagaccgccatggagggccgcgacctgcacttctacaccgcgcagatggaggagttccgcgccgcggagaaggccgccgccgagaaggggcggcgcctgatgctcatggacgccacggcggcgatgctgatgcggcccgacggccaccccagccgctacgggcactggcccaacgagaaggtgcagctctacaacgactgcatccactggtgcctcccgggacccatcgacatctggaacgacatgctcttccagatgctcctcgcctagcagcaagcagcaaagattaaaaaaaaaactcagcaattcggtcgccggtaaccgtgcacagattggccttcttttttttgccttgtttcgtttttttaaaaaaagaagaaaatggtgcaattttgacaagcaaggattcgaaattcgccggtaaccccc

SEQ ID NO: 8365 - protein, 406 aa, Zea mays subsp. mays
  peptide (1)..(406): Ceres Seq. ID no. 12356576
MKKLHWLVRFLFGPVPVYFSALAILIVLTNAQYFGLVGVGVAPRTAKLASSAPVVSVMKYCDIFRGEWVPDAEAPYYNHKTCHMIQEHQNCLKYGRPDLGFLKWRWRPSGCELPRFDPLQFLQFARGKSLAFVGDSLARNHMQSLLCLLSQVAYPKDLSANPSDQNKVYHYRAYNFTISMFWSPFLVRAREPDHDGPAHTGHWSLYLDEPDDKWVSQMPRFDYVLVSAANWFSRPSLFYERRRLVGCSFCSRQYGVPDLTLYYSQRRAWRVALRAINDLERLRGRVILRMLSPMSHFENGTWDHGGDCRRTQPLRANQTAMEGRDLHFYTAQMEEFRAAEKAAAEKGRRLMLMDATAAMLMRPDGHPSRYGHWPNEKVQLYNDCIHWCLPGPIDIWNDMLFQMLLA

SEQ ID NO: 8366 - protein, 349 aa, Zea mays subsp. mays
  peptide (1)..(349): Ceres Seq. ID no. 12356577
MKYCDIFRGEWVPDAEAPYYNHKTCHMIQEHQNCLKYGRPDLGFLKWRWRPSGCELPRFDPLQFLQFARGKSLAFVGDSLARNHMQSLLCLLSQVAYPKDLSANPSDQNKVYHYRAYNFTISMFWSPFLVRAREPDHDGPAHTGHWSLYLDEPDDKWVSQMPRFDYVLVSAANWFSRPSLFYERRRLVGCSFCSRQYGVPDLTLYYSQRRAWRVALRAINDLERLRGRVILRMLSPMSHFENGTWDHGGDCRRTQPLRANQTAMEGRDLHFYTAQMEEFRAAEKAAAEKGRRLMLMDATAAMLMRPDGHPSRYGHWPNEKVQLYNDCIHWCLPGPIDIWNDMLFQMLLA

SEQ ID NO: 8367 - protein, 323 aa, Zea mays subsp. mays
  peptide (1)..(323): Ceres Seq. ID no. 12356578
MIQEHQNCLKYGRPDLGFLKWRWRPSGCELPRFDPLQFLQFARGKSLAFVGDSLARNHMQSLLCLLSQVAYPKDLSANPSDQNKVYHYRAYNFTISMFWSPFLVRAREPDHDGPAHTGHWSLYLDEPDDKWVSQMPRFDYVLVSAANWFSRPSLFYERRRLVGCSFCSRQYGVPDLTLYYSQRRAWRVALRAINDLERLRGRVILRMLSPMSHFENGTWDHGGDCRRTQPLRANQTAMEGRDLHFYTAQMEEFRAAEKAAAEKGRRLMLMDATAAMLMRPDGHPSRYGHWPNEKVQLYNDCIHWCLPGPIDIWNDMLFQMLLA

SEQ ID NO: 8368 - DNA, 1161 bp, Zea mays subsp. mays
  misc_feature (1)..(1161): Ceres Seq. ID no. 12408515
  misc_feature (1)..(1161): Ortholog of  Ceres SEQ ID NO 13598589 as cited in SEQ ID NO 65254
atctagccctttgtgtgagccgccgtcgcgcactcgccgctccgcccctacgcgcagtcgccacgggagctcgttcctctccggcggcagcaccctccactataacccaacccgcaagaaaaaacccgcagcagagaagaggagtcgccgcgaccgagagctccagagcacgcccccgccacagcctccgacgatggatccaaagatgacagaggtgacccagatgttcgcccgcttcaaggcggcctacgcccgcaacgacctcaacacctgcgtcaccctcctctcgcagctcaaggtccatctcacccaattccccagccttccgcccttgtttcagcagacaccgaacattgtggaggagctcaaacttgcaagggacatttatgagcatgctgttgttttgagtgtgaaacttgaggaccaagatgcgtttgaacgcgatttctgccagctgaagccttattacatggatacatgtggcataattcccgcctcgccagaggagtacccaattttgggactcaatcttctgaggctgttggttcagaatagaattgccgaattccacactgagctggagcttttacctgccaaggcactcgagcatccttgcatcaagcatgctgtagagcttgagcaatccttcatggagggtgcctacaaccgagtgttaagcgctcggcaggctgtgccacatgagacctacgtttacttcatcgaccttctcgccaaaacagttagagatgagatcgctgggtgcagcgaaaaggggtatgattctctatctgtgagtgatgcaaagcaaatgcttatgttcagttctgaccaagatctgcacgagtacatcactgaggagcacccggaatgggagattaagaacggtgctgtcttcttccagaaggcgaaggaatcacagcccctgcaaggagatcccatccttgcagcttatcaaccagacgctcagctacgccagggagctggagcgtattgtatgatttaaaccaatccctggtggttctttccccccctgtggccgcttggcatggcttgtactgtcctttgcatttgggatgatctttgatcgcagctctcatctgactgaaacatcatgtgaatctctgaagggctcagtctctccggcattggtctgttaactcc

SEQ ID NO: 8369 - protein, 333 aa, Zea mays subsp. mays
  peptide (1)..(333): Ceres Seq. ID no. 12408516
SSPLCEPPSRTRRSAPTRSRHGSSFLSGGSTLHYNPTRKKKPAAEKRSRRDRELQSTPPPQPPTMDPKMTEVTQMFARFKAAYARNDLNTCVTLLSQLKVHLTQFPSLPPLFQQTPNIVEELKLARDIYEHAVVLSVKLEDQDAFERDFCQLKPYYMDTCGIIPASPEEYPILGLNLLRLLVQNRIAEFHTELELLPAKALEHPCIKHAVELEQSFMEGAYNRVLSARQAVPHETYVYFIDLLAKTVRDEIAGCSEKGYDSLSVSDAKQMLMFSSDQDLHEYITEEHPEWEIKNGAVFFQKAKESQPLQGDPILAAYQPDAQLRQGAGAYCMI

SEQ ID NO: 8370 - protein, 269 aa, Zea mays subsp. mays
  peptide (1)..(269): Ceres Seq. ID no. 12408517
MDPKMTEVTQMFARFKAAYARNDLNTCVTLLSQLKVHLTQFPSLPPLFQQTPNIVEELKLARDIYEHAVVLSVKLEDQDAFERDFCQLKPYYMDTCGIIPASPEEYPILGLNLLRLLVQNRIAEFHTELELLPAKALEHPCIKHAVELEQSFMEGAYNRVLSARQAVPHETYVYFIDLLAKTVRDEIAGCSEKGYDSLSVSDAKQMLMFSSDQDLHEYITEEHPEWEIKNGAVFFQKAKESQPLQGDPILAAYQPDAQLRQGAGAYCMI

SEQ ID NO: 8371 - protein, 265 aa, Zea mays subsp. mays
  peptide (1)..(265): Ceres Seq. ID no. 12408518
MTEVTQMFARFKAAYARNDLNTCVTLLSQLKVHLTQFPSLPPLFQQTPNIVEELKLARDIYEHAVVLSVKLEDQDAFERDFCQLKPYYMDTCGIIPASPEEYPILGLNLLRLLVQNRIAEFHTELELLPAKALEHPCIKHAVELEQSFMEGAYNRVLSARQAVPHETYVYFIDLLAKTVRDEIAGCSEKGYDSLSVSDAKQMLMFSSDQDLHEYITEEHPEWEIKNGAVFFQKAKESQPLQGDPILAAYQPDAQLRQGAGAYCMI

SEQ ID NO: 8372 - DNA, 1686 bp, Zea mays subsp. mays
  misc_feature (1)..(1686): Ceres Seq. ID no. 12408511
  misc_feature (1)..(1686): Ortholog of  Ceres SEQ ID NO 13503610 as cited in SEQ ID NO 62416
  misc_feature (1)..(1686): Ortholog of  Ceres SEQ ID NO 13657610 as cited in SEQ ID NO 66165
  misc_feature (1)..(1686): Ortholog of  Ceres SEQ ID NO 13598312 as cited in SEQ ID NO 68448
  misc_feature (1)..(1686): Ortholog of  Ceres SEQ ID NO 13596100 as cited in SEQ ID NO 68573
acctatagctctctccgatccatgcagagctcggtggtcatgttgtcgagcacggtggcagcggcggccatggcatcgctgcgcaccctcccgctgccggtgctggtgcccctcgtcgcctcggggctcgtcttcctggccaccgtgctccgacgcttgctaaggcggcagcggccggtgtacctcctgaactacagctgccacctcccggacgcggagcggcaggtgaacctggaggtgtgcgagtacttcggcctcaagtgtcgccgctactccgacgacatcgccgacttcatgcggctggtgtacagcaagtccggtctgggccaggagaccttcgcgccgcccttcatctactcgggcaagttcgagaagacgctggcattcgcgatccaggaggccgaggagggtctgttcgccgtcgtggagcagctcctggcaaagtcggacgtgagtcccagcgacatcagcgtcctggtggtggcctgctccatgttctccccgatgccgtcgctggcgtccatgatcatgcaccggttcaatatgcggccggatgtgaagtcgtacagcgtggccgggatgggttgcagcgcggggaccgttggcatcgacacggcggcgcggtcgctgcgctctcggcggacgcccgggtacgcgctggtggtggtgacggagaacacgagcctaaactggtacttcggcaagaacaagcacatgctggtgaccaactgcatcttccgcgtgggcagcgcggcggcgctggtgacggacgtcccgtcccggcgcccggacgccaagtacgagctggtgcgcacgctgcggacgcaccacggcgcggacgacgcggccttcaacgcggcgctgcagatggaggacgaggagggcaacctgggcgtggcgctcaccaaggacctggtccgcgtcgccggtgcggcgctgcggaggcacatcaccacgctgggtccccaggtgctgccggtgtccgagatgctccggtacgcgtggcgcgtggcgcgcgcctacgcggccgggaacagcaaggccgcggcggcggaggtgcccgacttccagcgcgcgttcgagcacttctgcatccactcgggcgggaaggcggttatcgactcgatcgccgcggctgatggggttcgggccctacgtcgtggagccggcgcgctccacgctgcaccggttcggcaacacgtccagcagtctggtgttctacgagctggcctacttcgaggccaagcgccgcgtccgggccggcgaccgcctctggatgctggcgttcgggacggggttcaaggcgtgcagcaacgtctggcgcgcgctccgcgacgccgcgcccgacgccgacaacccatggaacggatgcgtccaccgctacccagtgccgccgccgccaccgtccaagacgcacaagcatgcttgatatagtactatgtgctcctccgtcgccgcgtctcgtgcctgtgtctgcgtcgattgtttgataagcaacatcaacgaaggcgtatgtatcctagctagggaccgggtcagttgtttgatacgcttggatgcatgatgatcagctgtctcattggctccaagaagacctatgggttgtttgatttctgtgtcagtgatatgtcatatgacaacatgagtatccctgtttggaaagtgaaatatataagaaatttaaat

SEQ ID NO: 8373 - protein, 477 aa, Zea mays subsp. mays
  peptide (1)..(477): Ceres Seq. ID no. 12408512
TYSSLRSMQSSVVMLSSTVAAAAMASLRTLPLPVLVPLVASGLVFLATVLRRLLRRQRPVYLLNYSCHLPDAERQVNLEVCEYFGLKCRRYSDDIADFMRLVYSKSGLGQETFAPPFIYSGKFEKTLAFAIQEAEEGLFAVVEQLLAKSDVSPSDISVLVVACSMFSPMPSLASMIMHRFNMRPDVKSYSVAGMGCSAGTVGIDTAARSLRSRRTPGYALVVVTENTSLNWYFGKNKHMLVTNCIFRVGSAAALVTDVPSRRPDAKYELVRTLRTHHGADDAAFNAALQMEDEEGNLGVALTKDLVRVAGAALRRHITTLGPQVLPVSEMLRYAWRVARAYAAGNSKAAAAEVPDFQRAFEHFCIHSGGKAVIDSIAAADGVRALRRGAGALHAAPVRQHVQQSGVLRAGLLRGQAPRPGRRPPLDAGVRDGVQGVQQRLARAPRRRARRRQPMERMRPPLPSAAAATVQDAQACLI

SEQ ID NO: 8374 - protein, 470 aa, Zea mays subsp. mays
  peptide (1)..(470): Ceres Seq. ID no. 12408513
MQSSVVMLSSTVAAAAMASLRTLPLPVLVPLVASGLVFLATVLRRLLRRQRPVYLLNYSCHLPDAERQVNLEVCEYFGLKCRRYSDDIADFMRLVYSKSGLGQETFAPPFIYSGKFEKTLAFAIQEAEEGLFAVVEQLLAKSDVSPSDISVLVVACSMFSPMPSLASMIMHRFNMRPDVKSYSVAGMGCSAGTVGIDTAARSLRSRRTPGYALVVVTENTSLNWYFGKNKHMLVTNCIFRVGSAAALVTDVPSRRPDAKYELVRTLRTHHGADDAAFNAALQMEDEEGNLGVALTKDLVRVAGAALRRHITTLGPQVLPVSEMLRYAWRVARAYAAGNSKAAAAEVPDFQRAFEHFCIHSGGKAVIDSIAAADGVRALRRGAGALHAAPVRQHVQQSGVLRAGLLRGQAPRPGRRPPLDAGVRDGVQGVQQRLARAPRRRARRRQPMERMRPPLPSAAAATVQDAQACLI

SEQ ID NO: 8375 - protein, 464 aa, Zea mays subsp. mays
  peptide (1)..(464): Ceres Seq. ID no. 12408514
MLSSTVAAAAMASLRTLPLPVLVPLVASGLVFLATVLRRLLRRQRPVYLLNYSCHLPDAERQVNLEVCEYFGLKCRRYSDDIADFMRLVYSKSGLGQETFAPPFIYSGKFEKTLAFAIQEAEEGLFAVVEQLLAKSDVSPSDISVLVVACSMFSPMPSLASMIMHRFNMRPDVKSYSVAGMGCSAGTVGIDTAARSLRSRRTPGYALVVVTENTSLNWYFGKNKHMLVTNCIFRVGSAAALVTDVPSRRPDAKYELVRTLRTHHGADDAAFNAALQMEDEEGNLGVALTKDLVRVAGAALRRHITTLGPQVLPVSEMLRYAWRVARAYAAGNSKAAAAEVPDFQRAFEHFCIHSGGKAVIDSIAAADGVRALRRGAGALHAAPVRQHVQQSGVLRAGLLRGQAPRPGRRPPLDAGVRDGVQGVQQRLARAPRRRARRRQPMERMRPPLPSAAAATVQDAQACLI

SEQ ID NO: 8376 - DNA, 1246 bp, Zea mays subsp. mays
  misc_feature (1)..(1246): Ceres Seq. ID no. 12352601
  misc_feature (1)..(1246): Ortholog of  Ceres SEQ ID NO 15170627 as cited in SEQ ID NO 52703
  misc_feature (1)..(1246): Ortholog of  Ceres SEQ ID NO 13655124 as cited in SEQ ID NO 62896
  misc_feature (1)..(1246): Ortholog of  Ceres SEQ ID NO 13597493 as cited in SEQ ID NO 64613
  misc_feature (1)..(1246): Ortholog of  Ceres SEQ ID NO 14313540 as cited in SEQ ID NO 68110
  misc_feature (1)..(1246): Ortholog of  Ceres SEQ ID NO 13596175 as cited in SEQ ID NO 68297
  misc_feature (1)..(1246): Ortholog of  Ceres SEQ ID NO 14301898 as cited in SEQ ID NO 69243
atagttcccgtgatggtcgactgattgacactgccaacctcccaacttcccaaatatatcgtcgtcggtcaatgtcgacgagctcgcagtgcacgctcatggaaggcgctatctcccttcctcgcaacacaagcagaattgccgtggttaccggcgcgaacagaggtatcgggctagaggtgtgccggcagctggctggcaatggcgtcaccgtcgtcttgacagcagtggacgaggagctaggcgcgaaagccgtcggcaatctccaagggctagctctctccgatgttctttctcaccagctggatatcacggatgcttccagcatcgctcggttggccaacttcttgaaggcccgattcgggaagttggatatcctggtcaataatgctgcggttgctggggtcgtgtactctcaagatcatttggatgatctagaaccgagagaggaaaagttcaatctcatggatagggatcagaggcttgaatggctgtggaggaactgccgggagacctaccatgctgcaaaggaatgcctgcagacaaactactacggcacaaagcatgtgatcgaagccttgctgcctctgctgaaagcctccgatgatggaagaatcgtcaatatatcctccgactttgggttgttaaggcatttcagaaacgaggatctgaagcaagtgctgaacgacgtcggcaacctcaccgaggagcggctggacgaactgctggaccagttcctgagagacttcaaggtcggcacggcagaagcgcgcgggtggccagtggcgttcgcggcgtacaaggtgagcaaggcggccgtgaacgcgtactcgaggatgctggcggcgaagcagcccgcgctgcgcgttaactgcgcgcatcccggctacgtcaagactgacataaccttacactcggggctcctggcgccggaggagggcgcgagtaatgtggtgaaggtggcgctgctgccggacggcggggtgaccggcgccttctttgaggagggcaatgagctggcctccttcgtgtgatgtcaggatcggcctggttcgctagctgcggctgtttgccatcgcgtgagctcacggagtgtttggacccctcggtctgatgtttaagtgtgtggtagcaggatgcaagacgattctggtaataaactgattatgtttgtgaacggtgataacctgatgatgtatgtgttgtaaatttagagaacggtgataacctgatgatgtatgtgttg

SEQ ID NO: 8377 - protein, 343 aa, Zea mays subsp. mays
  peptide (1)..(343): Ceres Seq. ID no. 12352602
SSRDGRLIDTANLPTSQIYRRRSMSTSSQCTLMEGAISLPRNTSRIAVVTGANRGIGLEVCRQLAGNGVTVVLTAVDEELGAKAVGNLQGLALSDVLSHQLDITDASSIARLANFLKARFGKLDILVNNAAVAGVVYSQDHLDDLEPREEKFNLMDRDQRLEWLWRNCRETYHAAKECLQTNYYGTKHVIEALLPLLKASDDGRIVNISSDFGLLRHFRNEDLKQVLNDVGNLTEERLDELLDQFLRDFKVGTAEARGWPVAFAAYKVSKAAVNAYSRMLAAKQPALRVNCAHPGYVKTDITLHSGLLAPEEGASNVVKVALLPDGGVTGAFFEEGNELASFV

SEQ ID NO: 8378 - protein, 320 aa, Zea mays subsp. mays
  peptide (1)..(320): Ceres Seq. ID no. 12352603
MSTSSQCTLMEGAISLPRNTSRIAVVTGANRGIGLEVCRQLAGNGVTVVLTAVDEELGAKAVGNLQGLALSDVLSHQLDITDASSIARLANFLKARFGKLDILVNNAAVAGVVYSQDHLDDLEPREEKFNLMDRDQRLEWLWRNCRETYHAAKECLQTNYYGTKHVIEALLPLLKASDDGRIVNISSDFGLLRHFRNEDLKQVLNDVGNLTEERLDELLDQFLRDFKVGTAEARGWPVAFAAYKVSKAAVNAYSRMLAAKQPALRVNCAHPGYVKTDITLHSGLLAPEEGASNVVKVALLPDGGVTGAFFEEGNELASFV

SEQ ID NO: 8379 - protein, 311 aa, Zea mays subsp. mays
  peptide (1)..(311): Ceres Seq. ID no. 12352604
MEGAISLPRNTSRIAVVTGANRGIGLEVCRQLAGNGVTVVLTAVDEELGAKAVGNLQGLALSDVLSHQLDITDASSIARLANFLKARFGKLDILVNNAAVAGVVYSQDHLDDLEPREEKFNLMDRDQRLEWLWRNCRETYHAAKECLQTNYYGTKHVIEALLPLLKASDDGRIVNISSDFGLLRHFRNEDLKQVLNDVGNLTEERLDELLDQFLRDFKVGTAEARGWPVAFAAYKVSKAAVNAYSRMLAAKQPALRVNCAHPGYVKTDITLHSGLLAPEEGASNVVKVALLPDGGVTGAFFEEGNELASFV

SEQ ID NO: 8380 - DNA, 1741 bp, Zea mays subsp. mays
  misc_feature (1)..(1741): Ceres Seq. ID no. 12405430
  misc_feature (1)..(1741): Ortholog of  Ceres SEQ ID NO 13596299 as cited in SEQ ID NO 68023
aaaacctcgtctcgcctccttcagtccatcccctcaaccccggcggccaaaagccggcgcaccgaagcggcgggccggcggcaagcggtggccatggcggagctaaagcggctgtcagagagccgggacctgacgcggatcgagcgcatcggcgcgcactcccacatccgggggctagggctggactcctccatggaggcgcgcgacgcctcggagggcatggtcgggcagctgcccgcgcgccgcgccgcggggctcatactccagctcatccgccagggcaagatcgccggccgcgccgttctcctcgcgggccagcccggcaccggcaagaccgcgctcgccatgggcatcgccaagtcgctcggcgcggagacgcccttcgcctccgtcgccgcctcggagctcttctcgctcgacctctccaagacggaggcgctcacgcaggccttccgccgcgccatcggcgtgcgcatcaaggaggagacggaaatcatcgagggcgaggtcgtggagatcttgatcgaccgccctttgtcggcctctgccgctggcggcagctcggctgcccctacaggtgctactgcggctggtaagtcgggtcggctcacgctgaagaccacggacatggaaacggtgtacgagctcgggggaaagatgattgaggctcttgggaaggagaaggtgcagagcggggatgtgattgcgcttgacaaggcctccgggaaggtcaccaagcttggacgctccattgggaggtcgcgggattatgatgccgttggcccgcacaccaagtttgtcaagtgtcctgatggcgagctccagaagcgcaaggagatcgtgcactgtgttaccttacatgagattgatgtcattaatagcaggacacagggttttcttgcactgttcactggtgacaccggtgaaattcgtgcagaggttcgggagcagattgacacaaaagtcgcagagtggagagaggaaggaaaagctgatattgtccctggtgttctgttcatcgatgaagttcacatgctagacattgagtgcttctccttcctcaaccgagcattggaaaatgacatggctccgatcctagtaatcgcaacaaacagagggatcacatccattcgtgggacaaactaccgctcgccacacgggatcccgccagacttccttgaccggttactgatcatcacgacgcagccctacacggaggacgagatcaggaagatcctggacatccggtgcgatgaggaggatgtggagatgtccgcggacgccaaggtcctgctcaccaaaatcggcgtggagacctcgctgcggtacgccatcaaccttatcacatctgccgcactagcctgccagaggcgcaaggggaaggtggtcgacatggaggacattagccgggtgtaccagttgttcctggacgtgaagcggtcgacgcagtacctgatggagtaccagagccagtacatgttcaacgaagtgcccggggaagcagatggagaggacgcgatgcaatcctagatgaacttttcttcaccaggtgtctgtgttagtatgtactgcgtgtctgcgtcgtctatttctggtgcatcttgcttgtttagttgctgttatttcctgacaaggcgtggtgtgtgcgatggactgcctgaaagctgatttaggtaactatatatgcaattcagatgtatcttagtaaaattcaccccagttggagtgacattgtttgttt

SEQ ID NO: 8381 - protein, 509 aa, Zea mays subsp. mays
  peptide (1)..(509): Ceres Seq. ID no. 12405431
KTSSRLLQSIPSTPAAKSRRTEAAGRRQAVAMAELKRLSESRDLTRIERIGAHSHIRGLGLDSSMEARDASEGMVGQLPARRAAGLILQLIRQGKIAGRAVLLAGQPGTGKTALAMGIAKSLGAETPFASVAASELFSLDLSKTEALTQAFRRAIGVRIKEETEIIEGEVVEILIDRPLSASAAGGSSAAPTGATAAGKSGRLTLKTTDMETVYELGGKMIEALGKEKVQSGDVIALDKASGKVTKLGRSIGRSRDYDAVGPHTKFVKCPDGELQKRKEIVHCVTLHEIDVINSRTQGFLALFTGDTGEIRAEVREQIDTKVAEWREEGKADIVPGVLFIDEVHMLDIECFSFLNRALENDMAPILVIATNRGITSIRGTNYRSPHGIPPDFLDRLLIITTQPYTEDEIRKILDIRCDEEDVEMSADAKVLLTKIGVETSLRYAINLITSAALACQRRKGKVVDMEDISRVYQLFLDVKRSTQYLMEYQSQYMFNEVPGEADGEDAMQS

SEQ ID NO: 8382 - protein, 478 aa, Zea mays subsp. mays; identical to SEQ ID NO: 6964
  peptide (1)..(478): Ceres Seq. ID no. 12405432

SEQ ID NO: 8383 - protein, 445 aa, Zea mays subsp. mays; identical to SEQ ID NO: 6965
  peptide (1)..(445): Ceres Seq. ID no. 12405433

SEQ ID NO: 8384 - DNA, 1479 bp, Zea mays subsp. mays
  misc_feature (1)..(1479): Ceres Seq. ID no. 12343690
  misc_feature (1)..(1479): Ortholog of  Ceres SEQ ID NO 14313264 as cited in SEQ ID NO 67300
  misc_feature (1)..(1479): Ortholog of  Ceres SEQ ID NO 14302824 as cited in SEQ ID NO 67794
gcatctccctttaccattgtctcccccctcgtccgtcctcctcgccgccgcagaccaccgccgccgccgccgctgccgctgcgaacccttgtgaatcttcgttgtccgggctgtggggggcaggcatggcgctccggaggctgctgcaggggagcgtcctgccgcggataatcggcagggatttggcaccggccgtggcgccgttttcaacggagtctggggagaccattcgtgccacgctctttcccggcgatggcatcgggccagagatcgctgagtctgtcaagcaggtattcaatgttgcaggggtaccaattgaatgggaagaacactatgtcagtacagaagttgatcccagaacagagagttttttgacttgggaaagcctggagtcagtgcgtagaaataaagttggcttgaaaggacctatggctacacctattggaaagggccatcgatctttgaatcttacattaaggaaagaacttgggctctatgccaatgtcagaccttgcaacagcctcccaggttacaagaccagatacgatgatgttaaccttgtaacaattcgtgaaaatactgaaggagaatatagtggtcttgagcatcaggttgtgagaggtgttgtggaaagtttgaaaattattacacgccaagcaagtttgagagtggcagagtatgctttccattatgccaaggccaatggccgggaaagagtctctgcgatccacaaagccaatattatgaggaagacagatggtcttttcctcaagtgttgccgtgaagtggctgaaaagtaccctgaaattcaatacgaggaggtcatcattgacaattgctgtatgacgcttgtgaagaatcctggtctttttgacgtattagtgatgccaaatctctatggtgacattattagtgatctatgtgctggtttgatcgggggcttgggcctaacacccagttgcaatattggtgaaggtggcattttctggcagaagctgttcatggttctgctcctgatattgctggcaagaacctcgcgaacccgactgctcttatgctgagtgctgtcatgttgttgcgccacatgcaattcaacgacaaagcagaccggatccacaacgccatcctccagaccatcgccgaggggaagtacaggactgctgatcttggtggaaaggcatcgacatcagagtttacaaacgcagtctgtgatcacatctgagaaacggatgtgattcttccttctgattgttttgtcatcctaatattttttgtcacatatgagaggagctttagctttaagaggttaactggcagcacctcgaacttctttggggtgtttaacacggtttgagaccgtcaaataattttgtcacatttcttgctgttcagaaattctttcaacattggaatggagccaagaattgtctgtaataatcaacatcagcattataacagtatgtagggtttatcttattc

SEQ ID NO: 8385 - protein, 352 aa, Zea mays subsp. mays
  peptide (1)..(352): Ceres Seq. ID no. 12343691
ISLYHCLPPRPSSSPPQTTAAAAAAAANPCESSLSGLWGAGMALRRLLQGSVLPRIIGRDLAPAVAPFSTESGETIRATLFPGDGIGPEIAESVKQVFNVAGVPIEWEEHYVSTEVDPRTESFLTWESLESVRRNKVGLKGPMATPIGKGHRSLNLTLRKELGLYANVRPCNSLPGYKTRYDDVNLVTIRENTEGEYSGLEHQVVRGVVESLKIITRQASLRVAEYAFHYAKANGRERVSAIHKANIMRKTDGLFLKCCREVAEKYPEIQYEEVIIDNCCMTLVKNPGLFDVLVMPNLYGDIISDLCAGLIGGLGLTPSCNIGEGGIFWQKLFMVLLLILLARTSRTRLLLC

SEQ ID NO: 8386 - protein, 311 aa, Zea mays subsp. mays
  peptide (1)..(311): Ceres Seq. ID no. 12343692
MALRRLLQGSVLPRIIGRDLAPAVAPFSTESGETIRATLFPGDGIGPEIAESVKQVFNVAGVPIEWEEHYVSTEVDPRTESFLTWESLESVRRNKVGLKGPMATPIGKGHRSLNLTLRKELGLYANVRPCNSLPGYKTRYDDVNLVTIRENTEGEYSGLEHQVVRGVVESLKIITRQASLRVAEYAFHYAKANGRERVSAIHKANIMRKTDGLFLKCCREVAEKYPEIQYEEVIIDNCCMTLVKNPGLFDVLVMPNLYGDIISDLCAGLIGGLGLTPSCNIGEGGIFWQKLFMVLLLILLARTSRTRLLLC

SEQ ID NO: 8387 - protein, 210 aa, Zea mays subsp. mays
  peptide (1)..(210): Ceres Seq. ID no. 12343693
MATPIGKGHRSLNLTLRKELGLYANVRPCNSLPGYKTRYDDVNLVTIRENTEGEYSGLEHQVVRGVVESLKIITRQASLRVAEYAFHYAKANGRERVSAIHKANIMRKTDGLFLKCCREVAEKYPEIQYEEVIIDNCCMTLVKNPGLFDVLVMPNLYGDIISDLCAGLIGGLGLTPSCNIGEGGIFWQKLFMVLLLILLARTSRTRLLLC

SEQ ID NO: 8388 - DNA, 1221 bp, Zea mays subsp. mays
  misc_feature (1)..(1221): Ceres Seq. ID no. 12413244
  misc_feature (1)..(1221): Ortholog of  Ceres SEQ ID NO 14304969 as cited in SEQ ID NO 53193
  misc_feature (1)..(1221): Ortholog of  Ceres SEQ ID NO 14307442 as cited in SEQ ID NO 54239
  misc_feature (1)..(1221): Ortholog of  Ceres SEQ ID NO 14302561 as cited in SEQ ID NO 56543
  misc_feature (1)..(1221): Ortholog of  Ceres SEQ ID NO 15177710 as cited in SEQ ID NO 59217
  misc_feature (1)..(1221): Ortholog of  Ceres SEQ ID NO 12614814 as cited in SEQ ID NO 68816
  misc_feature (1)..(1221): Ortholog of  Ceres SEQ ID NO 13624040 as cited in SEQ ID NO 0
gtcctctcttcttccaccaccacctcctactccgctgcaaccccaaatctctccttcctcgcatacgcgcgcagcggaggagctgagaccaacgaagaagaagaagaacaaccgagcaagcacaagcttagctagcgtgtaggtgtccaaggcgacgacggccgccgcgccaggctagccaaccagctgctcatcgctcctagctgcggagccgatatggctggcgccgacgtcgacgtcgggacggagctccgtctcggcctgccgggaggaggcgccgatgcggccaaggctgccaagaggggcttcgaggacaccatcgacctcaagctgaagctgcccaccgccggcatggaggaagctgccgccgccgccgccgccgccgccaagcccgagccggcagccgagaaggccaagaggcccgccgaggcgccggccgctgatgccgagaagccacccgcacccaaggcacaagctgtgggttggccaccagtccggtcataccgcaggaacgtcatgaccgtccagtctgtgaagagcaagaaggaagaggagcctgagaagcagcagtccgctgccaacgccggcggcaacggctccgccttcgtgaaggtcagcatggacggcgcgccctacctgcgcaaggtggacctgaagatgtacaacagcntacacggagctctccgttgctctgaagaagatgttcagcaccttcaccacatccgggaacaacatgaatgagggaaaactggttgatccggtcagcggtgctgatgtggtcactacttacgaagacaaggatggcgactggatgctcgttggcgacgtcccgtgggagatgtttgtcgagtcatgcaggcgtctgaggatcatgaagagttctgaagccataggtcttgcaccaagaacgaaggacaagtgcaagaacaggagctgaagaagatacagcgttaaagacgctgcccattgtgtcaaaagaatggtgcccttgcagtgtgctgcggtttttctagaaatataatgcgttttaattactagttggagggagacctgtcttgttcaatttgttcatggaccagaagcaataatctatctgtgtgtagctggattggtgttatgcgatgtcccctaccgtgtcccagaatctacttggtgattttatcccagtgttgttaatcaagcttgtgtgattgttaagtaaagggcatcaatgagactatt

SEQ ID NO: 8389 - protein, 174 aa, Zea mays subsp. mays
  peptide (1)..(174): Ceres Seq. ID no. 12413245
  misc_feature (152)..(152): Xaa is any aa, unknown or other
MAGADVDVGTELRLGLPGGGADAAKAAKRGFEDTIDLKLKLPTAGMEEAAAAAAAAAKPEPAAEKAKRPAEAPAADAEKPPAPKAQAVGWPPVRSYRRNVMTVQSVKSKKEEEPEKQQSAANAGGNGSAFVKVSMDGAPYLRKVDLKMYNSXHGALRCSEEDVQHLHHIREQHE

SEQ ID NO: 8390 - protein, 129 aa, Zea mays subsp. mays
  peptide (1)..(129): Ceres Seq. ID no. 12413246
  misc_feature (107)..(107): Xaa is any aa, unknown or other
MEEAAAAAAAAAKPEPAAEKAKRPAEAPAADAEKPPAPKAQAVGWPPVRSYRRNVMTVQSVKSKKEEEPEKQQSAANAGGNGSAFVKVSMDGAPYLRKVDLKMYNSXHGALRCSEEDVQHLHHIREQHE

SEQ ID NO: 8391 - DNA, 782 bp, Zea mays subsp. mays
  misc_feature (1)..(782): Ceres Seq. ID no. 12412537
  misc_feature (1)..(782): Ortholog of  Ceres SEQ ID NO 15173608 as cited in SEQ ID NO 57605
actcagcccactacctttcagatttttcctcatctgccgccgcctgcacccaacaagcctctcgacgctagtcatggccgcttccaacggcgccgccgcggtcgacgagaccgtcgccgccaccgactccgtgcaggagcctccccagaagatctccaagatctctcccctgctcaaggtgaagaagctctccgagaaggccgtgctgccgtcccgcggctccgctctcgccgccggctacgacctctcgagcgccgaggagatggtggtgccggcgcgtggcaaggcgctcgtgccgaccgacctcagcgtcgccatcccgcacggaacctacgcgcgcatcgcgcccaggtcggggctggcgctgaagcactccatcgacgtgggcgccggcgtgatcgacgcggactaccgagggccccgtcggcgtcatcctcttcaaccactccgacgccgacttcgccgtgaagcccggcgacaggatcgcgcagatgatcatcgaggtgatcgcgacgcccgaggtcgcggaggtggaggacctcgacgccaccgtccgtggggacggagggttcgggtccaccggcgtctgaagggattcggtgtctaggttaggatggcgatgcaagccttggtgtcttttgttggctctaagaaatcgtgatgttcaccatcactatcctgctatcgataattagtattgagattagtacgtaggttgcgtagttagctcgatgcacgtactattgtcgagaactcgctattctgtgatgttgaaaatgtct

SEQ ID NO: 8392 - protein, 201 aa, Zea mays subsp. mays
  peptide (1)..(201): Ceres Seq. ID no. 12412538
LSPLPFRFFLICRRLHPTSLSTLVMAASNGAAAVDETVAATDSVQEPPQKISKISPLLKVKKLSEKAVLPSRGSALAAGYDLSSAEEMVVPARGKALVPTDLSVAIPHGTYARIAPRSGLALKHSIDVGAGVIDADYRGPRRRHPLQPLRRRLRREARRQDRADDHRGDRDARGRGGGGPRRHRPWGRRVRVHRRLKGFGV

SEQ ID NO: 8393 - protein, 177 aa, Zea mays subsp. mays
  peptide (1)..(177): Ceres Seq. ID no. 12412539
MAASNGAAAVDETVAATDSVQEPPQKISKISPLLKVKKLSEKAVLPSRGSALAAGYDLSSAEEMVVPARGKALVPTDLSVAIPHGTYARIAPRSGLALKHSIDVGAGVIDADYRGPRRRHPLQPLRRRLRREARRQDRADDHRGDRDARGRGGGGPRRHRPWGRRVRVHRRLKGFGV

SEQ ID NO: 8394 - protein, 155 aa, Zea mays subsp. mays
  peptide (1)..(155): Ceres Seq. ID no. 12412540
TQPTTFQIFPHLPPPAPNKPLDASHGRFQRRRRGRRDRRRHRLRAGASPEDLQDLSPAQGEEALREGRAAVPRLRSRRRLRPLERRGDGGAGAWQGARADRPQRRHPARNLRAHRAQVGAGAEALHRRGRRRDRRGLPRAPSASSSSTTPTPTSP

SEQ ID NO: 8395 - DNA, 1038 bp, Zea mays subsp. mays
  misc_feature (1)..(1038): Ceres Seq. ID no. 12412533
  misc_feature (1)..(1038): Ortholog of  Ceres SEQ ID NO 13596609 as cited in SEQ ID NO 63070
  misc_feature (1)..(1038): Ortholog of  Ceres SEQ ID NO 12616895 as cited in SEQ ID NO 63909
  misc_feature (1)..(1038): Ortholog of  Ceres SEQ ID NO 13598574 as cited in SEQ ID NO 69083
agttgcctttaagctcgcacgcgaaccgtcccacactctgcgcaagccactgccgctgccgctgccgccgccgccgccgccttcagtctccgtctccaccggtgccctcgtctcccagccgctgccgccgccgccgccgccccgtgagagccggcgcagcaatccggttgcttggggacgcagcgaggatgggcagcaccagcgcgttcgtcatcaggtggatcaacttcttcaccatgatactggcgctactggtggtgggcttcgggttctggatgagcacccacgacgacgagtgcaggcggaccttgaccgtccccgtcatcgccctcggtggagtgatcttcctcatatcgctcgtcggattccttggtgcctggaagaacatctcctgcttgctctggacatatctgatcatgctgttcgtggtcttggtggcaatcatggtgttcacggtgctcgcgtttatcataacaaactccggaagtggccatactgttcctggggctaggtataaagagtaccgtctccaggactacagctcctggtttgtcaaacagctcgatgacacggagaaatgggctcgcctgaaaagctgcctggtgaagatagatgactgcaatagcctgtcgagaagatacaagaccgcgagagaatacaagctcgcggacctcactcccatggagtcgggttgctgccgcccgccagcagagtgcgggttcccagctctgaacgcgtcctatttcgatctgagctatcacccggcgagcgccaacgccgactgcaaactgtacaggaacgcgcgctctgtccggtgctacgactgcggcggcggcggctggagggactgatgtgtgggcccatcctggcttcggccgagttatcttatctatctatagtatcgtgttaccgttcgcttctgtcaccgtgttagtgtccgttctacctttggattaggtgttggtacccctgttgttccctttggttgctcccgctatgaaacgagacgagagaagaatgagcaaggtttttgttcgc

SEQ ID NO: 8396 - protein, 282 aa, Zea mays subsp. mays
  peptide (1)..(282): Ceres Seq. ID no. 12412534
LPLSSHANRPTLCASHCRCRCRRRRRLQSPSPPVPSSPSRCRRRRRPVRAGAAIRLLGDAARMGSTSAFVIRWINFFTMILALLVVGFGFWMSTHDDECRRTLTVPVIALGGVIFLISLVGFLGAWKNISCLLWTYLIMLFVVLVAIMVFTVLAFIITNSGSGHTVPGARYKEYRLQDYSSWFVKQLDDTEKWARLKSCLVKIDDCNSLSRRYKTAREYKLADLTPMESGCCRPPAECGFPALNASYFDLSYHPASANADCKLYRNARSVRCYDCGGGGWRD

SEQ ID NO: 8397 - protein, 220 aa, Zea mays subsp. mays
  peptide (1)..(220): Ceres Seq. ID no. 12412535
MGSTSAFVIRWINFFTMILALLVVGFGFWMSTHDDECRRTLTVPVIALGGVIFLISLVGFLGAWKNISCLLWTYLIMLFVVLVAIMVFTVLAFIITNSGSGHTVPGARYKEYRLQDYSSWFVKQLDDTEKWARLKSCLVKIDDCNSLSRRYKTAREYKLADLTPMESGCCRPPAECGFPALNASYFDLSYHPASANADCKLYRNARSVRCYDCGGGGWRD

SEQ ID NO: 8398 - protein, 204 aa, Zea mays subsp. mays
  peptide (1)..(204): Ceres Seq. ID no. 12412536
MILALLVVGFGFWMSTHDDECRRTLTVPVIALGGVIFLISLVGFLGAWKNISCLLWTYLIMLFVVLVAIMVFTVLAFIITNSGSGHTVPGARYKEYRLQDYSSWFVKQLDDTEKWARLKSCLVKIDDCNSLSRRYKTAREYKLADLTPMESGCCRPPAECGFPALNASYFDLSYHPASANADCKLYRNARSVRCYDCGGGGWRD

SEQ ID NO: 8399 - DNA, 862 bp, Zea mays subsp. mays
  misc_feature (1)..(862): Ceres Seq. ID no. 12401768
  misc_feature (1)..(862): Ortholog of  Ceres SEQ ID NO 15178359 as cited in SEQ ID NO 0
gcacgagaccattacctagaacatcctaatcgaaaaatctgagatacagacagattaatcaacgcccgcacctcctatgggcacgaccggcgacgctccggctccggcgggggatccgcaggaccgccaccgtacccaccccccggcggcgaagcagcggacgacgctggtgttcacgtacgggacgctgaagcgcggcttctccaaccaccgcctcctggaggagctcttcgcgagcggggacgcgtcgctggtgggccccgcggtgacgtcggcgcggctgccgctggtgtgcgggccgtaccgggtgccgttcctgctgaacctccccggcgccggcgccggggcgcaccgcgtgcgcggggaggcgtacgcggtgacggcccgcgggcttgcgcggctggacgagctggagggcgtggagacggggcactacgagcggctggccgtggccgtggacctcgagggcggcggcggcggcggcggcggcgcggtggatgcgatcgcctacttcgcgcaccggagctacgccaacgacatgtggcggcgcagcggggagaagggcgtccccgagtacacccacggcgtggcagccgggtatgtccggcgcaaggaccggccgcaggggcagacgttcctggagcagatccggatcttcaattcgtctcctcccaatccgcttaataatccctcctagctcgcgctgcctcaactccttcaattcagtttctccgatccgtgtcatacatgatccatataatattatgggatgtatgtggtcagatcgagaaggtgtgttatgtttaatctagacatggtctatattttatttaattatgtcaaataaattttatatcttcgc

SEQ ID NO: 8400 - protein, 206 aa, Zea mays subsp. mays
  peptide (1)..(206): Ceres Seq. ID no. 12401769
MGTTGDAPAPAGDPQDRHRTHPPAAKQRTTLVFTYGTLKRGFSNHRLLEELFASGDASLVGPAVTSARLPLVCGPYRVPFLLNLPGAGAGAHRVRGEAYAVTARGLARLDELEGVETGHYERLAVAVDLEGGGGGGGGAVDAIAYFAHRSYANDMWRRSGEKGVPEYTHGVAAGYVRRKDRPQGQTFLEQIRIFNSSPPNPLNNPS

SEQ ID NO: 8401 - protein, 104 aa, Zea mays subsp. mays
  peptide (1)..(104): Ceres Seq. ID no. 12401770
MRSPTSRTGATPTTCGGAAGRRASPSTPTAWQPGMSGARTGRRGRRSWSRSGSSIRLLPIRLIIPPSSRCLNSFNSVSPIRVIHDPYNIMGCMWSDREGVLCLI

SEQ ID NO: 8402 - DNA, 1189 bp, Zea mays subsp. mays
  misc_feature (1)..(1189): Ceres Seq. ID no. 12401601
  misc_feature (1)..(1189): Ortholog of  Ceres SEQ ID NO 13491587 as cited in SEQ ID NO 20500
  misc_feature (1)..(1189): Ortholog of  Ceres SEQ ID NO 15169711 as cited in SEQ ID NO 54274
acgagaaacaccccacgtctcaagctgcccctttctcaccgccgcggccgccacgcgcagcagcaaccgagcaggagcgcagccagcaagctcaggcccgagccctactgcaaccgccgctgctaccgcactgaacaccatggccgacccggcggagcaccgtccagcggaggaggacgaggaagccgcggcggccggcgaggatgaggacaccggcgctcaggtcgcgcccatcgtgaagctggaggaggtcgccgttaccaccggagaggaggacgaggacgtacttgtcgacatgaaggcgaagctctaccggttcgacaaggaggcgaaccagtggaaagaacgtggcacaggcactgtgaagctgcttaagcacaaggagaccgccaaggtccgcctcgtcatgcgtcaggcgaagacgcttaagatctgtgctaaccatcttgtggtggcgacgactaagatgcaggagcacgcagggagcgacaagtcgtgcgtgtggcacgcgctggacttcgccgacggtgagctcaaggaggagatgtttgctatccgttttggatctgtcgagaattgcaagaagttcaaggacactgttgaagagatagctgaagagcaaggaaagaccgaggtgaaagaaaacgaggaagtctccattgccgccgcagatttggtacagaagttaacagtgacagaggctagcaaggagggagatgcagaggaagaggaggctcctgcatctgaccataagaaggatgctaaagggtaaagattgaaggcaaacaaggccaaatgattatgattccattcatttcgttgtcaaggttcatcttccccacaaattttcattacaaagtttcattgcattttctcctgagatgatttgtgtgtgtgtgtgtgtgtgtgtgtgttgggtgaaatctgagttgtcagtcatctacatgtctttcttggttgttagacttattctcagtcgcctgtttatctgggatggctaggtacatcatgtttgtacaattatttggggttgattttggaatggctctaaagctcgagatgagatagatggtatcatggtagttattagtgatgatttcttttcgcttcttgttcgttcgttctgaaataatatgggatgctttgttatacttgttgatccattattagcttgatgcatcgttgatcc

SEQ ID NO: 8403 - protein, 256 aa, Zea mays subsp. mays
  peptide (1)..(256): Ceres Seq. ID no. 12401602
RETPHVSSCPFLTAAAATRSSNRAGAQPASSGPSPTATAAATALNTMADPAEHRPAEEDEEAAAAGEDEDTGAQVAPIVKLEEVAVTTGEEDEDVLVDMKAKLYRFDKEANQWKERGTGTVKLLKHKETAKVRLVMRQAKTLKICANHLVVATTKMQEHAGSDKSCVWHALDFADGELKEEMFAIRFGSVENCKKFKDTVEEIAEEQGKTEVKENEEVSIAAADLVQKLTVTEASKEGDAEEEEAPASDHKKDAKG

SEQ ID NO: 8404 - protein, 210 aa, Zea mays subsp. mays; identical to SEQ ID NO: 7811
  peptide (1)..(210): Ceres Seq. ID no. 12401603

SEQ ID NO: 8405 - protein, 158 aa, Zea mays subsp. mays; identical to SEQ ID NO: 7812
  peptide (1)..(158): Ceres Seq. ID no. 12401604

SEQ ID NO: 8406 - DNA, 1628 bp, Zea mays subsp. mays
  misc_feature (1)..(1628): Ceres Seq. ID no. 12405418
  misc_feature (1)..(1628): Ortholog of  Ceres SEQ ID NO 13597656 as cited in SEQ ID NO 65561
ccctcctccccgcgccgccataccctccaacccgagaggaaccctaacaccaaaacgcccccggaggcagctaggagagctcgaatcaccagccatgtcggagcacgacctcacggcgctgatggcggcgcagctggaccgccacctggtgttccccctgctggagttcctccaggagcggcagctctactcggagtcggagatcctggaggccaagatccgcctcctcagcggcaccaacatggtcgactacgccatggacatccacaagtccctctacggcaccgacgacgtgcccgaggacatggtgaagcgccgcgccgaggtcgtctccaggctcaggtcgctcgaggaggccgcagccccgctcgtcgccttcctccagaacccgcagctcgtgcaggagttcaggcccgacaaacagtacaacatccacatgctccaggagcgataccagattggtcctgaccagattgaagctctgtatcagtatgccaaatttcagtttgagtgcggtaactactcaggggctgctgattacctgtaccagtatcgtgctttgtgcacaaacagtgagcgaaatgtgagtgccctctggggaaagctggcagcagaaatcctaatgcagaactgggacgtagctttggaggaactcaaccgcttgaaggaaataattgattcaaagaacttctcatcacctctgaatcagctccagaacaggatatggctgatgcattgggctctgttcatcttctttaaccatgaaaatggtagaaatgggatcattgatctgttcttccaggacaggtacttgaatgctatacagacaaatgcacaccatcttattaggtatctagctactgcagttgttgtcaacaaaaggagaaggaatatgcttaaagagttgattaaggtcattcaacaggagcaccatagctacaaggatcccgtaactgaatttctggaatgcttatatgttaactatgattttgatggtgctcaacagaaactcatagagtgtgagcaggttatactcaatgatccattcctgggaaagcgcattgaagagggaaattttgtcagtgttcctttgagagatgagttccttgagaatgctaggctgtttattttcgagacatactgccgtatccatcggtgcatcgatatcagcatgctttctcagaagttgaacatgagctacgatgaggccgagttgtggatcatgaatttggttagaagctcaaaactggatgccaggatcgattcagtatcaggaactctcatcatgacaaccaatcacgtcaatgtccatgagcagattgttgagagcttgaagggccttaatatgaggacctacatgctcgcaaagaacatcgttgagccagctcagcaggcaactcggtgaggatagcagacttcacagttttgagacgccaaggactagtttagagacaactgtaaacttttcgagctctattgtgtggcattggatttcaacacatggaaggtggcttgccgtttgatacagcttggaatattatgctgacattttcaatattttgtaatcggaatttcgtaacagtggatccttctcaatgtattgctattattttatgctgacattttct

SEQ ID NO: 8407 - protein, 467 aa, Zea mays subsp. mays
  peptide (1)..(467): Ceres Seq. ID no. 12405419
PPPRAAIPSNPRGTLTPKRPRRQLGELESPAMSEHDLTALMAAQLDRHLVFPLLEFLQERQLYSESEILEAKIRLLSGTNMVDYAMDIHKSLYGTDDVPEDMVKRRAEVVSRLRSLEEAAAPLVAFLQNPQLVQEFRPDKQYNIHMLQERYQIGPDQIEALYQYAKFQFECGNYSGAADYLYQYRALCTNSERNVSALWGKLAAEILMQNWDVALEELNRLKEIIDSKNFSSPLNQLQNRIWLMHWALFIFFNHENGRNGIIDLFFQDRYLNAIQTNAHHLIRYLATAVVVNKRRRNMLKELIKVIQQEHHSYKDPVTEFLECLYVNYDFDGAQQKLIECEQVILNDPFLGKRIEEGNFVSVPLRDEFLENARLFIFETYCRIHRCIDISMLSQKLNMSYDEAELWIMNLVRSSKLDARIDSVSGTLIMTTNHVNVHEQIVESLKGLNMRTYMLAKNIVEPAQQATR

SEQ ID NO: 8408 - protein, 436 aa, Zea mays subsp. mays
  peptide (1)..(436): Ceres Seq. ID no. 12405420
MSEHDLTALMAAQLDRHLVFPLLEFLQERQLYSESEILEAKIRLLSGTNMVDYAMDIHKSLYGTDDVPEDMVKRRAEVVSRLRSLEEAAAPLVAFLQNPQLVQEFRPDKQYNIHMLQERYQIGPDQIEALYQYAKFQFECGNYSGAADYLYQYRALCTNSERNVSALWGKLAAEILMQNWDVALEELNRLKEIIDSKNFSSPLNQLQNRIWLMHWALFIFFNHENGRNGIIDLFFQDRYLNAIQTNAHHLIRYLATAVVVNKRRRNMLKELIKVIQQEHHSYKDPVTEFLECLYVNYDFDGAQQKLIECEQVILNDPFLGKRIEEGNFVSVPLRDEFLENARLFIFETYCRIHRCIDISMLSQKLNMSYDEAELWIMNLVRSSKLDARIDSVSGTLIMTTNHVNVHEQIVESLKGLNMRTYMLAKNIVEPAQQATR

SEQ ID NO: 8409 - protein, 427 aa, Zea mays subsp. mays
  peptide (1)..(427): Ceres Seq. ID no. 12405421
MAAQLDRHLVFPLLEFLQERQLYSESEILEAKIRLLSGTNMVDYAMDIHKSLYGTDDVPEDMVKRRAEVVSRLRSLEEAAAPLVAFLQNPQLVQEFRPDKQYNIHMLQERYQIGPDQIEALYQYAKFQFECGNYSGAADYLYQYRALCTNSERNVSALWGKLAAEILMQNWDVALEELNRLKEIIDSKNFSSPLNQLQNRIWLMHWALFIFFNHENGRNGIIDLFFQDRYLNAIQTNAHHLIRYLATAVVVNKRRRNMLKELIKVIQQEHHSYKDPVTEFLECLYVNYDFDGAQQKLIECEQVILNDPFLGKRIEEGNFVSVPLRDEFLENARLFIFETYCRIHRCIDISMLSQKLNMSYDEAELWIMNLVRSSKLDARIDSVSGTLIMTTNHVNVHEQIVESLKGLNMRTYMLAKNIVEPAQQATR

SEQ ID NO: 8410 - DNA, 1193 bp, Zea mays subsp. mays
  misc_feature (1)..(1193): Ceres Seq. ID no. 13498586
  misc_feature (1)..(1193): Ortholog of  Ceres SEQ ID NO 13595668 as cited in SEQ ID NO 56792
gctttacaactccccaccccatcccatccacacacacttcacccagcgcggcggccgccggccgccggcaatggaggccgtggcgcgcagcggcactacctttggcggttcgtgcggagacagagtggtacaacgaggttgtcctcagcgccgtggcgccaggcgactggtggcgcggcctgccgcacccggtgcagtcatggatgcgcaactgcgtcggcggttacctcctctatttcatctctggtttcctctggtgcttcgtcatctactactggaagcgccacgcctacatccccaaagatgccatccccacaaatgaagctatgaagaagcaaatagttgtagcatcgaaggctatgcctttttactgcgctcttccaactttatctgaatatatgattgagagcggatggactcggtgctacttcaatatcagcgaaattggtttttctatgtacctctgttatatggctatgtatctcatctttgtggagtttggaatttactggatgcacagggagttgcatgacataaaaccattatacaaatatctgcatgcaacccaccatatttacaacaaggagaataccttgtctccatttgctggacttgcatttcatccactggatggtattctgcaagcaataccgcatgtgttcgcgctcttcctctttccaacacacttcaggacacatattgcactcttgttcctagaggctgtgtggacaacaaacatccacgactgcattcatggcaagatatggccagtcatgggcgctggatatcacaccattcaccatacgacttaccgccacaactatggccactacaccatctggatggactggatgtttggtacgctcaatgagccagaagatatcctcaagaaggcttgagtttctcggagctgtggtatccctatggtgctggtgctggaactgctcgatctgttcccagtgtttctaatccgttgagcctgttcagcactgtctgtttatgtaggcatcagtgtgttaattagtttgctaggttcatatggctttgtgcttattctgtaatttagtgatgtttgtctcatgacgcaacggagttcaggacgaataaaactttgctagacacattctggattccagttgcttgtacaatgttgcaactcaactgtcaatataggatgtaaaacggattccttc

SEQ ID NO: 8411 - protein, 298 aa, Zea mays subsp. mays
  peptide (1)..(298): Ceres Seq. ID no. 13498587
FTTPHPIPSTHTSPSAAAAGRRQWRPWRAAALPLAVRAETEWYNEVVLSAVAPGDWWRGLPHPVQSWMRNCVGGYLLYFISGFLWCFVIYYWKRHAYIPKDAIPTNEAMKKQIVVASKAMPFYCALPTLSEYMIESGWTRCYFNISEIGFSMYLCYMAMYLIFVEFGIYWMHRELHDIKPLYKYLHATHHIYNKENTLSPFAGLAFHPLDGILQAIPHVFALFLFPTHFRTHIALLFLEAVWTTNIHDCIHGKIWPVMGAGYHTIHHTTYRHNYGHYTIWMDWMFGTLNEPEDILKKA

SEQ ID NO: 8412 - protein, 231 aa, Zea mays subsp. mays
  peptide (1)..(231): Ceres Seq. ID no. 13498588
MRNCVGGYLLYFISGFLWCFVIYYWKRHAYIPKDAIPTNEAMKKQIVVASKAMPFYCALPTLSEYMIESGWTRCYFNISEIGFSMYLCYMAMYLIFVEFGIYWMHRELHDIKPLYKYLHATHHIYNKENTLSPFAGLAFHPLDGILQAIPHVFALFLFPTHFRTHIALLFLEAVWTTNIHDCIHGKIWPVMGAGYHTIHHTTYRHNYGHYTIWMDWMFGTLNEPEDILKKA

SEQ ID NO: 8413 - protein, 190 aa, Zea mays subsp. mays
  peptide (1)..(190): Ceres Seq. ID no. 13498589
MKKQIVVASKAMPFYCALPTLSEYMIESGWTRCYFNISEIGFSMYLCYMAMYLIFVEFGIYWMHRELHDIKPLYKYLHATHHIYNKENTLSPFAGLAFHPLDGILQAIPHVFALFLFPTHFRTHIALLFLEAVWTTNIHDCIHGKIWPVMGAGYHTIHHTTYRHNYGHYTIWMDWMFGTLNEPEDILKKA

SEQ ID NO: 8414 - DNA, 1201 bp, Zea mays subsp. mays; identical to SEQ ID NO: 7324
  misc_feature (1)..(1201): Ceres Seq. ID no. 13492541
  misc_feature (1)..(1201): Ortholog of  Ceres SEQ ID NO 12562983 as cited in SEQ ID NO 53309
  misc_feature (1)..(1201): Ortholog of  Ceres SEQ ID NO 14309224 as cited in SEQ ID NO 0

SEQ ID NO: 8415 - protein, 317 aa, Zea mays subsp. mays; identical to SEQ ID NO: 7325
  peptide (1)..(317): Ceres Seq. ID no. 13492542

SEQ ID NO: 8416 - protein, 311 aa, Zea mays subsp. mays; identical to SEQ ID NO: 7326
  peptide (1)..(311): Ceres Seq. ID no. 13492543

SEQ ID NO: 8417 - protein, 187 aa, Zea mays subsp. mays; identical to SEQ ID NO: 7327
  peptide (1)..(187): Ceres Seq. ID no. 13492544

SEQ ID NO: 8418 - DNA, 1606 bp, Zea mays subsp. mays
  misc_feature (1)..(1606): Ceres Seq. ID no. 12344912
  misc_feature (1)..(1606): Ortholog of  Ceres SEQ ID NO 13599602 as cited in SEQ ID NO 0
actccgtactcggcgctcctcccccgtcgccgccggaaatcaggaagcccaagtgctctcttgggtgcgctcgtcgccggtggcagtgagccagtgatgcatcttcatctccggcttccttattaggatcagcccgtcgatcgatcatggcgtcgtcgagctcggctgctactactagtggtgacagtcagggtctcaaggctcgagatgcctgcatcgtcggcgtcgcccgcacgcccatcggcgcacttctcgggtcgctgtcgtccctccccgccaccaagctcggctccatcgccatccagggtgctctcaagagggcgaaggtcgacccggcgctcgtgcaggaggttttcatgggcaacgtcctcagcgccaaccttggccaggctccggcaaggcaggcagcccttggcgccggcttgcccaactccgtgccatgtaccaccgtcaacaaagtttgttcctcgggaatgaaggctgtcatgtttgcggctcaaagtattcagctggggatcaacgatgttgtggtcgccggtggcatggaaagcatgtcgaatgccccaaaatatgtggctgaagcaagacgaggatcacggttcggacatgatgtccttgttgatgggatgctcaaggatggcctgtgggatgtctataacgatttcccgatgggaatgtgtgctgaattgtgttcagaccagcactcaatctcaagggaggagcaggattcgtatgctatcctcagcaatgaacgtggcatagcagctcaggacagcggtgcattttcttgggagattgttcctgttgaaatttcttctggtagagggaaaccaccagttgttgttgacaaggatgagagtcttgcaaagtttgatccagtaaagctgaagaaacttgggccaacttttaagacgaatggttctgtaacggctggcaattcttctagtataagtgatggcgctgctgcaattgtccttgtcagtggagagaaagccaagaatcttggccttgaagttattgcaaggattacagggtatgctgatgctgcacaggcacctgagctgtttacgacagctccagcccttgccattccaaaggctatatcaaatgcagctcttcaaacttcacagatagattattatgaagtaaatgaggctttctctgttgttgctatagctaatcagaggcttcttggtatcccttccggaaagctaaacttaagtggtggtgctgtttccctgggccatcctatcggttgcagtggtgcacggataattgtcactttgcttgggattcttagacagaaaaatggaaaatttggtgttgctggagtttgcaatggcggcggcggcgcttcagccctcgttttggagctcatgcaaccctcttcgcatatccattcatcattgtgaagttggtgcgagcaaattagcaagacaaaatttgtaaaatgtgctgtatctgtcgtgctgctcagcacagggcattatcttgtactcccttatatgggaaaatatagacgtatatatacccatggaaataacagaggcccggaagaataatgtacagacactgatacagccactgaaagaagacatgggtagtg

SEQ ID NO: 8419 - protein, 421 aa, Zea mays subsp. mays
  peptide (1)..(421): Ceres Seq. ID no. 12344913
MASSSSAATTSGDSQGLKARDACIVGVARTPIGALLGSLSSLPATKLGSIAIQGALKRAKVDPALVQEVFMGNVLSANLGQAPARQAALGAGLPNSVPCTTVNKVCSSGMKAVMFAAQSIQLGINDVVVAGGMESMSNAPKYVAEARRGSRFGHDVLVDGMLKDGLWDVYNDFPMGMCAELCSDQHSISREEQDSYAILSNERGIAAQDSGAFSWEIVPVEISSGRGKPPVVVDKDESLAKFDPVKLKKLGPTFKTNGSVTAGNSSSISDGAAAIVLVSGEKAKNLGLEVIARITGYADAAQAPELFTTAPALAIPKAISNAALQTSQIDYYEVNEAFSVVAIANQRLLGIPSGKLNLSGGAVSLGHPIGCSGARIIVTLLGILRQKNGKFGVAGVCNGGGGASALVLELMQPSSHIHSSL

SEQ ID NO: 8420 - protein, 351 aa, Zea mays subsp. mays
  peptide (1)..(351): Ceres Seq. ID no. 12344914
MGNVLSANLGQAPARQAALGAGLPNSVPCTTVNKVCSSGMKAVMFAAQSIQLGINDVVVAGGMESMSNAPKYVAEARRGSRFGHDVLVDGMLKDGLWDVYNDFPMGMCAELCSDQHSISREEQDSYAILSNERGIAAQDSGAFSWEIVPVEISSGRGKPPVVVDKDESLAKFDPVKLKKLGPTFKTNGSVTAGNSSSISDGAAAIVLVSGEKAKNLGLEVIARITGYADAAQAPELFTTAPALAIPKAISNAALQTSQIDYYEVNEAFSVVAIANQRLLGIPSGKLNLSGGAVSLGHPIGCSGARIIVTLLGILRQKNGKFGVAGVCNGGGGASALVLELMQPSSHIHSSL

SEQ ID NO: 8421 - protein, 312 aa, Zea mays subsp. mays
  peptide (1)..(312): Ceres Seq. ID no. 12344915
MKAVMFAAQSIQLGINDVVVAGGMESMSNAPKYVAEARRGSRFGHDVLVDGMLKDGLWDVYNDFPMGMCAELCSDQHSISREEQDSYAILSNERGIAAQDSGAFSWEIVPVEISSGRGKPPVVVDKDESLAKFDPVKLKKLGPTFKTNGSVTAGNSSSISDGAAAIVLVSGEKAKNLGLEVIARITGYADAAQAPELFTTAPALAIPKAISNAALQTSQIDYYEVNEAFSVVAIANQRLLGIPSGKLNLSGGAVSLGHPIGCSGARIIVTLLGILRQKNGKFGVAGVCNGGGGASALVLELMQPSSHIHSSL

SEQ ID NO: 8422 - DNA, 1171 bp, Zea mays subsp. mays
  misc_feature (1)..(1171): Ceres Seq. ID no. 12405407
  misc_feature (1)..(1171): Ortholog of  Ceres SEQ ID NO 13596762 as cited in SEQ ID NO 63019
agtcctctcctcccatccatctcatgcttcggtccacgcacccacccagccccaccagcggcagctccgcggcgccggcgtccagctccgacgccgcggcgatggtcgggggcggcgcggcggcgggcagcggcggcgcaccgagcggcgccaagctgctgcagatcctcaacgtgcgggtcgtgggcagcggcgaccgcgtggtggtgctgtcccacgggttcggcacggaccagtcggcgtggagccgcgtgctcccctacctcacccgcgaccaccgcgtggtgctctacgacctcgtctgcgccggcagcgtcaacccggagcacttcgacttccgccgctacgacacgctagactcgtacgtcgacgacctcctcgccatcctcgacgcgctccgcatcgcgcgctgcgccttcgtcggccactccgtctccgccatgatcggcatcctcgcctccatccgccgccccgagctcttcgccaagctcgtactcatcggcgcgtcgcccaggttcctgaacgaccacgactaccacggcgggttcgagctgccggagatccagcaggtgttcgacgcgatggcggccaactactcggcgtgggcgaccgggtacgccccgctggcggtgggcgcggacgtgccggcggcggtgcaggagttcagccgcaccctgttcaacatgcggccggacatctccctccacgtgtgccgcaccgtgttcaacaccgacctccgcggcgtgctgggcatggtgcggtccccctgcgtggtggtgcagaccacccgcgacgtctccgtcccggcctccgtcgccgcctacctcaaggcccacctcggcggccgcaccgccgtcgagttcctccagaccgagggccacctcccgcacctcagcgcccccggcctcctcgcgcaggtgctccgccgcgcgctcgcccggtactagcggagcgcctgccacctacggtcctggtggtcatcggtattttttaccgcctcgatttaccccgtgccgagaccggggacggggatcagataatgtggcgacccgcgccgtttgctgtgcgcgccatgactgtagactgtagtacgagtgtacgacttgttctggacttctggtacccgatttttttactgctttttaatggagagccgagcagtagcactggt

SEQ ID NO: 8423 - protein, 390 aa, Zea mays subsp. mays
  peptide (1)..(390): Ceres Seq. ID no. 12405408
VLSSHPSHASVHAPTQPHQRQLRGAGVQLRRRGDGRGRRGGGQRRRTERRQAAADPQRAGRGQRRPRGGAVPRVRHGPVGVEPRAPLPHPRPPRGALRPRLRRQRQPGALRLPPLRHARLVRRRPPRHPRRAPHRALRLRRPLRLRHDRHPRLHPPPRALRQARTHRRVAQVPERPRLPRRVRAAGDPAGVRRDGGQLLGVGDRVRPAGGGRGRAGGGAGVQPHPVQHAAGHLPPRVPHRVQHRPPRRAGHGAVPLRGGADHPRRLRPGLRRRLPQGPPRRPHRRRVPPDRGPPPAPQRPRPPRAGAPPRARPVLAERLPPTVLVVIGIFYRLDLPRAETGDGDQIMWRPAPFAVRAMTVDCSTSVRLVLDFWYPIFLLLFNGEPSSSTG

SEQ ID NO: 8424 - protein, 314 aa, Zea mays subsp. mays
  peptide (1)..(314): Ceres Seq. ID no. 12405409
SSPPIHLMLRSTHPPSPTSGSSAAPASSSDAAAMVGGGAAAGSGGAPSGAKLLQILNVRVVGSGDRVVVLSHGFGTDQSAWSRVLPYLTRDHRVVLYDLVCAGSVNPEHFDFRRYDTLDSYVDDLLAILDALRIARCAFVGHSVSAMIGILASIRRPELFAKLVLIGASPRFLNDHDYHGGFELPEIQQVFDAMAANYSAWATGYAPLAVGADVPAAVQEFSRTLFNMRPDISLHVCRTVFNTDLRGVLGMVRSPCVVVQTTRDVSVPASVAAYLKAHLGGRTAVEFLQTEGHLPHLSAPGLLAQVLRRALARY

SEQ ID NO: 8425 - protein, 307 aa, Zea mays subsp. mays
  peptide (1)..(307): Ceres Seq. ID no. 12405410
MLRSTHPPSPTSGSSAAPASSSDAAAMVGGGAAAGSGGAPSGAKLLQILNVRVVGSGDRVVVLSHGFGTDQSAWSRVLPYLTRDHRVVLYDLVCAGSVNPEHFDFRRYDTLDSYVDDLLAILDALRIARCAFVGHSVSAMIGILASIRRPELFAKLVLIGASPRFLNDHDYHGGFELPEIQQVFDAMAANYSAWATGYAPLAVGADVPAAVQEFSRTLFNMRPDISLHVCRTVFNTDLRGVLGMVRSPCVVVQTTRDVSVPASVAAYLKAHLGGRTAVEFLQTEGHLPHLSAPGLLAQVLRRALARY

SEQ ID NO: 8426 - DNA, 1723 bp, Zea mays subsp. mays
  misc_feature (1)..(1723): Ceres Seq. ID no. 12361433
  misc_feature (1)..(1723): Ortholog of  Ceres SEQ ID NO 12611235 as cited in SEQ ID NO 56101
  misc_feature (1)..(1723): Ortholog of  Ceres SEQ ID NO 15226202 as cited in SEQ ID NO 65001
  misc_feature (1)..(1723): Ortholog of  Ceres SEQ ID NO 15177896 as cited in SEQ ID NO 0
gcacgagaccattacctagaacatcctaatcgaaaagccctttccctcttccctcccgtcgtcttcactccgacgcctcccctgccgccaccgctattgcctattgggagggcggtccctgtcgcgcgcgacgccgaggcttcgtgacggggacacgctgctaatttgtagcgcaccacacgccggctcggcctcggttgcgcctcgcctcgcctcgccaggggattactggtgggcagcgctcgtgcttgttgtgcagccggtgtgcgtctgctcgcggcctgcggcgatggggcaggacctcgtcgagatccacccgcgcgagctccagttcacatttgaggtgaagaaacaaagttcatgtgttgtctgcctaaccaacaagtccaacgaatatgttgcttttaaggttaaaacgacatcccctaaaagatactgtgttcgaccaaataccggggttatccttccgaggaaaacatgtgaattcacagttaccatgcaagcgctccggactgctccaccagacatgcaattaaaggacaagtttttagtacagaccacagttgttccttatggcacatctgatgaagaactcgttcctgccgttttctccaaagaaactggcagatacatcgaggaaagcaaattgagagttgttcttgttagttcataccaatccctcgaagagcaacccactaatggaattcatgacactgagccagctgttgaagttcctttactgaaagagatgccaaatttagggagcgaagtaccagatgttgcaaaagaaattcctgcccctctggtacaaggtccagcaattgtgaccggaataccttcacctgtcaaagaggttccaggcctgagagaaattcctgtgccactgaacgaagcaccaactttattggcagaatttccttcccctcaaaaagatccctctgctattacagttgaacatgcctctaatgttacaattgagcatgcccctgctatttccattgaatccccacctttgaaacaaagtgttccagtttttaaggaatctcctctgaaacaaagcgttgcagtttttaaggaatctcctcctttgaaacaaagcatttcagtttttaaggaatctcctccactggaggaaactactcctaaagaagctgttatgctaagtgaccgagggcttttcaatgtgcagaatcatcaattatcccatgtaacagaagatgttcagaatatgaaatcaaagctcaacaatcttgaatcaaaattggaagaggctgaaaagatgataataaggctaagagaagagagcagaaataccacccaggagcgggatgagctacagcaagaaatggtattcctaagaaagaagggaaccgcaaggagtcaaatgggtttccccctgctctttgtggtgtacgtggcgcttcttggtacctgtatcggttacctgctccgcatatgagttccaaacttcaaaaaagttcagcagatgggatatgcttcgtatgtgggcaagacaattgaacggcagttgcactccaaaatgttgaggggtgaatttattagcattattagttcggaacttcatatggttttgcacataacagcagtgccaaactaccatctgcctgtatgtatagaacagttactttttttcgcgttttatagaacccacccaaaagatgtctgctgcctcgtagactaacctgggattcttcttccatcc

SEQ ID NO: 8427 - protein, 389 aa, Zea mays subsp. mays
  peptide (1)..(389): Ceres Seq. ID no. 12361434
MGQDLVEIHPRELQFTFEVKKQSSCVVCLTNKSNEYVAFKVKTTSPKRYCVRPNTGVILPRKTCEFTVTMQALRTAPPDMQLKDKFLVQTTVVPYGTSDEELVPAVFSKETGRYIEESKLRVVLVSSYQSLEEQPTNGIHDTEPAVEVPLLKEMPNLGSEVPDVAKEIPAPLVQGPAIVTGIPSPVKEVPGLREIPVPLNEAPTLLAEFPSPQKDPSAITVEHASNVTIEHAPAISIESPPLKQSVPVFKESPLKQSVAVFKESPPLKQSISVFKESPPLEETTPKEAVMLSDRGLFNVQNHQLSHVTEDVQNMKSKLNNLESKLEEAEKMIIRLREESRNTTQERDELQQEMVFLRKKGTARSQMGFPLLFVVYVALLGTCIGYLLRI

SEQ ID NO: 8428 - protein, 320 aa, Zea mays subsp. mays
  peptide (1)..(320): Ceres Seq. ID no. 12361435
MQALRTAPPDMQLKDKFLVQTTVVPYGTSDEELVPAVFSKETGRYIEESKLRVVLVSSYQSLEEQPTNGIHDTEPAVEVPLLKEMPNLGSEVPDVAKEIPAPLVQGPAIVTGIPSPVKEVPGLREIPVPLNEAPTLLAEFPSPQKDPSAITVEHASNVTIEHAPAISIESPPLKQSVPVFKESPLKQSVAVFKESPPLKQSISVFKESPPLEETTPKEAVMLSDRGLFNVQNHQLSHVTEDVQNMKSKLNNLESKLEEAEKMIIRLREESRNTTQERDELQQEMVFLRKKGTARSQMGFPLLFVVYVALLGTCIGYLLRI

SEQ ID NO: 8429 - protein, 310 aa, Zea mays subsp. mays
  peptide (1)..(310): Ceres Seq. ID no. 12361436
MQLKDKFLVQTTVVPYGTSDEELVPAVFSKETGRYIEESKLRVVLVSSYQSLEEQPTNGIHDTEPAVEVPLLKEMPNLGSEVPDVAKEIPAPLVQGPAIVTGIPSPVKEVPGLREIPVPLNEAPTLLAEFPSPQKDPSAITVEHASNVTIEHAPAISIESPPLKQSVPVFKESPLKQSVAVFKESPPLKQSISVFKESPPLEETTPKEAVMLSDRGLFNVQNHQLSHVTEDVQNMKSKLNNLESKLEEAEKMIIRLREESRNTTQERDELQQEMVFLRKKGTARSQMGFPLLFVVYVALLGTCIGYLLRI

SEQ ID NO: 8430 - DNA, 1770 bp, Zea mays subsp. mays
  misc_feature (1)..(1770): Ceres Seq. ID no. 12405403
  misc_feature (1)..(1770): Ortholog of  Ceres SEQ ID NO 14309674 as cited in SEQ ID NO 55707
  misc_feature (1)..(1770): Ortholog of  Ceres SEQ ID NO 13658728 as cited in SEQ ID NO 66270
  misc_feature (1)..(1770): Ortholog of  Ceres SEQ ID NO 12465428 as cited in SEQ ID NO 68898
aacacctccctcttttcctcgagcggtctaaccccaaaccctaaaccatggcgccgccggccccatccgtcggtccccgcctcctactccgccgcctcctctctacggctaccgaagcggcggcggagacacctgcgcccaccgcccccagctccgccgccgccgcgaagccggcgaaacaggacccgaggctgctctaccgtcgtttgtcggcgcttggaagcgccggggaggggagcgtgtcgcgggttttgaacaagtgggtgcgggagggcggcgcgacgcgaagcgacgacctcgtcaagcatgtcaaggagctccgcaagtacaagcgtcacgcccacgccctcgagttgatggattggatggtcaatgcaaggggtatgaacatgtcacacactaaccatgcaatacgtctggaactcatctataaagtgcgtggtcttgaggcagctgagaattattttgctaaccttcctgatccagcgaaaaatcatcgaacttacggctcccttcttagttgttattgctcagcaaaaatggaagagaaagcaacaaatctctaccgccagatggatgaacttggcatctggtccagtacactacccatcaacaatcttatgtccctttacatgaagttagaccagtataggaaggttgttagtctctttgaggagatgaaactgaagaatgttaaaccgaatagcctcacatgctgcattttaatgaccagctatgcagcattgaacaagatagatgacattgaagaacttctaacaaatggtagaaaaagatgtgactcttgggtggtctgcatacagcacacttgcttctatctatgtaaatgctggacaatttggaaaagcagaatctgctctgaagaaacttgagggccttatcagtgctcatgatgacagacagccttttgatttccttctgagcctatacgcttcactaggaaatttgagcgaggtcaatagggtatggaatgtgataaagtccaaattctcgaaggtaactaacacaagctaccttggcatgcttcacgctctttacaagctcaatgatattgaccgtatgaagcagatctatatggagtgggaatctaattatgaaacctttgatgtaaagctgacgaatatgatgattcgcagccatctgaaggttggcatgaccgaggaagcagaaatgttggtggagaaggtcaaggaaaatggtgcagagtttgacaccaaaacatgtgagttgtttcttgatcactacatgggcactgaggacatgaactcagcactgaactggttagagaatatgactaaactctccaagaaagcagagaagctcgatcaggacaggatctacaagttccagaagtatttcgaagaacacaaggatgctgacggtgcagagaggttctgcaactgcctgaggacgctagggtgcattgacgggaaagcatacgagtctctcttacgcacatacttggcagccggtaagaaaagctgttcactccgccaacagataaaaaacgataaggttgagatctgctatgacattgggaagctatctcaagaggttgggcgacaaggggcgatgagatacatatttatcttcgtttttaatttgagagagattagttctgttgatcctgtacgtccatgagcatcagaaaccaaatgtcggtccaacggttgaaaatgtatcagttctttcgttgttcatgaaaaggatagctcatggctgggctggtatcgttccggcttttgcgttcct

SEQ ID NO: 8431 - protein, 292 aa, Zea mays subsp. mays
  peptide (1)..(292): Ceres Seq. ID no. 12405404
MVEKDVTLGWSAYSTLASIYVNAGQFGKAESALKKLEGLISAHDDRQPFDFLLSLYASLGNLSEVNRVWNVIKSKFSKVTNTSYLGMLHALYKLNDIDRMKQIYMEWESNYETFDVKLTNMMIRSHLKVGMTEEAEMLVEKVKENGAEFDTKTCELFLDHYMGTEDMNSALNWLENMTKLSKKAEKLDQDRIYKFQKYFEEHKDADGAERFCNCLRTLGCIDGKAYESLLRTYLAAGKKSCSLRQQIKNDKVEICYDIGKLSQEVGRQGAMRYIFIFVFNLREISSVDPVRP

SEQ ID NO: 8432 - protein, 280 aa, Zea mays subsp. mays
  peptide (1)..(280): Ceres Seq. ID no. 12405405
MAPPAPSVGPRLLLRRLLSTATEAAAETPAPTAPSSAAAAKPAKQDPRLLYRRLSALGSAGEGSVSRVLNKWVREGGATRSDDLVKHVKELRKYKRHAHALELMDWMVNARGMNMSHTNHAIRLELIYKVRGLEAAENYFANLPDPAKNHRTYGSLLSCYCSAKMEEKATNLYRQMDELGIWSSTLPINNLMSLYMKLDQYRKVVSLFEEMKLKNVKPNSLTCCILMTSYAALNKIDDIEELLTNGRKRCDSWVVCIQHTCFYLCKCWTIWKSRICSEET

SEQ ID NO: 8433 - protein, 206 aa, Zea mays subsp. mays
  peptide (1)..(206): Ceres Seq. ID no. 12405406
MLHALYKLNDIDRMKQIYMEWESNYETFDVKLTNMMIRSHLKVGMTEEAEMLVEKVKENGAEFDTKTCELFLDHYMGTEDMNSALNWLENMTKLSKKAEKLDQDRIYKFQKYFEEHKDADGAERFCNCLRTLGCIDGKAYESLLRTYLAAGKKSCSLRQQIKNDKVEICYDIGKLSQEVGRQGAMRYIFIFVFNLREISSVDPVRP

SEQ ID NO: 8434 - DNA, 1389 bp, Zea mays subsp. mays
  misc_feature (1)..(1389): Ceres Seq. ID no. 12405399
  misc_feature (1)..(1389): Ortholog of  Ceres SEQ ID NO 15177463 as cited in SEQ ID NO 0
gcacgagaccattacctagaacatcctaatcgaaaagagccccacggcggccatcctctgcgcgggcgttccagagcatgtacgcgcagatggtgtgcgggctgtgccagcggcaggacgtgctgcgcgtgggcgccgtgttcgcgtcgggcctcctccgcgccatccgcttcctccagctcaactgggagcagctggcggaggacatcgaggccggctcgctgaccccgcgcgtgaccgacccgtcggtgcgcgaggcggtcgccggcatcctccgccctgaccccgcggtcgccgagctggtccgctccgagtgctccgggggcgactgggcgggcatcgtcacccgcatttggcccaacaccaagtacctggacgtgatcgtcaccggcgccatggcgcagtacatcccgacgctcaagcactacagcggcgggctcccgatggcgtgcaccatgtacgcgtcctcggagtgctacttcgggctgaacctccggcccatgtgcgacccgtcggaggtgtcctacaccctgatgcccaacatgtgctacttcgagttcctgccgatgggcggcgccgtcgacgcgagccagctggtggacctcggccgcgtggagcgcgggcgcgagtacgagctggtgatcaccacgtacgcggggctgaaccggtaccgcgtcggcgacgtgctccaggtgaccggcttccacaactcggcgccgcagttccggttcgtgcgccgcaagaacgtgctgctgtccatcgagtcggacaagacggacgaggccgagctgcagcgcgccgtggagcgcgcgtccgcgctgctccgcccgcacggcgccgccgtggtggagtacaccagccaggcctacaccaagagcatcccgggccactacgtcgtctactgggagctcctgcaggccaaggggggcgccgcggtggacggggagacgctggaagggtgctgcctcgagatggaggaggcgctgaacgcggtgtacaggcagagccgcgtggccgacggctccatcggcccgctggagatccgggtggtccggccgggcaccttcgaggagctcatggactacgccatctcccgcggcgcgtcgatcaaccagtacaaggtgccccggtgcgtgacgttcccgcccatcatcgagctcctggactcccgcgtcgtgtccagccacttgagccccgcgctgccgcactggaccgccggccagcgctccggctccggctccggctccgactagacacagcggcagggcggcgaggcgtgtccgtgtccaggcgcgcttaattagactgtggaaatcatctgctgcgtgtcgcagacgtagaagaatgcccgtgaaaacttaaatactatttgttaattttggagttttg

SEQ ID NO: 8435 - protein, 391 aa, Zea mays subsp. mays
  peptide (1)..(391): Ceres Seq. ID no. 12405400
MYAQMVCGLCQRQDVLRVGAVFASGLLRAIRFLQLNWEQLAEDIEAGSLTPRVTDPSVREAVAGILRPDPAVAELVRSECSGGDWAGIVTRIWPNTKYLDVIVTGAMAQYIPTLKHYSGGLPMACTMYASSECYFGLNLRPMCDPSEVSYTLMPNMCYFEFLPMGGAVDASQLVDLGRVERGREYELVITTYAGLNRYRVGDVLQVTGFHNSAPQFRFVRRKNVLLSIESDKTDEAELQRAVERASALLRPHGAAVVEYTSQAYTKSIPGHYVVYWELLQAKGGAAVDGETLEGCCLEMEEALNAVYRQSRVADGSIGPLEIRVVRPGTFEELMDYAISRGASINQYKVPRCVTFPPIIELLDSRVVSSHLSPALPHWTAGQRSGSGSGSD

SEQ ID NO: 8436 - protein, 387 aa, Zea mays subsp. mays
  peptide (1)..(387): Ceres Seq. ID no. 12405401
MVCGLCQRQDVLRVGAVFASGLLRAIRFLQLNWEQLAEDIEAGSLTPRVTDPSVREAVAGILRPDPAVAELVRSECSGGDWAGIVTRIWPNTKYLDVIVTGAMAQYIPTLKHYSGGLPMACTMYASSECYFGLNLRPMCDPSEVSYTLMPNMCYFEFLPMGGAVDASQLVDLGRVERGREYELVITTYAGLNRYRVGDVLQVTGFHNSAPQFRFVRRKNVLLSIESDKTDEAELQRAVERASALLRPHGAAVVEYTSQAYTKSIPGHYVVYWELLQAKGGAAVDGETLEGCCLEMEEALNAVYRQSRVADGSIGPLEIRVVRPGTFEELMDYAISRGASINQYKVPRCVTFPPIIELLDSRVVSSHLSPALPHWTAGQRSGSGSGSD

SEQ ID NO: 8437 - protein, 285 aa, Zea mays subsp. mays
  peptide (1)..(285): Ceres Seq. ID no. 12405402
MAQYIPTLKHYSGGLPMACTMYASSECYFGLNLRPMCDPSEVSYTLMPNMCYFEFLPMGGAVDASQLVDLGRVERGREYELVITTYAGLNRYRVGDVLQVTGFHNSAPQFRFVRRKNVLLSIESDKTDEAELQRAVERASALLRPHGAAVVEYTSQAYTKSIPGHYVVYWELLQAKGGAAVDGETLEGCCLEMEEALNAVYRQSRVADGSIGPLEIRVVRPGTFEELMDYAISRGASINQYKVPRCVTFPPIIELLDSRVVSSHLSPALPHWTAGQRSGSGSGSD

SEQ ID NO: 8438 - DNA, 1343 bp, Zea mays subsp. mays
  misc_feature (1)..(1343): Ceres Seq. ID no. 12405393
  misc_feature (1)..(1343): Ortholog of  Ceres SEQ ID NO 13594727 as cited in SEQ ID NO 52169
  misc_feature (1)..(1343): Ortholog of  Ceres SEQ ID NO 13598714 as cited in SEQ ID NO 62656
  misc_feature (1)..(1343): Ortholog of  Ceres SEQ ID NO 13596969 as cited in SEQ ID NO 63375
  misc_feature (1)..(1343): Ortholog of  Ceres SEQ ID NO 14302240 as cited in SEQ ID NO 64162
  misc_feature (1)..(1343): Ortholog of  Ceres SEQ ID NO 13584480 as cited in SEQ ID NO 64751
  misc_feature (1)..(1343): Ortholog of  Ceres SEQ ID NO 13597519 as cited in SEQ ID NO 64759
  misc_feature (1)..(1343): Ortholog of  Ceres SEQ ID NO 13596362 as cited in SEQ ID NO 67877
aaccaaagctagctactttgttgctgtttttattcgtttgtcacataagcagtggtggtcggtcggccggcgacaatgagcggccgtgtgttcgtcctggccgctgccttcggcgtgctgctcgccgcagccgccgtgtcctcgaggcccgtcctgactccgctgggtactagccgccctgctgccggcgacctgtccgtgtacttccacgcggactcgtgcccgcagctggagacgatcgtgcggtccagcgtggacgcgggcgctccagcagaacgtccgtctgacggcgggtctcctccgcctcttgttccacgactgcttcccgcagggctgcgacgcgtccatcctcctggacaacggcgagcgcggcctcccgcccaacgtggggctgcagcaggaggccgtgcagctggtggaggacatccgcgggaaggtgcacgcggcgtgcgggcccaccgtgtcgtgcgccgacatcacggtgctggccacccgcgacgccgtgagcctgtccggcgggccttccttcacggtgccgctggggcggctggacagcgcggcgccggcgtccagcaacgacgtgttcacgctgccgccgccgacggcgacggtggacgagctgctgacggcgttcgggagcaagaacctgtcggacccggcggacctggtggcgctgtcgggcgcgcacacggtggggaaggcgcggtgcagctcgttcggcgacgtggcgggcccggccaccgacgacgtgacgcggtgcgtgacggcgacgtgctcggcccccgggagcggcgacacgctgcgggacctggacttcctgacgcccgccgtgttcgacaacctctacttcgtggagctgacgctgaggaagaacaagggggtgatgctgccgtcggaccaagggctggtgagcgacccgcgcacgagctggctcgtccagggcttcgccgacaaccactggtggttcttcgaccagttcaggacctccatgatcaagatgagccagctcaggggaccccaggggaacgtcggcgagatccgccgtaactgcttccgccccaacaccaacggcatcgccgcctctgcttgagttgactgaccaggcaccgatccatccgccggtgaggactcatcacttcactttcactgtgtctgtgtgtaataattaataataataaaacaacaacaacaaccccagcccgtacgtgccgtgtgaggggggcacgtggttgtgccgtcaccaccatgtcggcgtcgtccatgcatgtcgcattaccgatttttgttcatgttccgatctcatctcatcatctcgctatcaataacaattatactagtgtttt

SEQ ID NO: 8439 - protein, 323 aa, Zea mays subsp. mays
  peptide (1)..(323): Ceres Seq. ID no. 12405394
MSGRVFVLAAAFGVLLAAAAVSSRPVLTPLGTSRPAAGDLSVYFHADSCPQLETIVRSSVDAGAPAERPSDGGSPPPLVPRLLPAGLRRVHPPGQRRARPPAQRGAAAGGRAAGGGHPREGARGVRAHRVVRRHHGAGHPRRREPVRRAFLHGAAGAAGQRGAGVQQRRVHAAAADGDGGRAADGVREQEPVGPGGPGGAVGRAHGGEGAVQLVRRRGGPGHRRRDAVRDGDVLGPRERRHAAGPGLPDARRVRQPLLRGADAEEEQGGDAAVGPRAGERPAHELARPGLRRQPLVVLRPVQDLHDQDEPAQGTPGERRRDPP

SEQ ID NO: 8440 - DNA, 830 bp, Zea mays subsp. mays
  misc_feature (1)..(830): Ceres Seq. ID no. 12369086
  misc_feature (1)..(830): Ortholog of  Ceres SEQ ID NO 13658261 as cited in SEQ ID NO 66697
accgctcttctcccgaagacccgaactccacgccacatatctctcctcttttctctcttttttctctccgtactctccccacgcaggtggcagctatggcggaggacgcccccaacgcagccgccgagggcggccagcccgctcctcccgagggatccgccgatgccgccccgttggctactgcgggcgccaaggccgcggaggcgctgctcccgtcgctcagcatctgggccgccgtcgcagcgcacgcgcgacgccgtggtgcgccgcctcgtgcagacgctcgcggcgcccagcgtcctctcccagcgctacggcgccgttccggagcccgaggccgagcgcgccgccgcggccgtcgaggccaaggccttcgcggccgcctccaagtccgccgccgccgagtccccggcctctatcgaggaggggattgaggtgctccaggcgtactccaaggaggtcagccgccgcctcctcgagctcgccaagaccaggtccgccgctgcgacggcgcccgccgaggggagcgtgcaggaggccgaggactcgtcggcgactgctccagccgccgaggaggctgccgtaaaagaggagtaaggcttcggcccgtgctttgatccaccgacagttgctgttattttggcatttggtcggaatgttattcatcgtcccccctgcatatgtttactagtatatctattgtctatctattagagattgcttgtgacaagagtgactgatgtttgttccaagaacatatatagtattaagctatatatcaaccgcgcgtccttcgcattgcaaatgtgaaggttgctcgtgtacgtttt

SEQ ID NO: 8441 - protein, 198 aa, Zea mays subsp. mays
  peptide (1)..(198): Ceres Seq. ID no. 12369087
TALLPKTRTPRHISLLFSLFFLSVLSPRRWQLWRRTPPTQPPRAASPLLPRDPPMPPRWLLRAPRPRRRCSRRSASGPPSQRTRDAVVRRLVQTLAAPSVLSQRYGAVPEPEAERAAAAVEAKAFAAASKSAAAESPASIEEGIEVLQAYSKEVSRRLLELAKTRSAAATAPAEGSVQEAEDSSATAPAAEEAAVKEE

SEQ ID NO: 8442 - protein, 194 aa, Zea mays subsp. mays
  peptide (1)..(194): Ceres Seq. ID no. 12369088
PLFSRRPELHATYLSSFLSFFSPYSPHAGGSYGGGRPQRSRRGRPARSSRGIRRCRPVGYCGRQGRGGAAPVAQHLGRRRSARATPWCAASCRRSRRPASSPSATAPFRSPRPSAPPRPSRPRPSRPPPSPPPPSPRPLSRRGLRCSRRTPRRSAAASSSSPRPGPPLRRRPPRGACRRPRTRRRLLQPPRRLP

SEQ ID NO: 8443 - protein, 144 aa, Zea mays subsp. mays
  peptide (1)..(144): Ceres Seq. ID no. 12369089
MPPRWLLRAPRPRRRCSRRSASGPPSQRTRDAVVRRLVQTLAAPSVLSQRYGAVPEPEAERAAAAVEAKAFAAASKSAAAESPASIEEGIEVLQAYSKEVSRRLLELAKTRSAAATAPAEGSVQEAEDSSATAPAAEEAAVKEE

SEQ ID NO: 8444 - DNA, 1566 bp, Zea mays subsp. mays
  misc_feature (1)..(1566): Ceres Seq. ID no. 12405381
  misc_feature (1)..(1566): Ortholog of  Ceres SEQ ID NO 14310920 as cited in SEQ ID NO 54622
aatacttcgatagtaactgtttgtgtgggaaattactaaaaacactttttgtttgtgtgggaaagaagaaaaaaagaactaacgttaaaggcggcttgtgttgtggcgcagggcaccagcagcagtgggcgctccccttcgccggctccttgcaggtcagtccgccgccgcagcaggcgcaaccggataggaagggccgcggcggaggcggggtcatggattcaggctccagatccagcggcggagccgggttcgacgacgaagacggcctcaccacgcgccgcgaggtctcctcctcgctccaagatttggcagtaagggtggattggaagggtgggagctgcagcgatggcggtacaaatcaggggccaaacacaccacggtcaaaacactcggccacagagcagcgcagacgcagcaagatcaatgataggtttcagatacttagggagctgttgccacacaatgatcaaaagagagacaaagcaacatttctcttggaggttattgaatatatacgttttttgcaagagaaagcgcaaaaatacgaggcaacattcccagaatggaaccaagaaaatccaacgatgcttccgtggagtaaaggccaaatcccaggagattccccgcctgacccttcacatttcgtgagaaatggatcctcccctggatctaatttcactgggaaactcgatgataatcacacatctgcagctgcatcaggggcactggaccaggcagaaactaatcacgtggctagcggctgctacagatcatcagaaactccggcgaatattacaaataatgctatatctcagtcccaacctcaatggacaggtccgtcccctgtggatgactctgcagtgaaaagtgaaatgcttaacagccaggagttggcaatagatgaaggaatgatcagtgtgtccagtacctattcccaagagttacttatctcgttgtctcacgcccttcagagctcaggtgtggatctgtcccaaaccagcatctctgtgcagatcaacctgggaaagcgtgctggcaagagatctgcatctgctggtggtgtatcctccaactccaaggaaccaccagccgatccagcatctagtaacgaactaggcggccatcacgtgacaacgttgggagctagcgctgacggtctcctcccccacgcgacgaaacggcataaacgggacaacagctgatgatgggcctctctcactccgcctcgttcccagacgacagacggattgatcattcttttttttttctcccagcccgacgggaggctctctcttggattggttgcacatcgcgtgctcggtgatgggctgagaccccggctgtattctttttgatttgatcgctcccgccgccatcccctgtctagcccattgtttttacgtagaggaacgaaccgtggagcttcccattgcggattgtgaagccgctcttcttgtacacaggcttccattcatctgagaagcttcttcccctccttgaacaggtctctccgcgttttagacctgtatactagcaacctgtaagatatgattatgatgtccc

SEQ ID NO: 8445 - protein, 400 aa, Zea mays subsp. mays
  peptide (1)..(400): Ceres Seq. ID no. 12405382
YFDSNCLCGKLLKTLFVCVGKKKKRTNVKGGLCCGAGHQQQWALPFAGSLQVSPPPQQAQPDRKGRGGGGVMDSGSRSSGGAGFDDEDGLTTRREVSSSLQDLAVRVDWKGGSCSDGGTNQGPNTPRSKHSATEQRRRSKINDRFQILRELLPHNDQKRDKATFLLEVIEYIRFLQEKAQKYEATFPEWNQENPTMLPWSKGQIPGDSPPDPSHFVRNGSSPGSNFTGKLDDNHTSAAASGALDQAETNHVASGCYRSSETPANITNNAISQSQPQWTGPSPVDDSAVKSEMLNSQELAIDEGMISVSSTYSQELLISLSHALQSSGVDLSQTSISVQINLGKRAGKRSASAGGVSSNSKEPPADPASSNELGGHHVTTLGASADGLLPHATKRHKRDNS

SEQ ID NO: 8446 - protein, 329 aa, Zea mays subsp. mays
  peptide (1)..(329): Ceres Seq. ID no. 12405383
MDSGSRSSGGAGFDDEDGLTTRREVSSSLQDLAVRVDWKGGSCSDGGTNQGPNTPRSKHSATEQRRRSKINDRFQILRELLPHNDQKRDKATFLLEVIEYIRFLQEKAQKYEATFPEWNQENPTMLPWSKGQIPGDSPPDPSHFVRNGSSPGSNFTGKLDDNHTSAAASGALDQAETNHVASGCYRSSETPANITNNAISQSQPQWTGPSPVDDSAVKSEMLNSQELAIDEGMISVSSTYSQELLISLSHALQSSGVDLSQTSISVQINLGKRAGKRSASAGGVSSNSKEPPADPASSNELGGHHVTTLGASADGLLPHATKRHKRDNS

SEQ ID NO: 8447 - protein, 205 aa, Zea mays subsp. mays
  peptide (1)..(205): Ceres Seq. ID no. 12405384
MLPWSKGQIPGDSPPDPSHFVRNGSSPGSNFTGKLDDNHTSAAASGALDQAETNHVASGCYRSSETPANITNNAISQSQPQWTGPSPVDDSAVKSEMLNSQELAIDEGMISVSSTYSQELLISLSHALQSSGVDLSQTSISVQINLGKRAGKRSASAGGVSSNSKEPPADPASSNELGGHHVTTLGASADGLLPHATKRHKRDNS

SEQ ID NO: 8448 - DNA, 800 bp, Zea mays subsp. mays
  misc_feature (1)..(800): Ceres Seq. ID no. 12348080
  misc_feature (1)..(800): Ortholog of  Ceres SEQ ID NO 14308077 as cited in SEQ ID NO 58566
  misc_feature (1)..(800): Ortholog of  Ceres SEQ ID NO 15226608 as cited in SEQ ID NO 64190
acgttctgtcgttctcgcttgaggcggcccgcggccttctcgaagccctccctcgctccgtgctcgtggctcccgcacgatccccacattccttggccggctccgcgctcgtgctctcgttgggatcgttgtcagttcagtggaaatgcattcttcggcaatgccacacccagtgatcagaggcacattgagaagccttttaaagtgaaggaggcagaacctgtgaatgtgacaaaaccttcaccacacaagctgctggttctaggaggaagtggtttcgttggatcacacgtttgcaaagaggctttggacaaaggtttagttgtctctagtcttaatagatcgggaaagccatccttaaatgaaccttgggctgacaaagttatatggaaccaaggcaacctccttgaaccagcttcattgaaggatgctatggataatgtttctgcagtggtatcttgtgtcggaggttttggatcaaattcattcatgtataagattaatgggactgcaaacatcaatggccatcagggctgcagctgagaaaggtgtaaagagatttgtatatgtgtcagctgcagactttggattagtgaattatttattgcaaggctattacgagggcatagggcttctgaagctgaattgttgtcaaagtttacatatggaggttgataaatggattaatggaaaaggtcgctgacatcgcaccaaggctgatctgcaccatatctaaaagaattatcaacaaaagaacagtgcaagaggctatggtcaataggagatggattggtgatatt

SEQ ID NO: 8449 - protein, 180 aa, Zea mays subsp. mays
  peptide (1)..(180): Ceres Seq. ID no. 12348081
TFCRSRLRRPAAFSKPSLAPCSWLPHDPHIPWPAPRSCSRWDRCQFSGNAFFGNATPSDQRHIEKPFKVKEAEPVNVTKPSPHKLLVLGGSGFVGSHVCKEALDKGLVVSSLNRSGKPSLNEPWADKVIWNQGNLLEPASLKDAMDNVSAVVSCVGGFGSNSFMYKINGTANINGHQGCS

SEQ ID NO: 8450 - protein, 91 aa, Zea mays subsp. mays
  peptide (1)..(91): Ceres Seq. ID no. 12348082
MLWIMFLQWYLVSEVLDQIHSCIRLMGLQTSMAIRAAAEKGVKRFVYVSAADFGLVNYLLQGYYEGIGLLKLNCCQSLHMEVDKWINGKGR

SEQ ID NO: 8451 - DNA, 1606 bp, Zea mays subsp. mays
  misc_feature (1)..(1606): Ceres Seq. ID no. 12408467
  misc_feature (1)..(1606): Ortholog of  Ceres SEQ ID NO 12562983 as cited in SEQ ID NO 53309
  misc_feature (1)..(1606): Ortholog of  Ceres SEQ ID NO 14309224 as cited in SEQ ID NO 0
acgagaagggcaccgatctgggaaggcattgtcttgttgtactttcccttccggcagtggcctcgattcgcatccccttttcccgtccatgcgcgcgccggcgggcggtgccagtgccagtgccaccgcgctcgcggcggccatgaacattaagcagccgctgcacggcgcatcgacgctgttcgcgctgctctccctctcgctgctcctcctccgcctgctcctccgcctccgcctggcggccttccgcgacgcggcgctgtcgctccacctgctggcgcgcctccgcttccgccccgtcctcctctgcctcccgtcagcctgccacgacggcggcgccggcgccaccacgctgcgcgtctggtgccccgccgccccatcctccaagccgccgctgctcctcctccacggcttcggcggggacgccaagtggacgtgggcgcgcaacctcccgcgcctgtcccgccacttccacgtgtacgcgccggacctcgtgttcttcggcgcgcagtcccggtccgcgtcgccgctgcgctccgtggcgttccaggcccgctgcgccgccgaggccatgcgcctcctcggcgtgccccgctacgacgtcgcggggatcagctacggcggcttcgtcgcctaccggatggccgccgccgaggccagggacgccgtgggcaggctcgtcatcatgaccaccggcgtcgcggccacgcccggggagatgcgggcgatggcggcgcgcgaggaccgcaccgtcgaggatgcgctgctgccggacaccgccgaggggctgcgcttcctcgtaagacgctccatgcatcgccccccgccttggatgccggacttcgtgcttgacgacttcatccagctcatgtacgtggaccagaaaagggagagggcagagttgctgcacgaacttctcaagaccggagctggcttcgaccccctgccggttcttacccaggaaacactgatcatctggggcgacaaagaccaggtgttccccgtcgacctcggccacaggctgcacaggcttctgggcgagaggtccaggctagagatcgtcagggacgcagggcacgcgctgcagctggagggcgccgaccacgtcaaccgctccatcaagtcgttcctcctggacgagcgggtcggcccgggagccggcgcgggccgcaagtaggacgaggccttctcccgtccaggcccacaagcaaacggaggcctgctcgcagtcgcaggtgcctgcgtacttgcgttgcagagctgcaatgcaacagtgccaacgccagctgtagttaagcagcggagcggcaatgacctgcacgcacgcagacgcccccaccgccccgcaatcatgcagcgctggggctactggttacataagtacagagaagcgtcgctccggactactagtttgttttgtacaataatgtctgaaagaatgagcttgtgcggccgaaattccgagagctgtcttttgtctggtgccctggcgcgcacagtctgtctctgttgtttctttaggctcagccttatgggataacgacatatttaggacagctccaacaataatttgtaagctaaattcaagcattttattttatatttc

SEQ ID NO: 8452 - protein, 391 aa, Zea mays subsp. mays
  peptide (1)..(391): Ceres Seq. ID no. 12408468
REGHRSGKALSCCTFPSGSGLDSHPLFPSMRAPAGGASASATALAAAMNIKQPLHGASTLFALLSLSLLLLRLLLRLRLAAFRDAALSLHLLARLRFRPVLLCLPSACHDGGAGATTLRVWCPAAPSSKPPLLLLHGFGGDAKWTWARNLPRLSRHFHVYAPDLVFFGAQSRSASPLRSVAFQARCAAEAMRLLGVPRYDVAGISYGGFVAYRMAAAEARDAVGRLVIMTTGVAATPGEMRAMAAREDRTVEDALLPDTAEGLRFLVRRSMHRPPPWMPDFVLDDFIQLMYVDQKRERAELLHELLKTGAGFDPLPVLTQETLIIWGDKDQVFPVDLGHRLHRLLGERSRLEIVRDAGHALQLEGADHVNRSIKSFLLDERVGPGAGAGRK

SEQ ID NO: 8453 - protein, 362 aa, Zea mays subsp. mays
  peptide (1)..(362): Ceres Seq. ID no. 12408469
MRAPAGGASASATALAAAMNIKQPLHGASTLFALLSLSLLLLRLLLRLRLAAFRDAALSLHLLARLRFRPVLLCLPSACHDGGAGATTLRVWCPAAPSSKPPLLLLHGFGGDAKWTWARNLPRLSRHFHVYAPDLVFFGAQSRSASPLRSVAFQARCAAEAMRLLGVPRYDVAGISYGGFVAYRMAAAEARDAVGRLVIMTTGVAATPGEMRAMAAREDRTVEDALLPDTAEGLRFLVRRSMHRPPPWMPDFVLDDFIQLMYVDQKRERAELLHELLKTGAGFDPLPVLTQETLIIWGDKDQVFPVDLGHRLHRLLGERSRLEIVRDAGHALQLEGADHVNRSIKSFLLDERVGPGAGAGRK

SEQ ID NO: 8454 - protein, 344 aa, Zea mays subsp. mays
  peptide (1)..(344): Ceres Seq. ID no. 12408470
MNIKQPLHGASTLFALLSLSLLLLRLLLRLRLAAFRDAALSLHLLARLRFRPVLLCLPSACHDGGAGATTLRVWCPAAPSSKPPLLLLHGFGGDAKWTWARNLPRLSRHFHVYAPDLVFFGAQSRSASPLRSVAFQARCAAEAMRLLGVPRYDVAGISYGGFVAYRMAAAEARDAVGRLVIMTTGVAATPGEMRAMAAREDRTVEDALLPDTAEGLRFLVRRSMHRPPPWMPDFVLDDFIQLMYVDQKRERAELLHELLKTGAGFDPLPVLTQETLIIWGDKDQVFPVDLGHRLHRLLGERSRLEIVRDAGHALQLEGADHVNRSIKSFLLDERVGPGAGAGRK

SEQ ID NO: 8455 - DNA, 1182 bp, Zea mays subsp. mays
  misc_feature (1)..(1182): Ceres Seq. ID no. 12352605
  misc_feature (1)..(1182): Ortholog of  Ceres SEQ ID NO 13503499 as cited in SEQ ID NO 68684
aacctgtgcttccttccgtcgtcttcctgcctcctcttctgttcaccgctctggcgctctcctatactcttctctctctctcgctgaggcaggcggggggcagcctttcctccccggtcgccatcctcgtttatatacacacaccctctcttgccgaaccactgctcgcttctctgcctgcttctgcttgagtcgtgccagtgacccgtgaccgtgaccgcgagcttcagggacgcgggcggcggcgatcatggcgtggcgcggcccgctcggagccggagaggaggccctggacagcggcctcgagctcagcctcggcctcccggcatacttcgcccggccttcaggtttggacgccgccagggaggagcccgccgaggcctctgtctacgctatccaggccgccagtgggagcaatgtctccaaggcaagggtcaggccagcgggcgcggcgccggtggtggggtggccgccggtgcggtcgttccggaggaacctggccgcctcctcctccaggccgtcgtcggggaaacacacccgccaggagggcagcgccaaggacggcctgttcgtgaagatcaacatggacggcgtgccgatcaggcgcaaggtggacctcacggcgtacggcggctacgccgacctctccgccgccgtcggcaagctcttccgcggcctgcttgccgctcagagggaccgagcggccacggcgggtggcgaggaggaggaggagggggagggccccgtgatcggcggcgactacacgctggtgtacgaggacgacgagggcgacagggtccttgccggcgacgtcccctgggagatgttcgtggccaccgccaagaggctgcgcgtgctcaagagctccgacgtgccggcctcgtcggtgacgctgggagctgggggcccggagaggtctgcagccgactgctgctgctgaaacgtgctctgcttcgtcagctgcttgtaaaaagtcccgagtggaggagacgaggagtggccctatccctggcctcttttttgtgtgttgctcttgctgcctttctgctagtggtactagtattgggtgccagtaaaaagtaggagaacaaagtcatgacggtattaaggatgtaatgtgcaagattagcagtggtagtagtcgtaaggtgtttaatgaatctacggtctctgttttggggc

SEQ ID NO: 8456 - protein, 229 aa, Zea mays subsp. mays
  peptide (1)..(229): Ceres Seq. ID no. 12352606
MAWRGPLGAGEEALDSGLELSLGLPAYFARPSGLDAAREEPAEASVYAIQAASGSNVSKARVRPAGAAPVVGWPPVRSFRRNLAASSSRPSSGKHTRQEGSAKDGLFVKINMDGVPIRRKVDLTAYGGYADLSAAVGKLFRGLLAAQRDRAATAGGEEEEEGEGPVIGGDYTLVYEDDEGDRVLAGDVPWEMFVATAKRLRVLKSSDVPASSVTLGAGGPERSAADCCC

SEQ ID NO: 8457 - protein, 118 aa, Zea mays subsp. mays
  peptide (1)..(118): Ceres Seq. ID no. 12352607
MDGVPIRRKVDLTAYGGYADLSAAVGKLFRGLLAAQRDRAATAGGEEEEEGEGPVIGGDYTLVYEDDEGDRVLAGDVPWEMFVATAKRLRVLKSSDVPASSVTLGAGGPERSAADCCC

SEQ ID NO: 8458 - DNA, 469 bp, Zea mays subsp. mays
  misc_feature (1)..(469): Ceres Seq. ID no. 1439681
  misc_feature (1)..(469): Ortholog of  Ceres SEQ ID NO 14304867 as cited in SEQ ID NO 54375
ctcggtaaggaatccccttttaagggttgctcgggttcctcttcctgctgcgattcatcccgttcttgccccctacggttcaccccggagcgcgtttcctggtcaactaaggccggcatgaagggctgctcagagcgcttgctgtttctgctgctgctgctggcatcgtcgtcgttactgtccgctgtgattgccgcgcasagaacttgccccgccgacctcgacagcaaatgcgatggtggcgcgtctgatgatgattgggagggggagttcttccccggcgtcccgaaaatcaagtatgagggtccaacaagcaagaaccctcttgcttataagtggtataacaaggaggaagtgattctcggtaagaagatgaaggattggatgcgcttcagtgttgcgttctggcacacgttccgcggtactggcgctgatcctttcggtgctcctacaaakacttggccttggg

SEQ ID NO: 8459 - protein, 156 aa, Zea mays subsp. mays
  peptide (1)..(156): Ceres Seq. ID no. 1439682
  misc_feature (67)..(67): Xaa is any aa, unknown or other
  misc_feature (152)..(152): Xaa is any aa, unknown or other
LGKESPFKGCSGSSSCCDSSRSCPLRFTPERVSWSTKAGMKGCSERLLFLLLLLASSSLLSAVIAAXRTCPADLDSKCDGGASDDDWEGEFFPGVPKIKYEGPTSKNPLAYKWYNKEEVILGKKMKDWMRFSVAFWHTFRGTGADPFGAPTXTWPW

SEQ ID NO: 8460 - protein, 117 aa, Zea mays subsp. mays
  peptide (1)..(117): Ceres Seq. ID no. 1439683
  misc_feature (28)..(28): Xaa is any aa, unknown or other
  misc_feature (113)..(113): Xaa is any aa, unknown or other
MKGCSERLLFLLLLLASSSLLSAVIAAXRTCPADLDSKCDGGASDDDWEGEFFPGVPKIKYEGPTSKNPLAYKWYNKEEVILGKKMKDWMRFSVAFWHTFRGTGADPFGAPTXTWPW

SEQ ID NO: 8461 - DNA, 1585 bp, Zea mays subsp. mays
  misc_feature (1)..(1585): Ceres Seq. ID no. 12408463
  misc_feature (1)..(1585): Ortholog of  Ceres SEQ ID NO 15177654 as cited in SEQ ID NO 59933
  misc_feature (1)..(1585): Ortholog of  Ceres SEQ ID NO 14303600 as cited in SEQ ID NO 64632
  misc_feature (1)..(1585): Ortholog of  Ceres SEQ ID NO 14302776 as cited in SEQ ID NO 66919
aacccacacatccgacgccgaggaagtaggaagcacgagcagcatatgtcacagagggccagcgtcccacactcctcctgcatagccttcgcgctccattcccatctcctggtctccagtgagatgtgccccagctcctattggcagcaatagctattctccgctttccttttttttcccccttcctttcttcccgtctggctttggtttccgtttgatcgagctggctctcagtttccgtttttagttttgttggcatctttgctctcggatccgtctctccctaactcctgaaacccaaaagggagagaagaaaccgggcaagcaagcaaccaagcgagcgatgggtgtcaagggattcgtcgagggcggcatcgcctccatcgtggccggctgctccacccacccgctggacctcatcaaggtccgcatgcagctgcagggggaggcggcggccgccgtggcgccgcagccggcgctgcgcccggcgctcgccttccacgccgggggccacgccgtcgcgctcccgcaccaccaccaccacgacatcccggcgccaccgcggaagcccgggccgctggccgtcggcgcgcagatcctgcggtccgagggcgccgcgggcctcttctcgggggtgtccgccaccatgctgcggcagacgctctactccaccacgcggatggggctgtacgacatcctcaagaccaggtgggcccgggagaacggcggcgtcctcccgctgcaccgcaagatcttggccggcctcgtcgccggcggcgtcggcgccgccgtgggcaacccggccgacgtggccatggtgcggatgcaggcggacgggcgcctgcccctcgcggagcgccggaactaccgcggcgtcggcgacgccatcggccggatggcgcgcgacgagggcgtgcgcagcctctggcgcgggtcctcgctcaccgtcaaccgcgccatgatcgtcacggcgtcgcagctggccacgtacgaccaggccaaggaggccatcctggcgcgccgcggcccgggcgccgacgggctcgccacgcacgtggccgccagcttcaccgccggcatcgtcgccgccgccgcgtccaaccccgtcgacgtcgtcaagacgaggatgatgaacatgaaggtggcgcccggcgcgcccccgccctacgccggcgccgtcgactgcgccctcaagaccgtcaggtcggagggacccatggcgctgtacaaggggttcatccccaccgtcatgcgccaggggcccttcaccgttgtgctcttcgtcacgctcgagcaggtgcgcaaggtcttcaagggcgtcgagttctgagaccggcgacgaggaaagatgatgacgacaacaaacgttgcgctgccagttcgtcaccgcgttcgctgccaagaataataacccgctgccaccctagaggccgcgactactattacgccctttgcttgcattgcatcccgtgttagacttgtgctcatgcgcttcactgcatcctgttgtatctggatggatttgaccaaatgcaaattgccaacatttttattaattaaaattgctactgcaatgtctcaaccc

SEQ ID NO: 8462 - protein, 328 aa, Zea mays subsp. mays
  peptide (1)..(328): Ceres Seq. ID no. 12408464
MGVKGFVEGGIASIVAGCSTHPLDLIKVRMQLQGEAAAAVAPQPALRPALAFHAGGHAVALPHHHHHDIPAPPRKPGPLAVGAQILRSEGAAGLFSGVSATMLRQTLYSTTRMGLYDILKTRWARENGGVLPLHRKILAGLVAGGVGAAVGNPADVAMVRMQADGRLPLAERRNYRGVGDAIGRMARDEGVRSLWRGSSLTVNRAMIVTASQLATYDQAKEAILARRGPGADGLATHVAASFTAGIVAAAASNPVDVVKTRMMNMKVAPGAPPPYAGAVDCALKTVRSEGPMALYKGFIPTVMRQGPFTVVLFVTLEQVRKVFKGVEF

SEQ ID NO: 8463 - protein, 299 aa, Zea mays subsp. mays
  peptide (1)..(299): Ceres Seq. ID no. 12408465
MQLQGEAAAAVAPQPALRPALAFHAGGHAVALPHHHHHDIPAPPRKPGPLAVGAQILRSEGAAGLFSGVSATMLRQTLYSTTRMGLYDILKTRWARENGGVLPLHRKILAGLVAGGVGAAVGNPADVAMVRMQADGRLPLAERRNYRGVGDAIGRMARDEGVRSLWRGSSLTVNRAMIVTASQLATYDQAKEAILARRGPGADGLATHVAASFTAGIVAAAASNPVDVVKTRMMNMKVAPGAPPPYAGAVDCALKTVRSEGPMALYKGFIPTVMRQGPFTVVLFVTLEQVRKVFKGVEF

SEQ ID NO: 8464 - protein, 227 aa, Zea mays subsp. mays
  peptide (1)..(227): Ceres Seq. ID no. 12408466
MLRQTLYSTTRMGLYDILKTRWARENGGVLPLHRKILAGLVAGGVGAAVGNPADVAMVRMQADGRLPLAERRNYRGVGDAIGRMARDEGVRSLWRGSSLTVNRAMIVTASQLATYDQAKEAILARRGPGADGLATHVAASFTAGIVAAAASNPVDVVKTRMMNMKVAPGAPPPYAGAVDCALKTVRSEGPMALYKGFIPTVMRQGPFTVVLFVTLEQVRKVFKGVEF

SEQ ID NO: 8465 - DNA, 1427 bp, Zea mays subsp. mays
  misc_feature (1)..(1427): Ceres Seq. ID no. 12405016
  misc_feature (1)..(1427): Ortholog of  Ceres SEQ ID NO 13594193 as cited in SEQ ID NO 58558
  misc_feature (1)..(1427): Ortholog of  Ceres SEQ ID NO 15177545 as cited in SEQ ID NO 0
aagcaagcaagagactgagagaggcaggtaatacatacctgcgactgcgacgagtgagtaaagcttcatcttcttcctccttcctccggcctcttcctgagtgctgcacgcagtgcgtaggaaggaactcgcgtacgtacgtgtgctagctagctagctcgaccacgcgcagcacgcaggcgcgtagtagctcgatcgatcgaccgccggccggaaatgtcgaccaactcgaggtccaactccagggccaacttcaacaacgagatccatgacatcggcacggcgcagaactccagcatgccccccacgtactacgaccggtcgctggcggacatcttccctccgcacctcctcaagaaggtggtctcggaggtggtgtccacgttcctgctggtgttcgtcacgtgcggggcggcggggatctacggcagcgacaaggaccgcatctcgcagctggggcagtcggtcgccggcgggctcatcgtcaccgtcatgatctacgccgtcggacacatctcgggcgcgcacatgaaccccgccgtcacgctcgcgttcgccgtgttccgccatttcccctggatccaggtcccgttctactgggcggcgcagttcaccggcagcatctgcgcgtcgttcgtgctcaaggccgtgctgcaccccatcgccgtgctgggcaccaccacgccgacggggccgcactggcactcgctcgtcatcgagatcatcgtcaccttcaacatgatgttcgtcaccctcgccgtcgccacggacacgagagcggtgggtgagttggcggggttggcagttggttccgcggtttgcattacgtccatcttcgcaggggcagtgtcgggcggatcgatgaacccggcgaggacgctggggccggcgctggcgagcaacctctacaccggcctctggatctacttcctgggccccgtcctcggcacgctctccggggcctggacctacacctacatccgcttcgaggaggcgcccagccacaaggacatgtcgcagaagctctcctccttcaagctccgccgcctgcagagccagtccgtcgcggtcgacgacgacgagctcgaccacatccaagtgtgattcatgctccatcgatcagagagtgcgcacttgtttactcctcagtcctctcactctatgtatcggcaacactccctaggatatactagtggtccgtagtcatggtctatgtctatgtgtcgctcttctctcgatccatgcacgtccgtggcgcggtgtggatgggctcgctctgtcaaatgtgccaatgagctggagcttaattttgggacgaacactgtgccgtgtgctgtgtgcagccagtcgtactcgtacctctcctgctatcacttgttccaaaagcttctttggtgcttacataaagatcatctgtgccttgcacg

SEQ ID NO: 8466 - protein, 295 aa, Zea mays subsp. mays
  peptide (1)..(295): Ceres Seq. ID no. 12405017
MSTNSRSNSRANFNNEIHDIGTAQNSSMPPTYYDRSLADIFPPHLLKKVVSEVVSTFLLVFVTCGAAGIYGSDKDRISQLGQSVAGGLIVTVMIYAVGHISGAHMNPAVTLAFAVFRHFPWIQVPFYWAAQFTGSICASFVLKAVLHPIAVLGTTTPTGPHWHSLVIEIIVTFNMMFVTLAVATDTRAVGELAGLAVGSAVCITSIFAGAVSGGSMNPARTLGPALASNLYTGLWIYFLGPVLGTLSGAWTYTYIRFEEAPSHKDMSQKLSSFKLRRLQSQSVAVDDDELDHIQV

SEQ ID NO: 8467 - protein, 268 aa, Zea mays subsp. mays
  peptide (1)..(268): Ceres Seq. ID no. 12405018
MPPTYYDRSLADIFPPHLLKKVVSEVVSTFLLVFVTCGAAGIYGSDKDRISQLGQSVAGGLIVTVMIYAVGHISGAHMNPAVTLAFAVFRHFPWIQVPFYWAAQFTGSICASFVLKAVLHPIAVLGTTTPTGPHWHSLVIEIIVTFNMMFVTLAVATDTRAVGELAGLAVGSAVCITSIFAGAVSGGSMNPARTLGPALASNLYTGLWIYFLGPVLGTLSGAWTYTYIRFEEAPSHKDMSQKLSSFKLRRLQSQSVAVDDDELDHIQV

SEQ ID NO: 8468 - protein, 203 aa, Zea mays subsp. mays
  peptide (1)..(203): Ceres Seq. ID no. 12405019
MIYAVGHISGAHMNPAVTLAFAVFRHFPWIQVPFYWAAQFTGSICASFVLKAVLHPIAVLGTTTPTGPHWHSLVIEIIVTFNMMFVTLAVATDTRAVGELAGLAVGSAVCITSIFAGAVSGGSMNPARTLGPALASNLYTGLWIYFLGPVLGTLSGAWTYTYIRFEEAPSHKDMSQKLSSFKLRRLQSQSVAVDDDELDHIQV

SEQ ID NO: 8469 - DNA, 1881 bp, Zea mays subsp. mays
  misc_feature (1)..(1881): Ceres Seq. ID no. 12379651
  misc_feature (1)..(1881): Ortholog of  Ceres SEQ ID NO 15171476 as cited in SEQ ID NO 55569
  misc_feature (1)..(1881): Ortholog of  Ceres SEQ ID NO 14312069 as cited in SEQ ID NO 59191
gtcgcgcacacctcagtctcctgccgtgcgtagtgtgtacgggcaaggcggcagagctagctttcactacactcagtggccattgccgttgctagctttcaatagctcttagctgcaatgtcggcggcggcgtcgcagagcagtgtcaaggcaatggcggcggccgcagccgctgtggcaatgctgctctcggccgcggcggcggtggccgcgcagcacgattacggcgacgccctgcacaagtgcatcctcttcttcgaggggcagcgctcggggaggctcccgccggaccagcgcctccgctggcgccgcgactccggcctccacgacggcgccgcggccggggtggatctgaccggagggtactacgacgccggcgacaacgtgaagttcgggttcccgatggcgtttcacggcgacgctcatgtcgtggggcctgatcgacttcgggcgcagcttcgggccccacagggaggaggcccggaaggcggtgcggtgggcgacggactacctgatgaaggcgacggcgaagcggaacacggtgtacgtgcaggtgggcgacgcgttccgcgaccacgcgtgctgggagcggcccgaggacatggacaccccgcgcaccgtgtacaaggtggacccgtcccacccgggctccgacgtcgccgccgagaccgccgccgcgctcgccgccggctccatcgtcttccgcgacgccgaccccgcctactccaagcgcctcctcgaccgcgccgtcgccgtgttcgagttcgcggacaagtaccggggcccctacagcagcagcctccacgcggcggtgtgcccctgctactgcgactactccggataccaggacgagctgctgtggggcgcggcgtggctgcacaaggcgacgcggcggcgggagtaccgcgagtacatcaagaggaacgaggtggtgctcggcgccagcgacgccatcaacgagttcggctgggacaacaagcacgccggcatcaacgtcctcatctcaaaggaggttctgatggggaaggacgagtacttccagtccttccgtgtcaacgccgacaacttcatgtgcaccctcctccccggcatctccaatcacccccagatccagtactccccaggcgggctgctgttcaaggtcgggagcagcaacatgcagcacgtgacgcagctgtcgttcctcctgctggcctactccaactacctgagccacgccggcgggcgcgtctcgtgcggctcgtcgtcggcgtcgccggtgcagctccgccgcgtggccaagcggcaggtggactacatactgggcgacaacccgctgcggatgtcgtacatggttggggtacggcgcgcggttcccgcggcggatccaccaccgccgccagctccgctgccgtccgtggcggcgcacccggcgcggatcggctgcaaggccggcgccgcctactacaccagcccggcgcccaacccgaacctgctcgtgggcgccgtcgtgggcgggcccaccgacgactccgacgccttccccgacgcgcgcgccgtgttccagcagtcctagcccaccacgtacatcaacgcgccgctcatgggcctcctcgcctacttctcggcacatcccaacccagccgagtcgggcggcgactgaaaaaagcctagggagagtgatagatgacgaacgcacgcacgggcctgggtattttagatgggctttggtttgtcttgttcgggcccgattgttgcctggtgtatccgtacgagtagttgtaactagttaaccagagccactcccttgcctgcaaaagaaagaccagggaagaggaattagtaggctccaagattgtattagctgttaagattatatacgctagtagcaaggttaactgt

SEQ ID NO: 8470 - protein, 511 aa, Zea mays subsp. mays
  peptide (1)..(511): Ceres Seq. ID no. 12379652
MSAAASQSSVKAMAAAAAAVAMLLSAAAAVAAQHDYGDALHKCILFFEGQRSGRLPPDQRLRWRRDSGLHDGAAAGVDLTGGYYDAGDNVKFGFPMAFHGDAHVVGPDRLRAQLRAPQGGGPEGGAVGDGLPDEGDGEAEHGVRAGGRRVPRPRVLGAARGHGHPAHRVQGGPVPPGLRRRRRDRRRARRRLHRLPRRRPRLLQAPPRPRRRRVRVRGQVPGPLQQQPPRGGVPLLLRLLRIPGRAAVGRGVAAQGDAAAGVPRVHQEERGGARRQRRHQRVRLGQQARRHQRPHLKGGSDGEGRVLPVLPCQRRQLHVHPPPRHLQSPPDPVLPRRAAVQGREQQHAARDAAVVPPAGLLQLPEPRRRARLVRLVVGVAGAAPPRGQAAGGLHTGRQPAADVVHGWGTARGSRGGSTTAASSAAVRGGAPGADRLQGRRRLLHQPGAQPEPARGRRRGRAHRRLRRLPRRARRVPAVLAHHVHQRAAHGPPRLLLGTSQPSRVGRRLKKA

SEQ ID NO: 8471 - protein, 499 aa, Zea mays subsp. mays
  peptide (1)..(499): Ceres Seq. ID no. 12379653
MAAAAAAVAMLLSAAAAVAAQHDYGDALHKCILFFEGQRSGRLPPDQRLRWRRDSGLHDGAAAGVDLTGGYYDAGDNVKFGFPMAFHGDAHVVGPDRLRAQLRAPQGGGPEGGAVGDGLPDEGDGEAEHGVRAGGRRVPRPRVLGAARGHGHPAHRVQGGPVPPGLRRRRRDRRRARRRLHRLPRRRPRLLQAPPRPRRRRVRVRGQVPGPLQQQPPRGGVPLLLRLLRIPGRAAVGRGVAAQGDAAAGVPRVHQEERGGARRQRRHQRVRLGQQARRHQRPHLKGGSDGEGRVLPVLPCQRRQLHVHPPPRHLQSPPDPVLPRRAAVQGREQQHAARDAAVVPPAGLLQLPEPRRRARLVRLVVGVAGAAPPRGQAAGGLHTGRQPAADVVHGWGTARGSRGGSTTAASSAAVRGGAPGADRLQGRRRLLHQPGAQPEPARGRRRGRAHRRLRRLPRRARRVPAVLAHHVHQRAAHGPPRLLLGTSQPSRVGRRLKKA

SEQ ID NO: 8472 - protein, 490 aa, Zea mays subsp. mays
  peptide (1)..(490): Ceres Seq. ID no. 12379654
MLLSAAAAVAAQHDYGDALHKCILFFEGQRSGRLPPDQRLRWRRDSGLHDGAAAGVDLTGGYYDAGDNVKFGFPMAFHGDAHVVGPDRLRAQLRAPQGGGPEGGAVGDGLPDEGDGEAEHGVRAGGRRVPRPRVLGAARGHGHPAHRVQGGPVPPGLRRRRRDRRRARRRLHRLPRRRPRLLQAPPRPRRRRVRVRGQVPGPLQQQPPRGGVPLLLRLLRIPGRAAVGRGVAAQGDAAAGVPRVHQEERGGARRQRRHQRVRLGQQARRHQRPHLKGGSDGEGRVLPVLPCQRRQLHVHPPPRHLQSPPDPVLPRRAAVQGREQQHAARDAAVVPPAGLLQLPEPRRRARLVRLVVGVAGAAPPRGQAAGGLHTGRQPAADVVHGWGTARGSRGGSTTAASSAAVRGGAPGADRLQGRRRLLHQPGAQPEPARGRRRGRAHRRLRRLPRRARRVPAVLAHHVHQRAAHGPPRLLLGTSQPSRVGRRLKKA

SEQ ID NO: 8473 - protein, 376 aa, Zea mays subsp. mays
  peptide (1)..(376): Ceres Seq. ID no. 12379655
MSWGLIDFGRSFGPHREEARKAVRWATDYLMKATAKRNTVYVQVGDAFRDHACWERPEDMDTPRTVYKVDPSHPGSDVAAETAAALAAGSIVFRDADPAYSKRLLDRAVAVFEFADKYRGPYSSSLHAAVCPCYCDYSGYQDELLWGAAWLHKATRRREYREYIKRNEVVLGASDAINEFGWDNKHAGINVLISKEVLMGKDEYFQSFRVNADNFMCTLLPGISNHPQIQYSPGGLLFKVGSSNMQHVTQLSFLLLAYSNYLSHAGGRVSCGSSSASPVQLRRVAKRQVDYILGDNPLRMSYMVGVRRAVPAADPPPPPAPLPSVAAHPARIGCKAGAAYYTSPAPNPNLLVGAVVGGPTDDSDAFPDARAVFQQS

SEQ ID NO: 8474 - DNA, 1342 bp, Zea mays subsp. mays
  misc_feature (1)..(1342): Ceres Seq. ID no. 12546334
  misc_feature (1)..(1342): Ortholog of  Ceres SEQ ID NO 15175048 as cited in SEQ ID NO 59975
  misc_feature (1)..(1342): Ortholog of  Ceres SEQ ID NO 14303542 as cited in SEQ ID NO 63539
  misc_feature (1)..(1342): Ortholog of  Ceres SEQ ID NO 13597333 as cited in SEQ ID NO 63974
  misc_feature (1)..(1342): Ortholog of  Ceres SEQ ID NO 12407937 as cited in SEQ ID NO 0
  misc_feature (1)..(1342): Ortholog of  Ceres SEQ ID NO 13599307 as cited in SEQ ID NO 0
aatatataccgttcctccgttcgtcccctccggccctctctccatccctgcccacgaccctccgccaccaggcaccagccatcgcctgcatcagatctcccgcccgtccgttacatcccagggcgacgcggccgcggccatgacgccatcctcagctctcgccctcgcgcaccacgccgcggtatccccgctcccgtcctccacgccgcggccctcccccaggtccagctctctgagcctgggcccgggctccgccgggctcgggccgcgccggctcgtcgcggcggcgcccccacgggcgttcttctcctcgtccccctaccagccgccccagccggaggggttctcgcagcaccgcgagtacggcctggtccccatggtcatcgagaccacctcccggggggagcgcgcctacgacatcttctcgcgcctgcttaaggagcgcatcgtctgcatccacgggcccatcgccgacgacacggcctcgctcgtcgtcgcgcagctgctcttcctcgagtccgagaacccgctcaagcccgtccacctctacatcaactcccccgggggcgtcgtcaccgcggggctcgccatctacgacaccatgcagtacatccgctgccccgtcaccaccctctgcatcggccaggcggcctccatgggctcgctcctcctcgcggctggggcgccgggtgagaggcgcgcgcttcccaacgccagggtcatgatccaccagccctcgggcggcgcgcaggggcaagccaccgacatcgccatccaggccaaggagatcctcaaaatgcgcgaccgcctcaacaagatctaccagaagcacacgcgccagcccatcgataagattgagcagtgcatggagagggacctcttcatggaccctgaagaggcgcgcgactggggcctcatcgacgaggtcatcgagaatcgacctgcctcgttcatgcccgacggaatcggtggaggcctcgatgtgcccaggctcggtggcgttggcggcggacgggggagggacgtcgaggaaccttccgcggtgtgaggattggcctcaaaggtgaaatccttcctcatccggtggatgtgttgtttgttgttagatccaaaggttcaattcttactatacaaggttaaccttgttattatggttatggaaacgtccggctccccattgtccttgttgcttaaattgcttcaattgagctattggggatataattattgcaactctaaggaaattctgcactgttgatactgataaattgacacagtattgtgtatgttgtactatatttgtatcaattccatgccaggacattcaaactttttcctcttt

SEQ ID NO: 8475 - protein, 348 aa, Zea mays subsp. mays
  peptide (1)..(348): Ceres Seq. ID no. 12546335
IYTVPPFVPSGPLSIPAHDPPPPGTSHRLHQISRPSVTSQGDAAAAMTPSSALALAHHAAVSPLPSSTPRPSPRSSSLSLGPGSAGLGPRRLVAAAPPRAFFSSSPYQPPQPEGFSQHREYGLVPMVIETTSRGERAYDIFSRLLKERIVCIHGPIADDTASLVVAQLLFLESENPLKPVHLYINSPGGVVTAGLAIYDTMQYIRCPVTTLCIGQAASMGSLLLAAGAPGERRALPNARVMIHQPSGGAQGQATDIAIQAKEILKMRDRLNKIYQKHTRQPIDKIEQCMERDLFMDPEEARDWGLIDEVIENRPASFMPDGIGGGLDVPRLGGVGGGRGRDVEEPSAV

SEQ ID NO: 8476 - protein, 302 aa, Zea mays subsp. mays
  peptide (1)..(302): Ceres Seq. ID no. 12546336
MTPSSALALAHHAAVSPLPSSTPRPSPRSSSLSLGPGSAGLGPRRLVAAAPPRAFFSSSPYQPPQPEGFSQHREYGLVPMVIETTSRGERAYDIFSRLLKERIVCIHGPIADDTASLVVAQLLFLESENPLKPVHLYINSPGGVVTAGLAIYDTMQYIRCPVTTLCIGQAASMGSLLLAAGAPGERRALPNARVMIHQPSGGAQGQATDIAIQAKEILKMRDRLNKIYQKHTRQPIDKIEQCMERDLFMDPEEARDWGLIDEVIENRPASFMPDGIGGGLDVPRLGGVGGGRGRDVEEPSAV

SEQ ID NO: 8477 - protein, 223 aa, Zea mays subsp. mays
  peptide (1)..(223): Ceres Seq. ID no. 12546337
MVIETTSRGERAYDIFSRLLKERIVCIHGPIADDTASLVVAQLLFLESENPLKPVHLYINSPGGVVTAGLAIYDTMQYIRCPVTTLCIGQAASMGSLLLAAGAPGERRALPNARVMIHQPSGGAQGQATDIAIQAKEILKMRDRLNKIYQKHTRQPIDKIEQCMERDLFMDPEEARDWGLIDEVIENRPASFMPDGIGGGLDVPRLGGVGGGRGRDVEEPSAV

SEQ ID NO: 8478 - DNA, 1251 bp, Zea mays subsp. mays
  misc_feature (1)..(1251): Ceres Seq. ID no. 12566852
  misc_feature (1)..(1251): Ortholog of  Ceres SEQ ID NO 14314390 as cited in SEQ ID NO 57717
tagactatcataaggaaacaaactagctattacaagggaataatccagactgctatcagtcctgatcttgctgattggatccgtcaatataagactgatccactaccatacttgctatttcctaaaacagaataagtaaactagcaccaatcaaggattactttcctaacaatgcatatatccgtatcaacctacagaatgtttttactggatctaaactcaatctaggtcattcctattgtcattgatatatctgtgcaaagtgcaaacctacatacccatctaaacattatttcagagtaatagtttctacatggatcatgttgcttctatggctgtctcatgtttgatactggacattagaatatgctcctttcaagttcttgcgtaaaagaaaattttgcattctgattctactgttttttttggagcatcatgttagctgaaacctcaggtgtcctgaatatgtcaagcatccctctggttctgaaaaatttcaacaatccagcattaaagagtgccatttgtgccttttccatgcagataacttggcagctaacttcagcagagaattagcagactacataatctacattatcgatgtctctggtggggacaagataccaagaaaaggtggccctgggataacccaggccgatctgttggtgcgtcgtgctgtattcaccagcatcatctataaccttgtgcacttaacttcatttgtagctctgcaaacttattttgacttttgcacactggtcatattttattggccggcataaaatgtctgagtttctgaactcaggtaataaacaagacagacctaacacctgctgttggagctgatctgtctgtaatggagcgagacgcacttcgcatgcgcgaaggagggccctttgtgtttgcacaggtgaaacatggagtgggcgtggaggggatcgtgaaccatattctgcaggcgtgggagatcgcgactggtaataagcggcgataagatctcacgacttggggccatatgttggatgcagatttgattcagtcggcacttccacatgcatgtgtcatctgttcgtttctcaataaattctgcgtcatttgctgctgattgtacttgacaagtagagacatggatggactcttaaaattccatccatgtgttaaatgacatattcgagacatccttttctcaataaactctgcatcatttggtgaattgcacttgagaagtaaagacatggagccttaaaattc

SEQ ID NO: 8479 - protein, 46 aa, Zea mays subsp. mays
  peptide (1)..(46): Ceres Seq. ID no. 12566853
MLAETSGVLNMSSIPLVLKNFNNPALKSAICAFSMQITWQLTSAEN

SEQ ID NO: 8480 - protein, 45 aa, Zea mays subsp. mays
  peptide (1)..(45): Ceres Seq. ID no. 12566854
MERDALRMREGGPFVFAQVKHGVGVEGIVNHILQAWEIATGNKRR

SEQ ID NO: 8481 - protein, 38 aa, Zea mays subsp. mays
  peptide (1)..(38): Ceres Seq. ID no. 12566855
MREGGPFVFAQVKHGVGVEGIVNHILQAWEIATGNKRR

SEQ ID NO: 8482 - DNA, 1287 bp, Zea mays subsp. mays
  misc_feature (1)..(1287): Ceres Seq. ID no. 12356579
  misc_feature (1)..(1287): Ortholog of  Ceres SEQ ID NO 13598387 as cited in SEQ ID NO 62757
  misc_feature (1)..(1287): Ortholog of  Ceres SEQ ID NO 13662984 as cited in SEQ ID NO 64419
ctaaaactaaggcatagcggtaaacaccaccgaagtctcagcttctccgaggaaggggcgcaattgctgaagcagccacttcaccttgggcccatacagaaatggcggcttcttgcgcctccacactcccttcactttccttcgtttcctcctccagttcatcccgccgattcaggcgctctggtgtggtggccatggccagcgttgggcagaaggtgtatgcgcccggtgtggcggtgtcggagggcaatggcgggctgccgaaaatcgacctcaaatccccgcacgggagcgaggctgagatttatctgtttggagcgtgtgttacttctttcaaagtccctaatggcaaggacctgctctttgttcgaccagatgctgtgtttaatggacagaaacccatcagcggtggaattccacattgtttcccccagtttggcccaggtcccatgcagcagcatgggtttgcacggaatgtgaattggtctatcacagattcagaagtcacagaaggagatccagctgtaactttggaactgaaagatgacacttatagccgttctatgtgggatttcagcttccatgcactgtacaaggtttccctgcactctaaaagcttgtcaacaactctagcaataataaatacagatgacaagcctttctcattcaactcagccctccacacttatttcagtgcttccataactggcgtttctgtgaaaggtctaaaaggttgcaagactctcaataaggaccctgacccaaaaaatcctttggagggcaaagaagagagggaagaggtgacttttccaggattcgtcgactgcgtctaccttggtgcaccaagtgaactcatcctggacaatggattgggtgacaaaattgccattgcaaattcaaattggtcagatgcagtcttgtggaatcctcacttgcagatggaggcctgctacaaagattttgtctgtgtggaaaacgccaagattgaaatggtacaactggagccaaaacaatcttgggtggcagaacagaaaattgaactagtctgatgataatgtcttgcagcaactgcatcaagtagagtgagacgcagatggcgctcccccagtgtcattcttcatggcacatgtcatcacaatagctatacatgtgatgttttctgttaaaaagaataaatgatgcaaatcatgaatttttttctagcagtctgatgtgtattgaattgcaaatgtacaatttgaactgcatggatctgttgaaataaagggagtgcccatttgatctttg

SEQ ID NO: 8483 - protein, 315 aa, Zea mays subsp. mays
  peptide (1)..(315): Ceres Seq. ID no. 12356580
MAASCASTLPSLSFVSSSSSSRRFRRSGVVAMASVGQKVYAPGVAVSEGNGGLPKIDLKSPHGSEAEIYLFGACVTSFKVPNGKDLLFVRPDAVFNGQKPISGGIPHCFPQFGPGPMQQHGFARNVNWSITDSEVTEGDPAVTLELKDDTYSRSMWDFSFHALYKVSLHSKSLSTTLAIINTDDKPFSFNSALHTYFSASITGVSVKGLKGCKTLNKDPDPKNPLEGKEEREEVTFPGFVDCVYLGAPSELILDNGLGDKIAIANSNWSDAVLWNPHLQMEACYKDFVCVENAKIEMVQLEPKQSWVAEQKIELV

SEQ ID NO: 8484 - protein, 284 aa, Zea mays subsp. mays
  peptide (1)..(284): Ceres Seq. ID no. 12356581
MASVGQKVYAPGVAVSEGNGGLPKIDLKSPHGSEAEIYLFGACVTSFKVPNGKDLLFVRPDAVFNGQKPISGGIPHCFPQFGPGPMQQHGFARNVNWSITDSEVTEGDPAVTLELKDDTYSRSMWDFSFHALYKVSLHSKSLSTTLAIINTDDKPFSFNSALHTYFSASITGVSVKGLKGCKTLNKDPDPKNPLEGKEEREEVTFPGFVDCVYLGAPSELILDNGLGDKIAIANSNWSDAVLWNPHLQMEACYKDFVCVENAKIEMVQLEPKQSWVAEQKIELV

SEQ ID NO: 8485 - protein, 199 aa, Zea mays subsp. mays
  peptide (1)..(199): Ceres Seq. ID no. 12356582
MQQHGFARNVNWSITDSEVTEGDPAVTLELKDDTYSRSMWDFSFHALYKVSLHSKSLSTTLAIINTDDKPFSFNSALHTYFSASITGVSVKGLKGCKTLNKDPDPKNPLEGKEEREEVTFPGFVDCVYLGAPSELILDNGLGDKIAIANSNWSDAVLWNPHLQMEACYKDFVCVENAKIEMVQLEPKQSWVAEQKIELV

SEQ ID NO: 8486 - DNA, 1165 bp, Zea mays subsp. mays
  misc_feature (1)..(1165): Ceres Seq. ID no. 12387009
  misc_feature (1)..(1165): Ortholog of  Ceres SEQ ID NO 14313014 as cited in SEQ ID NO 54841
  misc_feature (1)..(1165): Ortholog of  Ceres SEQ ID NO 14316091 as cited in SEQ ID NO 57622
  misc_feature (1)..(1165): Ortholog of  Ceres SEQ ID NO 13639317 as cited in SEQ ID NO 59781
  misc_feature (1)..(1165): Ortholog of  Ceres SEQ ID NO 13654578 as cited in SEQ ID NO 68583
gagctaccccatttccccacccccagcaccccactccccgcttccatttccttggaccccaccaccgcgcctacatccctcagagctcagatgcagccgccggcgaccgagatgcacccggccgccgacgccgccacctccgccgccaccgcgcaggccgacactactgctcgcgccgccgtccccgcatccgatccacccccgcccccgccggcgccggcggctganacggtcgatccgccgcccccgccgccagcgccggcgcccaagacggtcacctggagcgagaagctcacgtccgactcgccgacgcacgtgcacgccgccgccgcggcggagtccagccagtacgtgtcccgtgggcccgcatcctcgtctaagggcgccgtggaggcgatgagggagacgctgtcaaggtgggggaagtcgtggggggagaccaccaagctggtcgagagcctcagccgcgacacgtggcaacacttcaagactggacctagttttactgaagctgctatgggacgcctagcacaagggactaaagttttagcagaaggaggctatgaaaaaatatttaagcagaccttcgaggttcttccagacgaggagctgaaaatatgctatgcgtgctatctctcaacatcagcaggtcctgtcatgggagtcttgtatatttctacagcgaagattgctttctgcagtgacaatcctctgtcatacaaagctggaaataaaactgaatggagttactacaaggtggtcattcctcttcaccagctaagagcagctaatccttcagtaagcaaagtaaatcccgctgagaagtacattcaggtcgtttccgttgaagggcatgagttctggttcatgggttttctaatgtacgacaaggctgcagccagtcttcaagaagccttggctagtgctcgtgagttgcaaccgtgaagacaccaagtggtgttctttccggttacatacatcagtttccacatctcgagttcaggctgggtcgctgggattcttctcctgtttcagatcctttttgctgaagcttttgacacagtacacccacaggcctgcatacgtgtcagaaatgtgtgccattcctgtcaatgttgtaatcatgacagatatttatatatatggaaaaacactgccgctgtcc

SEQ ID NO: 8487 - protein, 314 aa, Zea mays subsp. mays
  peptide (1)..(314): Ceres Seq. ID no. 12387010
  misc_feature (76)..(76): Xaa is any aa, unknown or other
ELPHFPTPSTPLPASISLDPTTAPTSLRAQMQPPATEMHPAADAATSAATAQADTTARAAVPASDPPPPPPAPAAXTVDPPPPPPAPAPKTVTWSEKLTSDSPTHVHAAAAAESSQYVSRGPASSSKGAVEAMRETLSRWGKSWGETTKLVESLSRDTWQHFKTGPSFTEAAMGRLAQGTKVLAEGGYEKIFKQTFEVLPDEELKICYACYLSTSAGPVMGVLYISTAKIAFCSDNPLSYKAGNKTEWSYYKVVIPLHQLRAANPSVSKVNPAEKYIQVVSVEGHEFWFMGFLMYDKAAASLQEALASARELQP

SEQ ID NO: 8488 - protein, 284 aa, Zea mays subsp. mays
  peptide (1)..(284): Ceres Seq. ID no. 12387011
  misc_feature (46)..(46): Xaa is any aa, unknown or other
MQPPATEMHPAADAATSAATAQADTTARAAVPASDPPPPPPAPAAXTVDPPPPPPAPAPKTVTWSEKLTSDSPTHVHAAAAAESSQYVSRGPASSSKGAVEAMRETLSRWGKSWGETTKLVESLSRDTWQHFKTGPSFTEAAMGRLAQGTKVLAEGGYEKIFKQTFEVLPDEELKICYACYLSTSAGPVMGVLYISTAKIAFCSDNPLSYKAGNKTEWSYYKVVIPLHQLRAANPSVSKVNPAEKYIQVVSVEGHEFWFMGFLMYDKAAASLQEALASARELQP

SEQ ID NO: 8489 - protein, 277 aa, Zea mays subsp. mays
  peptide (1)..(277): Ceres Seq. ID no. 12387012
  misc_feature (39)..(39): Xaa is any aa, unknown or other
MHPAADAATSAATAQADTTARAAVPASDPPPPPPAPAAXTVDPPPPPPAPAPKTVTWSEKLTSDSPTHVHAAAAAESSQYVSRGPASSSKGAVEAMRETLSRWGKSWGETTKLVESLSRDTWQHFKTGPSFTEAAMGRLAQGTKVLAEGGYEKIFKQTFEVLPDEELKICYACYLSTSAGPVMGVLYISTAKIAFCSDNPLSYKAGNKTEWSYYKVVIPLHQLRAANPSVSKVNPAEKYIQVVSVEGHEFWFMGFLMYDKAAASLQEALASARELQP

SEQ ID NO: 8490 - DNA, 1500 bp, Zea mays subsp. mays
  misc_feature (1)..(1500): Ceres Seq. ID no. 12408444
  misc_feature (1)..(1500): Ortholog of  Ceres SEQ ID NO 14311515 as cited in SEQ ID NO 51680
  misc_feature (1)..(1500): Ortholog of  Ceres SEQ ID NO 13582301 as cited in SEQ ID NO 56509
  misc_feature (1)..(1500): Ortholog of  Ceres SEQ ID NO 13595567 as cited in SEQ ID NO 56760
  misc_feature (1)..(1500): Ortholog of  Ceres SEQ ID NO 13594147 as cited in SEQ ID NO 58975
  misc_feature (1)..(1500): Ortholog of  Ceres SEQ ID NO 13655302 as cited in SEQ ID NO 63307
  misc_feature (1)..(1500): Ortholog of  Ceres SEQ ID NO 13597380 as cited in SEQ ID NO 64054
  misc_feature (1)..(1500): Ortholog of  Ceres SEQ ID NO 12625474 as cited in SEQ ID NO 64169
  misc_feature (1)..(1500): Ortholog of  Ceres SEQ ID NO 13597502 as cited in SEQ ID NO 64681
aagttcgatccagattatagcagctagctcaccgtcaccgacatacagtacaatagcagcttattagcttgtgtcagtccatccatccatccatggagaaactcgtctacttcgcgaccattatatccttatccatggcggcgctgctagtgccactccgcgtacagtgcgaagaagcagctagagctgctgctgccagaagctgccatgccggcaccggagcttctgcttctgcaccagccgcagcagcagcgtggaaaaggagctgcggcggcggcaaggcggggaagcagcagccgcaggtggagggcatgttcgtgttcgggagctcgctggtggacaacggcaacaacaactttctcaacggctccggcgtgcgcgcagactacctcccctacggcgtggacttccccctcggcccctccggccgtttctccaacggccgcaacgtcatcgacgcgctcggcgagctcctcggcctccccgggctcgtcccacccttcgccgacccgcgcacccggcgggcccgcgccgcgctgcgcggcgtcaacttcgcctccggcggctccggcatcctggagcacaccgggcagggcaaggtggtgagcctgcggcagcagatcaccaactttgagtcggtgacccttcctgacctgcgggcccaactgcgtggaccagctgcggccgccaaccactggatcaagggtcaagattccttccacaagtgctacctctccaagtgcctcttcgtcatcggcacaggtggcaatgactacctgctcgactacttcaaccccgggaacggcacccaaggtgggccgcccttgtcagagttcactgcgtctctcatcaccaagctctccggacatcttcagaggttgtacgctcttggcgcacggaagtttgtgatcttctcgatccagccgaccgggtgcacccccgtggtacgggcgttcctcaacatcaccggcggcgcctgcatcgagccggtgaacgacgcggtggcgctcttcaacgccgagctcaggcggctggtggatggcgcgaggcggcgcatgcccgccgccaggttcgcctttatcgactcctacaggatcatcaaggacatgctggaccaccccgccaaacatggcgttagggagacgagcagagcctgctgcgagatgtcgaggagctcgtcgggcgtgctgtgcaagaagcaggggcccatctgcagcgaccggacggagtacgtcttcttcgacgggctgcacccgacggacgccgtgaacgccaggatcgcgcgcaagggctacggctccagctcgcccgaccacgcctaccccatcaacgtcaagaagctagccatgctgtagcccttgtagaagctagccatgcatgcttgtaacctagctttgtactagtagtaataatctagaattaatgcctacctcatcaacgccaacatcgttcgactacttactagtagtactagttctctgtgaaatagtctaataagcc

SEQ ID NO: 8491 - protein, 420 aa, Zea mays subsp. mays
  peptide (1)..(420): Ceres Seq. ID no. 12408445
MEKLVYFATIISLSMAALLVPLRVQCEEAARAAAARSCHAGTGASASAPAAAAAWKRSCGGGKAGKQQPQVEGMFVFGSSLVDNGNNNFLNGSGVRADYLPYGVDFPLGPSGRFSNGRNVIDALGELLGLPGLVPPFADPRTRRARAALRGVNFASGGSGILEHTGQGKVVSLRQQITNFESVTLPDLRAQLRGPAAAANHWIKGQDSFHKCYLSKCLFVIGTGGNDYLLDYFNPGNGTQGGPPLSEFTASLITKLSGHLQRLYALGARKFVIFSIQPTGCTPVVRAFLNITGGACIEPVNDAVALFNAELRRLVDGARRRMPAARFAFIDSYRIIKDMLDHPAKHGVRETSRACCEMSRSSSGVLCKKQGPICSDRTEYVFFDGLHPTDAVNARIARKGYGSSSPDHAYPINVKKLAML

SEQ ID NO: 8492 - protein, 406 aa, Zea mays subsp. mays
  peptide (1)..(406): Ceres Seq. ID no. 12408446
MAALLVPLRVQCEEAARAAAARSCHAGTGASASAPAAAAAWKRSCGGGKAGKQQPQVEGMFVFGSSLVDNGNNNFLNGSGVRADYLPYGVDFPLGPSGRFSNGRNVIDALGELLGLPGLVPPFADPRTRRARAALRGVNFASGGSGILEHTGQGKVVSLRQQITNFESVTLPDLRAQLRGPAAAANHWIKGQDSFHKCYLSKCLFVIGTGGNDYLLDYFNPGNGTQGGPPLSEFTASLITKLSGHLQRLYALGARKFVIFSIQPTGCTPVVRAFLNITGGACIEPVNDAVALFNAELRRLVDGARRRMPAARFAFIDSYRIIKDMLDHPAKHGVRETSRACCEMSRSSSGVLCKKQGPICSDRTEYVFFDGLHPTDAVNARIARKGYGSSSPDHAYPINVKKLAML

SEQ ID NO: 8493 - protein, 347 aa, Zea mays subsp. mays
  peptide (1)..(347): Ceres Seq. ID no. 12408447
MFVFGSSLVDNGNNNFLNGSGVRADYLPYGVDFPLGPSGRFSNGRNVIDALGELLGLPGLVPPFADPRTRRARAALRGVNFASGGSGILEHTGQGKVVSLRQQITNFESVTLPDLRAQLRGPAAAANHWIKGQDSFHKCYLSKCLFVIGTGGNDYLLDYFNPGNGTQGGPPLSEFTASLITKLSGHLQRLYALGARKFVIFSIQPTGCTPVVRAFLNITGGACIEPVNDAVALFNAELRRLVDGARRRMPAARFAFIDSYRIIKDMLDHPAKHGVRETSRACCEMSRSSSGVLCKKQGPICSDRTEYVFFDGLHPTDAVNARIARKGYGSSSPDHAYPINVKKLAML

SEQ ID NO: 8494 - DNA, 1094 bp, Zea mays subsp. mays
  misc_feature (1)..(1094): Ceres Seq. ID no. 12359506
  misc_feature (1)..(1094): Ortholog of  Ceres SEQ ID NO 15225613 as cited in SEQ ID NO 649
  misc_feature (1)..(1094): Ortholog of  Ceres SEQ ID NO 13647762 as cited in SEQ ID NO 20426
  misc_feature (1)..(1094): Ortholog of  Ceres SEQ ID NO 15171289 as cited in SEQ ID NO 51570
agcaacctcccttcctttccctcccccacccctcctgctgcagtctctcctcctcagcggacccggtcctggatggccgccttcttcgctgctgctccgccgccggcggcgggtgctctcgcgtcgttccaccacgaggagcagcagcgtcaggacgccgccgaggagctgtaccacgtggacgacgacgtcggcggccagcaggggaagctgtgcgccaggggccactggcgccccgccgaggacgccaagctcaaggagctcgtcgcgcagtacgggccccagaactggaacctcatcgccgagaggctggacggcagatcagggaagagctgccgcctgcggtggttcaaccagctagacccgcggatcaaccgccgggccttctccggcgaggaggaggagcggctgctggcggcgcaccgcgcgtacggcaacaagtgggcgctcatcgcgcgcctcttccccggccgcaccgacaacgccgtcaagaaccactggcacgtcctcatggcgcgcaagcagcgggagcacaccggcgcgctccgccggcgcaagccctcgtcctcgccctcgccggacccggcgccgccgccgccgcaattggcgcccgtcgtcgtcctcctccaccaccaccagcagcaccacgccggctcgcctccgcgcgccgccgctcacgcgcagttacacggcagcggacacccgcgcgcacagcggcggcgagtccgacgagaccgcgtccacctgcaccaccgacctgtccctcggctccgccgccccccctgcttctaccagagtggctacgacgcggccccgcgcgccgcggccttcgcgccgagcgcgcgctccgccttctccgcgccgccggcgtcggcgcgccatggcgagccacgctccgacgacaaggtgtcgccgcccttcttcgacttcctcggcgtcggcgcggcatgatcggggagggggcccccgcggcggtgtacaggaggcgggccgaaagacgcgtagtttagctttagggtccagttaatgatcaagaacatggcctgagagaggagaaagaatggtgatgaactggtgtcgtggcactgcagagt

SEQ ID NO: 8495 - protein, 335 aa, Zea mays subsp. mays
  peptide (1)..(335): Ceres Seq. ID no. 12359507
QPPFLSLPHPSCCSLSSSADPVLDGRLLRCCSAAGGGCSRVVPPRGAAASGRRRGAVPRGRRRRRPAGEAVRQGPLAPRRGRQAQGARRAVRAPELEPHRREAGRQIREELPPAVVQPARPADQPPGLLRRGGGAAAGGAPRVRQQVGAHRAPLPRPHRQRRQEPLARPHGAQAAGAHRRAPPAQALVLALAGPGAAAAAIGARRRPPPPPPAAPRRLASARRRSRAVTRQRTPARTAAASPTRPRPPAPPTCPSAPPPPLLLPEWLRRGPARRGLRAERALRLLRAAGVGAPWRATLRRQGVAALLRLPRRRRGMIGEGAPAAVYRRRAERRVV

SEQ ID NO: 8496 - protein, 316 aa, Zea mays subsp. mays
  peptide (1)..(316): Ceres Seq. ID no. 12359508
SNLPSFPSPTPPAAVSPPQRTRSWMAAFFAAAPPPAAGALASFHHEEQQRQDAAEELYHVDDDVGGQQGKLCARGHWRPAEDAKLKELVAQYGPQNWNLIAERLDGRSGKSCRLRWFNQLDPRINRRAFSGEEEERLLAAHRAYGNKWALIARLFPGRTDNAVKNHWHVLMARKQREHTGALRRRKPSSSPSPDPAPPPPQLAPVVVLLHHHQQHHAGSPPRAAAHAQLHGSGHPRAQRRRVRRDRVHLHHRPVPRLRRPPCFYQSGYDAAPRAAAFAPSARSAFSAPPASARHGEPRSDDKVSPPFFDFLGVGAA

SEQ ID NO: 8497 - protein, 292 aa, Zea mays subsp. mays
  peptide (1)..(292): Ceres Seq. ID no. 12359509
MAAFFAAAPPPAAGALASFHHEEQQRQDAAEELYHVDDDVGGQQGKLCARGHWRPAEDAKLKELVAQYGPQNWNLIAERLDGRSGKSCRLRWFNQLDPRINRRAFSGEEEERLLAAHRAYGNKWALIARLFPGRTDNAVKNHWHVLMARKQREHTGALRRRKPSSSPSPDPAPPPPQLAPVVVLLHHHQQHHAGSPPRAAAHAQLHGSGHPRAQRRRVRRDRVHLHHRPVPRLRRPPCFYQSGYDAAPRAAAFAPSARSAFSAPPASARHGEPRSDDKVSPPFFDFLGVGAA

SEQ ID NO: 8498 - DNA, 1621 bp, Zea mays subsp. mays
  misc_feature (1)..(1621): Ceres Seq. ID no. 12408436
  misc_feature (1)..(1621): Ortholog of  Ceres SEQ ID NO 14315626 as cited in SEQ ID NO 52943
  misc_feature (1)..(1621): Ortholog of  Ceres SEQ ID NO 13584616 as cited in SEQ ID NO 65234
  misc_feature (1)..(1621): Ortholog of  Ceres SEQ ID NO 14302742 as cited in SEQ ID NO 66899
  misc_feature (1)..(1621): Ortholog of  Ceres SEQ ID NO 14313536 as cited in SEQ ID NO 67925
ctctcttttccgccctccacccctcgcgagctctccacccctccacacgaccctcctcggcggcggcggcggcgatgcagatggcggcgaccaccaccgagtcccaaccggccgtgccgcctcaacaccctcacgcccacccccacgcgcccccgcagcatgctcatccgcaccaccacatgccgcagccacggtgggtcgtcatcccgtacccgccgccgccgcccatggtggccgcgccaccaccaccgccgcagtttgccaagcacttcgctgctgggccgccgccgccgccccaagctggtgctgggcgccgcacgccgaccccgccctcgtctggatccggcgggaacgggtgcgaagaaaataaaaccatttgggtcggtgacctccagtactggatggatgaaaactacctacataactgcttcgggcccagcggcgaggtggttacaataaaagttatccgcaataggcaaacaggacagtcagaggggtatggatttgttgagttcttttctcatgcatcagcagagaaagctcttcagaattttactggtcatgtgatgccaaacactgaccggccatttaaattgaactgggcatcgtatagcatgggtgaaaagcgatctgaagtggcttctgatcactcgatatttgttggcgatctagctgctgatgtcactgatgaaatgctgctggagcttttctccagcaagtaccgctcggtgaaaggagctaaagttattattgatgcaaacacaggccgttccaggggctatggatttgtcaggtttggagacgacaacgacaaatctcatgccatgtctgaaatgaatggtgtatattgctctacgaggccaattcgtataggacctgcgactcccagaagatcttcaggtgattctggctcctcgactcctggtcattcagatggtgattcttctaacagaacggtatatgttggtgggcttgaccccaatgtcagtgaagatgaactgagaaaagcctttgccaaatatgatcttgcctctgtgaaaattcctctaggaaagcaatgtggctttgttcaatttgttagcagaactgatgctgaagaagcactacaaggattaaatggatcactcattggaaagcaggcagttcgcctttcatgggtccgcagcccatcacataagcagtctaggggtgactccgtcaacaggaggaacaacatgtactatggcacaccattctacggcggatatggctatgcctccccggtgccacacccaaacatgtacgctgcagcgtatggcacgtacccgctatatggcaaccagcagctagtgagctagagagctcccctccgacgtgtcccctctgacgggaaacaaaggttttggtccggtgagcatagtagcgtcaggtgagaaggtgcctttataaggctgtcctaagaagtgggcgagatatgttgttgcatcgttatcgttatggtgcctgtaactgttgtgtgtgccgtgtgcgtccggaagaattggatggaatggaactcgtggcttgttgtagtacatcagagagtcatgttattctttcaagaaattttgacttggaaataaattaaactattgtttgtgcg

SEQ ID NO: 8499 - protein, 444 aa, Zea mays subsp. mays
  peptide (1)..(444): Ceres Seq. ID no. 12408437
LFSALHPSRALHPSTRPSSAAAAAMQMAATTTESQPAVPPQHPHAHPHAPPQHAHPHHHMPQPRWVVIPYPPPPPMVAAPPPPPQFAKHFAAGPPPPPQAGAGRRTPTPPSSGSGGNGCEENKTIWVGDLQYWMDENYLHNCFGPSGEVVTIKVIRNRQTGQSEGYGFVEFFSHASAEKALQNFTGHVMPNTDRPFKLNWASYSMGEKRSEVASDHSIFVGDLAADVTDEMLLELFSSKYRSVKGAKVIIDANTGRSRGYGFVRFGDDNDKSHAMSEMNGVYCSTRPIRIGPATPRRSSGDSGSSTPGHSDGDSSNRTVYVGGLDPNVSEDELRKAFAKYDLASVKIPLGKQCGFVQFVSRTDAEEALQGLNGSLIGKQAVRLSWVRSPSHKQSRGDSVNRRNNMYYGTPFYGGYGYASPVPHPNMYAAAYGTYPLYGNQQLVS

SEQ ID NO: 8500 - protein, 420 aa, Zea mays subsp. mays
  peptide (1)..(420): Ceres Seq. ID no. 12408438
MQMAATTTESQPAVPPQHPHAHPHAPPQHAHPHHHMPQPRWVVIPYPPPPPMVAAPPPPPQFAKHFAAGPPPPPQAGAGRRTPTPPSSGSGGNGCEENKTIWVGDLQYWMDENYLHNCFGPSGEVVTIKVIRNRQTGQSEGYGFVEFFSHASAEKALQNFTGHVMPNTDRPFKLNWASYSMGEKRSEVASDHSIFVGDLAADVTDEMLLELFSSKYRSVKGAKVIIDANTGRSRGYGFVRFGDDNDKSHAMSEMNGVYCSTRPIRIGPATPRRSSGDSGSSTPGHSDGDSSNRTVYVGGLDPNVSEDELRKAFAKYDLASVKIPLGKQCGFVQFVSRTDAEEALQGLNGSLIGKQAVRLSWVRSPSHKQSRGDSVNRRNNMYYGTPFYGGYGYASPVPHPNMYAAAYGTYPLYGNQQLVS

SEQ ID NO: 8501 - protein, 418 aa, Zea mays subsp. mays
  peptide (1)..(418): Ceres Seq. ID no. 12408439
MAATTTESQPAVPPQHPHAHPHAPPQHAHPHHHMPQPRWVVIPYPPPPPMVAAPPPPPQFAKHFAAGPPPPPQAGAGRRTPTPPSSGSGGNGCEENKTIWVGDLQYWMDENYLHNCFGPSGEVVTIKVIRNRQTGQSEGYGFVEFFSHASAEKALQNFTGHVMPNTDRPFKLNWASYSMGEKRSEVASDHSIFVGDLAADVTDEMLLELFSSKYRSVKGAKVIIDANTGRSRGYGFVRFGDDNDKSHAMSEMNGVYCSTRPIRIGPATPRRSSGDSGSSTPGHSDGDSSNRTVYVGGLDPNVSEDELRKAFAKYDLASVKIPLGKQCGFVQFVSRTDAEEALQGLNGSLIGKQAVRLSWVRSPSHKQSRGDSVNRRNNMYYGTPFYGGYGYASPVPHPNMYAAAYGTYPLYGNQQLVS

SEQ ID NO: 8502 - DNA, 1930 bp, Zea mays subsp. mays
  misc_feature (1)..(1930): Ceres Seq. ID no. 12566856
  misc_feature (1)..(1930): Ortholog of  Ceres SEQ ID NO 13532807 as cited in SEQ ID NO 53012
  misc_feature (1)..(1930): Ortholog of  Ceres SEQ ID NO 15170532 as cited in SEQ ID NO 55671
  misc_feature (1)..(1930): Ortholog of  Ceres SEQ ID NO 13663060 as cited in SEQ ID NO 60964
  misc_feature (1)..(1930): Ortholog of  Ceres SEQ ID NO 13598532 as cited in SEQ ID NO 65204
  misc_feature (1)..(1930): Ortholog of  Ceres SEQ ID NO 13656849 as cited in SEQ ID NO 65764
  misc_feature (1)..(1930): Ortholog of  Ceres SEQ ID NO 13656501 as cited in SEQ ID NO 69206
gcacgagaccattacctagaacatcctaatcaaaaaaatttctcgcggcgtcgttccgtcccaaatatcgccccgcgatcccccacctcgccgactggctcccccgctccacctcgtcgacgggcagaggagacccctcagggccgggatcggactcctctttcaccgccaacgcataccagtgatgaagatcttccgctgaagcttgctcaagctgcaataaagcatgacggttgtgcacataatgatgcttaatcattcatgttgcgaaaccctccagtggaacttccttcttctgatgcaaccatgtataggtggacctagttttgaggtggatgcgctgagttttgaaggtggcgagggatctttgctgcggggttctatttgttctcagtgatttttggcaaacactctttggttagattaagaatcatggaaaggtacaaattgatacggaagataggtgatggaacctgtgggaatgtttttatggcttctaatgtagaaactaatgaaattgttgctgttaaaaaaatgaagagaaaattttgtcattgggaagaatgtattagtctgcgagaagtgaaggcccttcagaaactatttcaccctaacattgtgaagctgaaggaagtgacgatggaaaaccatgagctgttcttcatctttgaacacatggagtgcaatttatatgatgtcataagggaaaggcaagttgctttccctgaaagggatataaggaactttatggtccagatactgcaaggtcttgcatatatgcataataatgggtattttcaccgtgatttaaaacctgagaatttgttggtgacaaatggtattattaaaattgctgactttgggttggcaagagaaatatcttccaatcctccttacactgattatgtttccaccagatggtatcgggctccagaggttctactgcaatcttcagtttatacacctgctattgacatgtgggcggttggtgctattttggctgagctttttacactgtccccactttttcctggtgaaagtgaaactgaccagctttacaaaatatgcactgtgcttgggacccctgattgcactatttggccagagggaatgaacctgcctcgttcatgcagctttaagttttttcagaatcctccaagaaacttatgggagcttattcctaatgcttcatctgaagcaatcgatttgatccagcaactttgttcctgggatcctcgaaggaggccaactgctgagcaagcattacaacatcctttcttcaatgtatgcaattgggtaccaagacctgtacatgatgcttaccatacaaaaacaaacggacctaaagctgaaccaagattggaactgaacctgtgggatttcagcacagaacctgatgattgtgtccttgatttaactctcagtctgaagccaagtttttctggaacagaccttggtaagcatgttccacgacgtacagaagaggaaattctcctgtacccgggatttgagaatacccctgtgaagtccggtttttggcctctggtgccatctgatcgtcccgttggtgatgttccggccataccatcctggcagcaggcgtacatggttgacagccaaggcgcattttctggctctccgttcttgcagtcgaacctgttggagaaccgttcgttagcacctatccggcaggtgaatttcttctgacggagacaggattaacagattcatacgattcttgatacgtccagcttctcgctgtatacacactatcttgaataaagtgttgccagtagaggaaatgtatatacagttcgttcgtagctcttgagcttctttctttctagagtacctctttttttttaatcgtctgttcatattccacaccactcctatgtaaataacggcatgcatgataatctctctccct

SEQ ID NO: 8503 - protein, 424 aa, Zea mays subsp. mays
  peptide (1)..(424): Ceres Seq. ID no. 12566857
MERYKLIRKIGDGTCGNVFMASNVETNEIVAVKKMKRKFCHWEECISLREVKALQKLFHPNIVKLKEVTMENHELFFIFEHMECNLYDVIRERQVAFPERDIRNFMVQILQGLAYMHNNGYFHRDLKPENLLVTNGIIKIADFGLAREISSNPPYTDYVSTRWYRAPEVLLQSSVYTPAIDMWAVGAILAELFTLSPLFPGESETDQLYKICTVLGTPDCTIWPEGMNLPRSCSFKFFQNPPRNLWELIPNASSEAIDLIQQLCSWDPRRRPTAEQALQHPFFNVCNWVPRPVHDAYHTKTNGPKAEPRLELNLWDFSTEPDDCVLDLTLSLKPSFSGTDLGKHVPRRTEEEILLYPGFENTPVKSGFWPLVPSDRPVGDVPAIPSWQQAYMVDSQGAFSGSPFLQSNLLENRSLAPIRQVNFF

SEQ ID NO: 8504 - protein, 405 aa, Zea mays subsp. mays
  peptide (1)..(405): Ceres Seq. ID no. 12566858
MASNVETNEIVAVKKMKRKFCHWEECISLREVKALQKLFHPNIVKLKEVTMENHELFFIFEHMECNLYDVIRERQVAFPERDIRNFMVQILQGLAYMHNNGYFHRDLKPENLLVTNGIIKIADFGLAREISSNPPYTDYVSTRWYRAPEVLLQSSVYTPAIDMWAVGAILAELFTLSPLFPGESETDQLYKICTVLGTPDCTIWPEGMNLPRSCSFKFFQNPPRNLWELIPNASSEAIDLIQQLCSWDPRRRPTAEQALQHPFFNVCNWVPRPVHDAYHTKTNGPKAEPRLELNLWDFSTEPDDCVLDLTLSLKPSFSGTDLGKHVPRRTEEEILLYPGFENTPVKSGFWPLVPSDRPVGDVPAIPSWQQAYMVDSQGAFSGSPFLQSNLLENRSLAPIRQVNFF

SEQ ID NO: 8505 - protein, 390 aa, Zea mays subsp. mays
  peptide (1)..(390): Ceres Seq. ID no. 12566859
MKRKFCHWEECISLREVKALQKLFHPNIVKLKEVTMENHELFFIFEHMECNLYDVIRERQVAFPERDIRNFMVQILQGLAYMHNNGYFHRDLKPENLLVTNGIIKIADFGLAREISSNPPYTDYVSTRWYRAPEVLLQSSVYTPAIDMWAVGAILAELFTLSPLFPGESETDQLYKICTVLGTPDCTIWPEGMNLPRSCSFKFFQNPPRNLWELIPNASSEAIDLIQQLCSWDPRRRPTAEQALQHPFFNVCNWVPRPVHDAYHTKTNGPKAEPRLELNLWDFSTEPDDCVLDLTLSLKPSFSGTDLGKHVPRRTEEEILLYPGFENTPVKSGFWPLVPSDRPVGDVPAIPSWQQAYMVDSQGAFSGSPFLQSNLLENRSLAPIRQVNFF

SEQ ID NO: 8506 - DNA, 1511 bp, Zea mays subsp. mays
  misc_feature (1)..(1511): Ceres Seq. ID no. 12566628
  misc_feature (1)..(1511): Ortholog of  Ceres SEQ ID NO 13598528 as cited in SEQ ID NO 64938
aaagtcaaaagggcaagagggggcaaaaagggagaaatttcctctcacaaaaccctcgccagcttatcccccttcctccctcacacgatctctcctcgacggctaacccggattgccgtctcaggctcgggatccgggcgctcgcggtgatggacggcggcggcggcgctggcggcgcggagggggagctcacggcgcaggagacagcgctctacgaccgccagatccgcgtctggggcgtcgatgcccagaagagactaagtaaggcgcacgtgcttgtgtgtggcatgaacggaaccaccatcgagttctgcaagaatattgttctagctggagttggaagtttatccttgatggatgataatgtagtcacagaggaggatctgaatgcaaatttcctaattcctcctgatgagagcatatatggtggtagatctcgagcccaagtttgctgcgagtctttgatagatttcaatcctatggttcgagtttctgttgaaaagggtgatccatcattaattgatggagaattccttgacaagtttgacattgttgtacttagccgtgcatctcttaaaacaaagttgttgattaatgaaaactgtcgaaagagaagcaaacacattgcattttatactatagattgcaaggattcatgtggtgaaatatttgttgacttacagaagcatagctatgttcagaaaaagcctggaggagcaactgaacaacaggagttgacatattctagtcttcaggaagctatctctgtgccttggaatagtctaccgaagaagacggcaaaattatactttgctatgagagtactggaggattatgaattatctgaagggcgcagccctggcgaaacaacactttctgatatagatgcagttctggctcggaggaaggatatgtgtgataaaatgtctttgaatgagtctcgtattcctactactctcgtggaacgactgctagcagctggaaagaaggagcatcctcctgtatgtgctatccttggtggtattcttggtcaggaggtgatcaaatcgatatcctgcaagggcgatccagtcaagaatttcttctatttcgatgtggctgacggtaaaggtgtcatcgaggatatcccaccaccaccacctgcaaaataaagcactcagctgtgtaactctcgactcgacttggttcactaatcgttttctgtacccactcagcttcgaacatgtagcaacttttagatctagagccatgtgaaaaaaggcaagtttgactttaacccagatgtttagggattgttcgagcagcaaactgtgacagtatgtatgcatcgacaatttaaagctgaagtctggacggtttccatgcttttgggggcggatttcctttgttgtccctttacccatttgtcaaatttggtagcggtggttggggggagtggggaatgaagtgagaaggctatgtttataactgtgaaccgacggttgcagctatacatatcgtcatgcctgtgc

SEQ ID NO: 8507 - protein, 382 aa, Zea mays subsp. mays
  peptide (1)..(382): Ceres Seq. ID no. 12566629
SQKGKRGQKGRNFLSQNPRQLIPLPPSHDLSSTANPDCRLRLGIRALAVMDGGGGAGGAEGELTAQETALYDRQIRVWGVDAQKRLSKAHVLVCGMNGTTIEFCKNIVLAGVGSLSLMDDNVVTEEDLNANFLIPPDESIYGGRSRAQVCCESLIDFNPMVRVSVEKGDPSLIDGEFLDKFDIVVLSRASLKTKLLINENCRKRSKHIAFYTIDCKDSCGEIFVDLQKHSYVQKKPGGATEQQELTYSSLQEAISVPWNSLPKKTAKLYFAMRVLEDYELSEGRSPGETTLSDIDAVLARRKDMCDKMSLNESRIPTTLVERLLAAGKKEHPPVCAILGGILGQEVIKSISCKGDPVKNFFYFDVADGKGVIEDIPPPPPAK

SEQ ID NO: 8508 - protein, 333 aa, Zea mays subsp. mays
  peptide (1)..(333): Ceres Seq. ID no. 12566630
MDGGGGAGGAEGELTAQETALYDRQIRVWGVDAQKRLSKAHVLVCGMNGTTIEFCKNIVLAGVGSLSLMDDNVVTEEDLNANFLIPPDESIYGGRSRAQVCCESLIDFNPMVRVSVEKGDPSLIDGEFLDKFDIVVLSRASLKTKLLINENCRKRSKHIAFYTIDCKDSCGEIFVDLQKHSYVQKKPGGATEQQELTYSSLQEAISVPWNSLPKKTAKLYFAMRVLEDYELSEGRSPGETTLSDIDAVLARRKDMCDKMSLNESRIPTTLVERLLAAGKKEHPPVCAILGGILGQEVIKSISCKGDPVKNFFYFDVADGKGVIEDIPPPPPAK

SEQ ID NO: 8509 - protein, 287 aa, Zea mays subsp. mays
  peptide (1)..(287): Ceres Seq. ID no. 12566631
MNGTTIEFCKNIVLAGVGSLSLMDDNVVTEEDLNANFLIPPDESIYGGRSRAQVCCESLIDFNPMVRVSVEKGDPSLIDGEFLDKFDIVVLSRASLKTKLLINENCRKRSKHIAFYTIDCKDSCGEIFVDLQKHSYVQKKPGGATEQQELTYSSLQEAISVPWNSLPKKTAKLYFAMRVLEDYELSEGRSPGETTLSDIDAVLARRKDMCDKMSLNESRIPTTLVERLLAAGKKEHPPVCAILGGILGQEVIKSISCKGDPVKNFFYFDVADGKGVIEDIPPPPPAK

SEQ ID NO: 8510 - DNA, 1711 bp, Zea mays subsp. mays
  misc_feature (1)..(1711): Ceres Seq. ID no. 12566632
  misc_feature (1)..(1711): Ortholog of  Ceres SEQ ID NO 13656012 as cited in SEQ ID NO 69067
cgttctgagtgaaaccattctccgttcaacgtgtactggtctaccccgggcccggtccgcaccccgccgtcgcacccgcacggcacccccttcgtcccttccgcaagaaaggaaacgagagagaaaatcgagtgaaaaggaagggaaacaacataacaaatcgcaaagaggcgtcttccaagtttgtagggttaccggatcggaggagcatccccgcctaggtcaccacagccatggttcgcggatcgctaggcaagcttgcgtcgcgcgccctctccgtcgccgggagatggcagcaccagcagcttcgccgcctcaacatccacgagtaccagggtgcggagttgatggggaagtacggtatcaacgtacccaggggtgcggcggcggggtccgtacaggaggtcaatgacgccttgaagaacatgttccccagtgagaaagagatagttgttaaaagtcaaatccttgctggtggccgagggctgggaactttcaaaagtgggctgcaaggaggtgtccatattgttaaggctgaggaagctgaaagcattgcacgtaaaatgttaggccagattctggtaacgaaacaaactggtccggagggaaagattgtgagcaaggtctacttgtgtgagaaactgtctcttactaatgagatgtattttgccatcacccttgataggaaaactgctggtccgctcattattgcttgcagcaagggaggaaccagtattgaagatcttgcggagaagtatcctgatatgattatcaaggttcctgttgatgtatttaaaggaataacagacgaggatgcagctaaagttgttgatggtctagctctaaagtcagcggataggcagtcttctatagaacagattaagaaactgtatgaacttttctgcaagtctgattgcacattgctggagataaatcctctggcggagacagctgacaacaagcttgttgctgctgatgcaaagttgaactttgatgataatgctgcatttagacagaaagaaatatttgcacttcgtgatacaactcaggaagaccccagggaggtcgctgctgccaaagcagatttgaactatattggtcttgatggagagattggttgcatggtgaatggagcaggattggccatggcgaccatggatattataaagttgcatggtgggacgcctgccaatttccttgatgttggtgggagtgcatcagaggggcaggttgtggaagcttttaagatactgacttcagatgatagagtgaaggcaattctagtgaacatttttgggggcattatgaaatgtgacgtgatagcaagtggaattgttaatgctgctaaacaggttgacctgaaggttcctgttgttgttcggttggaaggcaccaatgtagaccaaggaaaaaggattcttaaggaaagtggaatgactttgatcactgcagaagatcttgatgatgcggcagagaaagctgtaaaagcatccgtcaaataactatagtgtatcaatctgaagcttattttcttcactggtacaagatgagcagtgctcttttacggatttcgggctggggcagaagtcgcgaactgcaacttttttgaagcggggttattttgacctagttttcctgttaaacattgccagtgccgaaactttgtcgtctcatgttgataaacatttatcggggccattgggcagctgct

SEQ ID NO: 8511 - protein, 422 aa, Zea mays subsp. mays
  peptide (1)..(422): Ceres Seq. ID no. 12566633
MVRGSLGKLASRALSVAGRWQHQQLRRLNIHEYQGAELMGKYGINVPRGAAAGSVQEVNDALKNMFPSEKEIVVKSQILAGGRGLGTFKSGLQGGVHIVKAEEAESIARKMLGQILVTKQTGPEGKIVSKVYLCEKLSLTNEMYFAITLDRKTAGPLIIACSKGGTSIEDLAEKYPDMIIKVPVDVFKGITDEDAAKVVDGLALKSADRQSSIEQIKKLYELFCKSDCTLLEINPLAETADNKLVAADAKLNFDDNAAFRQKEIFALRDTTQEDPREVAAAKADLNYIGLDGEIGCMVNGAGLAMATMDIIKLHGGTPANFLDVGGSASEGQVVEAFKILTSDDRVKAILVNIFGGIMKCDVIASGIVNAAKQVDLKVPVVVRLEGTNVDQGKRILKESGMTLITAEDLDDAAEKAVKASVK

SEQ ID NO: 8512 - protein, 384 aa, Zea mays subsp. mays
  peptide (1)..(384): Ceres Seq. ID no. 12566634
MGKYGINVPRGAAAGSVQEVNDALKNMFPSEKEIVVKSQILAGGRGLGTFKSGLQGGVHIVKAEEAESIARKMLGQILVTKQTGPEGKIVSKVYLCEKLSLTNEMYFAITLDRKTAGPLIIACSKGGTSIEDLAEKYPDMIIKVPVDVFKGITDEDAAKVVDGLALKSADRQSSIEQIKKLYELFCKSDCTLLEINPLAETADNKLVAADAKLNFDDNAAFRQKEIFALRDTTQEDPREVAAAKADLNYIGLDGEIGCMVNGAGLAMATMDIIKLHGGTPANFLDVGGSASEGQVVEAFKILTSDDRVKAILVNIFGGIMKCDVIASGIVNAAKQVDLKVPVVVRLEGTNVDQGKRILKESGMTLITAEDLDDAAEKAVKASVK

SEQ ID NO: 8513 - protein, 358 aa, Zea mays subsp. mays
  peptide (1)..(358): Ceres Seq. ID no. 12566635
MFPSEKEIVVKSQILAGGRGLGTFKSGLQGGVHIVKAEEAESIARKMLGQILVTKQTGPEGKIVSKVYLCEKLSLTNEMYFAITLDRKTAGPLIIACSKGGTSIEDLAEKYPDMIIKVPVDVFKGITDEDAAKVVDGLALKSADRQSSIEQIKKLYELFCKSDCTLLEINPLAETADNKLVAADAKLNFDDNAAFRQKEIFALRDTTQEDPREVAAAKADLNYIGLDGEIGCMVNGAGLAMATMDIIKLHGGTPANFLDVGGSASEGQVVEAFKILTSDDRVKAILVNIFGGIMKCDVIASGIVNAAKQVDLKVPVVVRLEGTNVDQGKRILKESGMTLITAEDLDDAAEKAVKASVK

SEQ ID NO: 8514 - DNA, 1277 bp, Zea mays subsp. mays
  misc_feature (1)..(1277): Ceres Seq. ID no. 12352611
  misc_feature (1)..(1277): Ortholog of  Ceres SEQ ID NO 13598513 as cited in SEQ ID NO 64102
  misc_feature (1)..(1277): Ortholog of  Ceres SEQ ID NO 14302224 as cited in SEQ ID NO 64268
aggcacaaggaagaacgaagagagatcagcgacttaacaacaataatggccaccgccatagttcccacggacgccgagctgctgcaggcgcaggccgacctgtggcgccacagcctctactacctgacatccatggcgctcaagtgcgcggtggagctccacatcccgaccgccatccacaacctaggcgggtctgccacgctgccggacctcgtggccgcgctgtccctgccagcggccaagctcccgttcctcgggcgcgtgatgcggctgctggtcacgtcggggcgtcttcgcgtcgtccgacgacgtgcagtaccggctgaacccgctgtcctggctgctggtggagggcgtggagtcggaggaccacacctaccagaagtacttcgtgctgggcaccgtctcccgccactacgtggaggccggcatgtccctggccgactggttcaagaaggaggaggacgaggaccgccagctgccgtcgccgttcgaggccctgcacggggtgcccctcgtccacgagagcaccaagctgctggacgaggagctggacagggtcgtggaggaaggcgtggccgcgcacgacaacctggccatcgggaccgtcatacgggagtgcggcgccgacgtcttcagcggcctccgctcgctcacctactgctgcggcaggcaggggaacgccagcgcggccgccatcgtcaaggccttcccagacatcaagtgcaccgtgctcaaccttcccagggtcgtcgaggagacgacgaccaagaccatcaccatcccgcctgcgcaggctgtcatgctcaagctcgtcctgcacttctggagcgacgacgactgcgtcaagatcctggagctgtgcaggaaggccatcccttcccgccaagaaggagggaaggtgatcatcattgagatactcctgggcccgtacatggggccggtcatgtacgaggcccagctgctgatggacatgctcatgatggtgaacaccaagggcaggcagcgcggcgaagacgactggcgccacatctttaccaaggctggcttctccgactacaaggttgtcaagaaaatcggagctcgtggtgtcatcgaggtctacccatgatccatgatcgatgtcatgtgactgtgagaggacgatactgtacaattaaataaacggggtatctagctactactcagcttttgtacctcgagatccatgcatgttaattacttgcttccatctgttttcaaaatgcatctatgtaatgtacttcgcttcttcgtcc

SEQ ID NO: 8515 - protein, 304 aa, Zea mays subsp. mays
  peptide (1)..(304): Ceres Seq. ID no. 12352612
RHKEERREISDLTTIMATAIVPTDAELLQAQADLWRHSLYYLTSMALKCAVELHIPTAIHNLGGSATLPDLVAALSLPAAKLPFLGRVMRLLVTSGRLRVVRRRAVPAEPAVLAAGGGRGVGGPHLPEVLRAGHRLPPLRGGRHVPGRLVQEGGGRGPPAAVAVRGPARGAPRPREHQAAGRGAGQGRGGRRGRARQPGHRDRHTGVRRRRLQRPPLAHLLLRQAGERQRGRHRQGLPRHQVHRAQPSQGRRGDDDQDHHHPACAGCHAQARPALLERRRLRQDPGAVQEGHPFPPRRREGDHH

SEQ ID NO: 8516 - protein, 289 aa, Zea mays subsp. mays
  peptide (1)..(289): Ceres Seq. ID no. 12352613
MATAIVPTDAELLQAQADLWRHSLYYLTSMALKCAVELHIPTAIHNLGGSATLPDLVAALSLPAAKLPFLGRVMRLLVTSGRLRVVRRRAVPAEPAVLAAGGGRGVGGPHLPEVLRAGHRLPPLRGGRHVPGRLVQEGGGRGPPAAVAVRGPARGAPRPREHQAAGRGAGQGRGGRRGRARQPGHRDRHTGVRRRRLQRPPLAHLLLRQAGERQRGRHRQGLPRHQVHRAQPSQGRRGDDDQDHHHPACAGCHAQARPALLERRRLRQDPGAVQEGHPFPPRRREGDHH

SEQ ID NO: 8517 - protein, 260 aa, Zea mays subsp. mays
  peptide (1)..(260): Ceres Seq. ID no. 12352614
MALKCAVELHIPTAIHNLGGSATLPDLVAALSLPAAKLPFLGRVMRLLVTSGRLRVVRRRAVPAEPAVLAAGGGRGVGGPHLPEVLRAGHRLPPLRGGRHVPGRLVQEGGGRGPPAAVAVRGPARGAPRPREHQAAGRGAGQGRGGRRGRARQPGHRDRHTGVRRRRLQRPPLAHLLLRQAGERQRGRHRQGLPRHQVHRAQPSQGRRGDDDQDHHHPACAGCHAQARPALLERRRLRQDPGAVQEGHPFPPRRREGDHH

SEQ ID NO: 8518 - protein, 226 aa, Zea mays subsp. mays
  peptide (1)..(226): Ceres Seq. ID no. 12352615
MSLADWFKKEEDEDRQLPSPFEALHGVPLVHESTKLLDEELDRVVEEGVAAHDNLAIGTVIRECGADVFSGLRSLTYCCGRQGNASAAAIVKAFPDIKCTVLNLPRVVEETTTKTITIPPAQAVMLKLVLHFWSDDDCVKILELCRKAIPSRQEGGKVIIIEILLGPYMGPVMYEAQLLMDMLMMVNTKGRQRGEDDWRHIFTKAGFSDYKVVKKIGARGVIEVYP

SEQ ID NO: 8519 - DNA, 1345 bp, Zea mays subsp. mays
  misc_feature (1)..(1345): Ceres Seq. ID no. 13494398
  misc_feature (1)..(1345): Ortholog of  Ceres SEQ ID NO 15224973 as cited in SEQ ID NO 58138
agaacatcctaatcgaaaaaccccactgctcggtgttcactccggtcgggccatggcgcgcgccggcgtctctaccgcgccgctctcccgcactcacctcctcccaccacgtccttccctcctccacaacacgcagcaccactccctcctcctccggccccagcgcaaggcgcccgccaccaccgcggcggcgctgccgccggccgcggacctcccggcgctgtccctcccggccgcggccgccgcggctgccgcgctggcggcggcggtgtcactttccgaccccgagcggcggcggcgctcgcaggccgaggcggccggcggaggtgacaaggaggccgtccgcgcctacttcaactccacggggttcgagcggtggcgcaagatctacgggtcggcgacggagggcgtgaaccgcgtgcagcttgacatccgcgagggccacgcgcagacggtggcggcggcgctggccatgctccgcgactccccgctggagctgtcgggcgccaccgtgtgcgacgccggctgcgggacggggtcgctggccatcccgctcgcggcggcgggcgccgacgtcctggcctccgacatctcggcggccatggtgtcggaggcgcagcggcaggcggcggcgcagtcgtcgtcgtcgtcgttccggatgccgcggttcgaggtccgcgacctggagagcctggaggggcggtacgacgtggtggtgtgcctggacgtgctcatccactacccgcgggaggaggcgcgcgccatgatccgccacctcgcgtcgctggcggacaagcggctgctcatcagcttcgcgcccaggacgctctacttcgacttcctcaagcgcgtgggcgagctgttcccgggcccgtcaaaggccacgcgcgcctacctgcacgccgaggccgacatcgaggacgcgctccgccaggccggctggcgcgtcgccaaccgcggcttcatctccacgcagttctacttcgccaagctcttcgacgccgtgcccgtcggctcctcgacgtagccgtgtaggccgcccgccgtgtgcttgtgtgtttgtttgcctcacgcgactgtttatagagctccagacggtcgccgcagcgcgcgcggcggcgtagcctgtttgtacttgcaagctcactcagttccattccgtagcttgatgccttgattgattcccacgtagacttccatcgacaaacacaattgcagggttttgagtttttgacccaaacgacacgacaaagagttcttatcatccaggggcctcgaccaccgtgctcgttttacaaaagctgtaattaaagactactttgcaagattatcgtgattttcattc

SEQ ID NO: 8520 - protein, 341 aa, Zea mays subsp. mays
  peptide (1)..(341): Ceres Seq. ID no. 13494399
EHPNRKTPLLGVHSGRAMARAGVSTAPLSRTHLLPPRPSLLHNTQHHSLLLRPQRKAPATTAAALPPAADLPALSLPAAAAAAAALAAAVSLSDPERRRRSQAEAAGGGDKEAVRAYFNSTGFERWRKIYGSATEGVNRVQLDIREGHAQTVAAALAMLRDSPLELSGATVCDAGCGTGSLAIPLAAAGADVLASDISAAMVSEAQRQAAAQSSSSSFRMPRFEVRDLESLEGRYDVVVCLDVLIHYPREEARAMIRHLASLADKRLLISFAPRTLYFDFLKRVGELFPGPSKATRAYLHAEADIEDALRQAGWRVANRGFISTQFYFAKLFDAVPVGSST

SEQ ID NO: 8521 - protein, 324 aa, Zea mays subsp. mays
  peptide (1)..(324): Ceres Seq. ID no. 13494400
MARAGVSTAPLSRTHLLPPRPSLLHNTQHHSLLLRPQRKAPATTAAALPPAADLPALSLPAAAAAAAALAAAVSLSDPERRRRSQAEAAGGGDKEAVRAYFNSTGFERWRKIYGSATEGVNRVQLDIREGHAQTVAAALAMLRDSPLELSGATVCDAGCGTGSLAIPLAAAGADVLASDISAAMVSEAQRQAAAQSSSSSFRMPRFEVRDLESLEGRYDVVVCLDVLIHYPREEARAMIRHLASLADKRLLISFAPRTLYFDFLKRVGELFPGPSKATRAYLHAEADIEDALRQAGWRVANRGFISTQFYFAKLFDAVPVGSST

SEQ ID NO: 8522 - protein, 184 aa, Zea mays subsp. mays
  peptide (1)..(184): Ceres Seq. ID no. 13494401
MLRDSPLELSGATVCDAGCGTGSLAIPLAAAGADVLASDISAAMVSEAQRQAAAQSSSSSFRMPRFEVRDLESLEGRYDVVVCLDVLIHYPREEARAMIRHLASLADKRLLISFAPRTLYFDFLKRVGELFPGPSKATRAYLHAEADIEDALRQAGWRVANRGFISTQFYFAKLFDAVPVGSST

SEQ ID NO: 8523 - DNA, 1350 bp, Zea mays subsp. mays
  misc_feature (1)..(1350): Ceres Seq. ID no. 12408432
  misc_feature (1)..(1350): Ortholog of  Ceres SEQ ID NO 14305854 as cited in SEQ ID NO 52331
  misc_feature (1)..(1350): Ortholog of  Ceres SEQ ID NO 15168588 as cited in SEQ ID NO 60235
atcacactcgcacagtctcaccacagcgagcgagagcaaggcgcccaagcaaccaccgcgagaacaagtcgcagccaaacagccccgtctcccagcgaagcttgagcttgcattattctaccatgtcttccatggagctgctccacgccgtcgtcccggagaagcagagcgaggaggaggtcgcgcccgcagcgacgaccacgagcagcagcgccaccgccacgggcggggacgagggcgcccacgtgctccaggggtgggccaagaggaagcgctcgcgccgccagcgatcggaggaggagaacctcgcgctctgcctcctcatgctctcccgcggtggccaccaccgcgtccaggcgccgccaacgccggtcccgtccgcggcgccggccgccgcggagttcaggtgctccgtctgcggcaagtccttcagctcctaccaggcgctggggggccacaagaccagccaccgcgtcaagctgcccacccctcctcctcctcctcctgctgtaactgtcccggcagcagtgcccgtcccggaggcccccgccccgaccaccgtcgtcgtcccgccgctgccgccagtcgaggtcggccgcgagccggccacgtcatccaccgccgcgtcctccgacggggcggcctcgagcagagtccaccggtgctccatctgccacaaggagttcccgaccggccaggcgctcggcgggcacaagaggaagcactacgacgggggcgtcggcagcgccgccgcgtccaccgacgtcccggcggcgcccgccgagacgtccgccgaggtcgggagctccgccgcgcgtgcgttcgacctcaacctcccggccgtgccggagttcgtgttccggtgcggcaagcccggcaagatgtgggaggaggacgaggaggtgcagagccccctcgccttcaagaagccccgcctcctcatgaccgcgtgaaaccgctgcgcgcgcgggcggcggatctcatctcatcacccgtccaagattttggtccgcagctgccgagttcagcggtggaagtggaacacactattcgttcattcatttcgtatggtgccagtagcgctattgtttgatttttgtggctgctcctcttgtacagtaccgagtgcgagaaaagatgcatagtcatcgtatacataccaatacaataccgtacctataggtcttcctattcctgtggaagagtagaacttgtatccttattagctgtcagttcatacacacttggttctcattatcagagatcattggtgaattagtggttttgtatcataagcttattgtaaatgatggattggagattagtatggaatcagatacccatttgtgc

SEQ ID NO: 8524 - protein, 363 aa, Zea mays subsp. mays
  peptide (1)..(363): Ceres Seq. ID no. 12408433
SHSHSLTTASESKAPKQPPREQVAAKQPRLPAKLELALFYHVFHGAAPRRRPGEAERGGGRARSDDHEQQRHRHGRGRGRPRAPGVGQEEALAPPAIGGGEPRALPPHALPRWPPPRPGAANAGPVRGAGRRGVQVLRLRQVLQLLPGAGGPQDQPPRQAAHPSSSSSCCNCPGSSARPGGPRPDHRRRPAAAASRGRPRAGHVIHRRVLRRGGLEQSPPVLHLPQGVPDRPGARRAQEEALRRGRRQRRRVHRRPGGARRDVRRGRELRRACVRPQPPGRAGVRVPVRQARQDVGGGRGGAEPPRLQEAPPPHDRVKPLRARAADLISSPVQDFGPQLPSSAVEVEHTIRSFISYGASSAIV

SEQ ID NO: 8525 - protein, 316 aa, Zea mays subsp. mays
  peptide (1)..(316): Ceres Seq. ID no. 12408434
HTRTVSPQRARARRPSNHRENKSQPNSPVSQRSLSLHYSTMSSMELLHAVVPEKQSEEEVAPAATTTSSSATATGGDEGAHVLQGWAKRKRSRRQRSEEENLALCLLMLSRGGHHRVQAPPTPVPSAAPAAAEFRCSVCGKSFSSYQALGGHKTSHRVKLPTPPPPPPAVTVPAAVPVPEAPAPTTVVVPPLPPVEVGREPATSSTAASSDGAASSRVHRCSICHKEFPTGQALGGHKRKHYDGGVGSAAASTDVPAAPAETSAEVGSSAARAFDLNLPAVPEFVFRCGKPGKMWEEDEEVQSPLAFKKPRLLMTA

SEQ ID NO: 8526 - protein, 276 aa, Zea mays subsp. mays
  peptide (1)..(276): Ceres Seq. ID no. 12408435
MSSMELLHAVVPEKQSEEEVAPAATTTSSSATATGGDEGAHVLQGWAKRKRSRRQRSEEENLALCLLMLSRGGHHRVQAPPTPVPSAAPAAAEFRCSVCGKSFSSYQALGGHKTSHRVKLPTPPPPPPAVTVPAAVPVPEAPAPTTVVVPPLPPVEVGREPATSSTAASSDGAASSRVHRCSICHKEFPTGQALGGHKRKHYDGGVGSAAASTDVPAAPAETSAEVGSSAARAFDLNLPAVPEFVFRCGKPGKMWEEDEEVQSPLAFKKPRLLMTA

SEQ ID NO: 8527 - DNA, 985 bp, Zea mays subsp. mays
  misc_feature (1)..(985): Ceres Seq. ID no. 12360792
  misc_feature (1)..(985): Ortholog of  Ceres SEQ ID NO 15226909 as cited in SEQ ID NO 61336
  misc_feature (1)..(985): Ortholog of  Ceres SEQ ID NO 15179474 as cited in SEQ ID NO 0
gcagcgaggaacgtgatcagaatcagccagtggtgcttgtgacggggtgctcggagggcggcatcggccacgcgatggcacgcgccttcgctgcggccgggtgcgccgtcgtggccacggcgcggtcacgcggttccatgcgcggtctcgacggcgacccgcggttcctgctgctggagctcgacgtgcgctccgacgagagcgcgcgcgccgccgtggcggatgcgctgcgggagcacggccgcatcgacgtgctcgtcaacaacgctggggttcacctcgtcgcaccactcgccgaggtgcccatggagtccttccaccaggttttcgacaccaatgtctatggtgcaatgaggttaattcaatctgttattcctcacatgatggaaagaaggaaaggaacaattgtgaatgttggaagtattaccgctctggcacctggaccatgggctggtgtgtattcagcatccaaagctgctcttcatgcattgagtgactcgttaagggttgaactaagaagcttcggcataaacgtgatgaccgtcgccccaggagggacgaggtcgaatcttgggaattcttctgcagccaagtatgatcagatgcacgagtggaagtactacaagaaatacgaggaagggctccgagccaggactggcatttcccagggccccaggtccactccagcagaagagcttgcaaaggcggtggttgcatcggttctaaagaagaaccctccagcttggttcgcttacggccagtactctctattctgtcgattttgtattatgcaccgctatggttcagagattgcctctataagtttgtcatgaaatgttagtccctggaagaataatggctgtatggaccaaagagagagctggacaggcccagttcaattcatttcattgtactgacagcctgttacgtcgtactcctatattgtatatatagaactatgctctgtacctgttggcaacttggc

SEQ ID NO: 8528 - protein, 276 aa, Zea mays subsp. mays
  peptide (1)..(276): Ceres Seq. ID no. 12360793
SEERDQNQPVVLVTGCSEGGIGHAMARAFAAAGCAVVATARSRGSMRGLDGDPRFLLLELDVRSDESARAAVADALREHGRIDVLVNNAGVHLVAPLAEVPMESFHQVFDTNVYGAMRLIQSVIPHMMERRKGTIVNVGSITALAPGPWAGVYSASKAALHALSDSLRVELRSFGINVMTVAPGGTRSNLGNSSAAKYDQMHEWKYYKKYEEGLRARTGISQGPRSTPAEELAKAVVASVLKKNPPAWFAYGQYSLFCRFCIMHRYGSEIASISLS

SEQ ID NO: 8529 - protein, 252 aa, Zea mays subsp. mays
  peptide (1)..(252): Ceres Seq. ID no. 12360794
MARAFAAAGCAVVATARSRGSMRGLDGDPRFLLLELDVRSDESARAAVADALREHGRIDVLVNNAGVHLVAPLAEVPMESFHQVFDTNVYGAMRLIQSVIPHMMERRKGTIVNVGSITALAPGPWAGVYSASKAALHALSDSLRVELRSFGINVMTVAPGGTRSNLGNSSAAKYDQMHEWKYYKKYEEGLRARTGISQGPRSTPAEELAKAVVASVLKKNPPAWFAYGQYSLFCRFCIMHRYGSEIASISLS

SEQ ID NO: 8530 - protein, 231 aa, Zea mays subsp. mays
  peptide (1)..(231): Ceres Seq. ID no. 12360795
MRGLDGDPRFLLLELDVRSDESARAAVADALREHGRIDVLVNNAGVHLVAPLAEVPMESFHQVFDTNVYGAMRLIQSVIPHMMERRKGTIVNVGSITALAPGPWAGVYSASKAALHALSDSLRVELRSFGINVMTVAPGGTRSNLGNSSAAKYDQMHEWKYYKKYEEGLRARTGISQGPRSTPAEELAKAVVASVLKKNPPAWFAYGQYSLFCRFCIMHRYGSEIASISLS

SEQ ID NO: 8531 - DNA, 1796 bp, Zea mays subsp. mays
  misc_feature (1)..(1796): Ceres Seq. ID no. 12365735
  misc_feature (1)..(1796): Ortholog of  Ceres SEQ ID NO 12460981 as cited in SEQ ID NO 65146
ctcccacagtcccactcctctctctctcgcgctctctctctttcatcgccaccaccgccgtgaaatccgcacgcgtgcttcctgtcgatttttgagctgtgactgtgagcgccatgcgccgtggaggctgtgtccggaaatggcaccgaggcagtggccgcggcgccggcgaaggaggtgagcaccaagcaggcgtctttccgggaggagagcaacttcctggacgatctcaaggagagcgagcgtaaggcgcttgccgagctccgcgacaaggtcgaggcggccatcgtggagggcaagctgttcgacgacggtaagccggaggtgaaggagaaggagaaggagaaggaggaggccaagaagaaggcagtggagaagaaagatgagcagcccgaagccgaggagaagggagaggaggatgacaagaaggaggccgacgccgaggaggagaagaaggaaggcgtggaggaaggggagaagaaggaaggccaggaggaaggggagaaggaggaggccgaggaggagagcggagacgacaccaagcaggaggccaaggaagaggaagccgacgacaaggcggcggcgaaggagccggagacggcggccgttgtcgtcgacaaggacatcgcgctgtggggcgtgcctttgctccctagcaagggcgacgaggccaccgacgtggtgctcctcaagttcctccgcgcgcgcgacttcaaggccggcgccgcgttcgagatgctccgccgcacgctccgctggcgcagggactggaccggcttcagctccggcgccgagtccgacgccgacctccccgaggagctcgcgggcgcgtgctacctcgacggcgcagaccacgagggccacccggtgtgctacaacgcgctgggcgtgttcgcggacgacgccgtgtacaagaaggcgctgggcaccgaggaaggcaaggccaggttcctccggtggcgggtgcgcgccatggagcgccacgtcgccgagctggacctgaggcccggcggcgtcgcgtcgctgctgcaggtgatcgacctcaggaactcgccggggccggccaagaaggacttccgagtcgccgtcaagcaggtctcgacctgttccaggacaactaccccgagctcgtcgcgagaaacatcttggtcaacgtgccgttctggtactacgcgttcagcaccctgttctacccgttcctgacgcagaggacgaagagcaagttcgtcgttgctcgcccgtcaaaggtcaccgagaccctcctcaagtacattccgatcgaggccatcccggtgaagtacggcggcctgaagcgcgacggcgacaccgagttctcggcggacgacggcgaggtcgcggaggtcaccgtcaagggaagctccacggagaccatcgagatcgaagctactgaggctgatgccacgctgacatgggacctgactgtgctggggtgggaggtgaactacaaggaggagttcgtgccggcggacgagggctcctacactatcatcgtcaggaaaggcaagaagatggcgtccggcgaggaggcggtccgcaactcgttccgcgccggcgagccgggcaaggtcgtgctcaccgtccagaacacctcgcacaggaagaagaaggtgctgttcaggcacaaggccaagagcgcctgcgccaagaagtgctgagaggctaagaaatttgggagtgaaattggttgtggatttcaatattcgttacattctttgtgtgtgtgtaaggagagagagagagaacattgttcgctgattatttgaggtggttgttgc

SEQ ID NO: 8532 - protein, 206 aa, Zea mays subsp. mays
  peptide (1)..(206): Ceres Seq. ID no. 12365736
MSSPKPRRRERRMTRRRPTPRRRRRKAWRKGRRRKARRKGRRRRPRRRAETTPSRRPRKRKPTTRRRRRSRRRRPLSSTRTSRCGACLCSLARATRPPTWCSSSSSARATSRPAPRSRCSAARSAGAGTGPASAPAPSPTPTSPRSSRARATSTAQTTRATRCATTRWACSRTTPCTRRRWAPRKARPGSSGGGCAPWSATSPSWT

SEQ ID NO: 8533 - protein, 194 aa, Zea mays subsp. mays
  peptide (1)..(194): Ceres Seq. ID no. 12365737
MTRRRPTPRRRRRKAWRKGRRRKARRKGRRRRPRRRAETTPSRRPRKRKPTTRRRRRSRRRRPLSSTRTSRCGACLCSLARATRPPTWCSSSSSARATSRPAPRSRCSAARSAGAGTGPASAPAPSPTPTSPRSSRARATSTAQTTRATRCATTRWACSRTTPCTRRRWAPRKARPGSSGGGCAPWSATSPSWT

SEQ ID NO: 8534 - protein, 155 aa, Zea mays subsp. mays
  peptide (1)..(155): Ceres Seq. ID no. 12365738
MLRRTLRWRRDWTGFSSGAESDADLPEELAGACYLDGADHEGHPVCYNALGVFADDAVYKKALGTEEGKARFLRWRVRAMERHVAELDLRPGGVASLLQVIDLRNSPGPAKKDFRVAVKQVSTCSRTTTPSSSRETSWSTCRSGTTRSAPCSTRS

SEQ ID NO: 8535 - DNA, 1172 bp, Zea mays subsp. mays
  misc_feature (1)..(1172): Ceres Seq. ID no. 12408417
  misc_feature (1)..(1172): Ortholog of  Ceres SEQ ID NO 12616093 as cited in SEQ ID NO 63331
atccgcaagtccgcaacccccactactacagtgcccgccgccgctgcgtccaccacctcctttcccaactcctccgcgtacccccgccctctccggcggcccgcgtaaccacccgcgcagatggcgacggcggccacggcgtccgctacggcggcgacccgcttcacgctcctagcgggcgccggcctccgcagccgcatcagccgcctccccaccgccgtgcggttccagcgccagcgggggctcaccaccaccgcgctcctgaagaccgccgacctccagcccaaggagcagggcaagcccgagacgctcgactaccgcgtgttcctcgtcgacggcgggggccggaaggtgtcgccgtggcacgacgtcccgctgcgcgccggggacggggtgttccacttcgtcgtcgagatacccaaggagagcagcgccaagatggaggtcgccaccgacgaggccttcacgcccatcaagcaggacaccaagaagggcaaccttcgatactacccgtacaacattaactggaactatgggttacttcctcaaacatgggaggacccaacttctgcaaattctgaggttgaaggagcatttggggataatgatcctgttgatgttgttgagataggtgaaaggcgtgccaatgtcggggatgttcttaaggttaagccattggcagctttagcaatgattgatgagggagagcttgactggaaaattgtggccatttctttggatgacccgaaagcatctcttgtgaacgacgtggatgatgttgagaagcattttccggggacactgactgccatcagagactggttcagagactacaagatacctgatggaaagcctgctaacaaatttggtctgggcaacaagcccgcaagcaaggaatacgccctgaaggtcattcaagagaccaacgaatcatgggaaaaattggtaaagaggaatattcccgctggagagctctcgttggcctgattttggcccatgggaagccaccacattcttttgaactgctttcgtgagcatgtcgttttgtatgctgtgaccatgcttcttcgtttgcattccaaacctttttacgaactgtttaataaaaatgatcttgtcggatgaataatgattctggtgcgagtttaccagaacggcaaggagtgtttctc

SEQ ID NO: 8536 - protein, 288 aa, Zea mays subsp. mays
  peptide (1)..(288): Ceres Seq. ID no. 12408418
MATAATASATAATRFTLLAGAGLRSRISRLPTAVRFQRQRGLTTTALLKTADLQPKEQGKPETLDYRVFLVDGGGRKVSPWHDVPLRAGDGVFHFVVEIPKESSAKMEVATDEAFTPIKQDTKKGNLRYYPYNINWNYGLLPQTWEDPTSANSEVEGAFGDNDPVDVVEIGERRANVGDVLKVKPLAALAMIDEGELDWKIVAISLDDPKASLVNDVDDVEKHFPGTLTAIRDWFRDYKIPDGKPANKFGLGNKPASKEYALKVIQETNESWEKLVKRNIPAGELSLA

SEQ ID NO: 8537 - protein, 182 aa, Zea mays subsp. mays
  peptide (1)..(182): Ceres Seq. ID no. 12408419
MEVATDEAFTPIKQDTKKGNLRYYPYNINWNYGLLPQTWEDPTSANSEVEGAFGDNDPVDVVEIGERRANVGDVLKVKPLAALAMIDEGELDWKIVAISLDDPKASLVNDVDDVEKHFPGTLTAIRDWFRDYKIPDGKPANKFGLGNKPASKEYALKVIQETNESWEKLVKRNIPAGELSLA

SEQ ID NO: 8538 - protein, 173 aa, Zea mays subsp. mays
  peptide (1)..(173): Ceres Seq. ID no. 12408420
PQVRNPHYYSARRRCVHHLLSQLLRVPPPSPAARVTTRADGDGGHGVRYGGDPLHAPSGRRPPQPHQPPPHRRAVPAPAGAHHHRAPEDRRPPAQGAGQARDARLPRVPRRRRGPEGVAVARRPAARRGRGVPLRRRDTQGEQRQDGGRHRRGLHAHQAGHQEGQPSILPVQH

SEQ ID NO: 8539 - DNA, 1675 bp, Zea mays subsp. mays
  misc_feature (1)..(1675): Ceres Seq. ID no. 12545410
  misc_feature (1)..(1675): Ortholog of  Ceres SEQ ID NO 15176440 as cited in SEQ ID NO 53697
  misc_feature (1)..(1675): Ortholog of  Ceres SEQ ID NO 14314717 as cited in SEQ ID NO 54224
  misc_feature (1)..(1675): Ortholog of  Ceres SEQ ID NO 14313429 as cited in SEQ ID NO 55662
gcacgagaccattacctagaacatcctaatcgaaaaatccccgccccgcgcaccgcgagctagctagctactgacacccggcgccggcgccgagtacaatacaaggaaagcagcatggtgttcgagcagcaacaggaggaggcggtgttgccgggcgcggtgcacgggcaccggctctccacggtggtgccgagctccgtgacgggggaggtggactacgcgctggcggacgcggacctggccttcaagctgcactacctgcgcggggtgtactactaccggtccggggacggcctcgccaccaaggtgctcaaggaccccatgttcccgtggctggacgaccacttccccgtcgccggccgcgtccgccgcgccgaggcggagggggacggcgcgcggccctacatcaagtgcaacgactgcggcgtgcgcatcgtggaggccaggtgcgaccgcgacatggccgagtggatccgcgacggcggcgcgcccggcaggatcaggcagctctgctacgacaaggtgctcggccccgagctcttcttctcgccgctgctctacgtccagatcacaaacttcaaatgcggtgggctggcgctggggttcagctgggcgcacctcatcggcgacatcccgtcggccgccacctgcttcaacaagtgggcgcagatcctcagcggcaagaagccggaagccaccgtcctcaccccgccgaaccagccgctgcagggccagtcccccgcggcgccgcgctccgtcaagcaggtcgggcccatggaggacctctggctggtccccgcgggccgcgacatggcgtgctactccttccacgtcagcgacgcggtgctcaagaagctccaccagcagcagaatgggcgccaggacgcggccgctggcaccttcgagctcgtgtcggcgctggtgtggcaggcggtggccaagatcaggggcgacgtggacaccgtgaccgtggtcagggccgacgctgccgcgcggagcggcaagtccctggccaacgagatgaaggtcgggtacgtggagtcggcggggtcgtcgccggcgaagacggacgtcgcggagctggcggcgctgctggccaagaacgtggtcgacgagaccgccgcggtggcggcgttccagggggacgtgctcgtgtacggcggcgccaacctaacgctcgtggacatggagcaggtggacctgtacgggctggagatcaaggggcagcgcccggtccacgtggagtacggcatggacggcgtcggcgacgagggcgcggtgctggtgcagcccgacgccgacgggcgcggccgcctcgtcacggcggttttgcccggcgacgagatcgacagcctccgcgcagcgctcggtagcgcgctgcaggtcgcctgaaaactctagtacgtatcataatactacgctgctgcctacgtgctcgttgcatcgttcggtttcgcgatatcagagtaccacctcttgaagaaagtgtagtagcgtaatgaggcgtgactagtgatgggatgtattgtattgcaggatgttgcgcaaatactgtggtcgatttgcgatgtttgttctgtatcgcatgatgtttccttaataagctgctcgaatagatcatgcatgctcaatgtaccaatatttacactggagactagacaaaaacaatcgtttg

SEQ ID NO: 8540 - protein, 425 aa, Zea mays subsp. mays
  peptide (1)..(425): Ceres Seq. ID no. 12545411
MVFEQQQEEAVLPGAVHGHRLSTVVPSSVTGEVDYALADADLAFKLHYLRGVYYYRSGDGLATKVLKDPMFPWLDDHFPVAGRVRRAEAEGDGARPYIKCNDCGVRIVEARCDRDMAEWIRDGGAPGRIRQLCYDKVLGPELFFSPLLYVQITNFKCGGLALGFSWAHLIGDIPSAATCFNKWAQILSGKKPEATVLTPPNQPLQGQSPAAPRSVKQVGPMEDLWLVPAGRDMACYSFHVSDAVLKKLHQQQNGRQDAAAGTFELVSALVWQAVAKIRGDVDTVTVVRADAAARSGKSLANEMKVGYVESAGSSPAKTDVAELAALLAKNVVDETAAVAAFQGDVLVYGGANLTLVDMEQVDLYGLEIKGQRPVHVEYGMDGVGDEGAVLVQPDADGRGRLVTAVLPGDEIDSLRAALGSALQVA

SEQ ID NO: 8541 - protein, 356 aa, Zea mays subsp. mays
  peptide (1)..(356): Ceres Seq. ID no. 12545412
MFPWLDDHFPVAGRVRRAEAEGDGARPYIKCNDCGVRIVEARCDRDMAEWIRDGGAPGRIRQLCYDKVLGPELFFSPLLYVQITNFKCGGLALGFSWAHLIGDIPSAATCFNKWAQILSGKKPEATVLTPPNQPLQGQSPAAPRSVKQVGPMEDLWLVPAGRDMACYSFHVSDAVLKKLHQQQNGRQDAAAGTFELVSALVWQAVAKIRGDVDTVTVVRADAAARSGKSLANEMKVGYVESAGSSPAKTDVAELAALLAKNVVDETAAVAAFQGDVLVYGGANLTLVDMEQVDLYGLEIKGQRPVHVEYGMDGVGDEGAVLVQPDADGRGRLVTAVLPGDEIDSLRAALGSALQVA

SEQ ID NO: 8542 - protein, 310 aa, Zea mays subsp. mays
  peptide (1)..(310): Ceres Seq. ID no. 12545413
MAEWIRDGGAPGRIRQLCYDKVLGPELFFSPLLYVQITNFKCGGLALGFSWAHLIGDIPSAATCFNKWAQILSGKKPEATVLTPPNQPLQGQSPAAPRSVKQVGPMEDLWLVPAGRDMACYSFHVSDAVLKKLHQQQNGRQDAAAGTFELVSALVWQAVAKIRGDVDTVTVVRADAAARSGKSLANEMKVGYVESAGSSPAKTDVAELAALLAKNVVDETAAVAAFQGDVLVYGGANLTLVDMEQVDLYGLEIKGQRPVHVEYGMDGVGDEGAVLVQPDADGRGRLVTAVLPGDEIDSLRAALGSALQVA

SEQ ID NO: 8543 - DNA, 1237 bp, Zea mays subsp. mays
  misc_feature (1)..(1237): Ceres Seq. ID no. 13498675
  misc_feature (1)..(1237): Ortholog of  Ceres SEQ ID NO 14301423 as cited in SEQ ID NO 52204
  misc_feature (1)..(1237): Ortholog of  Ceres SEQ ID NO 12621037 as cited in SEQ ID NO 66448
  misc_feature (1)..(1237): Ortholog of  Ceres SEQ ID NO 12635639 as cited in SEQ ID NO 0
  misc_feature (1)..(1237): Ortholog of  Ceres SEQ ID NO 14305144 as cited in SEQ ID NO 0
gcacgagaccattacctagaacatcctaatcgaaaagatttgattccctatccctgcgctgcccacctcccctttcccgcctgtgncctcccattcacttgcccccttttttccctctcccgacctcccaattcccgaaatcacccccgacactccccacccaagaacccctcgtccccacctcgccatgggcagcgccgccgcctcgccgccgccgtccgggaagctgacgcaggaagagctgaagcgcgtggcggcgcaccgcgcggtggagttcgtggagcccggcatgacgctgggcctgggcacgggctccacggcggcgcacgcgctggaccgcctgggcgacctcctccgcgcgggcgcgctgccgggggtggccggcgtgcccacctccctcaagacggaggcccacgcggcgcgcgccgggatcccgctgctcccgctcccgggcgccaggatcgcgctctccatcgacggcgccgacgaggtcgacccggacctcaacctcgtcaagggccgcggcggctcgctgctccgcgagaagatgatcgagggcgccggcgcccgcttcgtcgtcatcgtcgacgagtccaagctcgtgccgcgcctcggctgcacgggcgccatccccgtcgaggtcatccccttcggcgcgctccacacgctgggcctcatccgcggcctcttcgacggattgcctggattccacgccaggctgaggactgtccccgccgctcccgccaaggggggagaagactcggactcggagtcggagcagcccttcgtcaccgacaacggcaactacatcgtcgagatgttcttcgaggacggcatccgcggcgacctgcgcgacatcagtgaccgcctgctccggatcaccggcgtcgtagagcacggcatgttcctgggcatggccaccaccgtcatcgtcgccaacaaggacggcacggtgtcagtcatggacaggaagaagtagcagtagtaatctacaagcagtagcctgttcttcgaaacagcgatcgcctgatcaccggcatgttccttgacgtggccaccaccaccatcgtcgctgccaacagcgacgacaagaagtactaataattttgcaagtagcctgtgtctgtgcaacacccagctactcttatctaagttggagttgtatcgtgtccgtgcgttatcctcatatgctgagtgtctgcaggagtatgttaatcatcatcctggtgttattatc

SEQ ID NO: 8544 - protein, 287 aa, Zea mays subsp. mays
  peptide (1)..(287): Ceres Seq. ID no. 13498676
  misc_feature (29)..(29): Xaa is any aa, unknown or other
ARDHYLEHPNRKDLIPYPCAAHLPFPACXLPFTCPLFSLSRPPNSRNHPRHSPPKNPSSPPRHGQRRRLAAAVREADAGRAEARGGAPRGGVRGARHDAGPGHGLHGGARAGPPGRPPPRGRAAGGGRRAHLPQDGGPRGARRDPAAPAPGRQDRALHRRRRRGRPGPQPRQGPRRLAAPREDDRGRRRPLRRHRRRVQARAAPRLHGRHPRRGHPLRRAPHAGPHPRPLRRIAWIPRQAEDCPRRSRQGGRRLGLGVGAALRHRQRQLHRRDVLRGRHPRRPARHQ

SEQ ID NO: 8545 - protein, 263 aa, Zea mays subsp. mays
  peptide (1)..(263): Ceres Seq. ID no. 13498677
MGSAAASPPPSGKLTQEELKRVAAHRAVEFVEPGMTLGLGTGSTAAHALDRLGDLLRAGALPGVAGVPTSLKTEAHAARAGIPLLPLPGARIALSIDGADEVDPDLNLVKGRGGSLLREKMIEGAGARFVVIVDESKLVPRLGCTGAIPVEVIPFGALHTLGLIRGLFDGLPGFHARLRTVPAAPAKGGEDSDSESEQPFVTDNGNYIVEMFFEDGIRGDLRDISDRLLRITGVVEHGMFLGMATTVIVANKDGTVSVMDRKK

SEQ ID NO: 8546 - protein, 229 aa, Zea mays subsp. mays
  peptide (1)..(229): Ceres Seq. ID no. 13498678
MTLGLGTGSTAAHALDRLGDLLRAGALPGVAGVPTSLKTEAHAARAGIPLLPLPGARIALSIDGADEVDPDLNLVKGRGGSLLREKMIEGAGARFVVIVDESKLVPRLGCTGAIPVEVIPFGALHTLGLIRGLFDGLPGFHARLRTVPAAPAKGGEDSDSESEQPFVTDNGNYIVEMFFEDGIRGDLRDISDRLLRITGVVEHGMFLGMATTVIVANKDGTVSVMDRKK

SEQ ID NO: 8547 - DNA, 1602 bp, Zea mays subsp. mays
  misc_feature (1)..(1602): Ceres Seq. ID no. 12356556
  misc_feature (1)..(1602): Ortholog of  Ceres SEQ ID NO 13655375 as cited in SEQ ID NO 63347
  misc_feature (1)..(1602): Ortholog of  Ceres SEQ ID NO 12626166 as cited in SEQ ID NO 64505
  misc_feature (1)..(1602): Ortholog of  Ceres SEQ ID NO 13654415 as cited in SEQ ID NO 68820
  misc_feature (1)..(1602): Ortholog of  Ceres SEQ ID NO 14303290 as cited in SEQ ID NO 0
aaacgaaaacgagccagccgggcaaacaacactcacatcttacaccagccgcactcccctgtcctcctctccgagacgagacggacgggacggcaggcaccaccgcaccggcgccaccccacccgccggctcagagcgggggcccggccacccgaatcacacagatcggaacgccggaggaggagcaacgcgggcgcggagaggcccgccagcgaaggcgcagtgcaagctctgggttcccggatccgataccaccggtctctcggcgagtgtgtaatccagcgagcgagcgctcggtttttgccgtgagagcgggagatgagtgctctgaagaaatccgacaagaaagccgccctcgacttcgcggcatggagcttcaacgtcaccacgtcggtcggactcatcatggtcaacaaggcgttgatggctacgtatggattcagttttgccacgacattaactgggcttcattttgtgaccactaccttgatgactatcgtatttcgatggttaggcctgagccagccatcccacttacccctagcagatctagttaaatttgtgatattttcgaacttgtcaattgttgggatgaatgtgagcttgatgtggaactctgtgggcttttatcagatagcaaagctgtgcatgatacctgcatcctgtcttctggaggttgtctttgatcatgtacattattcccgggacacaaagctgagcataatggtcgtgcttataggagttgcagtctgcacagttactgatgtcagtgtgaatgcaagaggtctaatcgcggctgttatagctgtttggagcacagctttgcaacaatattatgtccattttctccaacgcaagtactctttgaactcattcaacctgctgggccacactgctccagcccaagctgggtcactcctgctagtgggaccatttgcagattacttgttgacaggcaaaagggtggatcacttcagtttctcatcacttgctctgtttttcctggcactctcatgcttcatcgccattggtgttaatctgagccaattcatctgtattgggcgcttctctgctgtatccttccaagtcttaggccacatgaagaccgtacttgttctgtcccttgggttcctactctttggcaaggagggcctgaatcttcaggtagtccttgggatggttctggccgttcttggaatgatatggtacgggaacgcatctgccaaaccaggcggcaaagagcggcgcagcgtcctaccgctgaggtctgcaagtctcaagggaagttcggaagaaaagggcggtgccgagaaatagtcttgctctctctgattgccaacttgaacggggagttttccgttccaaggttgaatttctggtgaggtgacgtgaagtaccacatattgggaactcttgcctaatatttgacgcagagaacaaactcgttccatctagaaacccaggattgttatagttacaggtatactgtaaaggttcattttttttggcgctctgaatcaatttgcagtgaggggaaagacagacatggttgttacgagtcttcaagacagttttttatcgaatatataatgcagttgtttg

SEQ ID NO: 8548 - protein, 332 aa, Zea mays subsp. mays
  peptide (1)..(332): Ceres Seq. ID no. 12356557
MSALKKSDKKAALDFAAWSFNVTTSVGLIMVNKALMATYGFSFATTLTGLHFVTTTLMTIVFRWLGLSQPSHLPLADLVKFVIFSNLSIVGMNVSLMWNSVGFYQIAKLCMIPASCLLEVVFDHVHYSRDTKLSIMVVLIGVAVCTVTDVSVNARGLIAAVIAVWSTALQQYYVHFLQRKYSLNSFNLLGHTAPAQAGSLLLVGPFADYLLTGKRVDHFSFSSLALFFLALSCFIAIGVNLSQFICIGRFSAVSFQVLGHMKTVLVLSLGFLLFGKEGLNLQVVLGMVLAVLGMIWYGNASAKPGGKERRSVLPLRSASLKGSSEEKGGAEK

SEQ ID NO: 8549 - protein, 303 aa, Zea mays subsp. mays
  peptide (1)..(303): Ceres Seq. ID no. 12356558
MVNKALMATYGFSFATTLTGLHFVTTTLMTIVFRWLGLSQPSHLPLADLVKFVIFSNLSIVGMNVSLMWNSVGFYQIAKLCMIPASCLLEVVFDHVHYSRDTKLSIMVVLIGVAVCTVTDVSVNARGLIAAVIAVWSTALQQYYVHFLQRKYSLNSFNLLGHTAPAQAGSLLLVGPFADYLLTGKRVDHFSFSSLALFFLALSCFIAIGVNLSQFICIGRFSAVSFQVLGHMKTVLVLSLGFLLFGKEGLNLQVVLGMVLAVLGMIWYGNASAKPGGKERRSVLPLRSASLKGSSEEKGGAEK

SEQ ID NO: 8550 - protein, 297 aa, Zea mays subsp. mays
  peptide (1)..(297): Ceres Seq. ID no. 12356559
MATYGFSFATTLTGLHFVTTTLMTIVFRWLGLSQPSHLPLADLVKFVIFSNLSIVGMNVSLMWNSVGFYQIAKLCMIPASCLLEVVFDHVHYSRDTKLSIMVVLIGVAVCTVTDVSVNARGLIAAVIAVWSTALQQYYVHFLQRKYSLNSFNLLGHTAPAQAGSLLLVGPFADYLLTGKRVDHFSFSSLALFFLALSCFIAIGVNLSQFICIGRFSAVSFQVLGHMKTVLVLSLGFLLFGKEGLNLQVVLGMVLAVLGMIWYGNASAKPGGKERRSVLPLRSASLKGSSEEKGGAEK

SEQ ID NO: 8551 - DNA, 1161 bp, Zea mays subsp. mays
  misc_feature (1)..(1161): Ceres Seq. ID no. 12340900
  misc_feature (1)..(1161): Ortholog of  Ceres SEQ ID NO 13589868 as cited in SEQ ID NO 55521
  misc_feature (1)..(1161): Ortholog of  Ceres SEQ ID NO 14312250 as cited in SEQ ID NO 59168
  misc_feature (1)..(1161): Ortholog of  Ceres SEQ ID NO 15173326 as cited in SEQ ID NO 63793
  misc_feature (1)..(1161): Ortholog of  Ceres SEQ ID NO 12617659 as cited in SEQ ID NO 65286
  misc_feature (1)..(1161): Ortholog of  Ceres SEQ ID NO 12780566 as cited in SEQ ID NO 65822
  misc_feature (1)..(1161): Ortholog of  Ceres SEQ ID NO 15179979 as cited in SEQ ID NO 0
aactcacaaggcttttacacgactagttctgcgaggctaagagcagaaaaaactccacctgcctggctgatttcatcaactccggcggcttggagaagacgaagctgctccagaatccgataggaagtttggtgctcgcgtgttgacgggttgatttcggtgcgccgatggggcaggcgttccgcaagctgttcgatgccttcctcggcaccagcgagatgagggttgtgatgcttggtctggatgccgccggtaaaaccaccatcttgtacaagctgcaaatcggggaggttttgtcgactgttcccacgattggtttcaatgtcgagaaagttcaatacaagaatgtgatgtttactgtttgggatgttggtggccaagaaaagttgaggcccttgtggaggcactacttcaacaatactgatggcttgatctatgtagttgattcattggatcgggagaggattggaaaagctaaagctgaatttcaggcaataatcaatgatcctttcatgcttaacagtgtcatattggtatttgccaataaacaagatatgaaaggggcaatgacaccaatggaggtgtgtgagggccttggcctctacgatttgaagaatcgcacctggcacatccaaggctcctgtgcgcttaaaggtgatggcctttatgagggcttggactggatggcaagcactctgaaggaattgcaagcttcaggtcgcctaccctctggagggacatcgttgttctaagaagcaaatctgcatgtaagatccttgggttgatactagtaataatggatcaagagatcatcaatgatgttaacatcttgatgagaatttcctttcaaattcatgctgcactgctcaggctccgtggggtgattctactaaagaaaaggtgaaacatgggcctgaccgcataaaaatatcggtcatgcgtttgtactcacccctggggatttcttgtcaatgatctaacctgtgatataggccttgtaacttccgttgtgagtaagtttcattcaaagctaaccggcggatgcatttgtcacatatgagaattgaggagtcaacttccacatcctgttgttgtaagaatttctgtaaatcgaagttggcaaacataatttatctcaacaagttggtccggtcattatcc

SEQ ID NO: 8552 - protein, 194 aa, Zea mays subsp. mays
  peptide (1)..(194): Ceres Seq. ID no. 12340901
MGQAFRKLFDAFLGTSEMRVVMLGLDAAGKTTILYKLQIGEVLSTVPTIGFNVEKVQYKNVMFTVWDVGGQEKLRPLWRHYFNNTDGLIYVVDSLDRERIGKAKAEFQAIINDPFMLNSVILVFANKQDMKGAMTPMEVCEGLGLYDLKNRTWHIQGSCALKGDGLYEGLDWMASTLKELQASGRLPSGGTSLF

SEQ ID NO: 8553 - protein, 177 aa, Zea mays subsp. mays
  peptide (1)..(177): Ceres Seq. ID no. 12340902
MRVVMLGLDAAGKTTILYKLQIGEVLSTVPTIGFNVEKVQYKNVMFTVWDVGGQEKLRPLWRHYFNNTDGLIYVVDSLDRERIGKAKAEFQAIINDPFMLNSVILVFANKQDMKGAMTPMEVCEGLGLYDLKNRTWHIQGSCALKGDGLYEGLDWMASTLKELQASGRLPSGGTSLF

SEQ ID NO: 8554 - protein, 173 aa, Zea mays subsp. mays
  peptide (1)..(173): Ceres Seq. ID no. 12340903
MLGLDAAGKTTILYKLQIGEVLSTVPTIGFNVEKVQYKNVMFTVWDVGGQEKLRPLWRHYFNNTDGLIYVVDSLDRERIGKAKAEFQAIINDPFMLNSVILVFANKQDMKGAMTPMEVCEGLGLYDLKNRTWHIQGSCALKGDGLYEGLDWMASTLKELQASGRLPSGGTSLF

SEQ ID NO: 8555 - DNA, 1323 bp, Zea mays subsp. mays
  misc_feature (1)..(1323): Ceres Seq. ID no. 12408405
  misc_feature (1)..(1323): Ortholog of  Ceres SEQ ID NO 15178717 as cited in SEQ ID NO 54457
  misc_feature (1)..(1323): Ortholog of  Ceres SEQ ID NO 13584012 as cited in SEQ ID NO 63469
aagcttgggagttgggagtgacaccgcggcacctccactgcagtagtcttgttgccggcggcggcggcgggcggcggcgcggagaaattcggcgaacgatggcggactccggaagcctgaggaagcgggaggagaaggaagaggaggacgacattgtctgcctggatccttccttcttcgtggaccgcagctacgagatgacgaccttcaccttcggatcccacgagttgcgcctcctctgcctccgcgccgcttccactgattttgatcttactggacagttagtgtggccaggggcagtccttatgaacaactacctatctcaacaccctgaaattgtgaagggatgttcagtagttgagctaggatctgggattggcattactggcatattgtgtagccgtttctgcaaggaggttgtcttgactgatcacaatgatgaagttctggagattataaagaaaaatatagagttgcagtcatgttctgagaatgcacatgcagtgttgacagccgagaaactagagtggggaaactcagatcatttaagcggtattattgaaaaacatcctggtggatttgatcttgttcttggagctgatatttgcttccagcaatctagcatttcctgcctctttgatactgtagagaggattgttcgtattcaagctggtaaatgcagattcatattggcttatgtatcccgaactaaagtcatggatgcactagtactcaaggaagctgaaaagcatggaatgcgtgttgaagaagtgaacggaacaagaacaaccatctcgaatcttgaaggagtcatatttgacattaccctgaaatgacagtccgtccttcgactctcctttgtcgaagtgcttgagtggttattcgtcatgaagtcctgtgtaacttccttttagcgggaaaatcgaagttccgcatcatgatgagctggagttgtgtcagttgtatctctgtagaggaggaggcaccacagtaagaacattagccgatgatggtctttgattcatgcgcccatttggtgtggctttctactgttcaactgctccatcctttaagccaatatataagatgtaagatgcgtgctacaactttctcggactatctatctatctatcggtgagatgaccagactgtgaaagttcctgtgacaaggagttgctgaaagcagtgccatcatgtatgggttgcagatgcttggtctgaactctgtaaaaggctctggattaccatgagtttttcgtgcttggtgcagtagcatgtaagtaagcaccaactgaacagaagaaaccttcagcacccccttcg

SEQ ID NO: 8556 - protein, 277 aa, Zea mays subsp. mays
  peptide (1)..(277): Ceres Seq. ID no. 12408406
AWELGVTPRHLHCSSLVAGGGGGRRRGEIRRTMADSGSLRKREEKEEEDDIVCLDPSFFVDRSYEMTTFTFGSHELRLLCLRAASTDFDLTGQLVWPGAVLMNNYLSQHPEIVKGCSVVELGSGIGITGILCSRFCKEVVLTDHNDEVLEIIKKNIELQSCSENAHAVLTAEKLEWGNSDHLSGIIEKHPGGFDLVLGADICFQQSSISCLFDTVERIVRIQAGKCRFILAYVSRTKVMDALVLKEAEKHGMRVEEVNGTRTTISNLEGVIFDITLK

SEQ ID NO: 8557 - protein, 245 aa, Zea mays subsp. mays
  peptide (1)..(245): Ceres Seq. ID no. 12408407
MADSGSLRKREEKEEEDDIVCLDPSFFVDRSYEMTTFTFGSHELRLLCLRAASTDFDLTGQLVWPGAVLMNNYLSQHPEIVKGCSVVELGSGIGITGILCSRFCKEVVLTDHNDEVLEIIKKNIELQSCSENAHAVLTAEKLEWGNSDHLSGIIEKHPGGFDLVLGADICFQQSSISCLFDTVERIVRIQAGKCRFILAYVSRTKVMDALVLKEAEKHGMRVEEVNGTRTTISNLEGVIFDITLK

SEQ ID NO: 8558 - protein, 212 aa, Zea mays subsp. mays
  peptide (1)..(212): Ceres Seq. ID no. 12408408
MTTFTFGSHELRLLCLRAASTDFDLTGQLVWPGAVLMNNYLSQHPEIVKGCSVVELGSGIGITGILCSRFCKEVVLTDHNDEVLEIIKKNIELQSCSENAHAVLTAEKLEWGNSDHLSGIIEKHPGGFDLVLGADICFQQSSISCLFDTVERIVRIQAGKCRFILAYVSRTKVMDALVLKEAEKHGMRVEEVNGTRTTISNLEGVIFDITLK

SEQ ID NO: 8559 - DNA, 2037 bp, Zea mays subsp. mays
  misc_feature (1)..(2037): Ceres Seq. ID no. 12408401
  misc_feature (1)..(2037): Ortholog of  Ceres SEQ ID NO 13596319 as cited in SEQ ID NO 67933
cttcgcccaactcgtcccattatttctctaaaaatccaacaaataaatccttgtgccagcagaaagtatagatcgtgttagctaaaagacatccgcgatgacgtcgacagcggtggggggcgagccggcggcgttgccacgggtactggcggtggagcaaagccgactttttcccggagccctcgttccagagctggcgcgcgtacggcggcgcgctcttgtccactgggccacggctgcgcgaccgcgtcacgagtcgctcatccgaggccgttgaggcggggacgctgctcgcccagagcgagaaccccctccggcggtgcctgtcgtgggtggatctcgccttcctcggattcggctccgtcgtcggctcgggcgtcttcgtgctcaccggccaggaggcgcggttcgacgccggcccggccatcccgctggcctacgccgccgcgggcttctcggcgctgctctcgtccttctgctacgcggagctcgccggcgagatcccgtcggctggcggctcgttctcgtacctgcgcgtcgagctcggggacctggccgcgttcatcgccgccgggaacatcctgctcgaggccgtggtgggcgcggccggcctgggccggtcctggacgtcgtacctcgcggcgctcatcggccgcgacagcgacgcgctccgcatccacgtccccgcgctcgccgacggcttcaatctgctggacccgatcgccgtcgtcgtgctgtgcgccacttccgcgctcgccgtgtccggcgcgcgcctcacctccaccgtcaactcggtggcgtccgcggtcggcatcgccatcatcgcgttcgtgctggccgcggggttctcgcacttcgagccagccaacctcgcgccgtcattcttccccttcggcgccgcgggcgtcttccgcgcggcggccgtcgtgtactggtcctacacgggattcgacatggtggccaccatggccgaggagaccaagaaccccggcccgcgacgtgccgctgggcctcatctcgtccatgtccgccatcaccctcgtctactgcgccatgtccctcgcgctcgtggggatgcagcgctacagcgacattgacgccaacgcggcctactcggtggcgttcgcggcggccgggatgaagtgggcgcgctacgtcgtggcgctcggcgcgctcaagggcatgacgagcggcctcctcgtcggcgcgctcggccaggcgcgctacaccacgcagatcgcgcgcacgcacatgatcccgccctacttcgcgctcgtgcaccccaggaccggcacgcccatctacgccaccatcgccgtcacgctcggcgccgcctgcgtcgcgctcttctccagcctcgacgtgctcgcgtccgtctcctccatcagcacgctcttcatcttcgcgctcgtcgccgttgcgctcctcgtccgacgatactacgtcgcgggaaccacgtcacccgcgcaggcccgcaccttcgtcggcttcctggcgctgatcgtgctgtcgtccatcgggctgtccgtgtactacaactcgggctacgctgctcggtggcccgggtacgtagcgttcggcgctttgtgggcggccggcacggcggggctggcgctattcgcggagcagcagcgcgcgcccagggtatacggcgcgccgctcatgccgtggctgccggccatgtccgtcgccacaaacctcttccttatgggctctctcggctccctcgcctacatgcgctttggcatctgcacggcggcgatgcttgtgtactacgtgctcttcagcgtgcacgccacctatgacatggtgcactctcaaggtcagacgacatcggcggccgacgctgccaccgacggagtggagcagaggaagataatgccggtgtgacacagaggatgtcatttcttggttagttgagcaaaaggtttgttcaactgtagtgtagggtagacttgagtttggtttgttcaattgctctagttaattggatccctcgttcagaatagctcatctgtatgaaaaaatggtttgtgc

SEQ ID NO: 8560 - protein, 288 aa, Zea mays subsp. mays
  peptide (1)..(288): Ceres Seq. ID no. 12408402
MSAITLVYCAMSLALVGMQRYSDIDANAAYSVAFAAAGMKWARYVVALGALKGMTSGLLVGALGQARYTTQIARTHMIPPYFALVHPRTGTPIYATIAVTLGAACVALFSSLDVLASVSSISTLFIFALVAVALLVRRYYVAGTTSPAQARTFVGFLALIVLSSIGLSVYYNSGYAARWPGYVAFGALWAAGTAGLALFAEQQRAPRVYGAPLMPWLPAMSVATNLFLMGSLGSLAYMRFGICTAAMLVYYVLFSVHATYDMVHSQGQTTSAADAATDGVEQRKIMPV

SEQ ID NO: 8561 - protein, 278 aa, Zea mays subsp. mays
  peptide (1)..(278): Ceres Seq. ID no. 12408403
MSLALVGMQRYSDIDANAAYSVAFAAAGMKWARYVVALGALKGMTSGLLVGALGQARYTTQIARTHMIPPYFALVHPRTGTPIYATIAVTLGAACVALFSSLDVLASVSSISTLFIFALVAVALLVRRYYVAGTTSPAQARTFVGFLALIVLSSIGLSVYYNSGYAARWPGYVAFGALWAAGTAGLALFAEQQRAPRVYGAPLMPWLPAMSVATNLFLMGSLGSLAYMRFGICTAAMLVYYVLFSVHATYDMVHSQGQTTSAADAATDGVEQRKIMPV

SEQ ID NO: 8562 - protein, 271 aa, Zea mays subsp. mays
  peptide (1)..(271): Ceres Seq. ID no. 12408404
MQRYSDIDANAAYSVAFAAAGMKWARYVVALGALKGMTSGLLVGALGQARYTTQIARTHMIPPYFALVHPRTGTPIYATIAVTLGAACVALFSSLDVLASVSSISTLFIFALVAVALLVRRYYVAGTTSPAQARTFVGFLALIVLSSIGLSVYYNSGYAARWPGYVAFGALWAAGTAGLALFAEQQRAPRVYGAPLMPWLPAMSVATNLFLMGSLGSLAYMRFGICTAAMLVYYVLFSVHATYDMVHSQGQTTSAADAATDGVEQRKIMPV

SEQ ID NO: 8563 - DNA, 1450 bp, Zea mays subsp. mays
  misc_feature (1)..(1450): Ceres Seq. ID no. 12423817
  misc_feature (1)..(1450): Ortholog of  Ceres SEQ ID NO 12617368 as cited in SEQ ID NO 64050
  misc_feature (1)..(1450): Ortholog of  Ceres SEQ ID NO 13597866 as cited in SEQ ID NO 64974
  misc_feature (1)..(1450): Ortholog of  Ceres SEQ ID NO 13597624 as cited in SEQ ID NO 65426
cactctgcctttccattcccccatccgccatggcggcgccgccggagctcgttgacgacacgatcgccgagatctgcctccgccttcccccggacgagcccgcgcacctcgtccgtgccgccctggtctccaggcgctggcgccgcatcctctccggcggggccttcctccgccggtaccgcgcgttccacggggcaccccctctgctcggcttcgtcgacaacaccatcgggctccacggcgccacggcccctcgcttctcccccaccacctcatccggctcccctttccccaggcggacgttcgactgcatctgctgggaggccctcgactgccgccacggccgcgtcctcctcggcctcttcgccgagagggtcaacctcgtcgtgtgggaccccgtcaccggcgaccactgtgggctgcctgaccccggggtgctccccggttactacagcgcggcggtgctctgcgccgcgcgcggctgcgaccacctccactgccgcggcggcggcccgttccgcgtcgtcctggcgggcatggactacttctcaagggacgccggcgtgcgggcgcgcctctactgctcggaggccgctgcctgggtcgcctctgctcagttggcctccgattcccatgtcatgcggaagcccagcgcgctcgtcggagacaacgtctacttccagctcatggagggtgacgtgtttctgaggtacgacatgggcaggaaccgtctgtccaccttcgaccctccggcggcgcacgtcgacgaagggggcgtcgtgctcatgcccatgggcggtgacggctcgctggggcttgccggcgtcaggggatcaaggctttgcctgtggtcgacgagtgtcggcgcagaggggattggaaggatgggttcgacgcggggacattgagcttatgacacggatcccctttatgccctatagcgaagcacatgtgattgcttctgcggagggcttgggtttcggtacaatcttcttggtctcaactgaggttggcctcttcgcggtcgacctcaaatcagggcaggagcgcaaactaagcgagcctgggaactacaacgacttcgctgtcttccccttcatgagcttctatactccagactgtacaagcggcaaggtaccgtcacccaggaggacacactaatcactgtaatactgaggcgaagaatggtattgcctggctcatctncagatccatcaagttgagtttgcaggtgctgtcatctttctgttgcaggaatgacgtctcgcaagaaacacaagccatgaagccaacatattggtcgcttatgctcctatgctctctagctgattcttagatgcataatgtatacgcagccttttttttgttctcgtaatatgtgtgttgtttggttcacatatttgtaatataataggtaacagataacgttaaattatgtttgtttaaatcc

SEQ ID NO: 8564 - protein, 301 aa, Zea mays subsp. mays
  peptide (1)..(301): Ceres Seq. ID no. 12423818
LCLSIPPSAMAAPPELVDDTIAEICLRLPPDEPAHLVRAALVSRRWRRILSGGAFLRRYRAFHGAPPLLGFVDNTIGLHGATAPRFSPTTSSGSPFPRRTFDCICWEALDCRHGRVLLGLFAERVNLVVWDPVTGDHCGLPDPGVLPGYYSAAVLCAARGCDHLHCRGGGPFRVVLAGMDYFSRDAGVRARLYCSEAAAWVASAQLASDSHVMRKPSALVGDNVYFQLMEGDVFLRYDMGRNRLSTFDPPAAHVDEGGVVLMPMGGDGSLGLAGVRGSRLCLWSTSVGAEGIGRMGSTRGH

SEQ ID NO: 8565 - protein, 292 aa, Zea mays subsp. mays
  peptide (1)..(292): Ceres Seq. ID no. 12423819
MAAPPELVDDTIAEICLRLPPDEPAHLVRAALVSRRWRRILSGGAFLRRYRAFHGAPPLLGFVDNTIGLHGATAPRFSPTTSSGSPFPRRTFDCICWEALDCRHGRVLLGLFAERVNLVVWDPVTGDHCGLPDPGVLPGYYSAAVLCAARGCDHLHCRGGGPFRVVLAGMDYFSRDAGVRARLYCSEAAAWVASAQLASDSHVMRKPSALVGDNVYFQLMEGDVFLRYDMGRNRLSTFDPPAAHVDEGGVVLMPMGGDGSLGLAGVRGSRLCLWSTSVGAEGIGRMGSTRGH

SEQ ID NO: 8566 - protein, 235 aa, Zea mays subsp. mays
  peptide (1)..(235): Ceres Seq. ID no. 12423820
HSAFPFPHPPWRRRRSSLTTRSPRSASAFPRTSPRTSSVPPWSPGAGAASSPAGPSSAGTARSTGHPLCSASSTTPSGSTAPRPLASPPPPHPAPLSPGGRSTASAGRPSTAATAASSSASSPRGSTSSCGTPSPATTVGCLTPGCSPVTTARRCSAPRAAATTSTAAAAARSASSWRAWTTSQGTPACGRASTARRPLPGSPLLSWPPIPMSCGSPARSSETTSTSSSWRVTCF

SEQ ID NO: 8567 - DNA, 1511 bp, Zea mays subsp. mays
  misc_feature (1)..(1511): Ceres Seq. ID no. 12408397
  misc_feature (1)..(1511): Ortholog of  Ceres SEQ ID NO 14315455 as cited in SEQ ID NO 56988
cctgcccgcagctgagctcccccatagttactagctagcttatattgcatatctcctccccctcctccgtcctcgctagctcgtgttcttcttcctctcatcttttgcttgtcctccattccatcgatctcctattcctgtgccgaccgcgaggccatcgtcaaagagaaacacagagcgggtcggggactctcggggagtcgggggaggctgctagtgctagctagctcgaccatatacagtttgtgggcgcggccgggcgggcaacaagctgctaaggtaccagcataccacccatctccatggctttcctggtggagcggtgcggcgagatggtggtgtcgatggagagcccgcacgcgaaccggtgccggcgccgttcctgaccaagacgtaccagctggtggacgacccctgcaccgaccacttcgtgtcgtggggcgacgacgacaccaccttcgtcgtgtggcgcccgcccgagttcgcccgcgacctcctcccaaactacttcaagcacaacaacttctccagcttcgtcaggcagctcaacacctatggcttcaggaagatagtggcggacaggtgggagttcgccaacgagttcttcaggaagggcgccaagcacctcctcgccgagatccaccggaggaagtcgtcgcagccgctgccgacgccgctgccgccgcaccagccctaccaccaccaccaccaccatctccaccaccacctcagcccgttctccccgccgccgctggcacagccggtgccgtcgtaccaccaccaccacttccaagaagagcccatcgccaccgccaccgcgccgcacggcggtgctcaagccgccgccgccggcggcaacaatgaaggcagcggcgccggctccggcggggactttctggccgcgctgtcggaggacaaccggcagctgtggcggcgcaactcgctgctgctgtcggagctggcgcacatgaagaagctctacaacgacatcatctacttcctgcagaaccacgtggccccggtgacgagcccctcgtcggcggcgcacgcgtccctgcccaangcgccggcggcggcngcgccgcggcntcctcctgcaggctaatggagctggacccggcggactccccatcncnccgccgcggcggccggaggcggacgacggcacggacacggtgaagctgttcggcgtggccctgcagggcaagaagaagaagcgggcgcaccaggaggatggggacgacggcaaccatgagcagggaagcagcgacgtctagccgccggccggcttgcattgctagctctctcgttcgtgtacatacagagatcagatcagagagtagtagtttgcctcgctagctaggctaggctaggctttggtaattttcttctgagtgcgtactgaaattaatgtgcaagagcgaagtgtttgtctgagtaaaactaacaagaatctacggatgcgtgcatggaagctaagctagatgcagaggcttgcaccaccttctctt

SEQ ID NO: 8568 - protein, 45 aa, Zea mays subsp. mays
  peptide (1)..(45): Ceres Seq. ID no. 12408398
  misc_feature (32)..(32): Xaa is any aa, unknown or other
  misc_feature (37)..(37): Xaa is any aa, unknown or other
  misc_feature (41)..(41): Xaa is any aa, unknown or other
MKKLYNDIIYFLQNHVAPVTSPSSAAHASLPXAPAAXAPRXPPAG

SEQ ID NO: 8569 - protein, 41 aa, Zea mays subsp. mays
  peptide (1)..(41): Ceres Seq. ID no. 12408399
MGTTATMSREAATSSRRPACIASSLVRVHTEIRSESSSLPR

SEQ ID NO: 8570 - protein, 36 aa, Zea mays subsp. mays
  peptide (1)..(36): Ceres Seq. ID no. 12408400
MKAAAPAPAGTFWPRCRRTTGSCGGATRCCCRSWRT

SEQ ID NO: 8571 - DNA, 1528 bp, Zea mays subsp. mays
  misc_feature (1)..(1528): Ceres Seq. ID no. 12408393
  misc_feature (1)..(1528): Ortholog of  Ceres SEQ ID NO 14301920 as cited in SEQ ID NO 69277
atctcgcttgcgaaacaaaggacggcgcgcgagaggaggggaaaggaaaacaaccaccacgaccccgtccattccgttccacttccacccgagctcagcgatcgcggcggcggatgcggatggggaaggggctgtcgtcgcgggcggggtcgcggcaccggcagttccgcgcccgagccatgacccgcgtcgacgacctccaggaggtcttctcgggcctgcagtccgcgcgcaaggactcacgctccgcggacgccgccgtcctcgaggcgcagctccagcagatgctgcgcgagtggcgctccgagctcaacgctccctctcccacctcctccctgcagggcaacgccagggaactgtcggatccgccttcggatactcttcgtctactgcagttggtggtggccgaggaggaggatgacgccacgagcaagatggtcgagcagcagcagcagcccccacctccgctcccagctaaccggagccagggccacgcgcatgttgtgtgccagggcatgaagccggagccgcacgaggaagcagttgacgttgctgtggaccagccgcagctgctgagtcagggggttctgcctaatggtgctgctaccgcgtctgcggtgttccatgatcagctgtactatgtgaaccaggagctcacggtcgaggattttctttatgatgatgattacaagatagatctttctgggtctaatctggatgtcattaataacctagaagggattgttcagctggaatatccagatcacaatttgccgcaagggttagcccctaatgcataccttgacatgaatagttgtgggcagagtgccggggctgttttcctgcacatgccagatttgctcacaacaatgacttcagcaccttctgcattcctgaagccaaaatgcgctctctgggactgccccaggcctgctattggatcagaaagatggcataattattgcagcatgtatcatgctgatttggctgtgcaggaagagggccctccgggcacaatgcctgtgatccgtccaagaggcattgatctgaaagatggccccctgtttgctgctcttagtgcaaaagtccaaggaaaaaatgttggggtccctatctgtgaaggagctgccactgcaaagtctccatggaatgcacctgaacttttcgatctttacatatttgaaggtgaatctatcagagaatggttgttttttgacaaaccaaggagggcatttgatagtggaaatcggaagcagcggtccttgccagactacaacggccgtggttggcatgaatctaggaagcaggtgatgaaggactttgggggtctgaagaggtcctattacatggatccacaaccatccaacagctatgaatggcacctatatgaatatgagatcaatgactgtgatgcttttgccttatatcggcttgaattcaagtcttcagatgcaaagaaaattgcaaaatccaaattaggttgtaatccactgaatgaaattcagcagcaaatggatagactcagtcc

SEQ ID NO: 8572 - protein, 508 aa, Zea mays subsp. mays
  peptide (1)..(508): Ceres Seq. ID no. 12408394
LACETKDGAREEGKGKQPPRPRPFRSTSTRAQRSRRRMRMGKGLSSRAGSRHRQFRARAMTRVDDLQEVFSGLQSARKDSRSADAAVLEAQLQQMLREWRSELNAPSPTSSLQGNARELSDPPSDTLRLLQLVVAEEEDDATSKMVEQQQQPPPPLPANRSQGHAHVVCQGMKPEPHEEAVDVAVDQPQLLSQGVLPNGAATASAVFHDQLYYVNQELTVEDFLYDDDYKIDLSGSNLDVINNLEGIVQLEYPDHNLPQGLAPNAYLDMNSCGQSAGAVFLHMPDLLTTMTSAPSAFLKPKCALWDCPRPAIGSERWHNYCSMYHADLAVQEEGPPGTMPVIRPRGIDLKDGPLFAALSAKVQGKNVGVPICEGAATAKSPWNAPELFDLYIFEGESIREWLFFDKPRRAFDSGNRKQRSLPDYNGRGWHESRKQVMKDFGGLKRSYYMDPQPSNSYEWHLYEYEINDCDAFALYRLEFKSSDAKKIAKSKLGCNPLNEIQQQMDRLS

SEQ ID NO: 8573 - protein, 471 aa, Zea mays subsp. mays
  peptide (1)..(471): Ceres Seq. ID no. 12408395
MRMGKGLSSRAGSRHRQFRARAMTRVDDLQEVFSGLQSARKDSRSADAAVLEAQLQQMLREWRSELNAPSPTSSLQGNARELSDPPSDTLRLLQLVVAEEEDDATSKMVEQQQQPPPPLPANRSQGHAHVVCQGMKPEPHEEAVDVAVDQPQLLSQGVLPNGAATASAVFHDQLYYVNQELTVEDFLYDDDYKIDLSGSNLDVINNLEGIVQLEYPDHNLPQGLAPNAYLDMNSCGQSAGAVFLHMPDLLTTMTSAPSAFLKPKCALWDCPRPAIGSERWHNYCSMYHADLAVQEEGPPGTMPVIRPRGIDLKDGPLFAALSAKVQGKNVGVPICEGAATAKSPWNAPELFDLYIFEGESIREWLFFDKPRRAFDSGNRKQRSLPDYNGRGWHESRKQVMKDFGGLKRSYYMDPQPSNSYEWHLYEYEINDCDAFALYRLEFKSSDAKKIAKSKLGCNPLNEIQQQMDRLS

SEQ ID NO: 8574 - protein, 469 aa, Zea mays subsp. mays
  peptide (1)..(469): Ceres Seq. ID no. 12408396
MGKGLSSRAGSRHRQFRARAMTRVDDLQEVFSGLQSARKDSRSADAAVLEAQLQQMLREWRSELNAPSPTSSLQGNARELSDPPSDTLRLLQLVVAEEEDDATSKMVEQQQQPPPPLPANRSQGHAHVVCQGMKPEPHEEAVDVAVDQPQLLSQGVLPNGAATASAVFHDQLYYVNQELTVEDFLYDDDYKIDLSGSNLDVINNLEGIVQLEYPDHNLPQGLAPNAYLDMNSCGQSAGAVFLHMPDLLTTMTSAPSAFLKPKCALWDCPRPAIGSERWHNYCSMYHADLAVQEEGPPGTMPVIRPRGIDLKDGPLFAALSAKVQGKNVGVPICEGAATAKSPWNAPELFDLYIFEGESIREWLFFDKPRRAFDSGNRKQRSLPDYNGRGWHESRKQVMKDFGGLKRSYYMDPQPSNSYEWHLYEYEINDCDAFALYRLEFKSSDAKKIAKSKLGCNPLNEIQQQMDRLS

SEQ ID NO: 8575 - DNA, 1814 bp, Zea mays subsp. mays
  misc_feature (1)..(1814): Ceres Seq. ID no. 12406604
  misc_feature (1)..(1814): Ortholog of  Ceres SEQ ID NO 15176851 as cited in SEQ ID NO 61348
  misc_feature (1)..(1814): Ortholog of  Ceres SEQ ID NO 14316049 as cited in SEQ ID NO 67036
  misc_feature (1)..(1814): Ortholog of  Ceres SEQ ID NO 14313252 as cited in SEQ ID NO 67134
gcacgagaccattacctagaacatcctaatcgaaaatcatttcctctcttttgacgacggaaacgaggcacgatcacacgctgaacgcttccgccccgccgccaccttccccgctctcctccctccgctcgcctccgcttccgttccgcgccctgcccccggaaggcaagcaaagccctcgctacttgcggagcgtcgttggtcaaaccctagcacacgtacgagcaggccagccccgcccgctcccattcccaggccctcatccatggcggcgctctccgtgcccctccacgccgccgccggatcccgcgccgccgcggccgaccccgtcaaggttccgtgcgtgaggagcactggttcagcccatttcggccgcgccttcccctccgtcgcggtctcctctttggctgcgaggcacatcgagccgatgagagcgatagctacacaggcgccccctgccgtgccacaatatttgagtggcgagaagacaaagatcggcatcaacggctttgggcggattggcaggttggtcctgcgaattgcaactagcagagacgatattgaagttgtggctgtgaatgaccctttcgttgatgctaagtacatggcctatatgttcaagtatgactctactcatggcccgtttaaaggttctatttgtgttgtggatgattcaaccctggagatcaatgggaagaaggtcacaattacaagcaaaagagatcctgcagagattccatggggtaactttggggctgaatatgttgttgaatcttctggtgtctttacaacgactgataaagcatcagcacacttaaagggtggtgctaagaaagtggtgatatctgcaccatcagcagatgctcccatgtttgtagttggagttaatgagaatagctatgattcgaagatgaatgttgtttctaatgcaagttgcaccaccaactgccttgctccacttgccaaggttgtacatgaggaatttggcatcgtggagggccttatgacaactgttcatgccacaacagccacccagaagaccgttgatggtccttcaatgaaggattggagagaggacgtggtgctggccaaaacataattcctagctccactggtgcagcaaaggctgttggaaaagttctgcctgagctgaatggaaagctcactggcatggccttccgagttccaacaccaaatgtctctgttgtggacttgacatgccggattgagaaaaacgcctcctatgatgatgtgaaagcagccatcaaggcggcatcagagggtgcactcaaaggaattcttggctacacagacgaggacgttgtttccaatgattttgttggtgattctaggtcaagcatctttgatgccaaggctggtatcggactgagctcttctttcatgaagctcgtgtcttggtatgacaacgagtggggctacagcaaccgggttctggatctgatcgcccacatggccctcgtcagcgccgccgccaagctctgacgtccgtgctcgttcctccagtagtagcctaggagaaaggctgcaattttgacggccattttctgttagctgttgtctggaataaagatcaaatgctgtaacacttcgaactcgcgcgagactggactcagatccatggcctgtattttagttgtagaagggggcaaatttgcaccgtagtaccatggcatggttatacgcggaattgttgattgatgagtcgttgtacggtttgtcgacttgatgatatgttgatgtgggagcccctgaatgaggcggtattaatggaaatatataggatggcaatggct

SEQ ID NO: 8576 - protein, 277 aa, Zea mays subsp. mays
  peptide (1)..(277): Ceres Seq. ID no. 12406605
MAALSVPLHAAAGSRAAAADPVKVPCVRSTGSAHFGRAFPSVAVSSLAARHIEPMRAIATQAPPAVPQYLSGEKTKIGINGFGRIGRLVLRIATSRDDIEVVAVNDPFVDAKYMAYMFKYDSTHGPFKGSICVVDDSTLEINGKKVTITSKRDPAEIPWGNFGAEYVVESSGVFTTTDKASAHLKGGAKKVVISAPSADAPMFVVGVNENSYDSKMNVVSNASCTTNCLAPLAKVVHEEFGIVEGLMTTVHATTATQKTVDGPSMKDWREDVVLAKT

SEQ ID NO: 8577 - protein, 223 aa, Zea mays subsp. mays
  peptide (1)..(223): Ceres Seq. ID no. 12406606
MRAIATQAPPAVPQYLSGEKTKIGINGFGRIGRLVLRIATSRDDIEVVAVNDPFVDAKYMAYMFKYDSTHGPFKGSICVVDDSTLEINGKKVTITSKRDPAEIPWGNFGAEYVVESSGVFTTTDKASAHLKGGAKKVVISAPSADAPMFVVGVNENSYDSKMNVVSNASCTTNCLAPLAKVVHEEFGIVEGLMTTVHATTATQKTVDGPSMKDWREDVVLAKT

SEQ ID NO: 8578 - protein, 164 aa, Zea mays subsp. mays
  peptide (1)..(164): Ceres Seq. ID no. 12406607
MAYMFKYDSTHGPFKGSICVVDDSTLEINGKKVTITSKRDPAEIPWGNFGAEYVVESSGVFTTTDKASAHLKGGAKKVVISAPSADAPMFVVGVNENSYDSKMNVVSNASCTTNCLAPLAKVVHEEFGIVEGLMTTVHATTATQKTVDGPSMKDWREDVVLAKT

SEQ ID NO: 8579 - DNA, 1859 bp, Zea mays subsp. mays
  misc_feature (1)..(1859): Ceres Seq. ID no. 13498667
  misc_feature (1)..(1859): Ortholog of  Ceres SEQ ID NO 14311103 as cited in SEQ ID NO 52897
gaaaaagaacagaggttattcgttttggctacccgttttgaagacgatgatgagtccggcgtcggagcgcagcctcatcatccagagcgacgacgacgacgacgcccgatccggccacgacgtggaggagccggagccagagcaggagcaggactccgactcctcgtcgtcgtcctcatcctgcgccaccccacgccgcggcccaagctcacccccctacatccagcaatggccgcagagttacaggcaatcgatcgacattctcagcagcgtgcagtcacccaacctgacctttctggggactccaactctgagcaggctgtcgaactcattcctcgccatcaccgattctttccggagcaaggcccccgaaacgatctctagctttatcaagccactccttggccccacgccaagtgacgatcagcagcggcagcatgaaggcacccgaaagagttccgagtaccttgtgccctcgagaagatcatctctgcagcagatcccagaggatcaaaagccacctgtaggtggccatggggcgtctcatgaccagaactgctcttacacccagggagtgatgaatggaataaatgttctatgtggtgtggggatcctatcaacaccttatgccatcaaacaggggggctggattgggctggcgatactctgtatatatgctcttctcgcatggtacacaggtgtgctcctgcgccattgcctggacagcaaggagggcctcaagacatacccagatattggccatgcagcctttggcagcacaggccgcatagttatctcgataatactgtacgtggagttgtatgcatgttgcatcgagtatttgatattggagggtgacaatttgtcaaaattattccccaatgctcacctgaccattgggagcatgacactgaactcacatgtattttttgcaatcttgactaccatcatagtcatgccaaccacctggctccgtgacctgagctggctgagctacatttcagctgggggtgtcattgcatcaatccttgtagtcatctgcctgttcttggttggggttgtcaatgatgtcggctttgagaatgaagggactgcactgaacgccccaggaattcctattgcaattggattatatggttactgctactcagggcatgggttttttccaaatatctattcttccctgaagaatcgcaaccagtttccttcaattctttttacttgtattgggctgtctacctttttgtatgctggtgctgcagtgatgggatacaaaatgtttggtgaagccacagagtcccaattcacactcaacttaccagataattctgtcatttctaagattgctgtttggacaacggtggcaaatccaataaccaaatatgcattaactattattccattggctatgagtttggaagagctgctgccaccaaaccaacaaaagtattttacaataatcatgcttagatcatctctggtgatatcaaccctcctgattgctctatttgtgcctttctttggacttgtgatggccttggttggttctttgtttgccatgcttgtgacctacattttgccttgcgcgtgttttttggcgatcctcaagacaaaagtggggtggcatcagatagcagcttgctcgttcatcatagttgtcggggtttgctgtgcctacgtgggaacatactcgtccctgtcgaagataatccagaactacgcgtagcacagctgttcctgtgatcctgtatatgcatctgcctgacaaaatcatgtgtgtgctatatgggccgaacatatgtacaagatgaaagtttaccattcaattcactcgatgtataataaattattggtgcctc

SEQ ID NO: 8580 - protein, 574 aa, Zea mays subsp. mays
  peptide (1)..(574): Ceres Seq. ID no. 13498668
KKNRGYSFWLPVLKTMMSPASERSLIIQSDDDDDARSGHDVEEPEPEQEQDSDSSSSSSSCATPRRGPSSPPYIQQWPQSYRQSIDILSSVQSPNLTFLGTPTLSRLSNSFLAITDSFRSKAPETISSFIKPLLGPTPSDDQQRQHEGTRKSSEYLVPSRRSSLQQIPEDQKPPVGGHGASHDQNCSYTQGVMNGINVLCGVGILSTPYAIKQGGWIGLAILCIYALLAWYTGVLLRHCLDSKEGLKTYPDIGHAAFGSTGRIVISIILYVELYACCIEYLILEGDNLSKLFPNAHLTIGSMTLNSHVFFAILTTIIVMPTTWLRDLSWLSYISAGGVIASILVVICLFLVGVVNDVGFENEGTALNAPGIPIAIGLYGYCYSGHGFFPNIYSSLKNRNQFPSILFTCIGLSTFLYAGAAVMGYKMFGEATESQFTLNLPDNSVISKIAVWTTVANPITKYALTIIPLAMSLEELLPPNQQKYFTIIMLRSSLVISTLLIALFVPFFGLVMALVGSLFAMLVTYILPCACFLAILKTKVGWHQIAACSFIIVVGVCCAYVGTYSSLSKIIQNYA

SEQ ID NO: 8581 - protein, 559 aa, Zea mays subsp. mays
  peptide (1)..(559): Ceres Seq. ID no. 13498669
MMSPASERSLIIQSDDDDDARSGHDVEEPEPEQEQDSDSSSSSSSCATPRRGPSSPPYIQQWPQSYRQSIDILSSVQSPNLTFLGTPTLSRLSNSFLAITDSFRSKAPETISSFIKPLLGPTPSDDQQRQHEGTRKSSEYLVPSRRSSLQQIPEDQKPPVGGHGASHDQNCSYTQGVMNGINVLCGVGILSTPYAIKQGGWIGLAILCIYALLAWYTGVLLRHCLDSKEGLKTYPDIGHAAFGSTGRIVISIILYVELYACCIEYLILEGDNLSKLFPNAHLTIGSMTLNSHVFFAILTTIIVMPTTWLRDLSWLSYISAGGVIASILVVICLFLVGVVNDVGFENEGTALNAPGIPIAIGLYGYCYSGHGFFPNIYSSLKNRNQFPSILFTCIGLSTFLYAGAAVMGYKMFGEATESQFTLNLPDNSVISKIAVWTTVANPITKYALTIIPLAMSLEELLPPNQQKYFTIIMLRSSLVISTLLIALFVPFFGLVMALVGSLFAMLVTYILPCACFLAILKTKVGWHQIAACSFIIVVGVCCAYVGTYSSLSKIIQNYA

SEQ ID NO: 8582 - protein, 558 aa, Zea mays subsp. mays
  peptide (1)..(558): Ceres Seq. ID no. 13498670
MSPASERSLIIQSDDDDDARSGHDVEEPEPEQEQDSDSSSSSSSCATPRRGPSSPPYIQQWPQSYRQSIDILSSVQSPNLTFLGTPTLSRLSNSFLAITDSFRSKAPETISSFIKPLLGPTPSDDQQRQHEGTRKSSEYLVPSRRSSLQQIPEDQKPPVGGHGASHDQNCSYTQGVMNGINVLCGVGILSTPYAIKQGGWIGLAILCIYALLAWYTGVLLRHCLDSKEGLKTYPDIGHAAFGSTGRIVISIILYVELYACCIEYLILEGDNLSKLFPNAHLTIGSMTLNSHVFFAILTTIIVMPTTWLRDLSWLSYISAGGVIASILVVICLFLVGVVNDVGFENEGTALNAPGIPIAIGLYGYCYSGHGFFPNIYSSLKNRNQFPSILFTCIGLSTFLYAGAAVMGYKMFGEATESQFTLNLPDNSVISKIAVWTTVANPITKYALTIIPLAMSLEELLPPNQQKYFTIIMLRSSLVISTLLIALFVPFFGLVMALVGSLFAMLVTYILPCACFLAILKTKVGWHQIAACSFIIVVGVCCAYVGTYSSLSKIIQNYA

SEQ ID NO: 8583 - DNA, 1781 bp, Zea mays subsp. mays
  misc_feature (1)..(1781): Ceres Seq. ID no. 12408381
  misc_feature (1)..(1781): Ortholog of  Ceres SEQ ID NO 13596816 as cited in SEQ ID NO 62287
aaactccaaatccaatccaagcaagtcctccccatgctcctcccgctcctcctcctcgccgccttcctccatggcttggcggaggcgcagggcggcctcccgtcgctgccgatcggggtgaactacggcgcgaacgcagacaacctaccctcgcccgccgccgtggcggcgttcctggccaagagcacgaccatcgaccgcgtgaagctgttcgacgcgaacccggccttcctcgacgcgttcgccgccaacgcgccctccatcgccctcgccgtctccatccccaactccgccctcccgtccttcgccgacagatccacgggcctggacgcggcgcgcgggtgggtccgcgacaacctgtccccgcacgtgtccgcgggcgccaacatcaccctcctcatggcggggaacgaggtgctgggccccaccgtgtgcccgacctcgtcgtggcgctgctcccggccatgcgccgcctgtaccaggcgctgcagctggagggcctgcccaaggtccacgtcaccacgccgcactacctcggcatcctggcgccctcggacgggatcccctccaacgcgagcttccgcccggggctggacgccaaggtgctggcgcccatgctcaggttccacaacgacaccggctcccccttcatggtgaacgcctacccctacttcagctacaacgccgccacgctggactacgcggtgttccgccccaacgccggcgtgtacgacccggcgacgcggctcaactacaccagcatgttcgacgcgcagatggacgccatccacacggcgatgaagaagctcgggtacggcggcgtgcagatcgcggtgggcgaggccgggtggcccaccaaggcggaggccgggcaggtcggcgtaggccccgaggaggccagggatttcaacgccggcatgatccgggtgtgcagcggcgggaagggcacgccgctgatgcctgggaggacgttcgagacgtacgtcttctcgctgttcgacgagaaccagaagcccgggccggtcgcggagcggaacttcggcatcttcaacacggatctcacacccaaatacgacctggggctgctccgccaaggaccgcagtctggatctccaaccccatctccggagccctcgccgtcggtcggcggaggcaagtggtgcgtggccaagtccggcgcgagcgcaaccgacctgcagaacaacattaactacgcctgtgcctacgtcgactgtaggccgatccagagcggcggcgcgtgcttggaccccaacaacatccactcacatgcctcgtacgtcatgaacgcgtactaccaggccaatggcatgcacgactatgactgcgacttcaagggcaccggcgtggtcacctccagtgaccccagttacgggagctgcaaatacaacgcctcctcctgacggcgcgcagcaagtccagctggcactactgcaccagcctccagtccacatcgtcctccagctccaggctccagccatggccacgctggggacgggaggaggtccgtactgccgccgggcttgcgccacatacttgtatactcatgtctcacacccatgcttcttgttgctctcaaccactactagcactactatttgtctagttccataattacaagtccctctcccctcatgttaacttgatcattgtccgtgtgtagtggactagtggtggtgaataaaatagcttccattccatgtagacaaacaaacaaattgtaacatctgttatccttgggttatttgatatatttatttttc

SEQ ID NO: 8584 - protein, 472 aa, Zea mays subsp. mays
  peptide (1)..(472): Ceres Seq. ID no. 12408382
TPNPIQASPPHAPPAPPPRRLPPWLGGGAGRPPVAADRGELRRERRQPTLARRRGGVPGQEHDHRPREAVRREPGLPRRVRRQRALHRPRRLHPQLRPPVLRRQIHGPGRGARVGPRQPVPARVRGRQHHPPHGGERGAGPHRVPDLVVALLPAMRRLYQALQLEGLPKVHVTTPHYLGILAPSDGIPSNASFRPGLDAKVLAPMLRFHNDTGSPFMVNAYPYFSYNAATLDYAVFRPNAGVYDPATRLNYTSMFDAQMDAIHTAMKKLGYGGVQIAVGEAGWPTKAEAGQVGVGPEEARDFNAGMIRVCSGGKGTPLMPGRTFETYVFSLFDENQKPGPVAERNFGIFNTDLTPKYDLGLLRQGPQSGSPTPSPEPSPSVGGGKWCVAKSGASATDLQNNINYACAYVDCRPIQSGGACLDPNNIHSHASYVMNAYYQANGMHDYDCDFKGTGVVTSSDPSYGSCKYNASS

SEQ ID NO: 8585 - protein, 318 aa, Zea mays subsp. mays
  peptide (1)..(318): Ceres Seq. ID no. 12408383
MRRLYQALQLEGLPKVHVTTPHYLGILAPSDGIPSNASFRPGLDAKVLAPMLRFHNDTGSPFMVNAYPYFSYNAATLDYAVFRPNAGVYDPATRLNYTSMFDAQMDAIHTAMKKLGYGGVQIAVGEAGWPTKAEAGQVGVGPEEARDFNAGMIRVCSGGKGTPLMPGRTFETYVFSLFDENQKPGPVAERNFGIFNTDLTPKYDLGLLRQGPQSGSPTPSPEPSPSVGGGKWCVAKSGASATDLQNNINYACAYVDCRPIQSGGACLDPNNIHSHASYVMNAYYQANGMHDYDCDFKGTGVVTSSDPSYGSCKYNASS

SEQ ID NO: 8586 - protein, 268 aa, Zea mays subsp. mays
  peptide (1)..(268): Ceres Seq. ID no. 12408384
MLRFHNDTGSPFMVNAYPYFSYNAATLDYAVFRPNAGVYDPATRLNYTSMFDAQMDAIHTAMKKLGYGGVQIAVGEAGWPTKAEAGQVGVGPEEARDFNAGMIRVCSGGKGTPLMPGRTFETYVFSLFDENQKPGPVAERNFGIFNTDLTPKYDLGLLRQGPQSGSPTPSPEPSPSVGGGKWCVAKSGASATDLQNNINYACAYVDCRPIQSGGACLDPNNIHSHASYVMNAYYQANGMHDYDCDFKGTGVVTSSDPSYGSCKYNASS

SEQ ID NO: 8587 - DNA, 1608 bp, Zea mays subsp. mays
  misc_feature (1)..(1608): Ceres Seq. ID no. 12408379
  misc_feature (1)..(1608): Ortholog of  Ceres SEQ ID NO 13595199 as cited in SEQ ID NO 59815
  misc_feature (1)..(1608): Ortholog of  Ceres SEQ ID NO 13598276 as cited in SEQ ID NO 69311
aaacgggcggcctcgtagcggagtcctagtcctctcgctttctccctgcgattcgcctcagcttccatccgatccgattcgggagtcgggactcgggagatagaggcagacggagagagaagaaaggcaaggcaatcgccgcgcgcgtgcttcctgccttctcggtcggctccagctcgccgttcattcccgcaatcccgctccgctcgcggtatcgggccgtggtagtgatgccgctggctgagccgccccagtggcgccgcaaagccacggatttcttctccacatctagtgtcaagctgaagcaggcagggcaatcggccggggataatatagctgatgttgctgggaaggttgggtccgcggtgaagagtcggtgggtcgtcttccaggaggctaggcagcagcagcagcaacggccaccgcatgagacagtgcaagagcgtatcatcaccgctgctgccaccactggtttgcttttcaggaaaggcatttcagagacaaaggagaaggttgcagtgggaaaggttaaagttgaagaggttgctaaaaaaactgcagataaaagcaagaatatcttgaacaatattgaacgctggcagaagggagtcgcaagcactgatgtgtttggtgttcctattgaagccactgtacaacgagagcaatctggtaaagctgtgcccttggtgctagtgagatgtgcagactacctggttatatcaggtttgaataatgagtacttattcaaatctgaaggtgacaaaaaagttcttcagcagttagtttctctttacaatgaagactctggcgcatctttacctgaaggtgtgaatcctattgatgtaggtgcactggtgaagtgctaccttgccagtatccctgagccgcttactacattttcgctttatgatgagcttcgagctgcgagggttagcattcctgatcttagggatatattgaagaagcttccaaatgtgaactacatgacaatagagtttgttacagcattgcttcttcgagtcagccataaatcatcacttaacaagatggactcccgcagccttgctgtggaatttgcgcctttgatcatgtggcggcaaggtgatgctggcacagatttgcgtaaccacctcaagttaaccctgaaaccgcctccaaaaattgtggatacaacatcaaatactgccacgtgggacctgtttgatgaggatggcgaggatgcttcatcccagatccccttggacgatgcttcacccccagactacaactccattgaggtcatccagtgtctgatcgagcatcataatgccatcttcactgatgcaaatgaaaccgtgtggagatgatcaaggtctcctctagatctctctggtgttagctcgtgctacgtattagttccaggtaggaaggtggattaccgtccgttattgttagggataagcattttggccggaacatttttggagtaggtttgtatatatgcgctagtgttaattctccccgggactaggatctggtcatgttatagcaatataagtcttgggtggatgtaaaccagatggacacgattgtgctgcatttgctaaattcggcttatacactgctgtt

SEQ ID NO: 8588 - protein, 371 aa, Zea mays subsp. mays
  peptide (1)..(371): Ceres Seq. ID no. 12408380
MPLAEPPQWRRKATDFFSTSSVKLKQAGQSAGDNIADVAGKVGSAVKSRWVVFQEARQQQQQRPPHETVQERIITAAATTGLLFRKGISETKEKVAVGKVKVEEVAKKTADKSKNILNNIERWQKGVASTDVFGVPIEATVQREQSGKAVPLVLVRCADYLVISGLNNEYLFKSEGDKKVLQQLVSLYNEDSGASLPEGVNPIDVGALVKCYLASIPEPLTTFSLYDELRAARVSIPDLRDILKKLPNVNYMTIEFVTALLLRVSHKSSLNKMDSRSLAVEFAPLIMWRQGDAGTDLRNHLKLTLKPPPKIVDTTSNTATWDLFDEDGEDASSQIPLDDASPPDYNSIEVIQCLIEHHNAIFTDANETVWR

SEQ ID NO: 8589 - DNA, 1228 bp, Zea mays subsp. mays
  misc_feature (1)..(1228): Ceres Seq. ID no. 12344372
  misc_feature (1)..(1228): Ortholog of  Ceres SEQ ID NO 12582076 as cited in SEQ ID NO 58448
  misc_feature (1)..(1228): Ortholog of  Ceres SEQ ID NO 14301839 as cited in SEQ ID NO 67150
actgcttgcagttgcgccacgcccgccaccccgccaggccgccactagggtttttcggggcctcgccatcgtctccgaccccgtgtctccgaacaacatcgcgcggccgccgcctcctcccagtcgccatggtcaggctcaccgccgacctgatatggaagagcccgcacttcttcaacgccgtcaaggagcgcgagctcgacctccgaggcaacaagatcgccgtcatcgagaatgtcggagccaccgaggaccagtttgacacaattgacttgtcggataatgagattgtcaagcttgaaaacttcccatacttgaatcgtcttggcactctactagttaataataacagaatcacacgtatcaatcccaatcttggcgagtttttgccaaagctgcatacgctggtgctcacgaataatcgtctgacaaatcttgcggagattgatcccctggcatctcttccaaagctacaattccttagcttactggataatactgtaactaagcagccagattacaggctgtatgtgatccataaattgaagcatttgcgtttgctggatttcaagaaagtgaaacaacaggagagagttgcggcagcgaaaaagttccactcaaaggaagcagaggaagaggcaaagaaggtgcctgccaaaacgtttactcctggtctgcctgatgctcaggacatcacaatggagccacaaggtcctaaagtagttgctccaactcctgaacaaatcacagctatcaaggctgctattgcaaatgcccacactctcgaggaagctgcaaggctagaacaggtactaagcactggccaagttcctgctgaatttgcagtgcccaagcccgatgcaaacatggccgaagcttcagatggagccgagaagatggacacagatggtgagaaccaagagggcggtgaggctgatgggcagaaacaaggcgaaggaagcacaagcaccccaattcaggaggattgaaggcatggtgacatgggctgggtcatccattgtctgagttttaggtttgccagttttcgtgggggtgcaggaaagagctagagccttgttgccgcagaactccccctctatggatcgcatgtggatgctaacaacattcttgcttatttttgcagtagatggtactgagaacagaatcagatgttgtaaactatacatacagtcgtgcatgttgccgaatgaaccattgtttcggtcgt

SEQ ID NO: 8590 - protein, 328 aa, Zea mays subsp. mays
  peptide (1)..(328): Ceres Seq. ID no. 12344373
CLQLRHARHPARPPLGFFGASPSSPTPCLRTTSRGRRLLPVAMVRLTADLIWKSPHFFNAVKERELDLRGNKIAVIENVGATEDQFDTIDLSDNEIVKLENFPYLNRLGTLLVNNNRITRINPNLGEFLPKLHTLVLTNNRLTNLAEIDPLASLPKLQFLSLLDNTVTKQPDYRLYVIHKLKHLRLLDFKKVKQQERVAAAKKFHSKEAEEEAKKVPAKTFTPGLPDAQDITMEPQGPKVVAPTPEQITAIKAAIANAHTLEEAARLEQVLSTGQVPAEFAVPKPDANMAEASDGAEKMDTDGENQEGGEADGQKQGEGSTSTPIQED

SEQ ID NO: 8591 - protein, 286 aa, Zea mays subsp. mays
  peptide (1)..(286): Ceres Seq. ID no. 12344374
MVRLTADLIWKSPHFFNAVKERELDLRGNKIAVIENVGATEDQFDTIDLSDNEIVKLENFPYLNRLGTLLVNNNRITRINPNLGEFLPKLHTLVLTNNRLTNLAEIDPLASLPKLQFLSLLDNTVTKQPDYRLYVIHKLKHLRLLDFKKVKQQERVAAAKKFHSKEAEEEAKKVPAKTFTPGLPDAQDITMEPQGPKVVAPTPEQITAIKAAIANAHTLEEAARLEQVLSTGQVPAEFAVPKPDANMAEASDGAEKMDTDGENQEGGEADGQKQGEGSTSTPIQED

SEQ ID NO: 8592 - DNA, 1202 bp, Zea mays subsp. mays
  misc_feature (1)..(1202): Ceres Seq. ID no. 12412510
  misc_feature (1)..(1202): Ortholog of  Ceres SEQ ID NO 14311981 as cited in SEQ ID NO 55703
  misc_feature (1)..(1202): Ortholog of  Ceres SEQ ID NO 15226227 as cited in SEQ ID NO 63433
  misc_feature (1)..(1202): Ortholog of  Ceres SEQ ID NO 13599003 as cited in SEQ ID NO 0
agaagaaagctccaatctttctcgccctctcgcggttcggaggagggacccgggcgcaaagactaaagcgcaggtgagctccgggcggggaagatgttccccagcctgatccaccacgctagccacggccgacccgacgtcgccgtcgccgaggacgcaccacgcagtggctgcgggttagggctgcccgggcacggcggcgggcccagcgtggtgctcacggccgatcccaagcctaggctccgctggacggccgacctccacgaccgtttcgtcgatgccgtcgcccagctcggcgggcctgataaagcaacaccgaaagctatcatgaggacaatgggagtgaagggcctcaccctttttcacttgaaaagccatcttcagaaatacagattgggaagacagtctggaaaagagttaacggagcaatcaaaagatgcttcttaccttatggaagctcaaagtggaacaactttgtctcctagaggttctactccagatgtgaaagagagtcaagaagttaaagaagcactcagagcacaaatggaagtgcaacgaagattgcacgaacaagtggaggtccagaagcatatgcagatccgaatggaggcgaaccagaagtacatcgacacgatactagataaggcgttcaagatagtatctgagcaactgagtggcttcagcatatctgaccaagacctaccgattctcacctctgctagggccatgcttagccctgcagatcacttgagttcgtctgtcttcccccagctctccgtcagctccgttagccttcacaatcctggtcctggaggagggaaaggccttccgcatgttgccgacagccacgtgttctcccagaggccacctgaacaattcaagcgcaaatcacgttgagaagcattgctagctcgacgcagatgcatgacctgatcaagggcacactggaaaatcagaggaatttcgtctgacatgtgcacggtgcaatcgttcgcccatcctcccgtagcacatctgtgaaaatcaaggttatcttggtctatttcggtacatctagactgacctttattaatatctaatgtaatgcctaagtggactagataagtaattcgcttgttgtataaactgcccagctgtaggatccagttttaaagtcctgttccacgcacttaaaacttgggggccgtctcttgggcggcttc

SEQ ID NO: 8593 - protein, 267 aa, Zea mays subsp. mays
  peptide (1)..(267): Ceres Seq. ID no. 12412511
MFPSLIHHASHGRPDVAVAEDAPRSGCGLGLPGHGGGPSVVLTADPKPRLRWTADLHDRFVDAVAQLGGPDKATPKAIMRTMGVKGLTLFHLKSHLQKYRLGRQSGKELTEQSKDASYLMEAQSGTTLSPRGSTPDVKESQEVKEALRAQMEVQRRLHEQVEVQKHMQIRMEANQKYIDTILDKAFKIVSEQLSGFSISDQDLPILTSARAMLSPADHLSSSVFPQLSVSSVSLHNPGPGGGKGLPHVADSHVFSQRPPEQFKRKSR

SEQ ID NO: 8594 - protein, 189 aa, Zea mays subsp. mays
  peptide (1)..(189): Ceres Seq. ID no. 12412512
MRTMGVKGLTLFHLKSHLQKYRLGRQSGKELTEQSKDASYLMEAQSGTTLSPRGSTPDVKESQEVKEALRAQMEVQRRLHEQVEVQKHMQIRMEANQKYIDTILDKAFKIVSEQLSGFSISDQDLPILTSARAMLSPADHLSSSVFPQLSVSSVSLHNPGPGGGKGLPHVADSHVFSQRPPEQFKRKSR

SEQ ID NO: 8595 - protein, 186 aa, Zea mays subsp. mays
  peptide (1)..(186): Ceres Seq. ID no. 12412513
MGVKGLTLFHLKSHLQKYRLGRQSGKELTEQSKDASYLMEAQSGTTLSPRGSTPDVKESQEVKEALRAQMEVQRRLHEQVEVQKHMQIRMEANQKYIDTILDKAFKIVSEQLSGFSISDQDLPILTSARAMLSPADHLSSSVFPQLSVSSVSLHNPGPGGGKGLPHVADSHVFSQRPPEQFKRKSR

SEQ ID NO: 8596 - DNA, 1690 bp, Zea mays subsp. mays
  misc_feature (1)..(1690): Ceres Seq. ID no. 12373176
  misc_feature (1)..(1690): Ortholog of  Ceres SEQ ID NO 14310736 as cited in SEQ ID NO 52901
  misc_feature (1)..(1690): Ortholog of  Ceres SEQ ID NO 13594345 as cited in SEQ ID NO 58043
  misc_feature (1)..(1690): Ortholog of  Ceres SEQ ID NO 14308594 as cited in SEQ ID NO 60384
  misc_feature (1)..(1690): Ortholog of  Ceres SEQ ID NO 12614112 as cited in SEQ ID NO 60891
  misc_feature (1)..(1690): Ortholog of  Ceres SEQ ID NO 14302832 as cited in SEQ ID NO 64926
  misc_feature (1)..(1690): Ortholog of  Ceres SEQ ID NO 13662880 as cited in SEQ ID NO 65422
  misc_feature (1)..(1690): Ortholog of  Ceres SEQ ID NO 14302071 as cited in SEQ ID NO 66585
  misc_feature (1)..(1690): Ortholog of  Ceres SEQ ID NO 14316013 as cited in SEQ ID NO 67181
  misc_feature (1)..(1690): Ortholog of  Ceres SEQ ID NO 12779098 as cited in SEQ ID NO 67698
  misc_feature (1)..(1690): Ortholog of  Ceres SEQ ID NO 13591190 as cited in SEQ ID NO 68044
gttcctgccgacgccgccggcaagccgcacgccgtgctcgtgccgttcccggcgcagggccacgtcacaccgatgctgaagctagcaaagatcctccactgccggggcttccacgtcaccttcgtcaacagcgagtacaaccgccgccgcttgctccggtcccgcggcgcggacgcgctcgacggcctcccaggcttccgtttcgcgaccatcccggatggcctgccgccgtccgacaccgacgccacccaggacgtgccgtccctctgccgctccacggaggagacctgtctcccgcatttcagggccctgctccagtgtctcaacgcctcctcccctgtcccctgacgtgccgctggtcacctgcgtcgtcggcgacgacatcatgggctttaccttggatgccgccagggagataggcgtgccgtgcgctctgttctggactgccagcacctgcgggtacatgggctaccgctactaccgcaccctcatcgacaagggcatcttcccgttgaaagaggagcagctgacgaatgggttcttagacacgccggtggagttcgcgccgcccgggatgagcaagcacatgcggctcaaggacttcccaagcttcatgcgctccacggacccctacgagttcatggtccactacgccgtcagggtgacggatcacacagccggcgcggacgccgtccttctcaacaccttcgacgagctcgagcaggaggcgctggacgccatgcgcgccgtgatctcatctgccgcgtccatcaacaccatcggcccgctcaccctcctcgccgaacagatcgtgcccagaggcagccaactggactcgctgggctctaacctctggaaggaggacgcctcctgcttccgctggctcgacggccggaagcccaggtccgtggtgttcgtgaactacggcagtgtgacggtgatgaccagcgcggagctggtggagttcgcgtggggtctggccaacagcggccacgacttcctgtggatcatccggccggacctcgtaagcggcgacgccgccgtgctgcccccggagttccaggaggcgatcgaggggcgcggcctgctggcgaactggtgcgctcaggacgcggtgctgcgtcacgaggcggtgggcgtgttcctgacgcactctgggtggaactcgacgctggagagcctctgcgccggggtgccgatgctgtgctggcctttcttcgcggagcagcagaccaactgccggtacacatgcgcggagtggggcgtggagatcggccacgacgtgcgacgggaggccgtggaagagaagatacgggaggccatgggcggggagaaagggaaggagatgcgtcgccgactcgccgcgcggtggagtggcgggagaccgccgtgcgcgcgacgcggcccggcgggcgctcgtacgccaacctggagaagctggtgactgacgtactcctctcgggtggcaagaattattaaacctccttgctatcaggcttcaggcatcagcactgctccatatgcatgcataaaccatcaaatacactttagctcagttttaagatctacgtgtcattgctctctctagtacgtgatgtattatgcacccgcctcttgttggcattattgttgtattatttagatctggtttctggaaacgagtgtgcatatattttgattctctaagcgg

SEQ ID NO: 8597 - protein, 408 aa, Zea mays subsp. mays
  peptide (1)..(408): Ceres Seq. ID no. 12373177
MACRRPTPTPPRTCRPSAAPRRRPVSRISGPCSSVSTPPPLSPDVPLVTCVVGDDIMGFTLDAAREIGVPCALFWTASTCGYMGYRYYRTLIDKGIFPLKEEQLTNGFLDTPVEFAPPGMSKHMRLKDFPSFMRSTDPYEFMVHYAVRVTDHTAGADAVLLNTFDELEQEALDAMRAVISSAASINTIGPLTLLAEQIVPRGSQLDSLGSNLWKEDASCFRWLDGRKPRSVVFVNYGSVTVMTSAELVEFAWGLANSGHDFLWIIRPDLVSGDAAVLPPEFQEAIEGRGLLANWCAQDAVLRHEAVGVFLTHSGWNSTLESLCAGVPMLCWPFFAEQQTNCRYTCAEWGVEIGHDVRREAVEEKIREAMGGEKGKEMRRRLAARWSGGRPPCARRGPAGARTPTWRSW

SEQ ID NO: 8598 - protein, 352 aa, Zea mays subsp. mays
  peptide (1)..(352): Ceres Seq. ID no. 12373178
MGFTLDAAREIGVPCALFWTASTCGYMGYRYYRTLIDKGIFPLKEEQLTNGFLDTPVEFAPPGMSKHMRLKDFPSFMRSTDPYEFMVHYAVRVTDHTAGADAVLLNTFDELEQEALDAMRAVISSAASINTIGPLTLLAEQIVPRGSQLDSLGSNLWKEDASCFRWLDGRKPRSVVFVNYGSVTVMTSAELVEFAWGLANSGHDFLWIIRPDLVSGDAAVLPPEFQEAIEGRGLLANWCAQDAVLRHEAVGVFLTHSGWNSTLESLCAGVPMLCWPFFAEQQTNCRYTCAEWGVEIGHDVRREAVEEKIREAMGGEKGKEMRRRLAARWSGGRPPCARRGPAGARTPTWRSW

SEQ ID NO: 8599 - protein, 326 aa, Zea mays subsp. mays
  peptide (1)..(326): Ceres Seq. ID no. 12373179
MGYRYYRTLIDKGIFPLKEEQLTNGFLDTPVEFAPPGMSKHMRLKDFPSFMRSTDPYEFMVHYAVRVTDHTAGADAVLLNTFDELEQEALDAMRAVISSAASINTIGPLTLLAEQIVPRGSQLDSLGSNLWKEDASCFRWLDGRKPRSVVFVNYGSVTVMTSAELVEFAWGLANSGHDFLWIIRPDLVSGDAAVLPPEFQEAIEGRGLLANWCAQDAVLRHEAVGVFLTHSGWNSTLESLCAGVPMLCWPFFAEQQTNCRYTCAEWGVEIGHDVRREAVEEKIREAMGGEKGKEMRRRLAARWSGGRPPCARRGPAGARTPTWRSW

SEQ ID NO: 8600 - DNA, 1522 bp, Zea mays subsp. mays
  misc_feature (1)..(1522): Ceres Seq. ID no. 12373476
  misc_feature (1)..(1522): Ortholog of  Ceres SEQ ID NO 15176709 as cited in SEQ ID NO 1148
  misc_feature (1)..(1522): Ortholog of  Ceres SEQ ID NO 13658922 as cited in SEQ ID NO 66316
ctgggtcttctataccgtgcctcatctagtcatctcgtctcaggttgcggccgaaccagagccccgtcccaactccaccacctctcttctctacggcgcgagcaagggcggcgccggccgcggcgtcggcgggaaccgggcctcgctctccccatctctccgatcacttctgtcctgtgaaaatggcggatgaactacgctcaacgtctgtgggtcagaagttccatgggcagtccgtgctgttgagcagaatctcttcctattccgccatgaacaaccctgtattcaacaatgcctattctgcttacaatgtgccccagaggtcatatcatgggatgaatgcaactgctggactctcatctgtcatggcaccatctcctgtctttgcttctgccccaaaagagaaaggcttttctggatttatgatcgactttatgatgggtggagtttctgctgctgtctccaagacagctgcagctccgattgagcgtgtcaagcttttgattcagaaccaggatgaaatgctcaagactggcaggctttctgaaccgtacaagggtattggggactgctttggccggacaatcagagatgagggttttgtctcactgtggagaggaaacacagctaatgtcatccgttacttccccacacaggcattgaactttgcgttcaaggatcacttcaagcgcatgttcaactttaagaaggacaaggatgggtactggaagtggtttgctggaaatctggcttctggtggagctgctggtgcttgctctctattctttgtctattctctggactacgcccgtacgcgtttggccaatgatgccaaggctgcaaagaagggtggtgagaggcagttcaatggactcgttgatgtttaccgcaagacccttgccagtgatggtattcgtggcctctaccgtggattcaatatctcttgtgtggggatcattgtgtaccgaggtctttactttggtatgtatgattccctgaagccagtgcttcttgttggtaccctgcaggataacttcttggccagcttcttgctcgggtggggtataaccattggtgctggccttgcctcctaccccattgacactgttcgccgtcgcatgatgatgacatctggtgaggccgtcaagtacaacagctccttggacgctttcaagcagattgtcgcaaaggagggtaccaagtccctcttcaagggtgctggcgcaaacatcctccgcgctgtagctggtgctggtgtccttgctgggtacgacaagctccaggtggttgtcttcggcaagaagtacgggtctggtggtggctaaggatgtataatgatgatgacgacgaacaacaaacatgatgttttaggtgcctcctttaagtaaacatacgtacggaccctcgacaccattttaagttcgctctcgcagaggctggtgagtttgtagcgtggctgtgaccgcacctctttttatgtcagagattggaaataagtgacgttagaaattgctgtcttgct

SEQ ID NO: 8601 - protein, 380 aa, Zea mays subsp. mays
  peptide (1)..(380): Ceres Seq. ID no. 12373477
MADELRSTSVGQKFHGQSVLLSRISSYSAMNNPVFNNAYSAYNVPQRSYHGMNATAGLSSVMAPSPVFASAPKEKGFSGFMIDFMMGGVSAAVSKTAAAPIERVKLLIQNQDEMLKTGRLSEPYKGIGDCFGRTIRDEGFVSLWRGNTANVIRYFPTQALNFAFKDHFKRMFNFKKDKDGYWKWFAGNLASGGAAGACSLFFVYSLDYARTRLANDAKAAKKGGERQFNGLVDVYRKTLASDGIRGLYRGFNISCVGIIVYRGLYFGMYDSLKPVLLVGTLQDNFLASFLLGWGITIGAGLASYPIDTVRRRMMMTSGEAVKYNSSLDAFKQIVAKEGTKSLFKGAGANILRAVAGAGVLAGYDKLQVVVFGKKYGSGGG

SEQ ID NO: 8602 - protein, 351 aa, Zea mays subsp. mays
  peptide (1)..(351): Ceres Seq. ID no. 12373478
MNNPVFNNAYSAYNVPQRSYHGMNATAGLSSVMAPSPVFASAPKEKGFSGFMIDFMMGGVSAAVSKTAAAPIERVKLLIQNQDEMLKTGRLSEPYKGIGDCFGRTIRDEGFVSLWRGNTANVIRYFPTQALNFAFKDHFKRMFNFKKDKDGYWKWFAGNLASGGAAGACSLFFVYSLDYARTRLANDAKAAKKGGERQFNGLVDVYRKTLASDGIRGLYRGFNISCVGIIVYRGLYFGMYDSLKPVLLVGTLQDNFLASFLLGWGITIGAGLASYPIDTVRRRMMMTSGEAVKYNSSLDAFKQIVAKEGTKSLFKGAGANILRAVAGAGVLAGYDKLQVVVFGKKYGSGGG

SEQ ID NO: 8603 - protein, 329 aa, Zea mays subsp. mays
  peptide (1)..(329): Ceres Seq. ID no. 12373479
MNATAGLSSVMAPSPVFASAPKEKGFSGFMIDFMMGGVSAAVSKTAAAPIERVKLLIQNQDEMLKTGRLSEPYKGIGDCFGRTIRDEGFVSLWRGNTANVIRYFPTQALNFAFKDHFKRMFNFKKDKDGYWKWFAGNLASGGAAGACSLFFVYSLDYARTRLANDAKAAKKGGERQFNGLVDVYRKTLASDGIRGLYRGFNISCVGIIVYRGLYFGMYDSLKPVLLVGTLQDNFLASFLLGWGITIGAGLASYPIDTVRRRMMMTSGEAVKYNSSLDAFKQIVAKEGTKSLFKGAGANILRAVAGAGVLAGYDKLQVVVFGKKYGSGGG

SEQ ID NO: 8604 - DNA, 1843 bp, Zea mays subsp. mays
  misc_feature (1)..(1843): Ceres Seq. ID no. 12367930
  misc_feature (1)..(1843): Ortholog of  Ceres SEQ ID NO 12625120 as cited in SEQ ID NO 67706
  misc_feature (1)..(1843): Ortholog of  Ceres SEQ ID NO 13595999 as cited in SEQ ID NO 68173
aactcggcaactccgcctcccaagtcacacccccactccctcgctcaccagaggaactagcggaccaggcaaagccgagccgcaaccgcgaagatcttgcgtggcctccttttcccagatcgtcactgtgccgctcgtgccctccactcccggtccgcccaaccaataatccatccatccatccaccaccaccaccccgctgcggcgatgtgcggcggcgccatcctctcgggtttcatcccgccgtccggggtggcggcggcggcggcggcggccaagaagaagcagcagcagcggtgccgtgtgactgcggacctgctatggccggggcccggcagtaaggaagctccccaggaccaggaggaggacttcgaggccgacttccgcgagttcgagcgcggcctcggcgaggatgacgtggacagcgccggcgaaggcggcgaccccgaggtccaggagcttcctccgccggagccgacgaggtttgccttcgccaccgcggccaaggcagcagttgatggcgtgatgacgacgactccaaaggatgtcaaaggagatagaccagtaaagcgcggccggaagaaccagtacaggggaatccggcagcgcccttggggcaaatgggcagctgagatcagggaccctaacaagggcgtccgcgtctggctcggaacctacaacaccgccgaggaggcagctagggcatacgacgccgaagctcgcaagatccgcggcaagaaagcgaaggtgaatttccccgatgacgacgcgccaggcactggtcacaggccagcgaacgcagcgcctaggctagtagctccacccccaccccccaaggcctgcgccgatgagatctttaacaacctgaagaacgacgacgacgacaacaacaacaacaacgatgatctgtttgcgatgtttgcgttcggtgacaataagaagaaggttcctgcagcgaagccagccgccgccgagggtggcagtggcagtggcagcttcctcgtccctgcgcctgcggtggcggtggtgcccggtaataagaggaggtcgtccgcgaccaacactatgctctccgtctccgacgaccagcgcagcaactcctacggctccggctcctccgacttggtggggtcgtggtcgtgggacgacgacgcggcggccgccgccatgacctcggactacacctcctcggtcttcgctcccgataacgccgtgctgccggcggcgtcttacacgcaaggcggagcgccgaagagaatgaggagcagctacggcggcgcgccgcccagcctcgcacatgacgcggccatgcctggctttggccttgataaagtgagctaccaccactaccaggcgttgcctccttattacgtcgggagcagcaacgcgtcggtgggcaacctcggtcttctgcagcaggctgatgatgctccagctccacaggatggggcgagcgccggggatatctggagcctcgacgagctgctcatgctggcagcagctggtgcttattgagaaccgcaagaaaaaaaaatgtgttgggcgctgctagctggagacgagacgagggcgagaggcagttgcatcatccgccatccgctatcgttttgtctctcctatatctagtatatatatgcttctggcagtcgaactctatggcaatgcgtgtgtatagtgtgttgctgccgtctatgattggaagcgagctcgagactggttcaataattcacctttgcctaccgtcgtaccgccggcctgctggactgtagtgtgcgtactgcatatatatgccataattatgtatgcactcctcctatataaactatattattatgatgtgctt

SEQ ID NO: 8605 - protein, 435 aa, Zea mays subsp. mays
  peptide (1)..(435): Ceres Seq. ID no. 12367931
MCGGAILSGFIPPSGVAAAAAAAKKKQQQRCRVTADLLWPGPGSKEAPQDQEEDFEADFREFERGLGEDDVDSAGEGGDPEVQELPPPEPTRFAFATAAKAAVDGVMTTTPKDVKGDRPVKRGRKNQYRGIRQRPWGKWAAEIRDPNKGVRVWLGTYNTAEEAARAYDAEARKIRGKKAKVNFPDDDAPGTGHRPANAAPRLVAPPPPPKACADEIFNNLKNDDDDNNNNNDDLFAMFAFGDNKKKVPAAKPAAAEGGSGSGSFLVPAPAVAVVPGNKRRSSATNTMLSVSDDQRSNSYGSGSSDLVGSWSWDDDAAAAAMTSDYTSSVFAPDNAVLPAASYTQGGAPKRMRSSYGGAPPSLAHDAAMPGFGLDKVSYHHYQALPPYYVGSSNASVGNLGLLQQADDAPAPQDGASAGDIWSLDELLMLAAAGAY

SEQ ID NO: 8606 - protein, 329 aa, Zea mays subsp. mays
  peptide (1)..(329): Ceres Seq. ID no. 12367932
MTTTPKDVKGDRPVKRGRKNQYRGIRQRPWGKWAAEIRDPNKGVRVWLGTYNTAEEAARAYDAEARKIRGKKAKVNFPDDDAPGTGHRPANAAPRLVAPPPPPKACADEIFNNLKNDDDDNNNNNDDLFAMFAFGDNKKKVPAAKPAAAEGGSGSGSFLVPAPAVAVVPGNKRRSSATNTMLSVSDDQRSNSYGSGSSDLVGSWSWDDDAAAAAMTSDYTSSVFAPDNAVLPAASYTQGGAPKRMRSSYGGAPPSLAHDAAMPGFGLDKVSYHHYQALPPYYVGSSNASVGNLGLLQQADDAPAPQDGASAGDIWSLDELLMLAAAGAY

SEQ ID NO: 8607 - DNA, 1608 bp, Zea mays subsp. mays
  misc_feature (1)..(1608): Ceres Seq. ID no. 12349247
  misc_feature (1)..(1608): Ortholog of  Ceres SEQ ID NO 13590739 as cited in SEQ ID NO 66960
aacagaaacgaaagagcctccaaaacctcgcaacaaccccgtgacacccacacccatccgccctgcccctcctcgcgctccccaccaaccccgacgagcggcgatgaccggcacggtgtccaagctggcggcgccccggcctgcggcgccaccgctccggccggcgtccatccgcgccgccgcaatcgccttcgctccctccccgcgccgggtcagcgtctccgtcgccgggcgggccaggatcccctccgtcattgcgatggcttctgccaaggaaggaaatggagcaccgaccaagaaaacctcccttcacgatctctacgagctccagggcctctccccgtggtatgacaacctctgccgacctgtcaccgacttgctgccccttatcgccagcggtgttcgtggagtcaccagcaaccctacaattttccagaaggccatctcatcctccagcgcatatgatgatcagttcaagcagctcatttcgggcggaaaggacgcggagagcgcttactgggaactcgttataaaggatatccaagacgcgtgcagtctttttgagcctatctacgatgagaccgatggggctgatgggtatgtctccgtggaggtgtctcctaggttggcaaatgacactcaaggaactgttgaggcggcaaagtggttacacaaagtggtcaaccgccccaatgtctacataaagatccctgctaccgccgaatgtgttccttccatccgggaagttatcgctaatggcattagcgtcaacgtcacgcttattttctctattgcgacatacgaggctgtgattgatgcttaccttgatgggctagaggcttcgggcttgagcgacttatctcgagttaccagtgtcgcatccttctttgtcagccgagtcgacacccttatcgacaaaatgcttgaaaagattggaacacctgaggcacttgccttgagagggaaggctgccgtcgcacaggccaaactagcaaatcggctctaccagaagaaattctctggcccaaggtgggaggcgttggccaagaaaggtgccaagaaacagaggttgttgtgggcatccaccggtgtcaagaacccagcttatcccgacactctttacatcgacagtctcattggacctgacacggtcaacacgatgcccgaccaagctttgcaggcattcatagaccacggcactgtctcgaggacagttgatgcgaatgtgtccgaggcggaaggtgtatacagcgccttggagaagcttggcattgactgggccgaggtcggaaagcagcttgagctggaaggtgtggactccttcaagaagagctttgacagcctactcgtgagcctgcaggagaagggcaacagcctcaagacggcaactgtgtaaaactgagaagattgggtaccggcgggtgaacgattttactaaataaaatgctagcttgctggctctcttagtttttacgatgtacctttgctctccattttctgaatcgggattgtattctaggcttgcctggccgtcattgtgtgaccaacgttcatggcttgggacgtaaacggttggaaaacatctctgttactttctatacgattttt

SEQ ID NO: 8608 - protein, 464 aa, Zea mays subsp. mays
  peptide (1)..(464): Ceres Seq. ID no. 12349248
TETKEPPKPRNNPVTPTPIRPAPPRAPHQPRRAAMTGTVSKLAAPRPAAPPLRPASIRAAAIAFAPSPRRVSVSVAGRARIPSVIAMASAKEGNGAPTKKTSLHDLYELQGLSPWYDNLCRPVTDLLPLIASGVRGVTSNPTIFQKAISSSSAYDDQFKQLISGGKDAESAYWELVIKDIQDACSLFEPIYDETDGADGYVSVEVSPRLANDTQGTVEAAKWLHKVVNRPNVYIKIPATAECVPSIREVIANGISVNVTLIFSIATYEAVIDAYLDGLEASGLSDLSRVTSVASFFVSRVDTLIDKMLEKIGTPEALALRGKAAVAQAKLANRLYQKKFSGPRWEALAKKGAKKQRLLWASTGVKNPAYPDTLYIDSLIGPDTVNTMPDQALQAFIDHGTVSRTVDANVSEAEGVYSALEKLGIDWAEVGKQLELEGVDSFKKSFDSLLVSLQEKGNSLKTATV

SEQ ID NO: 8609 - protein, 430 aa, Zea mays subsp. mays
  peptide (1)..(430): Ceres Seq. ID no. 12349249
MTGTVSKLAAPRPAAPPLRPASIRAAAIAFAPSPRRVSVSVAGRARIPSVIAMASAKEGNGAPTKKTSLHDLYELQGLSPWYDNLCRPVTDLLPLIASGVRGVTSNPTIFQKAISSSSAYDDQFKQLISGGKDAESAYWELVIKDIQDACSLFEPIYDETDGADGYVSVEVSPRLANDTQGTVEAAKWLHKVVNRPNVYIKIPATAECVPSIREVIANGISVNVTLIFSIATYEAVIDAYLDGLEASGLSDLSRVTSVASFFVSRVDTLIDKMLEKIGTPEALALRGKAAVAQAKLANRLYQKKFSGPRWEALAKKGAKKQRLLWASTGVKNPAYPDTLYIDSLIGPDTVNTMPDQALQAFIDHGTVSRTVDANVSEAEGVYSALEKLGIDWAEVGKQLELEGVDSFKKSFDSLLVSLQEKGNSLKTATV

SEQ ID NO: 8610 - protein, 378 aa, Zea mays subsp. mays
  peptide (1)..(378): Ceres Seq. ID no. 12349250
MASAKEGNGAPTKKTSLHDLYELQGLSPWYDNLCRPVTDLLPLIASGVRGVTSNPTIFQKAISSSSAYDDQFKQLISGGKDAESAYWELVIKDIQDACSLFEPIYDETDGADGYVSVEVSPRLANDTQGTVEAAKWLHKVVNRPNVYIKIPATAECVPSIREVIANGISVNVTLIFSIATYEAVIDAYLDGLEASGLSDLSRVTSVASFFVSRVDTLIDKMLEKIGTPEALALRGKAAVAQAKLANRLYQKKFSGPRWEALAKKGAKKQRLLWASTGVKNPAYPDTLYIDSLIGPDTVNTMPDQALQAFIDHGTVSRTVDANVSEAEGVYSALEKLGIDWAEVGKQLELEGVDSFKKSFDSLLVSLQEKGNSLKTATV

SEQ ID NO: 8611 - DNA, 411 bp, Zea mays subsp. mays
  misc_feature (1)..(411): Ceres Seq. ID no. 2870951
  misc_feature (1)..(411): Ortholog of  Ceres SEQ ID NO 13582184 as cited in SEQ ID NO 56002
gaaccctagcgccccgcccgtcctgccgccgccgcagccgccatcgcacggccatkggtatcgatctcgtagccggcggccgcaacaagawraccaagcgcacggcsccaagtccgacgatgtctacctcaagctcctcgtcaagctctaccgcttccttgtgcgcaggacaaagagcaacttcaacgccgtgatcctcaagcgcctcttcatgagcaagaccaaccgcccgccgctctcgatgcgccgcctcgtcaggttcatggaggggaagggtgatcagatcgccgtgattgtgggcacgtgaccgacgacaagaggatcagcgaggtgccggcgatgaaggtctgcgcgctcaggttcactgagacagcgagggccaggatcatcaatgctggcggctgcagcgag

SEQ ID NO: 8612 - protein, 101 aa, Zea mays subsp. mays
  peptide (1)..(101): Ceres Seq. ID no. 2870952
  misc_feature (19)..(19): Xaa is any aa, unknown or other
  misc_feature (30)..(30): Xaa is any aa, unknown or other
  misc_feature (31)..(31): Xaa is any aa, unknown or other
  misc_feature (36)..(36): Xaa is any aa, unknown or other
NPSAPPVLPPPQPPSHGHXYRSRSRRPQQXXQAHGXKSDDVYLKLLVKLYRFLVRRTKSNFNAVILKRLFMSKTNRPPLSMRRLVRFMEGKGDQIAVIVGT

SEQ ID NO: 8613 - protein, 63 aa, Zea mays subsp. mays
  peptide (1)..(63): Ceres Seq. ID no. 2870953
  misc_feature (18)..(18): Xaa is any aa, unknown or other
  misc_feature (30)..(30): Xaa is any aa, unknown or other
  misc_feature (35)..(35): Xaa is any aa, unknown or other
TLAPRPSCRRRSRHRTAXGIDLVAGGRNKXTKRTXPSPTMSTSSSSSSSTASLCAGQRATSTP

SEQ ID NO: 8614 - DNA, 1198 bp, Zea mays subsp. mays
  misc_feature (1)..(1198): Ceres Seq. ID no. 12407607
  misc_feature (1)..(1198): Ortholog of  Ceres SEQ ID NO 14311229 as cited in SEQ ID NO 53262
agatccatttcccactcgatcgccaataatggagtttccgcaccaccaccaccaccacggccatcgccgcgacgacgacgaagacgaccgcagaggcccgcctcccccggtctacggcggctacggccagccaccgccacccgacccgtacggccgcgcgcccgtcgaccccgatccgtacggtcgacctccgccccagtccgcgtacggtggggccggggacgcctacggccacagcgggccaaggctacgcgcccccgccggcctacggcgccgggggcgggtacggcaacgtcgtccacgtcgcgcacgaggtcggcgacgagaggccttactacggcggcggcggcggcggtcttggtggcgcctacggaggcggtggctccgagtacggccacgagggccgaccgcaccacggcggcggcggatcccagtacggccacgagacacgcccgcaccacggcggcgggggcggcgccccgcctgtgaggcagcagacgtacaggatctactgcaaggctggggaggaccagtacagcctcgcctcccgcgacggcaaggtctgcctcgtgcgcacggaccgtgatgacgacgcgcagcactggatcaaggacatgaagtacagcaccagggtgaaggatgaggaaggctaccctgccatcgtcctcgtcaacaaagccactggagaggctctcaagcattcccttggccagtcacaccctgttcttctgacccgccataatccagactccctggacgagtctgtcctgtggacagagagcagggacgttggggatgggttccgctgcattaggatggtcaacaacatctacctgaactttgatgctttacatggagacaaggaccatggtggtgtgcgcgacggggacggcccttgtgctgtgggagtggtgcgagggagacaaccagcgctggaagattgttccctggtgaacaaggaaatgtgtgaccgagcccgcaccaaggaggagctcctgccgttataagtgaagtgattggtactgaagtttctggaaataagaggctcttctgagatgcctgtttgtgtgagtatttgcgtttccattccgttttcatgataataaaacgcattgattattaatatatgtaatgtgatgctacactgagtggcagcgttggtatatatttgtaagaattaagaacccattgttgttgg

SEQ ID NO: 8615 - protein, 194 aa, Zea mays subsp. mays
  peptide (1)..(194): Ceres Seq. ID no. 12407608
DPFPTRSPIMEFPHHHHHHGHRRDDDEDDRRGPPPPVYGGYGQPPPPDPYGRAPVDPDPYGRPPPQSAYGGAGDAYGHSGPRLRAPAGLRRRGRVRQRRPRRARGRRREALLRRRRRRSWWRLRRRWLRVRPRGPTAPRRRRIPVRPRDTPAPRRRGRRPACEAADVQDLLQGWGGPVQPRLPRRQGLPRAHGP

SEQ ID NO: 8616 - protein, 185 aa, Zea mays subsp. mays
  peptide (1)..(185): Ceres Seq. ID no. 12407609
MEFPHHHHHHGHRRDDDEDDRRGPPPPVYGGYGQPPPPDPYGRAPVDPDPYGRPPPQSAYGGAGDAYGHSGPRLRAPAGLRRRGRVRQRRPRRARGRRREALLRRRRRRSWWRLRRRWLRVRPRGPTAPRRRRIPVRPRDTPAPRRRGRRPACEAADVQDLLQGWGGPVQPRLPRRQGLPRAHGP

SEQ ID NO: 8617 - protein, 162 aa, Zea mays subsp. mays
  peptide (1)..(162): Ceres Seq. ID no. 12407610
RSISHSIANNGVSAPPPPPRPSPRRRRRRPQRPASPGLRRLRPATATRPVRPRARRPRSVRSTSAPVRVRWGRGRLRPQRAKATRPRRPTAPGAGTATSSTSRTRSATRGLTTAAAAAVLVAPTEAVAPSTATRADRTTAAADPSTATRHARTTAAGAAPRL

SEQ ID NO: 8618 - protein, 130 aa, Zea mays subsp. mays
  peptide (1)..(130): Ceres Seq. ID no. 12407611
MKYSTRVKDEEGYPAIVLVNKATGEALKHSLGQSHPVLLTRHNPDSLDESVLWTESRDVGDGFRCIRMVNNIYLNFDALHGDKDHGGVRDGDGPCAVGVVRGRQPALEDCSLVNKEMCDRARTKEELLPL

SEQ ID NO: 8619 - DNA, 1783 bp, Zea mays subsp. mays
  misc_feature (1)..(1783): Ceres Seq. ID no. 12350029
  misc_feature (1)..(1783): Ortholog of  Ceres SEQ ID NO 14315241 as cited in SEQ ID NO 52516
  misc_feature (1)..(1783): Ortholog of  Ceres SEQ ID NO 13594349 as cited in SEQ ID NO 58161
  misc_feature (1)..(1783): Ortholog of  Ceres SEQ ID NO 13663419 as cited in SEQ ID NO 66561
  misc_feature (1)..(1783): Ortholog of  Ceres SEQ ID NO 15177892 as cited in SEQ ID NO 0
atgcctcaaggcctccactgtccactcctctcgtacaaccataccagtgctgttcgttgctctgtacgtagctcttctccaactacgtaacgtaactagctagtacgtgtacgtccagcacttggattggatggctcccctgcgactgcgagcgggagcggcggcgccaatggcggcggccgccgccacggtcgtgctggccgccatacttgcgctgttcggctgctgtgccgctgccgcgtccgccgccgccaccgacgtgacggccgcggcagagctggaccgcatcgacaggctgccgggccagcccccggtcaacttctccatgtactccggctacgtcaccgtcgacgccgccgcggggcgggcgctcttctactggctcatggaggcctccggcgtgccggcgggctccgctccgctcgtgctctggctcaacggcgggcccgggtgctcctctcttggctacggcgctatggaggagctcggcgccttccgcgtcaaccccgacggcgccacgctctccttgaatccctacgcctggaacaatgtggcgaatgtgctgttcttggactcgccggccggcgttggctactcctacaccaacaccaccgacgacctgtacgctgctggtgacaacaagacagctcatgactcatatgctttcttgataaattggttggaacggttcccacagtacaagcatcgtgatttctacatcactggagagagctatggaggccactatgtccctcaattgtcttggttagtgtaccaaaacaacaaaggaattaagaatccaaccttaaacttcaaaggcttcatggttggaaatgcggtaattgacgattaccatgactacatgggcacatttgagtattggtggacacatgggcttatctccgatgaaacttatgcaaagttgtgggaggattgtaaaaatgatgtgtctgagaacccctccgaggaatgccaaaagatttatgaggttgctgaggctgagcaagggaatattgatttgtatagcatctacacacctacttgtaagaagacttcattgcaaaagcgcagactaataaggggaagaatgccctggctgccgagaggatacgatccttgcaccgagctgtacatcacgaagtactgcaacttgcccgaggtgcaggacgccttccatgccaatgttactggaataccatacgcctgggtgggctgcagtgacccaatatatgagtactggaaggattcgccgaggtccatgcttccgatctaccgtgaactcatctcggcaggcctaaggatatgggtcttcagcggcgacaccgactccgtcgtgcccctcacggcgacgaggtactccatcgacgcgctgtctctgccaacgatcaccaagtggtacccttggtactacgacgaagaggttggtggatggtgccaggtgtacgagggcctgacgctggtgacggtccgaggcgcggggcacgaggtccccctccaccgtccgccgcagggcctcaagctgttcgagcacttcctgcggggcgagcccatgcccaagcctgtcgagagcgtccagtcgttctagatgagcttgctgccgcgcttggctagttggctttgatgaatagtaaggccggacatgtggcaagccatctccactccacatttcttcaccacgttttcaataactggcgctggccgaaataataagagcagaacgaataaaatgccgctcgctagaatgatctggctgtgcgtgtttgctttcgagttatttttatat

SEQ ID NO: 8620 - protein, 484 aa, Zea mays subsp. mays
  peptide (1)..(484): Ceres Seq. ID no. 12350030
MAPLRLRAGAAAPMAAAAATVVLAAILALFGCCAAAASAAATDVTAAAELDRIDRLPGQPPVNFSMYSGYVTVDAAAGRALFYWLMEASGVPAGSAPLVLWLNGGPGCSSLGYGAMEELGAFRVNPDGATLSLNPYAWNNVANVLFLDSPAGVGYSYTNTTDDLYAAGDNKTAHDSYAFLINWLERFPQYKHRDFYITGESYGGHYVPQLSWLVYQNNKGIKNPTLNFKGFMVGNAVIDDYHDYMGTFEYWWTHGLISDETYAKLWEDCKNDVSENPSEECQKIYEVAEAEQGNIDLYSIYTPTCKKTSLQKRRLIRGRMPWLPRGYDPCTELYITKYCNLPEVQDAFHANVTGIPYAWVGCSDPIYEYWKDSPRSMLPIYRELISAGLRIWVFSGDTDSVVPLTATRYSIDALSLPTITKWYPWYYDEEVGGWCQVYEGLTLVTVRGAGHEVPLHRPPQGLKLFEHFLRGEPMPKPVESVQSF

SEQ ID NO: 8621 - protein, 471 aa, Zea mays subsp. mays
  peptide (1)..(471): Ceres Seq. ID no. 12350031
MAAAAATVVLAAILALFGCCAAAASAAATDVTAAAELDRIDRLPGQPPVNFSMYSGYVTVDAAAGRALFYWLMEASGVPAGSAPLVLWLNGGPGCSSLGYGAMEELGAFRVNPDGATLSLNPYAWNNVANVLFLDSPAGVGYSYTNTTDDLYAAGDNKTAHDSYAFLINWLERFPQYKHRDFYITGESYGGHYVPQLSWLVYQNNKGIKNPTLNFKGFMVGNAVIDDYHDYMGTFEYWWTHGLISDETYAKLWEDCKNDVSENPSEECQKIYEVAEAEQGNIDLYSIYTPTCKKTSLQKRRLIRGRMPWLPRGYDPCTELYITKYCNLPEVQDAFHANVTGIPYAWVGCSDPIYEYWKDSPRSMLPIYRELISAGLRIWVFSGDTDSVVPLTATRYSIDALSLPTITKWYPWYYDEEVGGWCQVYEGLTLVTVRGAGHEVPLHRPPQGLKLFEHFLRGEPMPKPVESVQSF

SEQ ID NO: 8622 - protein, 419 aa, Zea mays subsp. mays
  peptide (1)..(419): Ceres Seq. ID no. 12350032
MYSGYVTVDAAAGRALFYWLMEASGVPAGSAPLVLWLNGGPGCSSLGYGAMEELGAFRVNPDGATLSLNPYAWNNVANVLFLDSPAGVGYSYTNTTDDLYAAGDNKTAHDSYAFLINWLERFPQYKHRDFYITGESYGGHYVPQLSWLVYQNNKGIKNPTLNFKGFMVGNAVIDDYHDYMGTFEYWWTHGLISDETYAKLWEDCKNDVSENPSEECQKIYEVAEAEQGNIDLYSIYTPTCKKTSLQKRRLIRGRMPWLPRGYDPCTELYITKYCNLPEVQDAFHANVTGIPYAWVGCSDPIYEYWKDSPRSMLPIYRELISAGLRIWVFSGDTDSVVPLTATRYSIDALSLPTITKWYPWYYDEEVGGWCQVYEGLTLVTVRGAGHEVPLHRPPQGLKLFEHFLRGEPMPKPVESVQSF

SEQ ID NO: 8623 - DNA, 1246 bp, Zea mays subsp. mays
  misc_feature (1)..(1246): Ceres Seq. ID no. 12343033
  misc_feature (1)..(1246): Ortholog of  Ceres SEQ ID NO 15175965 as cited in SEQ ID NO 20627
gttggactctagccatttactgcaagaagccattttctttcttctctagccgccgccgccgccggccggaacctggcgccgagcgcccttctcttcctatccagccgcagctgccagggcgtagtactcctggccggcgtctccctcctctcttcctgcgcattctcctctctggaaaggttttgcaggtttcacacttcttatcatggatgataagaacaaagtcaagaaggaaatagatggcccccttggacccccacctcgcaaggggggacttaaattcgcaccaaaagtacctcagaagaaacctgctaaggttgtcccaaagaaggaaccagttgaagagagaaaggaggatgctttggataaggagttattgatgaaacttaagatgtcgcaaaacaagtatccctcaagaattaagtccgacgaaaagccaagaagtggtacacaggttgcatttggacaaggaaactcttattatgcaagaaattttcccatgcccaaaaaggattcttcagcaggtggagcttcgaagttaccaaaagaatatgcagaaccatgggactatagccatgattatcctgttactctcccactaaggaagccctactctggaaatcctgaaattctggatgaggaagaatttggagaatcttctgccagcaggacccaagatgatgaattatctgcagcagagcagcttggattaatggatatgtcgtcggaatcacagttcctcttcttccagttgccatcctctcttcctttaccgaggcagccacaatcagttgctgaccctaacgaagtccgcgatgagaaacgtgagggcatgaggccatcatcgcacaatggctcgaaactcaaagaggttcctgaaggctatatggggaaaatgctcgtatataagagtggtaaagtgaagatgaagataggagacactctctttgatgtttcatttggctcgaattgcatgttttcccaggaggttgcagcaatcaacatcagagaaaaacattgctgtacggtgggagagatcagcaagcgtgcaatcatcaccccagatattaactacatgttgggttctgttgacaagatggaagaatagtccattggtttctttcgcgcaaaccatatagaccatattatgccattacaagatagttttgctttcttatagagaacgacctgtgatgccctctcagacttcttcaagaaaagatgcctcaaacaaaggaatgtgccg

SEQ ID NO: 8624 - protein, 300 aa, Zea mays subsp. mays
  peptide (1)..(300): Ceres Seq. ID no. 12343034
MDDKNKVKKEIDGPLGPPPRKGGLKFAPKVPQKKPAKVVPKKEPVEERKEDALDKELLMKLKMSQNKYPSRIKSDEKPRSGTQVAFGQGNSYYARNFPMPKKDSSAGGASKLPKEYAEPWDYSHDYPVTLPLRKPYSGNPEILDEEEFGESSASRTQDDELSAAEQLGLMDMSSESQFLFFQLPSSLPLPRQPQSVADPNEVRDEKREGMRPSSHNGSKLKEVPEGYMGKMLVYKSGKVKMKIGDTLFDVSFGSNCMFSQEVAAINIREKHCCTVGEISKRAIITPDINYMLGSVDKMEE

SEQ ID NO: 8625 - protein, 242 aa, Zea mays subsp. mays
  peptide (1)..(242): Ceres Seq. ID no. 12343035
MKLKMSQNKYPSRIKSDEKPRSGTQVAFGQGNSYYARNFPMPKKDSSAGGASKLPKEYAEPWDYSHDYPVTLPLRKPYSGNPEILDEEEFGESSASRTQDDELSAAEQLGLMDMSSESQFLFFQLPSSLPLPRQPQSVADPNEVRDEKREGMRPSSHNGSKLKEVPEGYMGKMLVYKSGKVKMKIGDTLFDVSFGSNCMFSQEVAAINIREKHCCTVGEISKRAIITPDINYMLGSVDKMEE

SEQ ID NO: 8626 - protein, 238 aa, Zea mays subsp. mays
  peptide (1)..(238): Ceres Seq. ID no. 12343036
MSQNKYPSRIKSDEKPRSGTQVAFGQGNSYYARNFPMPKKDSSAGGASKLPKEYAEPWDYSHDYPVTLPLRKPYSGNPEILDEEEFGESSASRTQDDELSAAEQLGLMDMSSESQFLFFQLPSSLPLPRQPQSVADPNEVRDEKREGMRPSSHNGSKLKEVPEGYMGKMLVYKSGKVKMKIGDTLFDVSFGSNCMFSQEVAAINIREKHCCTVGEISKRAIITPDINYMLGSVDKMEE

SEQ ID NO: 8627 - DNA, 1254 bp, Zea mays subsp. mays
  misc_feature (1)..(1254): Ceres Seq. ID no. 12402364
  misc_feature (1)..(1254): Ortholog of  Ceres SEQ ID NO 14316440 as cited in SEQ ID NO 58263
  misc_feature (1)..(1254): Ortholog of  Ceres SEQ ID NO 14302462 as cited in SEQ ID NO 65678
gcacgagaccattacctagaacatcctaatcaaaaataacggaacgtcgtccagatctcgatcggccggtggccgccgtggtcagtaaggcaggcatggcatccgaggtagccggcctcgccgtggtctcggccgccgcgtccgtggccctggtctacgctcgtctcgccacctcgcggctggctcccggcaccccccgcctcgcggcgctgctcccggtgctcctactcctcccagtcctccccttcgccttctcctccatccacctccgcaccgtctccgccttcttcctcgtctggctctgcggcttcaagctcctcctcctcgccgcggggcacgacgggccgctccaccccgccctcccgctcgtgcgcttcgtcgcgtgcgccgcgctgcccatcaaggtccgggacgagaacgacaagcagcagcaaactcggataccccgctcctctctcccttcgggattcctgctgtcctacgcggccaaggcggcgctcttctccgcgctcgtctccgtccggtgctacagggcgcggatgcccgcgtacgccgtgcccgtgttcgacggcgcgcacgtgtacctcatgctggagctcttcctcgcgtccgccgcggcgctcgcgcgcgcgctgctgggcgcggagctggagccgcagttcgaccggccgtacctcgcttcctccctgcgcgacttctggggccggcggtggaacctcatggtccccggcgtgctccggccctgcgtgtaccgccccgtgcgcgcccgcttcggcgccgccgcgggcgtgctcgcggcgttcctcgtgtccggggccatgcacgaggtcatgttctactacatcacgctggaggccgggaccggggaggtgaccgcgttcttcgcgctgcacggcgcgtgcgcggtggccgagcggtggatggcgcggcagggcggcatgtggcggccgccgcggcccgtcgcgacggcgctgacgctggcgttcgtgacggggacggggtcgtggctattctttgcgcccgtgatccgaagccggctggacgaggccatcatcgcagagtgcgaggggatgcttgcgttcttggagcgcgctggccggaatctagccgcgatggcacatttcatttgaacctctgtaaggtagagttatttggaaccgtgatactcccaacactgggcttctgaaaatcagtatcccgaacagagcaattgtaattttagtattataattcatagaacttcagatttctggt

SEQ ID NO: 8628 - protein, 344 aa, Zea mays subsp. mays
  peptide (1)..(344): Ceres Seq. ID no. 12402365
MASEVAGLAVVSAAASVALVYARLATSRLAPGTPRLAALLPVLLLLPVLPFAFSSIHLRTVSAFFLVWLCGFKLLLLAAGHDGPLHPALPLVRFVACAALPIKVRDENDKQQQTRIPRSSLPSGFLLSYAAKAALFSALVSVRCYRARMPAYAVPVFDGAHVYLMLELFLASAAALARALLGAELEPQFDRPYLASSLRDFWGRRWNLMVPGVLRPCVYRPVRARFGAAAGVLAAFLVSGAMHEVMFYYITLEAGTGEVTAFFALHGACAVAERWMARQGGMWRPPRPVATALTLAFVTGTGSWLFFAPVIRSRLDEAIIAECEGMLAFLERAGRNLAAMAHFI

SEQ ID NO: 8629 - protein, 196 aa, Zea mays subsp. mays
  peptide (1)..(196): Ceres Seq. ID no. 12402366
MPAYAVPVFDGAHVYLMLELFLASAAALARALLGAELEPQFDRPYLASSLRDFWGRRWNLMVPGVLRPCVYRPVRARFGAAAGVLAAFLVSGAMHEVMFYYITLEAGTGEVTAFFALHGACAVAERWMARQGGMWRPPRPVATALTLAFVTGTGSWLFFAPVIRSRLDEAIIAECEGMLAFLERAGRNLAAMAHFI

SEQ ID NO: 8630 - protein, 180 aa, Zea mays subsp. mays
  peptide (1)..(180): Ceres Seq. ID no. 12402367
MLELFLASAAALARALLGAELEPQFDRPYLASSLRDFWGRRWNLMVPGVLRPCVYRPVRARFGAAAGVLAAFLVSGAMHEVMFYYITLEAGTGEVTAFFALHGACAVAERWMARQGGMWRPPRPVATALTLAFVTGTGSWLFFAPVIRSRLDEAIIAECEGMLAFLERAGRNLAAMAHFI

SEQ ID NO: 8631 - DNA, 1534 bp, Zea mays subsp. mays
  misc_feature (1)..(1534): Ceres Seq. ID no. 12373172
  misc_feature (1)..(1534): Ortholog of  Ceres SEQ ID NO 15168502 as cited in SEQ ID NO 60095
  misc_feature (1)..(1534): Ortholog of  Ceres SEQ ID NO 15169466 as cited in SEQ ID NO 66135
tcgtattacgtactcctgcatagcgatagcatagcttagcttgcttccccaatgccaatgtcatcgacagcacaaatggcttccctcgccgttctcatcatttccctcgtctttgcggcgcttgcctccgacgccgccgcaggcgtccgcgtcgagctcacgcgcgtccacgccgaccccagcgtgaccgcgtcccagttcgtccgcggcgccctgcgccgcgacatgcaccggcacaacgccaggaagctagccctagccgcgtcgtctggcgccacggtgtccgcgccgacccagaactcgcccaccgccggggagtacctgatggcgctggccatcggcacgccgccgctgccgtaccaggccatcgccgacacgggcagcgacctcatctggacgcagtgcgcgccctgcacctcccagtgcttccgccagccgacgccgctgtacaacccgtccagctccaccacgttcgccgtgctcccgtgcaacagctcgctgagcgtatgcgcggcggcgctggccgggaccgggacggccccgccgccggggtgcgcgtgcacgtacaacgtcacgtacggcagcgggtggacgagtgtctttcaggggtccgagaccttcacgttcgggtccacgccggccggtcagtcccgcgtccctggcatcgccttcggctgcagcaccgccagcagcggcttcaacgcctcgtccgcgtccggcctcgtcgggctgggcagggggaggctgtcgctcgtctcccagctcggcgtccccaagttctcctactgcctcacgccgtaccaggacaccaacagcacgagcacgctcctcctcgggccgtcggcgtcgctcaacggcaccgccggcgtcagctccacgcctttcgtcgccagcccttccactgcgcccatgaacaccttctactatctcaacctgaccggcatatccctcggcacgacggcactgtccatcccgcccgacgccttcttgctcaacgcggacggcaccgggcgggctcatcatcgactctggcaccaccatcacattactgggcaacacggcgtaccagcaggtccgggcagcggtcgtctccctggtgacgctgcccaccacagacgggtcggcagccacggggctcgacctgtgcttcatgctgccctcctcaacgtcggcgccgccggccatgccgagcatgacgctccacttcaacggcgcggacatggtgctcccggcggacagctacatgatgtcggacgactccggcttgtggtgcctggccatgcagaaccagaccgacggcgaggtaaacattctcggcaactaccagcagcaaaacatgcacatcctctacgacattgggcaggagacattgtcgtttgctccggccaaatgcagcgcgctctgatcagagctttacagaactgaaaatatgtgcgcgcaattgcataaggatcgtgatttttttaactatatattatgtaaaaatgtcgtgttgcttgggttgggttgtaaagcaggagatatttttccttcc

SEQ ID NO: 8632 - protein, 457 aa, Zea mays subsp. mays
  peptide (1)..(457): Ceres Seq. ID no. 12373173
MPMSSTAQMASLAVLIISLVFAALASDAAAGVRVELTRVHADPSVTASQFVRGALRRDMHRHNARKLALAASSGATVSAPTQNSPTAGEYLMALAIGTPPLPYQAIADTGSDLIWTQCAPCTSQCFRQPTPLYNPSSSTTFAVLPCNSSLSVCAAALAGTGTAPPPGCACTYNVTYGSGWTSVFQGSETFTFGSTPAGQSRVPGIAFGCSTASSGFNASSASGLVGLGRGRLSLVSQLGVPKFSYCLTPYQDTNSTSTLLLGPSASLNGTAGVSSTPFVASPSTAPMNTFYYLNLTGISLGTTALSIPPDAFLLNADGTGRAHHRLWHHHHITGQHGVPAGPGSGRLPGDAAHHRRVGSHGARPVLHAALLNVGAAGHAEHDAPLQRRGHGAPGGQLHDVGRLRLVVPGHAEPDRRRGKHSRQLPAAKHAHPLRHWAGDIVVCSGQMQRALIRALQN

SEQ ID NO: 8633 - protein, 455 aa, Zea mays subsp. mays
  peptide (1)..(455): Ceres Seq. ID no. 12373174
MSSTAQMASLAVLIISLVFAALASDAAAGVRVELTRVHADPSVTASQFVRGALRRDMHRHNARKLALAASSGATVSAPTQNSPTAGEYLMALAIGTPPLPYQAIADTGSDLIWTQCAPCTSQCFRQPTPLYNPSSSTTFAVLPCNSSLSVCAAALAGTGTAPPPGCACTYNVTYGSGWTSVFQGSETFTFGSTPAGQSRVPGIAFGCSTASSGFNASSASGLVGLGRGRLSLVSQLGVPKFSYCLTPYQDTNSTSTLLLGPSASLNGTAGVSSTPFVASPSTAPMNTFYYLNLTGISLGTTALSIPPDAFLLNADGTGRAHHRLWHHHHITGQHGVPAGPGSGRLPGDAAHHRRVGSHGARPVLHAALLNVGAAGHAEHDAPLQRRGHGAPGGQLHDVGRLRLVVPGHAEPDRRRGKHSRQLPAAKHAHPLRHWAGDIVVCSGQMQRALIRALQN

SEQ ID NO: 8634 - protein, 449 aa, Zea mays subsp. mays
  peptide (1)..(449): Ceres Seq. ID no. 12373175
MASLAVLIISLVFAALASDAAAGVRVELTRVHADPSVTASQFVRGALRRDMHRHNARKLALAASSGATVSAPTQNSPTAGEYLMALAIGTPPLPYQAIADTGSDLIWTQCAPCTSQCFRQPTPLYNPSSSTTFAVLPCNSSLSVCAAALAGTGTAPPPGCACTYNVTYGSGWTSVFQGSETFTFGSTPAGQSRVPGIAFGCSTASSGFNASSASGLVGLGRGRLSLVSQLGVPKFSYCLTPYQDTNSTSTLLLGPSASLNGTAGVSSTPFVASPSTAPMNTFYYLNLTGISLGTTALSIPPDAFLLNADGTGRAHHRLWHHHHITGQHGVPAGPGSGRLPGDAAHHRRVGSHGARPVLHAALLNVGAAGHAEHDAPLQRRGHGAPGGQLHDVGRLRLVVPGHAEPDRRRGKHSRQLPAAKHAHPLRHWAGDIVVCSGQMQRALIRALQN

SEQ ID NO: 8635 - DNA, 1582 bp, Zea mays subsp. mays
  misc_feature (1)..(1582): Ceres Seq. ID no. 13577851
  misc_feature (1)..(1582): Ortholog of  Ceres SEQ ID NO 14301932 as cited in SEQ ID NO 67747
gaccagaggcggagagcactatagtcacgagctccacagtccaagctcgcactcgcaagtgctagcatctctcgggaatggcggagtcgcgtggtttcgtgatgacggctgtgatggtggtggtggtggccatggtatcagtggcgccgcgcggnnggnaggcgaagacgancgattgagccgtgctcggggtccgactcttgcccggcgctgctgggctacacgctctacgccgacatgaaggtgtccgaggtggccgcgctcttctccgtcgacccggcggcgttgctggccgccaacgcgctcgacttcggcgccccagggtgcggcgcacgcatcctgcccatgggcctcttcgtncgcgtncccacccgctgctcctgcgccgacggntccgcaagtccgtctccgtccgctacgccgcgcgcncggccganacgctcgccaccgtctccgangtcgtcttcgcngggctcgcctcctccgaccagatccgcaacgagaacggcctcacctccgacgaccccgacgcgccgctcgacgccggccagaagctcgccatcccgctgccatgcgtctgcttcaactcgtccgacaacaacctccccgcggtgtacctctcctacgtcgtgcaggtcggggacaccgtgcccgccatcgctgcaagctacgagaccaccgtcacggatgtcatgaatgtcaatgccatggggagtcccgtcgccgcgccaggcgacattctcgccatcccattgccagcatgtgcatctgcatttccaaaatctgcatcagaccacggactgattgtagcgaatggaacttacgcgcttaccgctagcaactgtgtgcagtgtagctgtggacctggcagcctcaatctatattgcacgccaacttcactgtcgggaacctgtcctagtatgcaatgtcctaacagcaacgtgatgcttggcaatgtgagcacccatccaaccggcgctggatgcaacgtctctgcttgcagctacggaggttttgttaatggaactataacagcttcgctaaccggaggtctccaagccagatgcccaggaccacgccagtttcccgcactgacggaaccacctaccacggtgagccacgactcgacgtaccttcctccgttatcagcgcctgggccagcggaagctggtggcgtcatgcctgagccaggctcgccagggccaggcgcctcggtgcaagcagggcccttcacgctcccgaaagtgtctaaggccaatggccccgctggcagcgtttcagcagctccgttggtgggtaaaccacttcaaatcctacccgtcctgntctcctgcctagccttctacttgcagctctgagtgaacccacatcgcgatgagntctttagcatagtatgcttttgaagcaccaagggacatcattgctcgatcactccctctgagttgttgttctagctttgtttcgcgaaatctccccggcaaaactgcgcgcctaaacggcatatctgatgatgtgttcgctgcttttgtacaaaaagacaatggccctgtgtaaagcagtaaagtggtagctattgttctcc

SEQ ID NO: 8636 - protein, 221 aa, Zea mays subsp. mays
  peptide (1)..(221): Ceres Seq. ID no. 13577852
  misc_feature (212)..(212): Xaa is any aa, unknown or other
MNVNAMGSPVAAPGDILAIPLPACASAFPKSASDHGLIVANGTYALTASNCVQCSCGPGSLNLYCTPTSLSGTCPSMQCPNSNVMLGNVSTHPTGAGCNVSACSYGGFVNGTITASLTGGLQARCPGPRQFPALTEPPTTVSHDSTYLPPLSAPGPAEAGGVMPEPGSPGPGASVQAGPFTLPKVSKANGPAGSVSAAPLVGKPLQILPVLXSCLAFYLQL

SEQ ID NO: 8637 - protein, 216 aa, Zea mays subsp. mays
  peptide (1)..(216): Ceres Seq. ID no. 13577853
  misc_feature (207)..(207): Xaa is any aa, unknown or other
MGSPVAAPGDILAIPLPACASAFPKSASDHGLIVANGTYALTASNCVQCSCGPGSLNLYCTPTSLSGTCPSMQCPNSNVMLGNVSTHPTGAGCNVSACSYGGFVNGTITASLTGGLQARCPGPRQFPALTEPPTTVSHDSTYLPPLSAPGPAEAGGVMPEPGSPGPGASVQAGPFTLPKVSKANGPAGSVSAAPLVGKPLQILPVLXSCLAFYLQL

SEQ ID NO: 8638 - protein, 152 aa, Zea mays subsp. mays
  peptide (1)..(152): Ceres Seq. ID no. 13577854
  misc_feature (41)..(41): Xaa is any aa, unknown or other
  misc_feature (43)..(43): Xaa is any aa, unknown or other
  misc_feature (52)..(52): Xaa is any aa, unknown or other
  misc_feature (64)..(64): Xaa is any aa, unknown or other
  misc_feature (67)..(67): Xaa is any aa, unknown or other
  misc_feature (74)..(74): Xaa is any aa, unknown or other
  misc_feature (78)..(78): Xaa is any aa, unknown or other
MKVSEVAALFSVDPAALLAANALDFGAPGCGARILPMGLFXRXPTRCSCADXSASPSPSATPRXRPXRSPPSPXSSSXGSPPPTRSATRTASPPTTPTRRSTPARSSPSRCHASASTRPTTTSPRCTSPTSCRSGTPCPPSLQATRPPSRMS

SEQ ID NO: 8639 - DNA, 1422 bp, Zea mays subsp. mays
  misc_feature (1)..(1422): Ceres Seq. ID no. 12351428
  misc_feature (1)..(1422): Ortholog of  Ceres SEQ ID NO 13656196 as cited in SEQ ID NO 64709
acgttctctgcacgttcatgttcgtcgtcacctccggattccccgaaatagacaaattcgcccacaccacaccctccgccgctgcacgcctccacgcctcgcccacccataggccatagccggtagatactttcatcaaagatagcacacaggattcgccccgccggttcgcgtgaaaaggagccgacgaatccacctacccgcattcgggctccagcgccaccccgtgccatcgggctgcgtccgctaacgaccgcccgttcgcgcagggcccagggtgtgggagggagcaatggtcgctgggatggaggcggaggaaggggtgatggcgacggacttcttctggtcgtacacggacgagccgcacgcgtcgcgccgccgggagatcctggccaagtacccgcagatcaaggagctcttcggcccggatccgtgggccttcctcaagattggtttggtcgtgtcgcttcagctatggactgctacattcctccgtgacgccagctggctgaagctactgacggtgtcctacttcttcgggtcgtttctaaaccacaacctgttcctggccatccacgagctgagccacaaccttgccttcgcgaccccatccctgaaccgctggctgggcatcttcgctgaacctccccatcggtgtgcccatgtccatcacgttccagaagtaccacctggagcaccaccggttccagggcgtggacggcgtggacatggacatcccgagccaggcggaggcgcgcgccgtgaggagcgccgccggcaagtccgcgtgggtcgtgctccagctcttcttctacgctctgcggccgctgttcctgaagccgaagcctccgggcctgtgggagctgaccaacctggcggcccaggtcggcctcgacgccgggctcgtgtacctgtgcggctggaggtcgctggcctaccttgtcctctccacgttcgtcggcggcggccatgcaccccatggcgggccacttcatctcggagcactacgtgttcagccccgagcaggagacctactcgtactacgggcccctgaacctggtggcgtggcacgtggggtaccacaacgagcaccacgacttccccaggatcccgggcacccggctgcacagggtgaaggagatggcgccggagtactacgacggcctcgagtcgtacaggtcctggagccaggtcatttacatgtacatcatggaccggacggtcggcccgttcagccggatgaagaggaaggcgcagaagaaagactcgtagtcgccgtgtgctcaatttgttttttttttggtcgcgtgtgatgtgaactcatgtttggtgtaagcatttcgattcgtcggaacagcttgtttgtgatatcaatggctcgttttttcgtgctggatccaccgtgcccagcacgagctgtcg

SEQ ID NO: 8640 - protein, 253 aa, Zea mays subsp. mays
  peptide (1)..(253): Ceres Seq. ID no. 12351429
MVAGMEAEEGVMATDFFWSYTDEPHASRRREILAKYPQIKELFGPDPWAFLKIGLVVSLQLWTATFLRDASWLKLLTVSYFFGSFLNHNLFLAIHELSHNLAFATPSLNRWLGIFAEPPHRCAHVHHVPEVPPGAPPVPGRGRRGHGHPEPGGGARREERRRQVRVGRAPALLLRSAAAVPEAEASGPVGADQPGGPGRPRRRARVPVRLEVAGLPCPLHVRRRRPCTPWRATSSRSTTCSAPSRRPTRTTGP

SEQ ID NO: 8641 - protein, 249 aa, Zea mays subsp. mays
  peptide (1)..(249): Ceres Seq. ID no. 12351430
MEAEEGVMATDFFWSYTDEPHASRRREILAKYPQIKELFGPDPWAFLKIGLVVSLQLWTATFLRDASWLKLLTVSYFFGSFLNHNLFLAIHELSHNLAFATPSLNRWLGIFAEPPHRCAHVHHVPEVPPGAPPVPGRGRRGHGHPEPGGGARREERRRQVRVGRAPALLLRSAAAVPEAEASGPVGADQPGGPGRPRRRARVPVRLEVAGLPCPLHVRRRRPCTPWRATSSRSTTCSAPSRRPTRTTGP

SEQ ID NO: 8642 - protein, 242 aa, Zea mays subsp. mays
  peptide (1)..(242): Ceres Seq. ID no. 12351431
MATDFFWSYTDEPHASRRREILAKYPQIKELFGPDPWAFLKIGLVVSLQLWTATFLRDASWLKLLTVSYFFGSFLNHNLFLAIHELSHNLAFATPSLNRWLGIFAEPPHRCAHVHHVPEVPPGAPPVPGRGRRGHGHPEPGGGARREERRRQVRVGRAPALLLRSAAAVPEAEASGPVGADQPGGPGRPRRRARVPVRLEVAGLPCPLHVRRRRPCTPWRATSSRSTTCSAPSRRPTRTTGP

SEQ ID NO: 8643 - DNA, 1162 bp, Zea mays subsp. mays
  misc_feature (1)..(1162): Ceres Seq. ID no. 12344858
  misc_feature (1)..(1162): Ortholog of  Ceres SEQ ID NO 12635141 as cited in SEQ ID NO 0
aacccgccagaggcccgatcgtcccacactcccaccacgcgacaggaacacaaaaaccctagcacaagcccacacgacgccacccggccccggacggccggccccccccgtcccacgttcccaccgggctccgagcacaaaaccctaaccttctcgctattaaagtcggcgtccagtccgtcggctgctgctacgccaccgaatccgcatctcctcgccggtcgcgcacgggcaaagcagcgatggcagcagcgacggcagttggcggacacgacagggtggaggctgcggcgtcgtccgcgggggctgtgctggccgtcgccgttgcctcgcagaggttgataggcctgctcgctcttgcggttcaaactgtaaattgtgtagcagaaatatataatgaagaccagcaggaaatatacaagttattatatggaagaatcaaatctgaaaatgtccctgaaattaaggctgggtcagatgatgatgatgacgatgaagacgatgaagatgaagatgaagatgaagatgatgatgatgatgatgatgatgatgatgatgatgagggtggtgacgacgacgatgaagacgatgatgatgaagaggggggtgatgaagatgatgatcctgaggctaatggtgaaggggggagtgatgatgacgacgatgataacgatggtgatgatgatggtaacgatgatgacgacgatgaagatgatgacgaagatgaagatgaagaggatgacgacgatgaggaagaacagccaccttccaagaagaagaagtgatttgctctttcatggattcacctcagcttctccatgctgttagttgtgttgtttagatcatggaacagctttgggacaaatgttgcttgtcatggtattatagtgtaggaaaccttgacatctgatgttaaatcgttatcctactttctcctctgcatgtagtcttaattgtgtgttttagatttttactttattggagctgtgattgtgtcatgccattcagttttattctgctgaggccagtgtcatgccattcaatttatttcttttactgaggcctgagcactcaggcctggattgtatgtgatgctatgtctgttactgagaaggttgagccaggccagaactgtatttgatgagttgcagattcttgagct

SEQ ID NO: 8644 - protein, 180 aa, Zea mays subsp. mays
  peptide (1)..(180): Ceres Seq. ID no. 12344859
MAAATAVGGHDRVEAAASSAGAVLAVAVASQRLIGLLALAVQTVNCVAEIYNEDQQEIYKLLYGRIKSENVPEIKAGSDDDDDDEDDEDEDEDEDDDDDDDDDDDDEGGDDDDEDDDDEEGGDEDDDPEANGEGGSDDDDDDNDGDDDGNDDDDDEDDDEDEDEEDDDDEEEQPPSKKKK

SEQ ID NO: 8645 - protein, 143 aa, Zea mays subsp. mays
  peptide (1)..(143): Ceres Seq. ID no. 12344860
MKTSRKYTSYYMEESNLKMSLKLRLGQMMMMTMKTMKMKMKMKMMMMMMMMMMMMRVVTTTMKTMMMKRGVMKMMILRLMVKGGVMMTTMITMVMMMVTMMTTMKMMTKMKMKRMTTMRKNSHLPRRRSDLLFHGFTSASPCC

SEQ ID NO: 8646 - protein, 132 aa, Zea mays subsp. mays
  peptide (1)..(132): Ceres Seq. ID no. 12344861
MEESNLKMSLKLRLGQMMMMTMKTMKMKMKMKMMMMMMMMMMMMRVVTTTMKTMMMKRGVMKMMILRLMVKGGVMMTTMITMVMMMVTMMTTMKMMTKMKMKRMTTMRKNSHLPRRRSDLLFHGFTSASPCC

SEQ ID NO: 8647 - DNA, 1703 bp, Zea mays subsp. mays
  misc_feature (1)..(1703): Ceres Seq. ID no. 12347254
  misc_feature (1)..(1703): Ortholog of  Ceres SEQ ID NO 14304944 as cited in SEQ ID NO 53041
  misc_feature (1)..(1703): Ortholog of  Ceres SEQ ID NO 15170354 as cited in SEQ ID NO 54190
  misc_feature (1)..(1703): Ortholog of  Ceres SEQ ID NO 14307164 as cited in SEQ ID NO 54775
  misc_feature (1)..(1703): Ortholog of  Ceres SEQ ID NO 14307253 as cited in SEQ ID NO 54783
  misc_feature (1)..(1703): Ortholog of  Ceres SEQ ID NO 12583314 as cited in SEQ ID NO 56435
  misc_feature (1)..(1703): Ortholog of  Ceres SEQ ID NO 13594213 as cited in SEQ ID NO 57038
  misc_feature (1)..(1703): Ortholog of  Ceres SEQ ID NO 15171508 as cited in SEQ ID NO 58526
  misc_feature (1)..(1703): Ortholog of  Ceres SEQ ID NO 14312300 as cited in SEQ ID NO 58632
  misc_feature (1)..(1703): Ortholog of  Ceres SEQ ID NO 15225226 as cited in SEQ ID NO 58693
  misc_feature (1)..(1703): Ortholog of  Ceres SEQ ID NO 15226720 as cited in SEQ ID NO 58707
  misc_feature (1)..(1703): Ortholog of  Ceres SEQ ID NO 15168378 as cited in SEQ ID NO 59129
  misc_feature (1)..(1703): Ortholog of  Ceres SEQ ID NO 13654989 as cited in SEQ ID NO 63117
  misc_feature (1)..(1703): Ortholog of  Ceres SEQ ID NO 13656662 as cited in SEQ ID NO 65594
  misc_feature (1)..(1703): Ortholog of  Ceres SEQ ID NO 13584744 as cited in SEQ ID NO 69137
aaaggttgtggggtgataaactcgtggactgatgcaaccaggacatgctattttgaatagtgattctcttttgtctgagtcggactgctgatgagcttactgaatctacctcttgtacttgtctatgtgtgcagcggctgagaaagcaagagtaaagagcaatgggctcaccaaagaggctttggtgccaaaggatgccaatggcaatgccatctcagcgcaaactttcaccttccgtgagcttgctaccgccaccaggaacttcaggcccgagtgcttcctgggagagggaggttttggacgtgtttacaagggccgccttgagagcacaggccaggttgttgctataaagcagcttaacagggatgggcttcaaggaaacagagaatttctagtagaagttctcatgctcagcttactacatcatcaaaacctggttaatttgattggttattgtgctgatggagaccagagacttcttgtttatgaatatatgccttctggatcacttgaagatcatttgcacgatctacctcttgataaagaggccttggactggaacaccaggatgaaaattgcagcaggtgctgccaaaggactggagtaccttcatgacaaagctaatccaccagttatttatagggatttcaagtcatcgaacattctgttggatgaaagtttccacccgaagctgtctgattttggacttgctaagttgggtccagttggcgacaaatcacatgtctcaacacgtgtaatgggtacatatggttattgtgcaccagaatatgctatgacagggcagctgacagtgaagtctgacgtgtatagttttggggttgtcttgctagagttgattactggccgtagggctattgacagcaccagaccacatggagaacaaaatcttgtctcatgggcacgtcctctgtttaacgacagaagaaagctccctaagatggctgacccgaggctggaagggcgataccccatgcgtgggctttaccaagcccttgcagtggcttcgatgtgcattcagtcggaggctgcttcacgcccactgattgcagatgtcgtgactgctctgtcctacttggcatcccagccatatgatcccaacgcagctcttgcttcaaggaagccaggcggcgatcagcgaagcaagcctggcgagaacggcagggcagtttccaggaatgatgaaactggaagctccggccacaaaacacctgccaaggaccgagaggactcacctagggacctcccagcgatcctgaacaaggaccttgaccgggagcgcatggtggccgaggcgaagatgtggggcgaccgggagcgcatggtggccgaggctaagatgtggggcgaccgagagcgcatggtggctgaggcgaagatgtggggtgaaaattggcgtgacaagcggcgtgcagagattgggcaggggagcctggattcggttactgggaacagctagggggcaattaagcgaacagaaacgtgacatccacccatgcatttcgtttgtttatttccaggtccattttcgttctggcggcggtcggcaggccccagggttgtacatttctaggtcagggaagagtgggaaagcggcagcgttgtactggacagtgaatgcatgtggttgtacatgtaaattctcagaaaagttttgtgagaatgaaaggacatatttgagttcc

SEQ ID NO: 8648 - protein, 450 aa, Zea mays subsp. mays
  peptide (1)..(450): Ceres Seq. ID no. 12347255
MCAAAEKARVKSNGLTKEALVPKDANGNAISAQTFTFRELATATRNFRPECFLGEGGFGRVYKGRLESTGQVVAIKQLNRDGLQGNREFLVEVLMLSLLHHQNLVNLIGYCADGDQRLLVYEYMPSGSLEDHLHDLPLDKEALDWNTRMKIAAGAAKGLEYLHDKANPPVIYRDFKSSNILLDESFHPKLSDFGLAKLGPVGDKSHVSTRVMGTYGYCAPEYAMTGQLTVKSDVYSFGVVLLELITGRRAIDSTRPHGEQNLVSWARPLFNDRRKLPKMADPRLEGRYPMRGLYQALAVASMCIQSEAASRPLIADVVTALSYLASQPYDPNAALASRKPGGDQRSKPGENGRAVSRNDETGSSGHKTPAKDREDSPRDLPAILNKDLDRERMVAEAKMWGDRERMVAEAKMWGDRERMVAEAKMWGENWRDKRRAEIGQGSLDSVTGNS

SEQ ID NO: 8649 - protein, 356 aa, Zea mays subsp. mays; identical to SEQ ID NO: 3196
  peptide (1)..(356): Ceres Seq. ID no. 12347256

SEQ ID NO: 8650 - protein, 327 aa, Zea mays subsp. mays
  peptide (1)..(327): Ceres Seq. ID no. 12347257
MPSGSLEDHLHDLPLDKEALDWNTRMKIAAGAAKGLEYLHDKANPPVIYRDFKSSNILLDESFHPKLSDFGLAKLGPVGDKSHVSTRVMGTYGYCAPEYAMTGQLTVKSDVYSFGVVLLELITGRRAIDSTRPHGEQNLVSWARPLFNDRRKLPKMADPRLEGRYPMRGLYQALAVASMCIQSEAASRPLIADVVTALSYLASQPYDPNAALASRKPGGDQRSKPGENGRAVSRNDETGSSGHKTPAKDREDSPRDLPAILNKDLDRERMVAEAKMWGDRERMVAEAKMWGDRERMVAEAKMWGENWRDKRRAEIGQGSLDSVTGNS

SEQ ID NO: 8651 - DNA, 1345 bp, Zea mays subsp. mays
  misc_feature (1)..(1345): Ceres Seq. ID no. 12344822
  misc_feature (1)..(1345): Ortholog of  Ceres SEQ ID NO 13598579 as cited in SEQ ID NO 65523
attcacaattccacatgccgctgctcaccagcacgcactgtggccgatgcgccatcgatctcatttcatgcatgccgaattatttccccccggcccctgcacaagtctagagtctagagtctagacactagactgtcttgttcagttctgacttattatctgatcatgatccgttgttattaggtgtgtgtgtgatcatgagtggatagtaagagatgataagcggcaacctcaccaatgaagacctgggggccgggcgcaccaaggccgaggggccgacgaccgcggccggggccgtcgtcgcaaagagtcccgtgctgccgagctcccggcactggccgccgtcgacggagtccaggatcgtgcgcgtgtcgcgggtcttcggcggcaaggaccggcacagcaaggtgaggacggtcaaggggctgcgcgaccggcgcgtgcggctgtccgtgccgacggcgatacagctctacgacctccaggaccggctgggcctcagccagccgagcaaggtggtggactggctgctcgacgccgcgcagcacgagatcgacaagctgcctccgcttcagttcccaccgcaggcagcgcaggacctcgtcgcccatctgccgccgccatccatggtggcgcccttcgcagccgaccgggccgaggccgacggcgacaaacgccactgccacgccggcgtcaaagggctcatgggcctcaacaattccatccgcctcgtcaacgccaccatgccgctggctcacggcttgtactacacgcccggcgagtcttggaccggtaccaatgccgatgatgccgccgcccatgatcatcagacggtggctcacggccactcgcccttctcatctctgctgtctcttgctgctccggggcctcagctcgtcttctactcgtcggaaggcggcggattcaccatgaaagaagaagccaccggttatcagttcccagtacaaaatagcctcgaccactcgcaaggccagctctcactgagctcagctagaagcttccttcgccccggcaaccagggatgattaggtcactgatctctactgctccaagaaggtacgtagaagaataaagcttggtgtagtagtaatcaagtactcatttgaaggttccgtaacggttgtaactgcagttttgagatgctattgtttggtatgatcgagtagagggtctctagcatgcataattgaggttatttttgcaggacatgcaatgcaattcgttgcttcttttttatacaaggaagcaacgacaggtcatatgggtgtgtgtgtttgtttgtattgtaataacaattttaataatccattcttgattttgtgtc

SEQ ID NO: 8652 - protein, 276 aa, Zea mays subsp. mays
  peptide (1)..(276): Ceres Seq. ID no. 12344823
MISGNLTNEDLGAGRTKAEGPTTAAGAVVAKSPVLPSSRHWPPSTESRIVRVSRVFGGKDRHSKVRTVKGLRDRRVRLSVPTAIQLYDLQDRLGLSQPSKVVDWLLDAAQHEIDKLPPLQFPPQAAQDLVAHLPPPSMVAPFAADRAEADGDKRHCHAGVKGLMGLNNSIRLVNATMPLAHGLYYTPGESWTGTNADDAAAHDHQTVAHGHSPFSSLLSLAAPGPQLVFYSSEGGGFTMKEEATGYQFPVQNSLDHSQGQLSLSSARSFLRPGNQG

SEQ ID NO: 8653 - protein, 139 aa, Zea mays subsp. mays
  peptide (1)..(139): Ceres Seq. ID no. 12344824
MVAPFAADRAEADGDKRHCHAGVKGLMGLNNSIRLVNATMPLAHGLYYTPGESWTGTNADDAAAHDHQTVAHGHSPFSSLLSLAAPGPQLVFYSSEGGGFTMKEEATGYQFPVQNSLDHSQGQLSLSSARSFLRPGNQG

SEQ ID NO: 8654 - DNA, 1354 bp, Zea mays subsp. mays
  misc_feature (1)..(1354): Ceres Seq. ID no. 12408354
  misc_feature (1)..(1354): Ortholog of  Ceres SEQ ID NO 14311950 as cited in SEQ ID NO 51677
aaacccgtgtccccctcgtttccgctcttctgctcctcgcgccgccgcagcgacccgacgacaggtaatggcttccgccgcggtgctccggaacgccggatctcgccgcctcttctcctaccccaccctccgtgctgctgcaatctcgggacccgccgtgctaccagatgcgcccgtggcggcgtcggtggcggcccagccgcccccgctggcctggacactctgggcgatgtccatggccaccttcacacgcacgaagccccatgtgaacgtcggcaccattgggcacgtcgaacacggcaaaaccagtctcactgccgctattaccaagggaatatcaactacaaggaattctgcttgcagatgatgctatggtgcctatctcctctcctttgactcctccactaggtgacagtgaagaaactgacaaaaagggggctgtggtaaaacgcctaaaggtccaagccataaaaaaagatatcaaacagagtcccaagaaggtgaatctagtagcaaagctggttcgaggtatgcgtgtagaagatgccctactgcagctgcaagtgactgttaaaagggctgccaaaaccgtttaccaggtgatccattctgctcgggccaatgcatctcacaaccatggattggatcctgataagctcattgttgaggaggcctttgtgggaaagggacttttcctgaagagagtgtcttaccatgccagagggaggtccggcattatggtgcgaccaaggtgcagactgacagtggtggttagagaagctacagctgaggaggaggcaaagatcgccaaactcagggtgagcaactacaagaagctgaccaggaaggagcagcagcttatgcctcacaggctcatcgaggttagcccgaggtggattcgcaagaggaaagcggaggctggtgctacggcgtagtactttatgtatgcagaacctgcattcactgctttgcacatccgaggagcgaacatgccttccctggcacaaatacttgatcctctctcggtgtcgattcacgcaaacgggttacaaagccaggcttgttcgttttgctctcaatccatgtggattggatgtgtttaaatcgcaaacaagtcaaaatcttttataagtttttctaatctcatcaaatccacgtgggatagagaataatcgaacaagaccataggtggattcaactatttggtaatcttggtcgtttggagtctaggaagagaggaaattgctatgtatttcagcgatgtgcattgtagccaactaaaatctcgccaaagcattggatgtgcatgagacacgtaccattgcttctacaatttcatgcaactattggtttc

SEQ ID NO: 8655 - protein, 187 aa, Zea mays subsp. mays
  peptide (1)..(187): Ceres Seq. ID no. 12408355
MVPISSPLTPPLGDSEETDKKGAVVKRLKVQAIKKDIKQSPKKVNLVAKLVRGMRVEDALLQLQVTVKRAAKTVYQVIHSARANASHNHGLDPDKLIVEEAFVGKGLFLKRVSYHARGRSGIMVRPRCRLTVVVREATAEEEAKIAKLRVSNYKKLTRKEQQLMPHRLIEVSPRWIRKRKAEAGATA

SEQ ID NO: 8656 - protein, 134 aa, Zea mays subsp. mays
  peptide (1)..(134): Ceres Seq. ID no. 12408356
MRVEDALLQLQVTVKRAAKTVYQVIHSARANASHNHGLDPDKLIVEEAFVGKGLFLKRVSYHARGRSGIMVRPRCRLTVVVREATAEEEAKIAKLRVSNYKKLTRKEQQLMPHRLIEVSPRWIRKRKAEAGATA

SEQ ID NO: 8657 - protein, 131 aa, Zea mays subsp. mays
  peptide (1)..(131): Ceres Seq. ID no. 12408357
KPVSPSFPLFCSSRRRSDPTTGNGFRRGAPERRISPPLLLPHPPCCCNLGTRRATRCARGGVGGGPAAPAGLDTLGDVHGHLHTHEAPCERRHHWARRTRQNQSHCRYYQGNINYKEFCLQMMLWCLSPLL

SEQ ID NO: 8658 - DNA, 1755 bp, Zea mays subsp. mays
  misc_feature (1)..(1755): Ceres Seq. ID no. 12344379
  misc_feature (1)..(1755): Ortholog of  Ceres SEQ ID NO 14311305 as cited in SEQ ID NO 53731
  misc_feature (1)..(1755): Ortholog of  Ceres SEQ ID NO 13501807 as cited in SEQ ID NO 67558
aaaccgaagcagcgacagagctcttccctcccacacgctcggcgctctgtccgccagaaatctcgtcgctggtagaagagaatcgtgccatttgtcatgtcaggaggatcttcaccatcatcaaggcgaaacagctttaattctttgtctaaggacctagaccttccttcagagcaaggttgtctctccattgttgtacttggggcttctggtgaccttgctaagaagaaaacattcccagccctctaccacctctttgagcagggattcatacaatctggagaagtccatatatttggttatgctagatcaaatctttctgatgatgggttaagagaacgcattcgtgggtatctcaaaggagccccagaagatctttcagaatttttgcaactaataaaatatgtcagtggttcctatgatactggagaaggatttgagaaactgaacagggcaatatcagagtatgaggtgtcaaagagttcaggaagctatcgcaggctcttttatttggcattgcctccatctgtctacccttcagtgtgcaaaatgatcagaacatattgcatgaatccatcttctcaccctggatggaccagagtcattgttgagaagccctttggaaaggacttggattccgctgaagaattaagtgcccaacttggggagctattcgaggaacaccaactatacaggatagaccattacctgggaaaagagttggtccaaaacttgcttgttcttcgttttgccaaccgattattcttgcctctttggaaccgcgacaatattgataatatacagattgtattcagggaagactttggtactgaagggcgtggaggatattttgaccaatatggaatcattcgtgatatcattcagaatcatttactgcaggttttctgtttggttgcaatggaaaagcctgtctcccttaagcctgagcacatcagagatgagaaagtcaaggttctgcaatctgtgaaccctattaagcctgaagaggtagtccttgggcaatacgatggctacaaggatgaccctacagtgccagatgactcgaataccccaacttttgcatctgttgttcttcgggtacacaatgaaagatgggaaggtgttcctttcattcttaaagctggtaaagcattgagttcaaagaaagcagaagttcgggtgcaattcaaggatgtccctggtgacatttttagaagcaagaagcaaggaagaaatgagtttgttatacgcctccaaccatcagaagccatgtacatgaaactaactgttaagaagcctgggttagaaatggctactgaacaaagtgaacttgatctgtcatatgggatgcggtaccaaaatgtcaaaattcctgaggcatatgaacgccttatcttggatacaataagaggtgatcagcagcactttgttcgcagagatgagctacaggctgcttggaagatcttcactcctttgctgcatgacattgacgacggcaagctgaaggccctcccgtatgaacctggcagccggggacccaaggaagccgacgaattgagcgcgagagttggatacgtgcagacccacggttacatatgggtaccgccgacccttgcatagaagagaatacgaattgtttgtacctaggaagatccgagtgtcctacaataaagctgtgcgtatatgctcattttcgctatatcgcctgccgttgtaataatgttgtgctggatatgaaataaaattgcgtgttcc

SEQ ID NO: 8659 - protein, 507 aa, Zea mays subsp. mays
  peptide (1)..(507): Ceres Seq. ID no. 12344380
MSGGSSPSSRRNSFNSLSKDLDLPSEQGCLSIVVLGASGDLAKKKTFPALYHLFEQGFIQSGEVHIFGYARSNLSDDGLRERIRGYLKGAPEDLSEFLQLIKYVSGSYDTGEGFEKLNRAISEYEVSKSSGSYRRLFYLALPPSVYPSVCKMIRTYCMNPSSHPGWTRVIVEKPFGKDLDSAEELSAQLGELFEEHQLYRIDHYLGKELVQNLLVLRFANRLFLPLWNRDNIDNIQIVFREDFGTEGRGGYFDQYGIIRDIIQNHLLQVFCLVAMEKPVSLKPEHIRDEKVKVLQSVNPIKPEEVVLGQYDGYKDDPTVPDDSNTPTFASVVLRVHNERWEGVPFILKAGKALSSKKAEVRVQFKDVPGDIFRSKKQGRNEFVIRLQPSEAMYMKLTVKKPGLEMATEQSELDLSYGMRYQNVKIPEAYERLILDTIRGDQQHFVRRDELQAAWKIFTPLLHDIDDGKLKALPYEPGSRGPKEADELSARVGYVQTHGYIWVPPTLA

SEQ ID NO: 8660 - protein, 356 aa, Zea mays subsp. mays
  peptide (1)..(356): Ceres Seq. ID no. 12344381
MIRTYCMNPSSHPGWTRVIVEKPFGKDLDSAEELSAQLGELFEEHQLYRIDHYLGKELVQNLLVLRFANRLFLPLWNRDNIDNIQIVFREDFGTEGRGGYFDQYGIIRDIIQNHLLQVFCLVAMEKPVSLKPEHIRDEKVKVLQSVNPIKPEEVVLGQYDGYKDDPTVPDDSNTPTFASVVLRVHNERWEGVPFILKAGKALSSKKAEVRVQFKDVPGDIFRSKKQGRNEFVIRLQPSEAMYMKLTVKKPGLEMATEQSELDLSYGMRYQNVKIPEAYERLILDTIRGDQQHFVRRDELQAAWKIFTPLLHDIDDGKLKALPYEPGSRGPKEADELSARVGYVQTHGYIWVPPTLA

SEQ ID NO: 8661 - protein, 350 aa, Zea mays subsp. mays
  peptide (1)..(350): Ceres Seq. ID no. 12344382
MNPSSHPGWTRVIVEKPFGKDLDSAEELSAQLGELFEEHQLYRIDHYLGKELVQNLLVLRFANRLFLPLWNRDNIDNIQIVFREDFGTEGRGGYFDQYGIIRDIIQNHLLQVFCLVAMEKPVSLKPEHIRDEKVKVLQSVNPIKPEEVVLGQYDGYKDDPTVPDDSNTPTFASVVLRVHNERWEGVPFILKAGKALSSKKAEVRVQFKDVPGDIFRSKKQGRNEFVIRLQPSEAMYMKLTVKKPGLEMATEQSELDLSYGMRYQNVKIPEAYERLILDTIRGDQQHFVRRDELQAAWKIFTPLLHDIDDGKLKALPYEPGSRGPKEADELSARVGYVQTHGYIWVPPTLA

SEQ ID NO: 8662 - DNA, 1429 bp, Zea mays subsp. mays
  misc_feature (1)..(1429): Ceres Seq. ID no. 12407159
  misc_feature (1)..(1429): Ortholog of  Ceres SEQ ID NO 13654583 as cited in SEQ ID NO 68599
aaaaatttttccttaaaactgcctcctcagttagaaaaagccacgcaactttgcaagtcacgacctcatggaagaggtgagccaccccgtgacggattgacaccaagtcagtctcactcaagtaaagtggacgccaagtcagtcacactcacaccaccgtagcacacaccagtacaccacacactcgcctttccgatcccatccctctccagccaccttcctccgctcgccgtgcttctgcttcctccgccaccaccgccggcatggctgcgcgctgcccctacttcgccgtcgaggagtcctcccgcggcatccgctcgggggagtccccggccgcggcgctccgccggatcctcgcgacgcctggtgcgcaccaggcgccctgctgctacgacgcgctcggcgcgcgcctcgtcgagcgcgcggggtttccgatcgggttcatgggcggtttctgtgtttctgccgcgcgacttggcttgcctgatgttggcctcatttcctatggagaaatggtagatcaagggcgtctcatcaatgaagctgtttcaatcccagtgattggtgatggagacaatggttacggaaactctatgaatatcaagagaaccataaaaggatatatcaatgctggttttgctggaattatgcttgaggatcaggtggcacctaaagcatgtggacatactgaaggaaggaaagtcatatcaagggaggaagctgtcatgcacataaaagctgctgtagatgctaggaaagagagtggctctgacattgttattgtagcaaggacagattctcgccaagctatttctcatgatgaagcattatggagggtgaaagcatttgctgatgctggagcagatgttctatttattgatgcccttgcttcagtagaagagatgaaagcattttgtgcggttgcaccagaagttccaaagatggcaaacatgttagaaggtggtggtaaaactcccatattgagccctgctgaacttgaggaaattggtttcaggcttgtagtatatcctttatccttagttggggtatcaatgcgtgcaatgcaggatgctctagttgcgataaaagacggcggtgtacctccacctagcgtcctgccatcttttcaggagatcaaggatacattgggtttcaaccgctattataaagaagagaaacaataccaagtggacaagtgaaggaagcagctgaagtctgatcctgtggattcagtcggatcgtggccatggcttaatttccaccggacatgctgggcttccaccggacatgatgcagaccaatcgtatttatgttgagttgtaatcgaacgctgcgtagcgcagtatcccgaagaacatatatatggggtcttctcttccgtttctgctctgctgtggtttcaataatcccgaaactgtgattccagttt

SEQ ID NO: 8663 - protein, 311 aa, Zea mays subsp. mays
  peptide (1)..(311): Ceres Seq. ID no. 12407160
MAARCPYFAVEESSRGIRSGESPAAALRRILATPGAHQAPCCYDALGARLVERAGFPIGFMGGFCVSAARLGLPDVGLISYGEMVDQGRLINEAVSIPVIGDGDNGYGNSMNIKRTIKGYINAGFAGIMLEDQVAPKACGHTEGRKVISREEAVMHIKAAVDARKESGSDIVIVARTDSRQAISHDEALWRVKAFADAGADVLFIDALASVEEMKAFCAVAPEVPKMANMLEGGGKTPILSPAELEEIGFRLVVYPLSLVGVSMRAMQDALVAIKDGGVPPPSVLPSFQEIKDTLGFNRYYKEEKQYQVDK

SEQ ID NO: 8664 - protein, 251 aa, Zea mays subsp. mays
  peptide (1)..(251): Ceres Seq. ID no. 12407161
MGGFCVSAARLGLPDVGLISYGEMVDQGRLINEAVSIPVIGDGDNGYGNSMNIKRTIKGYINAGFAGIMLEDQVAPKACGHTEGRKVISREEAVMHIKAAVDARKESGSDIVIVARTDSRQAISHDEALWRVKAFADAGADVLFIDALASVEEMKAFCAVAPEVPKMANMLEGGGKTPILSPAELEEIGFRLVVYPLSLVGVSMRAMQDALVAIKDGGVPPPSVLPSFQEIKDTLGFNRYYKEEKQYQVDK

SEQ ID NO: 8665 - protein, 228 aa, Zea mays subsp. mays
  peptide (1)..(228): Ceres Seq. ID no. 12407162
MVDQGRLINEAVSIPVIGDGDNGYGNSMNIKRTIKGYINAGFAGIMLEDQVAPKACGHTEGRKVISREEAVMHIKAAVDARKESGSDIVIVARTDSRQAISHDEALWRVKAFADAGADVLFIDALASVEEMKAFCAVAPEVPKMANMLEGGGKTPILSPAELEEIGFRLVVYPLSLVGVSMRAMQDALVAIKDGGVPPPSVLPSFQEIKDTLGFNRYYKEEKQYQVDK

SEQ ID NO: 8666 - DNA, 970 bp, Zea mays subsp. mays
  misc_feature (1)..(970): Ceres Seq. ID no. 12391403
  misc_feature (1)..(970): Ortholog of  Ceres SEQ ID NO 14309248 as cited in SEQ ID NO 0
gtcgaaaccacagccacacaggcagccggtgctgggcctcggcactcggcagccatggttcgccttgcgaagttctatctcgtctgctacaactccctccaatcgctcggatggttcgtcgccctcctccgcctcgtgccctgcctcgtccctcccttccctgtccactccgcgtacgtggtcgccggcgacctcatctgtttcctgcagacatgtgcgatccttgaaacggtccacgctgccatcggattggtgccgaccgcgccacttcttgctttcttgcaatggggagggaggatccacttcatcctggctgttgtccggcaaattcgcgaggttcagagcagtccatctgtgttcataacatttatagcttggagcatatctgaggtcatccgttactctcactatgctctgagtaccttaaaagtttgtccagcatggctgacttatctcaggtacactgcttttatcccgctgtatccaatcggggttggtccaggagaaatgtggacaatgtaccaagccctcccatttgtgaagaagagggacctttactcaggtttcttcgagaagttctccatgagctaccgttcctttctagtgggtgtgctggtgctctacccgttcctgtggctgaagctgtaccagcacgtgttcaagcagcgcaagtccaagctggggaaggggagcaggaagaaacgggcctgagaaaatctggctctgctcagctcagctcagctcagctgccacttgttgctgtcatgtgaaacgctaacgggtcattgtggatttttgttttggaagaaaatctttgagttgttgtctgatgcgacggtgaaggttttgctgaatcgggcagtaattggattacgctttgggttctctgtttgtttcaattgctctgcgttttatgtctgtattaacatacatcaagcatatataatagtcatgttgctgctgcgagtct

SEQ ID NO: 8667 - protein, 236 aa, Zea mays subsp. mays
  peptide (1)..(236): Ceres Seq. ID no. 12391404
VETTATQAAGAGPRHSAAMVRLAKFYLVCYNSLQSLGWFVALLRLVPCLVPPFPVHSAYVVAGDLICFLQTCAILETVHAAIGLVPTAPLLAFLQWGGRIHFILAVVRQIREVQSSPSVFITFIAWSISEVIRYSHYALSTLKVCPAWLTYLRYTAFIPLYPIGVGPGEMWTMYQALPFVKKRDLYSGFFEKFSMSYRSFLVGVLVLYPFLWLKLYQHVFKQRKSKLGKGSRKKRA

SEQ ID NO: 8668 - protein, 218 aa, Zea mays subsp. mays
  peptide (1)..(218): Ceres Seq. ID no. 12391405
MVRLAKFYLVCYNSLQSLGWFVALLRLVPCLVPPFPVHSAYVVAGDLICFLQTCAILETVHAAIGLVPTAPLLAFLQWGGRIHFILAVVRQIREVQSSPSVFITFIAWSISEVIRYSHYALSTLKVCPAWLTYLRYTAFIPLYPIGVGPGEMWTMYQALPFVKKRDLYSGFFEKFSMSYRSFLVGVLVLYPFLWLKLYQHVFKQRKSKLGKGSRKKRA

SEQ ID NO: 8669 - protein, 120 aa, Zea mays subsp. mays
  peptide (1)..(120): Ceres Seq. ID no. 12391406
SKPQPHRQPVLGLGTRQPWFALRSSISSATTPSNRSDGSSPSSASCPASSLPSLSTPRTWSPATSSVSCRHVRSLKRSTLPSDWCRPRHFLLSCNGEGGSTSSWLLSGKFARFRAVHLCS

SEQ ID NO: 8670 - DNA, 1659 bp, Zea mays subsp. mays
  misc_feature (1)..(1659): Ceres Seq. ID no. 12412308
  misc_feature (1)..(1659): Ortholog of  Ceres SEQ ID NO 13594037 as cited in SEQ ID NO 55666
  misc_feature (1)..(1659): Ortholog of  Ceres SEQ ID NO 15171501 as cited in SEQ ID NO 58322
atttccgttggttcttgacctcagctcgctcctctcactcacctctatatatgccccgccctcttgcccgtgttggtggtaccccgcgtcgccctccgtcgtctcagcgtatgttgtgcatgtgaagagagagaggaagagggtgacgagcgagaaaaaagctagtagagtgatagcttgacaagacgcattgaagcgaaggccacgcataccaaagcaacctcaccatcgctcgcaagctactcgatcaaggacattattgtcgcaacgagctagcaagaataatccgcgttagtttcgcgaaggtggtacatatggctcgcatcctcgtgctggctctgctcaccatcgcgagcctcctcctgccgccggtcgtcgcgagccagcaggcggcggccaagtgcgagtacagaaagcactccggccaccggtacaggcacccggtgggcgtgcggaagatcgtggtggacgcgggcggcgccggcgacttcgtctccatccagcgcgccgtcgactccgtgccggagggcaacaccgtgcgcgtcatcgtgcagatcaacgccggcacgtacatagagaaggtggtagtgccggcgtcgaagccgtacgtcacgttccagggcgccgggcgcgacgtgacggtggtggagtggcacgaccgggccagcgaccgcggccccgacgggcagccgctccgcacctacaacaccgcctcagtaaccatcctagctaactatttcaacgctaagaacatcagcttcaagaacacagctccggcgccgatgcccggcacgcaaggagggcaggcggtggcgttccgcatctccggcgacaaggccttcttcttcggctgcgggttctacggcgcgcaggacacgctgtgcgacgacgccggccggcactacttccgcgactgctacatcgagggctccatcgacttcgtcttcggcaacgcccgctccctctacaaggactgcgagctgcactcgacggcgcagcggttcggctcggtggcggcgcacgggctgcgcgacccgtgcgagcgcaccggcttcgccttcgtcaactgccgggtgaccggcacggggcggctctacgtggggcgggccatggggcagtactcgcgcaatcgtctacgcctacacctacttcgacagcgtcatcgcgccaggcggctgggatgactgggaccacaccagcaacaagagcatgacggcgttcttcgggatgtacaggaactggggccccggcgtcgacgccgtgcacggcgtctcctgggcgcgagagctcgactacttcgccgcccgccctttcctcggcaagagcttcgtcaacggataccactggctcacacctgatgtctgaaaaacacacaaacacacgcgcgagagtcaggagacacatcgattacagcaaaccagattaatttattcgtacagcataaagacagaataagacaccatttacaagccactgaatatgtatagtgatccactggcgcagaagtcagattcaagattcatttcgtctataaaaaatagtttccaaaacttcgtcatgtgcagtgtaaactagacagtgagcagtgagtctgttatgtctctgcataggagaccttggatgtgcaattcaagttgttccattatgtttgaatctgcg

SEQ ID NO: 8671 - protein, 289 aa, Zea mays subsp. mays
  peptide (1)..(289): Ceres Seq. ID no. 12412309
MARILVLALLTIASLLLPPVVASQQAAAKCEYRKHSGHRYRHPVGVRKIVVDAGGAGDFVSIQRAVDSVPEGNTVRVIVQINAGTYIEKVVVPASKPYVTFQGAGRDVTVVEWHDRASDRGPDGQPLRTYNTASVTILANYFNAKNISFKNTAPAPMPGTQGGQAVAFRISGDKAFFFGCGFYGAQDTLCDDAGRHYFRDCYIEGSIDFVFGNARSLYKDCELHSTAQRFGSVAAHGLRDPCERTGFAFVNCRVTGTGRLYVGRAMGQYSRNRLRLHLLRQRHRARRLG

SEQ ID NO: 8672 - DNA, 1215 bp, Zea mays subsp. mays
  misc_feature (1)..(1215): Ceres Seq. ID no. 13665996
  misc_feature (1)..(1215): Ortholog of  Ceres SEQ ID NO 12781552 as cited in SEQ ID NO 51997
  misc_feature (1)..(1215): Ortholog of  Ceres SEQ ID NO 15176548 as cited in SEQ ID NO 53387
  misc_feature (1)..(1215): Ortholog of  Ceres SEQ ID NO 15169228 as cited in SEQ ID NO 55423
  misc_feature (1)..(1215): Ortholog of  Ceres SEQ ID NO 14312196 as cited in SEQ ID NO 56984
  misc_feature (1)..(1215): Ortholog of  Ceres SEQ ID NO 13597237 as cited in SEQ ID NO 64136
  misc_feature (1)..(1215): Ortholog of  Ceres SEQ ID NO 13598601 as cited in SEQ ID NO 69129
accggccaccgcgaatccagagccccacgccccgtccgaaccccagagcagagcaaagcctcctcgacctccctgtccccagccttccccgatggcccgcacgaagcagacggcgcgcaagtcgacgggcgggccatcggggagggctggtcagggattcaaacagaggcttctcagcatatgggggttctacaagcatcatcaatgggctggaatggtgctcctgtacttgctgccactcctgttgtcaagaaagtcatgaggctggatgttccagtagacaagtatcctaactacaactttgttggtcgtttattggggccgcgaggtaactccctgaaaagggttgaagcttcaacccaatgtagagtttacattcgaggacggggttctgtgaaagactctgttaaggaagacaagctgagggataaacctgggtatgaacaccttaatgaacaactgcatgtgcttgtggaagcagagtttccagcagatatggttgatgtgcgtcttaatcaagctgtgtccatcctagaggatcttcttaaaccaattgacgagtccatggactactacaagaagcagcagctgagggagctggcgattctaaatggcacactgagagaggaaagcccaagccctcacctcagccctagtgtgtcccccttcaactccaccgggatgaagcgcgcaaaaacagggcggtaatctctgttccgaaagccttcatccccccaaatcaatcatggttcaatgcccaattattacacaagctactgctggagatgattggtgatgcatatgctgggatcatcagtgatggcctatgcctgtcatgatctgtgcgctttatcgacaagcacacaaacatgcctgtgctgtgcttggacgaatggtctccgggcttgttgtttgactctactattatttattctttgtgcttctgactgcctaagtattattaacattattggtttgggaaagtgttaacaaggcccggttggccagtcgctgtagaaagcttggggagaggaggggggggtgtcaatgtgacggacaataataaggtttcgttggtgtacctgagatagttgtaatatgtcatgtgctgatgcttttgtgtggtgctagtacaagacaaccagacagctatagttgaggcaatgattattttgcgttcataaaatgcatgtcggtgtgctttcttcatggttc

SEQ ID NO: 8673 - protein, 235 aa, Zea mays subsp. mays
  peptide (1)..(235): Ceres Seq. ID no. 13665997
TGHRESRAPRPVRTPEQSKASSTSLSPAFPDGPHEADGAQVDGRAIGEGWSGIQTEASQHMGVLQASSMGWNGAPVLAATPVVKKVMRLDVPVDKYPNYNFVGRLLGPRGNSLKRVEASTQCRVYIRGRGSVKDSVKEDKLRDKPGYEHLNEQLHVLVEAEFPADMVDVRLNQAVSILEDLLKPIDESMDYYKKQQLRELAILNGTLREESPSPHLSPSVSPFNSTGMKRAKTGR

SEQ ID NO: 8674 - protein, 175 aa, Zea mays subsp. mays
  peptide (1)..(175): Ceres Seq. ID no. 13665998
MGVLQASSMGWNGAPVLAATPVVKKVMRLDVPVDKYPNYNFVGRLLGPRGNSLKRVEASTQCRVYIRGRGSVKDSVKEDKLRDKPGYEHLNEQLHVLVEAEFPADMVDVRLNQAVSILEDLLKPIDESMDYYKKQQLRELAILNGTLREESPSPHLSPSVSPFNSTGMKRAKTGR

SEQ ID NO: 8675 - protein, 167 aa, Zea mays subsp. mays
  peptide (1)..(167): Ceres Seq. ID no. 13665999
MGWNGAPVLAATPVVKKVMRLDVPVDKYPNYNFVGRLLGPRGNSLKRVEASTQCRVYIRGRGSVKDSVKEDKLRDKPGYEHLNEQLHVLVEAEFPADMVDVRLNQAVSILEDLLKPIDESMDYYKKQQLRELAILNGTLREESPSPHLSPSVSPFNSTGMKRAKTGR

SEQ ID NO: 8676 - DNA, 1312 bp, Zea mays subsp. mays
  misc_feature (1)..(1312): Ceres Seq. ID no. 12408327
  misc_feature (1)..(1312): Ortholog of  Ceres SEQ ID NO 12609214 as cited in SEQ ID NO 52165
  misc_feature (1)..(1312): Ortholog of  Ceres SEQ ID NO 13662018 as cited in SEQ ID NO 61693
actctactcccggtaccggaggccggagctatccaattcccttcccacccagaccgcgatccctaaccctacccaatgtcctcgccgccgccggcttcgcccatggccgccgagaatgaggcctgcgactgggcggagatgccgtcggacgcgctcgcggccgtgttcgcgaagctggacgtggccgagatcctgtccggcgccgggctggtctgccgcgcgtggcaccgtctcgcggcctcggaccctacgctgtggcgccgcgtcgacatgtgctaccagggggaccagctgcagaccgaggaggtcgaggccatggcgcgcgccgcggtcgaccgctctgcgggcaccatggaggcgttctgtgccgagaccttcgtcaacgacgacctggctccgctacatctctcagagggccccctcattgaagagcctccatctctgcctgtgccattacgtcactaatcaaggttttgcagaggcagttaattgcttccctcagctcaaggagctagacattacattctgctcattgtatggcatcgtgtgtgagactgctgggagagcctgcccgcagcttaaatgcttcaggttgaatgagcgctggtctattcttcaaagcgagtttgcaccctacgagggcatggatgatgacacggaagcattagggatcgctagcaccatgcctgggctccaagaacttcagttgatcggtaacaacctgaccaatgacggactcgtggcaatccttgaccgttgccctcgccttgaatcccttgacattcgccaatgctacaacatacagatggacgacgcactgagatcgaaatgcgctaggatacgagatctgaagcttcctcacgactccatctccgacttcaagtatcgggcttacatcgtcagcagcatagccaactcgggctctgattttgaggttgatatgtatgatgatctgctggatgtggtcactgaagatgatgatgctgatttcgatgacatggatgatttcgatgatacagtctcagatggaggcatgtacgatgatgacttggatatctgaaattaggaatcggttcaaacagcttttccgtggaccatgtaagtgctgttagctggaatggtttcccgtcccttttctttgagattcgggtagctatgatggaatctccctgatgttcatacttctgcgcctctccatttgttaagaagctggagtagctgaactggttctaatcgatgtacaactgttgtttttttattctgaacctttgttaattggtattttaataataacctagggcaaaaaatgtgt

SEQ ID NO: 8677 - protein, 352 aa, Zea mays subsp. mays
  peptide (1)..(352): Ceres Seq. ID no. 12408328
LYSRYRRPELSNSLPTQTAIPNPTQCPRRRRLRPWPPRMRPATGRRCRRTRSRPCSRSWTWPRSCPAPGWSAARGTVSRPRTLRCGAASTCATRGTSCRPRRSRPWRAPRSTALRAPWRRSVPRPSSTTTWLRYISQRAPSLKSLHLCLCHYVTNQGFAEAVNCFPQLKELDITFCSLYGIVCETAGRACPQLKCFRLNERWSILQSEFAPYEGMDDDTEALGIASTMPGLQELQLIGNNLTNDGLVAILDRCPRLESLDIRQCYNIQMDDALRSKCARIRDLKLPHDSISDFKYRAYIVSSIANSGSDFEVDMYDDLLDVVTEDDDADFDDMDDFDDTVSDGGMYDDDLDI

SEQ ID NO: 8678 - protein, 314 aa, Zea mays subsp. mays
  peptide (1)..(314): Ceres Seq. ID no. 12408329
MRPATGRRCRRTRSRPCSRSWTWPRSCPAPGWSAARGTVSRPRTLRCGAASTCATRGTSCRPRRSRPWRAPRSTALRAPWRRSVPRPSSTTTWLRYISQRAPSLKSLHLCLCHYVTNQGFAEAVNCFPQLKELDITFCSLYGIVCETAGRACPQLKCFRLNERWSILQSEFAPYEGMDDDTEALGIASTMPGLQELQLIGNNLTNDGLVAILDRCPRLESLDIRQCYNIQMDDALRSKCARIRDLKLPHDSISDFKYRAYIVSSIANSGSDFEVDMYDDLLDVVTEDDDADFDDMDDFDDTVSDGGMYDDDLDI

SEQ ID NO: 8679 - DNA, 1287 bp, Zea mays subsp. mays
  misc_feature (1)..(1287): Ceres Seq. ID no. 12408316
  misc_feature (1)..(1287): Ortholog of  Ceres SEQ ID NO 13593932 as cited in SEQ ID NO 54078
  misc_feature (1)..(1287): Ortholog of  Ceres SEQ ID NO 12635231 as cited in SEQ ID NO 0
aagcgacgcgaagcaccgaggagaggcggcgagagttcttggtcggctagatggaaaaggcgggccagaagcggcggccgctgacggtgatggcatcctcatcgtcgcaggtggcagcagcgcggggcatgggcatgaccaacccactggcggagtggaccgaccgcgtcaggtcgctggaggccggcgtgctggcgtggctagcgaagcagcccacccacgtcgaggccgccgtggtcacggcggtcggcgccgtgcagggcgccgcgctcgggcgggctcatgggcacgcttgcgcccgacggcggggcccgcgctccctgtgccgccgccgccgccggggaccgacccaaaggtcttggcctccttcaagcaagcgcaggctttagcgggtggacccctggtgcaagcacgaaactttgcggtcatgactggtgcgaatgctggcatatcttgtgtcatgagaaggataagaggagtggaggatgtccagggcagcatggcagcagcttttggttctggggctctattctccatcgtgagtggaatggggaccccaaatccagtagctaatgcaattacaactggtgttggttttgctgtatttcaaggtggttttttcatgatctctcaaaaattttcacagccacagagtggagatacatactattctcgtggaagaagcatgctgcaaaagttaggccttcagaactatgagaagaacttcaagaagggtctcctaactgatcaaaccttgccccttcttacggacagtgctctcagagatgtgaagatcccgcctggccccaggctcctcatacttgatcacattaaaagagatccagagttgacaaaagcaaattaagtgatcggcactgcggcactgcctcacggtgccagttcttttccccctcgagttgcagaaattggaccaggagaaccgtttaatttagctattcagtgacgacctctttggagcagtatttggttgtgcttactagtatatgttttctagtcatcattcacgcttttttttgagccgaagtgtttgcaaatcactctgatcttggaatgacagaattttgtattctcaaaggtttatgctgatcaatccagattttactactagtttagggatgtcaaacgaagggaaactgcaattcgcacattttatttggcttctggatggtagtttggttctgatctgtaacgtttagccctttgctaagctgtgtcctgcataaggctttgcggcctgattaatataagcacacatgttggaatttc

SEQ ID NO: 8680 - protein, 287 aa, Zea mays subsp. mays
  peptide (1)..(287): Ceres Seq. ID no. 12408317
SDAKHRGEAARVLGRLDGKGGPEAAAADGDGILIVAGGSSAGHGHDQPTGGVDRPRQVAGGRRAGVASEAAHPRRGRRGHGGRRRAGRRARAGSWARLRPTAGPALPVPPPPPGTDPKVLASFKQAQALAGGPLVQARNFAVMTGANAGISCVMRRIRGVEDVQGSMAAAFGSGALFSIVSGMGTPNPVANAITTGVGFAVFQGGFFMISQKFSQPQSGDTYYSRGRSMLQKLGLQNYEKNFKKGLLTDQTLPLLTDSALRDVKIPPGPRLLILDHIKRDPELTKAN

SEQ ID NO: 8681 - protein, 145 aa, Zea mays subsp. mays
  peptide (1)..(145): Ceres Seq. ID no. 12408318
MTGANAGISCVMRRIRGVEDVQGSMAAAFGSGALFSIVSGMGTPNPVANAITTGVGFAVFQGGFFMISQKFSQPQSGDTYYSRGRSMLQKLGLQNYEKNFKKGLLTDQTLPLLTDSALRDVKIPPGPRLLILDHIKRDPELTKAN

SEQ ID NO: 8682 - DNA, 1540 bp, Zea mays subsp. mays
  misc_feature (1)..(1540): Ceres Seq. ID no. 12408314
  misc_feature (1)..(1540): Ortholog of  Ceres SEQ ID NO 14301430 as cited in SEQ ID NO 56553
  misc_feature (1)..(1540): Ortholog of  Ceres SEQ ID NO 13639124 as cited in SEQ ID NO 56718
  misc_feature (1)..(1540): Ortholog of  Ceres SEQ ID NO 13638746 as cited in SEQ ID NO 59296
  misc_feature (1)..(1540): Ortholog of  Ceres SEQ ID NO 13596474 as cited in SEQ ID NO 62169
  misc_feature (1)..(1540): Ortholog of  Ceres SEQ ID NO 13598714 as cited in SEQ ID NO 62656
  misc_feature (1)..(1540): Ortholog of  Ceres SEQ ID NO 13596969 as cited in SEQ ID NO 63375
  misc_feature (1)..(1540): Ortholog of  Ceres SEQ ID NO 13597519 as cited in SEQ ID NO 64759
  misc_feature (1)..(1540): Ortholog of  Ceres SEQ ID NO 13597870 as cited in SEQ ID NO 64982
  misc_feature (1)..(1540): Ortholog of  Ceres SEQ ID NO 13595926 as cited in SEQ ID NO 67778
gaaagcaggatgttcctacctttaaccaagtggaccaagatctctatcatcgactccctgcccccctcctcctcttctatataaaccatacactgaaacgacgtctaattgtgctgtgatccaggcagcagtgagctcagtacacagctaggcacagcgacggggtccggtccagggccatggctaaggaaagcaagctaacggccggagtggccgccgcgctgaccgtcgtcgctgcttgcgcgctatgcctgctgctgccggcgacggcccgcgcgcagctccgggtgggattctacgacaccagctgccccaacgccgaggccctcgtccgccaggccgtcgcggccgccttcgccaaggacgccggcatcgccgccggcctcatccgcctccacttccacgactgctttgtcaggggctgtgatggatccgtcctcctcaccgtgaatcctggcggcgggcagactgagcgtgacgccctcccaaacaacccgagcctccgcggcttcgacgtgatcgacgccgccaagaccgccgttgagcagagctgcccgcgcacagtctcgtgcgccgacatcgtcgccttcgccgcccgcgacagcatcagtctcaccgggagcgtctcgtaccaggtccccgcgggccggcgcgacggccgcgtgtccaacgcgacggagaccgtcgacctacccccgcccacctccacggcgcaaagcctgaccgacttgttcaaggccaaggagcttagcgtggaggacatggtcgtcctctccggcgctcacaccgtcggccgctccttctgcgcctccttcttcaagcgcgtctggaacacaagcacgaaccccgctaccgcaatcgtggacgcggggctgagcccgtcgtacgcgcagctactacgcgcgctgtgcccgtcaaacacgacgcagacgacgccgatcacgacggccatggacccgggaacgcccaacgtgctggacaacaactactacaagcttcctgcctcgcggcatggggctcttcttctccgacaacccgctgcgcgtgaacccgcagatggccgcgctggtgagcagcttcgcgtccaacgagacgctgtggaaggagaaattcgcggcggccatggtaaagatgggacgcatccaggtgcagacagggacgtgcggagaggtccgtctcaactgcggcgtcgtcaacccgagttcgtactcgtcgtcgtcggcggtggagctgggttcgagcgcgccagcagccgtcggtgaagagggctacgccgcgagctagtagctcgcataccagtcttcggccgccgtcgttgtcgagatcaatgattttttttctctctctcgcatgcatccctcttctgcttttattttgtcgcgtggactgtggtttttgttgtgtcgatgatctttgttgtgtgccagtgccactaaacgtacgcatgccggccggcgaactcttaacttcggtggcgggtaataataagcatatgtatgagtaagatgagattgtgtcaatttagggtgtggatgctttc

SEQ ID NO: 8683 - protein, 360 aa, Zea mays subsp. mays
  peptide (1)..(360): Ceres Seq. ID no. 12408315
MAKESKLTAGVAAALTVVAACALCLLLPATARAQLRVGFYDTSCPNAEALVRQAVAAAFAKDAGIAAGLIRLHFHDCFVRGCDGSVLLTVNPGGGQTERDALPNNPSLRGFDVIDAAKTAVEQSCPRTVSCADIVAFAARDSISLTGSVSYQVPAGRRDGRVSNATETVDLPPPTSTAQSLTDLFKAKELSVEDMVVLSGAHTVGRSFCASFFKRVWNTSTNPATAIVDAGLSPSYAQLLRALCPSNTTQTTPITTAMDPGTPNVLDNNYYKLPASRHGALLLRQPAAREPADGRAGEQLRVQRDAVEGEIRGGHGKDGTHPGADRDVRRGPSQLRRRQPEFVLVVVGGGAGFERASSRR

SEQ ID NO: 8684 - DNA, 1301 bp, Zea mays subsp. mays
  misc_feature (1)..(1301): Ceres Seq. ID no. 12401930
  misc_feature (1)..(1301): Ortholog of  Ceres SEQ ID NO 13599880 as cited in SEQ ID NO 545
ctacaacgcaccctacggtggctacccaccgcagggaccgtcaagaggtggcatgggctgggaccagaggccgggcccaccaacccatccttcgtaccagggtggtggttctgactactacaagcagggatctcagccatatgatagccagccacccagctaccctcctgggccagggaattacaacagttatgggcaatcccagggccctaactatggccaacctcagtatccgcaacatgcacctcaacagaactacagccatggctatggtgatcctagatacaatgccccccctccgaaccagcagtactatggtcagccaccgatggccccgcagcaaggctatcctcaacagccagatccctatgctaggcctccatacagtggacctggtcaatggacccccaggggtgctcccgccgcagatggctcctaccaggcgccaccttcatcttatgggccaccgtctcagcaacctcctgcttatgggcaaacatatggtgcagcaacgggacctgatgggtatggtcaacagggttacccacagcagggtggccaggtaccagcttcatatggtcagagtgcaccagcagctccaggatatcctcagcaaggcacgcagcaaggtggctatgcacagtacccgcagacccaaccagcatatggtgatcaagcagctcaagccaatgcgaactatgggtaccagggagctccagcagatcccaactacggaagtgcgtacccacagcagccagggtatggtcctcctggtcaggcaactggtcaggctggttatgcatcctctgcgccagcggccagccagcctgtgtatggccaggctggatatacccagccacctacaaatcctccaagttatgatcagtctgcagcaccagcggcgactcagagcggttatgctgcgccccctgcaaatccacaacagcctgctgcagcaaaaggggtctcgccacagcctgctgctgctgctgctgctggatatggtgctagcgggcagtggacggcatgagcctcgtcttccgaacttcgatgacagcaaggtcaggttggatatccgcttttggcgcgtgtttgaatgtttgcatcttttggatgtctgtggacgcatcatgtagggcttgaccccgttatcgaaagagattgtaaccccttgagttgtgatactggacatcttctgtagtatctacgagtagttgcttaatgtgacttttaaacattctattcagtttggatgttccttgtcttgctacttcacagcttgccaagccagtaatctttgg

SEQ ID NO: 8685 - protein, 377 aa, Zea mays subsp. mays
  peptide (1)..(377): Ceres Seq. ID no. 12401931
TTHPTVATHRRDRQEVAWAGTRGRAHQPILRTRVVVLTTTSRDLSHMIASHPATLLGQGITTVMGNPRALTMANLSIRNMHLNRTTAMAMVILDTMPPLRTSSTMVSHRWPRSKAILNSQIPMLGLHTVDLVNGPPGVLPPQMAPTRRHLHLMGHRLSNLLLMGKHMVQQRDLMGMVNRVTHSRVARYQLHMVRVHQQLQDILSKARSKVAMHSTRRPNQHMVIKQLKPMRTMGTRELQQIPTTEVRTHSSQGMVLLVRQLVRLVMHPLRQRPASLCMARLDIPSHLQILQVMISLQHQRRLRAVMLRPLQIHNSLLQQKGSRHSLLLLLLLDMVLAGSGRHEPRLPNFDDSKVRLDIRFWRVFECLHLLDVCGRIM

SEQ ID NO: 8686 - protein, 342 aa, Zea mays subsp. mays
  peptide (1)..(342): Ceres Seq. ID no. 12401932
YNAPYGGYPPQGPSRGGMGWDQRPGPPTHPSYQGGGSDYYKQGSQPYDSQPPSYPPGPGNYNSYGQSQGPNYGQPQYPQHAPQQNYSHGYGDPRYNAPPPNQQYYGQPPMAPQQGYPQQPDPYARPPYSGPGQWTPRGAPAADGSYQAPPSSYGPPSQQPPAYGQTYGAATGPDGYGQQGYPQQGGQVPASYGQSAPAAPGYPQQGTQQGGYAQYPQTQPAYGDQAAQANANYGYQGAPADPNYGSAYPQQPGYGPPGQATGQAGYASSAPAASQPVYGQAGYTQPPTNPPSYDQSAAPAATQSGYAAPPANPQQPAAAKGVSPQPAAAAAAGYGASGQWTA

SEQ ID NO: 8687 - protein, 331 aa, Zea mays subsp. mays
  peptide (1)..(331): Ceres Seq. ID no. 12401933
MIASHPATLLGQGITTVMGNPRALTMANLSIRNMHLNRTTAMAMVILDTMPPLRTSSTMVSHRWPRSKAILNSQIPMLGLHTVDLVNGPPGVLPPQMAPTRRHLHLMGHRLSNLLLMGKHMVQQRDLMGMVNRVTHSRVARYQLHMVRVHQQLQDILSKARSKVAMHSTRRPNQHMVIKQLKPMRTMGTRELQQIPTTEVRTHSSQGMVLLVRQLVRLVMHPLRQRPASLCMARLDIPSHLQILQVMISLQHQRRLRAVMLRPLQIHNSLLQQKGSRHSLLLLLLLDMVLAGSGRHEPRLPNFDDSKVRLDIRFWRVFECLHLLDVCGRIM

SEQ ID NO: 8688 - DNA, 918 bp, Zea mays subsp. mays
  misc_feature (1)..(918): Ceres Seq. ID no. 12346185
  misc_feature (1)..(918): Ortholog of  Ceres SEQ ID NO 12619999 as cited in SEQ ID NO 66123
  misc_feature (1)..(918): Ortholog of  Ceres SEQ ID NO 13656436 as cited in SEQ ID NO 69154
cgggtgcctcgcttcgctttgcgcgcgattcgatccaggctttggttggaggcatggcctcgtcgcccgcgagcagctacgactgctccttcaaggtcctgcttatcggggattcggccgtcggcaagagcagcctcctcgtcagcttcgtctccgccgctcacatcgacgacgacatcgcgccaaccataggggtggattttaaaatcaaatttctcagtgtgggtgggaagaaactaaaactgacaatatgggacactgccggtcaagagaggttcaggacaattaccagctcttactacaggggtgctcatgggattattttagtttatgacgttacaaagagggagagtttcacaaatttggctgatgtgtggaccaaggaaatagagttacactcaacaaataaggaatgcatcaaaatgcttgttggaaataaagtggacaaggatgaggacagaatggtgacaaaagaagaaggtcttgaatttgcacaagaacgtggatgtctctttgtcgagagtagtgctaaaacaagagaaaacgtggaaaaatgttttgaagagcttgcattaaagattctccaggttcccagtctcttggaggaaggttcttcggttgttaagaggaacactctgactctgaaacaaaagcaggagaatgcaaaccgaagtggaggatgctgtcagtaggtcggccagttcttgttgcaagccactcgaggtatcatatatttaggtccttgtaagttgtattgggatgtagatgagttgtatctaaatgcacagcggcagagccaatgcaagtgatgggagaactaaccacttgaggttttggtgtgaattgatctgtacagaagaaaagccttctcttgtttttcctgtttcttgatgtggtaatttgtgcaagtgatgggag

SEQ ID NO: 8689 - protein, 229 aa, Zea mays subsp. mays
  peptide (1)..(229): Ceres Seq. ID no. 12346186
GASLRFARDSIQALVGGMASSPASSYDCSFKVLLIGDSAVGKSSLLVSFVSAAHIDDDIAPTIGVDFKIKFLSVGGKKLKLTIWDTAGQERFRTITSSYYRGAHGIILVYDVTKRESFTNLADVWTKEIELHSTNKECIKMLVGNKVDKDEDRMVTKEEGLEFAQERGCLFVESSAKTRENVEKCFEELALKILQVPSLLEEGSSVVKRNTLTLKQKQENANRSGGCCQ

SEQ ID NO: 8690 - protein, 212 aa, Zea mays subsp. mays
  peptide (1)..(212): Ceres Seq. ID no. 12346187
MASSPASSYDCSFKVLLIGDSAVGKSSLLVSFVSAAHIDDDIAPTIGVDFKIKFLSVGGKKLKLTIWDTAGQERFRTITSSYYRGAHGIILVYDVTKRESFTNLADVWTKEIELHSTNKECIKMLVGNKVDKDEDRMVTKEEGLEFAQERGCLFVESSAKTRENVEKCFEELALKILQVPSLLEEGSSVVKRNTLTLKQKQENANRSGGCCQ

SEQ ID NO: 8691 - DNA, 1317 bp, Zea mays subsp. mays
  misc_feature (1)..(1317): Ceres Seq. ID no. 12360003
  misc_feature (1)..(1317): Ortholog of  Ceres SEQ ID NO 14301430 as cited in SEQ ID NO 56553
  misc_feature (1)..(1317): Ortholog of  Ceres SEQ ID NO 13639124 as cited in SEQ ID NO 56718
  misc_feature (1)..(1317): Ortholog of  Ceres SEQ ID NO 13598714 as cited in SEQ ID NO 62656
  misc_feature (1)..(1317): Ortholog of  Ceres SEQ ID NO 13596969 as cited in SEQ ID NO 63375
  misc_feature (1)..(1317): Ortholog of  Ceres SEQ ID NO 13597519 as cited in SEQ ID NO 64759
  misc_feature (1)..(1317): Ortholog of  Ceres SEQ ID NO 13662323 as cited in SEQ ID NO 68305
attcagcccatcgctagctctcgcgtctcgcctgtctcctctagtagcacaagaccacgagggattaagcgatgacaacctctaagctcgctgtcctcactctgtttgccctgctcggctccgtgtcatgccagtccggtggctactacttctacccaaccccgcagcaaccatctccaacacccagccctccttctagtccgcaactcatggtcggatactacaaggacaagtgtgccgcttacgtggatgttgaagctattgtcaagaagcacgtcaaggccaccgatgctggcatgcaggccgggcttgtccgtctcttattccacgactgcttcgtccgtggatgcgacggctccgtcctcctcgacacgttcagcaacgacaccagcctgaccccagagaagttcggcgtgcccaacttccccagcctgcggggcttcgaggtgatcgacgcggccaaggccgagatcgaggcggcgtgccccggcacggtctcgtgcgcggacatcgtcgcgttcgccgcccgcgacgcgtcctacttcctcagcggcggcggcatcagcttcgccatgcccgcggggcgctacgacgggaacgtctccctcgccagcgagaccctccccaacctgccctcgccgttcaccggcttcgaccagctcgtcaaggtgttcgccgacaaagggctcgacgccttcgacatgatcacgctctccggcgcgcacagcatcggccgctcccactgctcctccttcaccagggaccgcctgccgcccagcaacaccaccgacatagatccagcgttcgccgccacgctgcaggctagctgcgcttcgcccaacggcaccgacaacacggtcatgcaggacttcaagacccccgacgtcctggacaaccagtactacaagaacgtgctggcccacaaggttctcttcacgtcggacgccgcgctcaccaccaacttcacgtccaacaacctggtgcgcgcctacgcggacttcgtgccctatctgtggcagcagaagttcgccaaagccatggtgaagatggccggcgtcgagatcaaaaccgccgccaacggagagatcaggaagacatgccgcaaggtcaacagcaggtcctgatcagatggcgtaccggcgggcttccaatttcctaagttttgcctttacatacattcccctgatctcccctaatatctgcctttatgctgtatacattctttgtttcgttttccagctgtatgcctgcttttatgctgtataatttaaatttgattgaatattacatcttttgaaatccaagcaaattttcatc

SEQ ID NO: 8692 - protein, 350 aa, Zea mays subsp. mays
  peptide (1)..(350): Ceres Seq. ID no. 12360004
MTTSKLAVLTLFALLGSVSCQSGGYYFYPTPQQPSPTPSPPSSPQLMVGYYKDKCAAYVDVEAIVKKHVKATDAGMQAGLVRLLFHDCFVRGCDGSVLLDTFSNDTSLTPEKFGVPNFPSLRGFEVIDAAKAEIEAACPGTVSCADIVAFAARDASYFLSGGGISFAMPAGRYDGNVSLASETLPNLPSPFTGFDQLVKVFADKGLDAFDMITLSGAHSIGRSHCSSFTRDRLPPSNTTDIDPAFAATLQASCASPNGTDNTVMQDFKTPDVLDNQYYKNVLAHKVLFTSDAALTTNFTSNNLVRAYADFVPYLWQQKFAKAMVKMAGVEIKTAANGEIRKTCRKVNSRS

SEQ ID NO: 8693 - protein, 304 aa, Zea mays subsp. mays
  peptide (1)..(304): Ceres Seq. ID no. 12360005
MVGYYKDKCAAYVDVEAIVKKHVKATDAGMQAGLVRLLFHDCFVRGCDGSVLLDTFSNDTSLTPEKFGVPNFPSLRGFEVIDAAKAEIEAACPGTVSCADIVAFAARDASYFLSGGGISFAMPAGRYDGNVSLASETLPNLPSPFTGFDQLVKVFADKGLDAFDMITLSGAHSIGRSHCSSFTRDRLPPSNTTDIDPAFAATLQASCASPNGTDNTVMQDFKTPDVLDNQYYKNVLAHKVLFTSDAALTTNFTSNNLVRAYADFVPYLWQQKFAKAMVKMAGVEIKTAANGEIRKTCRKVNSRS

SEQ ID NO: 8694 - protein, 275 aa, Zea mays subsp. mays
  peptide (1)..(275): Ceres Seq. ID no. 12360006
MQAGLVRLLFHDCFVRGCDGSVLLDTFSNDTSLTPEKFGVPNFPSLRGFEVIDAAKAEIEAACPGTVSCADIVAFAARDASYFLSGGGISFAMPAGRYDGNVSLASETLPNLPSPFTGFDQLVKVFADKGLDAFDMITLSGAHSIGRSHCSSFTRDRLPPSNTTDIDPAFAATLQASCASPNGTDNTVMQDFKTPDVLDNQYYKNVLAHKVLFTSDAALTTNFTSNNLVRAYADFVPYLWQQKFAKAMVKMAGVEIKTAANGEIRKTCRKVNSRS

SEQ ID NO: 8695 - DNA, 850 bp, Zea mays subsp. mays
  misc_feature (1)..(850): Ceres Seq. ID no. 12423783
  misc_feature (1)..(850): Ortholog of  Ceres SEQ ID NO 13656871 as cited in SEQ ID NO 65884
ctatgaaagtctgaaaatagctagtggattgagcggagcgtgcctctgcggtccgataggcgggttcgcatccggccatccgatactctgccagtgcggccgcgcggcggcggagcaaccacgcgcgcagaccgccgtcgccacctcctccctccctccgctccccggcgtgcgtccgatccaccaggaatcgaaggctcccacacgcccccacgcgatgctgcgcaacttcccgcaggcccggaggctcctcaggcggatggggttcgagaaggaggacgcctacttctggaagcagatgggcaaggccatgctctgcacgtacacgctcttcggcgtcgtctggctctggaacgagacgtcgccgctcgggtggtggacgctcaagccgcgccccaaggaagaaagagagatggcacacctctacgagcgcaggaagttcccgtaccctggcgatgatgaggcggtcgaggagtttgtaaagagcggaggtgctcttggaaccacaattggacccaggggattcgctgacgccaatatggattctgaaaacatgcagaagcagctgcagtctaagaagttcgagcaggaagcacagaaactgtggattcggatgaggaatgaggtcgtacaggagctccaggagaaggggtttgatatcgagtgaatttgaaacctgcagtatggtcggcgctgaggatgttaaaacttaaaaccacttgccatctaaattggagaactgtataacttaggaataaaagagtttgtagctatctttttaactaactatctggtgctgcattcttggtgctgctagattgtaccgaaaataaattttgatgtcttgtgg

SEQ ID NO: 8696 - protein, 221 aa, Zea mays subsp. mays
  peptide (1)..(221): Ceres Seq. ID no. 12423784
YESLKIASGLSGACLCGPIGGFASGHPILCQCGRAAAEQPRAQTAVATSSLPPLPGVRPIHQESKAPTRPHAMLRNFPQARRLLRRMGFEKEDAYFWKQMGKAMLCTYTLFGVVWLWNETSPLGWWTLKPRPKEEREMAHLYERRKFPYPGDDEAVEEFVKSGGALGTTIGPRGFADANMDSENMQKQLQSKKFEQEAQKLWIRMRNEVVQELQEKGFDIE

SEQ ID NO: 8697 - protein, 149 aa, Zea mays subsp. mays
  peptide (1)..(149): Ceres Seq. ID no. 12423785
MLRNFPQARRLLRRMGFEKEDAYFWKQMGKAMLCTYTLFGVVWLWNETSPLGWWTLKPRPKEEREMAHLYERRKFPYPGDDEAVEEFVKSGGALGTTIGPRGFADANMDSENMQKQLQSKKFEQEAQKLWIRMRNEVVQELQEKGFDIE

SEQ ID NO: 8698 - protein, 135 aa, Zea mays subsp. mays
  peptide (1)..(135): Ceres Seq. ID no. 12423786
MGFEKEDAYFWKQMGKAMLCTYTLFGVVWLWNETSPLGWWTLKPRPKEEREMAHLYERRKFPYPGDDEAVEEFVKSGGALGTTIGPRGFADANMDSENMQKQLQSKKFEQEAQKLWIRMRNEVVQELQEKGFDIE

SEQ ID NO: 8699 - DNA, 1606 bp, Zea mays subsp. mays
  misc_feature (1)..(1606): Ceres Seq. ID no. 12350293
  misc_feature (1)..(1606): Ortholog of  Ceres SEQ ID NO 15178264 as cited in SEQ ID NO 52395
  misc_feature (1)..(1606): Ortholog of  Ceres SEQ ID NO 13598642 as cited in SEQ ID NO 64264
  misc_feature (1)..(1606): Ortholog of  Ceres SEQ ID NO 13663413 as cited in SEQ ID NO 66334
  misc_feature (1)..(1606): Ortholog of  Ceres SEQ ID NO 12779833 as cited in SEQ ID NO 66670
  misc_feature (1)..(1606): Ortholog of  Ceres SEQ ID NO 15169501 as cited in SEQ ID NO 67032
  misc_feature (1)..(1606): Ortholog of  Ceres SEQ ID NO 13590666 as cited in SEQ ID NO 68761
gattcattccccctctcccctctccaagacccaaaaccctaacccctacgacccccgtgaccgccgccgccgtcgatgcctgcgctctccgacgtcgcgcttcaggctgccatcgccggcaacctccgcctcctgaagctggtggcgagcaagatgaatctgcgcgaagcgaaggacgccgctgggcggaacgcgctccacctggccgcggagatgggccgtcttgaggtttgcaggttcctggtggaggaatcgggcttcgaggtgaacttcgcctgcgccgaaggcgggtcgccggtccactgcgccgcggccgggggcagcgagagcgtcttgggctaccttctcgaccacggtggcgaccctgtgatgccggactccatgggctccactccactgcatgatgcggcagaggaagggcattgtgcggctgtgaggatgctgctgtccaagggtgtcgatgtggatccacacggctgtcgtgggacgccgctgcacttggcctgctccaatgaccgggatcaggttgttaggatcctgctggaacatggcgcagatcccaacaaagtttcggtcatgtcctcccaccactcatgatggcatactgtggcggttctttgagatgcatgaagctactgattgaggctggtgcggatgtgaacttgattgctccttctggagtaattttggctcaggcagtttgtgatgggtcaactgagattgtcaagtttttgctagaggttggagctgatcctaacattcctgatgaggatgggaaaatcccgatcatgtacccagcatttaatgggcatcgggatcttgttgaaattctatttcctaagacaagaccagtttcatctttgccagactggagcgttgatgggattattagaagtatgaaagatctgtttttcaagcctcaggatgcagctgtggtggaaaaaaagatagctgatgcgaagtcacaagggaaggaagctttcgcaaggggagagtaccctgcagcagtatacttctataccatggtactagagaacgaccttgatgctactgcgtttgccaaccggagcctgtgctggttgcggctgagggagggggccaaggctctgttagatgctcaacagtgcaaaatgatacggcctcgttggtcgaaggcatggtatcgcgagggcgcggctctcagcttgctgaaggactaccaaggggcagtcaacgcgttcacggaagcattgaaactggatcctgcaagtttagagatcaagaaagccttaagggaggccaccgattccctggcgaacgttggccgctccggagaacagaacccatgagctgctgctgcatccatgtgctttatctcacgttaagaatcctctaacactatgtggctcagcctcatattatatgttgatatatgtcgccttaacgcactgctggagatactagtttcgatctcagcctatatgttttgctccttcgggatgcagcctaagatacatgtggcaaccaagtgaggttgggcagggtagcatatctatggactggttgaactattatatgtatctggatatctaagtgcacctgttgctcctagtaaagttgcagttct

SEQ ID NO: 8700 - protein, 244 aa, Zea mays subsp. mays
  peptide (1)..(244): Ceres Seq. ID no. 12350294
MMAYCGGSLRCMKLLIEAGADVNLIAPSGVILAQAVCDGSTEIVKFLLEVGADPNIPDEDGKIPIMYPAFNGHRDLVEILFPKTRPVSSLPDWSVDGIIRSMKDLFFKPQDAAVVEKKIADAKSQGKEAFARGEYPAAVYFYTMVLENDLDATAFANRSLCWLRLREGAKALLDAQQCKMIRPRWSKAWYREGAALSLLKDYQGAVNAFTEALKLDPASLEIKKALREATDSLANVGRSGEQNP

SEQ ID NO: 8701 - protein, 243 aa, Zea mays subsp. mays
  peptide (1)..(243): Ceres Seq. ID no. 12350295
MAYCGGSLRCMKLLIEAGADVNLIAPSGVILAQAVCDGSTEIVKFLLEVGADPNIPDEDGKIPIMYPAFNGHRDLVEILFPKTRPVSSLPDWSVDGIIRSMKDLFFKPQDAAVVEKKIADAKSQGKEAFARGEYPAAVYFYTMVLENDLDATAFANRSLCWLRLREGAKALLDAQQCKMIRPRWSKAWYREGAALSLLKDYQGAVNAFTEALKLDPASLEIKKALREATDSLANVGRSGEQNP

SEQ ID NO: 8702 - protein, 233 aa, Zea mays subsp. mays
  peptide (1)..(233): Ceres Seq. ID no. 12350296
MKLLIEAGADVNLIAPSGVILAQAVCDGSTEIVKFLLEVGADPNIPDEDGKIPIMYPAFNGHRDLVEILFPKTRPVSSLPDWSVDGIIRSMKDLFFKPQDAAVVEKKIADAKSQGKEAFARGEYPAAVYFYTMVLENDLDATAFANRSLCWLRLREGAKALLDAQQCKMIRPRWSKAWYREGAALSLLKDYQGAVNAFTEALKLDPASLEIKKALREATDSLANVGRSGEQNP

SEQ ID NO: 8703 - DNA, 775 bp, Zea mays subsp. mays; identical to SEQ ID NO: 2416
  misc_feature (1)..(775): Ceres Seq. ID no. 12544805
  misc_feature (1)..(775): Ortholog of  Ceres SEQ ID NO 13575779 as cited in SEQ ID NO 20515

SEQ ID NO: 8704 - protein, 164 aa, Zea mays subsp. mays; identical to SEQ ID NO: 2417
  peptide (1)..(164): Ceres Seq. ID no. 12544806

SEQ ID NO: 8705 - protein, 141 aa, Zea mays subsp. mays; identical to SEQ ID NO: 2418
  peptide (1)..(141): Ceres Seq. ID no. 12544807

SEQ ID NO: 8706 - protein, 113 aa, Zea mays subsp. mays; identical to SEQ ID NO: 2419
  peptide (1)..(113): Ceres Seq. ID no. 12544808

SEQ ID NO: 8707 - DNA, 739 bp, Zea mays subsp. mays
  misc_feature (1)..(739): Ceres Seq. ID no. 12352966
  misc_feature (1)..(739): Ortholog of  Ceres SEQ ID NO 13581889 as cited in SEQ ID NO 50900
  misc_feature (1)..(739): Ortholog of  Ceres SEQ ID NO 13581902 as cited in SEQ ID NO 52223
  misc_feature (1)..(739): Ortholog of  Ceres SEQ ID NO 12585528 as cited in SEQ ID NO 62991
aatcactgccaaatcccccagaaaatcaactcctccccaattccacgctgccaccaactcgccgtcctccgcgccaagcaccaaagctccgatggcccgcacgaagcagacggcgcgcaagtcgacgggcggcaaggcgccccgcaagcagctggcgaccaaggcggcgcgcaagtctgcgccggccaccggcggcgtgaagaagccccaccgcttccgccccggcaccgtcgcgctccgggagatccgcaagtaccagaagagcacggagctgctcatccgcaagttgcccttccagcgcctcgtccgtgagatcgcgcaggacttcaagaccgatctccgcttccagtcctccgccgtcgccgcgctgcaggaggccgccgaggcctaccttgtggggctctttgaggacactaacctctgtgccatccacgccaagcgcgtcaccatcatgcccaaggacatccagctcgcgcgccgtatcaggggcgagagggcctgagcgaggctggctcctctcaccgcaggcggcgtcgttgttgcttcgggcctgcttgtaggacttgtgcttctcttggtttcctttctggtggcagtggcatcttggtaccattgtgcttgttcttagaatcttagggatagagagttgttcagttgctgggtaacctgattgtttatcttgcattcctgcctctgtaatggttgtctgctgtcttaatggaaatgatatttgctttct

SEQ ID NO: 8708 - protein, 166 aa, Zea mays subsp. mays
  peptide (1)..(166): Ceres Seq. ID no. 12352967
ITAKSPRKSTPPQFHAATNSPSSAPSTKAPMARTKQTARKSTGGKAPRKQLATKAARKSAPATGGVKKPHRFRPGTVALREIRKYQKSTELLIRKLPFQRLVREIAQDFKTDLRFQSSAVAALQEAAEAYLVGLFEDTNLCAIHAKRVTIMPKDIQLARRIRGERA

SEQ ID NO: 8709 - protein, 136 aa, Zea mays subsp. mays
  peptide (1)..(136): Ceres Seq. ID no. 12352968
MARTKQTARKSTGGKAPRKQLATKAARKSAPATGGVKKPHRFRPGTVALREIRKYQKSTELLIRKLPFQRLVREIAQDFKTDLRFQSSAVAALQEAAEAYLVGLFEDTNLCAIHAKRVTIMPKDIQLARRIRGERA

SEQ ID NO: 8710 - protein, 103 aa, Zea mays subsp. mays
  peptide (1)..(103): Ceres Seq. ID no. 12352969
NHCQIPQKINSSPIPRCHQLAVLRAKHQSSDGPHEADGAQVDGRQGAPQAAGDQGGAQVCAGHRRREEAPPLPPRHRRAPGDPQVPEEHGAAHPQVALPAPRP

SEQ ID NO: 8711 - DNA, 1396 bp, Zea mays subsp. mays
  misc_feature (1)..(1396): Ceres Seq. ID no. 12407155
  misc_feature (1)..(1396): Ortholog of  Ceres SEQ ID NO 12578784 as cited in SEQ ID NO 20729
  misc_feature (1)..(1396): Ortholog of  Ceres SEQ ID NO 13658847 as cited in SEQ ID NO 66674
agtcacaactcacaatcacccagcgacagacaacaactacccagtccgtcgtcccggcttccgtgcgggccggggtttcccacgagcgcgcacggcacggcgccgccagcaaggtcacgagtcgggtggaggcatcggacatggccaccacgacggtgacgacgactgcggaggcggcgagcgcgcccgggaagcggcgcggcggggggtgntgcgccctcgcggcggcggcggcgagcgtcgtgcccgtgaaggcggcgggtgagcaggggcagcagccgctgccgctgccgcggctggnncggttcnaggagctnccggactacctgcgcgacaacgagttcatccacgcgcactaccgctgcgagtggtccgtccgcgacgcgnngcgcagcgccctcgcctggcacaacgagacgctcaacgtctggagccatctcggaggcttcttcctgttcctgtacctcgccgtcgccgagccaacggggacggtggccggcggcgccggcgccggagccgccccgggtatcgtgacgttcgtgctcgcgtcggccaacacctcctggtcttcgtgggaggccagcagtaactcgagcttgacggccagcaagggtttgatggccgtgttcgggagcagcgacggcgacgcccacgcggtgccgaggtggccgcggacggtgttcctggcgggcgcgatggcgtgcctggcggtgagcgcggcggcgcacctgctggcgtgccactcgcgccgcttcacgcgcctcttctggcagctcgactacgcggggatcgcggtgatgatcgtcgcctccttcttccctcccgtctactacgccttcctcggccgcgcccgcacgcagctcgtctacctgtccgccgtcaccctgctgggcctgctggtggtggcgctgctcctggcgcccgcgcgctcgtcgccgcgcctgcgccacctccgcgccggcctcttcgtgtccatggccttctccggggtgctgccggcgctgcacgcgctgtggctcaactgggtacaccgcgagtgccacctcgcgctggcgctcgagctcctcatgggcctcgtgtacgccgccggcgccgggttctacgtcacccgcgtgccggagcgctggagccccggcaggttcgactgcgtcggccacagccaccagatcttccacgtgctcgtgctcgtcggcgcgctcacgcactacgccgccaccgccatcctcatcgactggcgagaggcgatggccgtcgctgccggcggggcatcggtgctctcgtgatccgtgactgcaaagcagcgcagtgtatatgtaggtgaagggggtactatcgattcgttcattctttgtacgcgacgtcgatttatttacctcaatcgaaatatttgttcggc

SEQ ID NO: 8712 - protein, 426 aa, Zea mays subsp. mays
  peptide (1)..(426): Ceres Seq. ID no. 12407156
  misc_feature (70)..(70): Xaa is any aa, unknown or other
  misc_feature (100)..(100): Xaa is any aa, unknown or other
  misc_feature (103)..(103): Xaa is any aa, unknown or other
  misc_feature (105)..(105): Xaa is any aa, unknown or other
  misc_feature (129)..(129): Xaa is any aa, unknown or other
SQLTITQRQTTTTQSVVPASVRAGVSHERARHGAASKVTSRVEASDMATTTVTTTAEAASAPGKRRGGGXCALAAAAASVVPVKAAGEQGQQPLPLPRLXRFXEXPDYLRDNEFIHAHYRCEWSVRDAXRSALAWHNETLNVWSHLGGFFLFLYLAVAEPTGTVAGGAGAGAAPGIVTFVLASANTSWSSWEASSNSSLTASKGLMAVFGSSDGDAHAVPRWPRTVFLAGAMACLAVSAAAHLLACHSRRFTRLFWQLDYAGIAVMIVASFFPPVYYAFLGRARTQLVYLSAVTLLGLLVVALLLAPARSSPRLRHLRAGLFVSMAFSGVLPALHALWLNWVHRECHLALALELLMGLVYAAGAGFYVTRVPERWSPGRFDCVGHSHQIFHVLVLVGALTHYAATAILIDWREAMAVAAGGASVLS

SEQ ID NO: 8713 - protein, 380 aa, Zea mays subsp. mays
  peptide (1)..(380): Ceres Seq. ID no. 12407157
  misc_feature (24)..(24): Xaa is any aa, unknown or other
  misc_feature (54)..(54): Xaa is any aa, unknown or other
  misc_feature (57)..(57): Xaa is any aa, unknown or other
  misc_feature (59)..(59): Xaa is any aa, unknown or other
  misc_feature (83)..(83): Xaa is any aa, unknown or other
MATTTVTTTAEAASAPGKRRGGGXCALAAAAASVVPVKAAGEQGQQPLPLPRLXRFXEXPDYLRDNEFIHAHYRCEWSVRDAXRSALAWHNETLNVWSHLGGFFLFLYLAVAEPTGTVAGGAGAGAAPGIVTFVLASANTSWSSWEASSNSSLTASKGLMAVFGSSDGDAHAVPRWPRTVFLAGAMACLAVSAAAHLLACHSRRFTRLFWQLDYAGIAVMIVASFFPPVYYAFLGRARTQLVYLSAVTLLGLLVVALLLAPARSSPRLRHLRAGLFVSMAFSGVLPALHALWLNWVHRECHLALALELLMGLVYAAGAGFYVTRVPERWSPGRFDCVGHSHQIFHVLVLVGALTHYAATAILIDWREAMAVAAGGASVLS

SEQ ID NO: 8714 - protein, 221 aa, Zea mays subsp. mays
  peptide (1)..(221): Ceres Seq. ID no. 12407158
MAVFGSSDGDAHAVPRWPRTVFLAGAMACLAVSAAAHLLACHSRRFTRLFWQLDYAGIAVMIVASFFPPVYYAFLGRARTQLVYLSAVTLLGLLVVALLLAPARSSPRLRHLRAGLFVSMAFSGVLPALHALWLNWVHRECHLALALELLMGLVYAAGAGFYVTRVPERWSPGRFDCVGHSHQIFHVLVLVGALTHYAATAILIDWREAMAVAAGGASVLS

SEQ ID NO: 8715 - DNA, 1452 bp, Zea mays subsp. mays
  misc_feature (1)..(1452): Ceres Seq. ID no. 12405369
  misc_feature (1)..(1452): Ortholog of  Ceres SEQ ID NO 15168537 as cited in SEQ ID NO 57100
  misc_feature (1)..(1452): Ortholog of  Ceres SEQ ID NO 15178681 as cited in SEQ ID NO 63192
  misc_feature (1)..(1452): Ortholog of  Ceres SEQ ID NO 13579918 as cited in SEQ ID NO 64644
gttctacgcccatttggcgagcaacgacatgagccccgcgccgaggaacagggcgacgtacgccgccagctggagcttggcgttcgtctgcagcctcgggttgctgaagtccgcggcgaggagatcgaccagggacatgtacaccaggatccctgcggcggccgcgttgaagacgccctccacgaccagggcggtggcgccgtgcctgctgtagccggaagcgatggcgatgcccagcgcgatgcccgcgggagcggtgagcgagaagaaggccgccatgaccacggccgccctcgccttgaactctgcctggataggtatcgacggattgtgctcagggaaaaggacaggttgtttgtttgttttttcttcatggcatggcgtgtgttcttgtcgaggaggtgccccaagtgggcgttcggaatgctgggaaggtgctcacctgagagatcaccctgtgcctgatggacacggcgacggcggaggcatcctgaggcgaggcaccggnngtggccgtgccctccgtgggcgtgcgtgtgcgcgtgcacgtggcccgcgggctcggcggcggcgccctcntcgtccgcgggcgccgcgcggccctggcctccgtcgacggcgtcgtcgtcgacggggcgcgccttgcggatgtgcgcgcgctggtagtagcccgcggcggcggagtcgaccatcatggtggccatggcagagcacatggcgacgagtcccgcgtaggggaacccgccggccctggcgccgccgccgcaggggggcgcgagcgcgtcgaaggccgcgggcaggatgtgcaccatgccggtggcgaggatgacccccgcggcgaacgccttgacggcgaagaagacgtccccgtcggggcgcagcgccgaggcggagcggcccagcagcgggaccagcacccccgccgcgcccgacgccaggatggacgccaccgcgacgagcttcagccgcagcgccccgcgcgcgtcctcctccttgatcgccgccgcctcgccgccgccacaatcgcaccccacgcccgccgctgccgccgcgccgaccccgggcgtcacctgaacgaggagcagtagcacagcgagccacgccggcagagacgggggaagaggaacccgaactcgcgtggcgtccatggcgtgcgcgcacgtgcgcctggcgtgggagagagggccggtgcggtgagtgacggagggagggagtcggcgccgcgcgcgcgctgagctatataaagctccgcggccgcgagtgtggtgacatggtgagctcacactccggcaacgccgctttgaagcgtggtgggccctgagcagtgtgcaccgtccgatctgggtgtgtgggcacgctctccaactggcagcaagtgttggtgttgccgtggaccttttgtcgtgattgtttggaaaaaacggatcaggtttgccaaaaaaaaaaaaaaaa

SEQ ID NO: 8716 - protein, 201 aa, Zea mays subsp. mays
  peptide (1)..(201): Ceres Seq. ID no. 12405370
  misc_feature (95)..(95): Xaa is any aa, unknown or other
  misc_feature (96)..(96): Xaa is any aa, unknown or other
  misc_feature (119)..(119): Xaa is any aa, unknown or other
MAMPSAMPAGAVSEKKAAMTTAALALNSAWIGIDGLCSGKRTGCLFVFSSWHGVCSCRGGAPSGRSECWEGAHLRDHPVPDGHGDGGGILRRGTXXGRALRGRACARARGPRARRRRPXRPRAPRGPGLRRRRRRRRGAPCGCARAGSSPRRRSRPSWWPWQSTWRRVPRRGTRRPWRRRRRGARARRRPRAGCAPCRWRG

SEQ ID NO: 8717 - protein, 199 aa, Zea mays subsp. mays
  peptide (1)..(199): Ceres Seq. ID no. 12405371
  misc_feature (93)..(93): Xaa is any aa, unknown or other
  misc_feature (94)..(94): Xaa is any aa, unknown or other
  misc_feature (117)..(117): Xaa is any aa, unknown or other
MPSAMPAGAVSEKKAAMTTAALALNSAWIGIDGLCSGKRTGCLFVFSSWHGVCSCRGGAPSGRSECWEGAHLRDHPVPDGHGDGGGILRRGTXXGRALRGRACARARGPRARRRRPXRPRAPRGPGLRRRRRRRRGAPCGCARAGSSPRRRSRPSWWPWQSTWRRVPRRGTRRPWRRRRRGARARRRPRAGCAPCRWRG

SEQ ID NO: 8718 - protein, 195 aa, Zea mays subsp. mays
  peptide (1)..(195): Ceres Seq. ID no. 12405372
  misc_feature (89)..(89): Xaa is any aa, unknown or other
  misc_feature (90)..(90): Xaa is any aa, unknown or other
  misc_feature (113)..(113): Xaa is any aa, unknown or other
MPAGAVSEKKAAMTTAALALNSAWIGIDGLCSGKRTGCLFVFSSWHGVCSCRGGAPSGRSECWEGAHLRDHPVPDGHGDGGGILRRGTXXGRALRGRACARARGPRARRRRPXRPRAPRGPGLRRRRRRRRGAPCGCARAGSSPRRRSRPSWWPWQSTWRRVPRRGTRRPWRRRRRGARARRRPRAGCAPCRWRG

SEQ ID NO: 8719 - DNA, 1488 bp, Zea mays subsp. mays
  misc_feature (1)..(1488): Ceres Seq. ID no. 12349268
  misc_feature (1)..(1488): Ortholog of  Ceres SEQ ID NO 14306797 as cited in SEQ ID NO 53354
  misc_feature (1)..(1488): Ortholog of  Ceres SEQ ID NO 15176525 as cited in SEQ ID NO 54495
  misc_feature (1)..(1488): Ortholog of  Ceres SEQ ID NO 15169519 as cited in SEQ ID NO 67237
aagatcaagccaccaccaccgccagcaagagcagagaggcgagaccgcgagagtgtacgtgccaccagcagcagcagcaatggccgccgccgccaccacctcctcatcctcccacctgctcctcctctcccgccagcaggcggcctccctacgatgccgcctctccttcctcggccagcccagaaggcccggcagggtcacggcccaggcgccggccgctaaggacgtgcggtgcatggcggccgtggacactgcggcgtccgcggcggcggcggagacgagccccaagtcgagcagcagctacgagatcgtgacgctcacgacgtggctgctgcagcaggagcggaccggcgcgatcgacaacgagatgaccatcgtgctggccagcatatccacggcgtgcaagcagatcgccgcgctggtgcagcgcgcgcccatctccaacctcacgggcgttcagggcgccgtcaacgtgcagggcgaggaccagaagaagctcgatgtcgtctccaacgaggtgttctccaactgcctcaagtcgagcgggcgcaccggcgtgatcgcctcggaggaggaggacgtgcccgtagcggtggagcagagctactccggcaactacatcgtcgtgttcgaccctctcgacggctcctccaacatcgacgccgccgtctccactggctccatcttcggcatctacaaccccaacgacgagtgcctcgccgacgtcgacgacaatgacacccttgattcggtggagcagaggtgcatcgtgaacgtgtgccagccggggagcaacctgctggccgccggctactgcatgtactcgagctccgtgatcttcgtgctcaccgtcggcaccggggtgtacgtgttcacgctggaccccatgtacggcgagttcgtgctgacgcaggagaaggtgcagatccccaaggcgggcaagatctacgccttcaacgagggcaactacgcgctctgggacgacaagctgaagctgtacatggacagcctcaaggagcccggcgactcggggaagccctactccgcgcggtacatcggcagcctcgtcggcgacttccaccgcactctgctctacggagggatctacgggtaccccagggacaagaagagcaagaacggcaagctgcggcttctctacgagtgcgcccccatgagcttcatcgtcgagcaggccggtggcaagggctctgacggccaccagagaattcttgacatcacacctacagagatccaccaaagagtgcctctgtacattgggagcgtggaggaagtggacaaggtggagaaattcctggcttgaataccagagctctctcatcagatggactcccgaagacatcaagtttagggagggaatatgcatgtactctctctttcccaccccaaataagtcttcttcatctcatatttctcatctcatatttcgataaatcaaacaatctcaattttgatctaatatatatacac

SEQ ID NO: 8720 - protein, 439 aa, Zea mays subsp. mays
  peptide (1)..(439): Ceres Seq. ID no. 12349269
RSSHHHRQQEQRGETARVYVPPAAAAMAAAATTSSSSHLLLLSRQQAASLRCRLSFLGQPRRPGRVTAQAPAAKDVRCMAAVDTAASAAAAETSPKSSSSYEIVTLTTWLLQQERTGAIDNEMTIVLASISTACKQIAALVQRAPISNLTGVQGAVNVQGEDQKKLDVVSNEVFSNCLKSSGRTGVIASEEEDVPVAVEQSYSGNYIVVFDPLDGSSNIDAAVSTGSIFGIYNPNDECLADVDDNDTLDSVEQRCIVNVCQPGSNLLAAGYCMYSSSVIFVLTVGTGVYVFTLDPMYGEFVLTQEKVQIPKAGKIYAFNEGNYALWDDKLKLYMDSLKEPGDSGKPYSARYIGSLVGDFHRTLLYGGIYGYPRDKKSKNGKLRLLYECAPMSFIVEQAGGKGSDGHQRILDITPTEIHQRVPLYIGSVEEVDKVEKFLA

SEQ ID NO: 8721 - protein, 413 aa, Zea mays subsp. mays
  peptide (1)..(413): Ceres Seq. ID no. 12349270
MAAAATTSSSSHLLLLSRQQAASLRCRLSFLGQPRRPGRVTAQAPAAKDVRCMAAVDTAASAAAAETSPKSSSSYEIVTLTTWLLQQERTGAIDNEMTIVLASISTACKQIAALVQRAPISNLTGVQGAVNVQGEDQKKLDVVSNEVFSNCLKSSGRTGVIASEEEDVPVAVEQSYSGNYIVVFDPLDGSSNIDAAVSTGSIFGIYNPNDECLADVDDNDTLDSVEQRCIVNVCQPGSNLLAAGYCMYSSSVIFVLTVGTGVYVFTLDPMYGEFVLTQEKVQIPKAGKIYAFNEGNYALWDDKLKLYMDSLKEPGDSGKPYSARYIGSLVGDFHRTLLYGGIYGYPRDKKSKNGKLRLLYECAPMSFIVEQAGGKGSDGHQRILDITPTEIHQRVPLYIGSVEEVDKVEKFLA

SEQ ID NO: 8722 - protein, 361 aa, Zea mays subsp. mays
  peptide (1)..(361): Ceres Seq. ID no. 12349271
MAAVDTAASAAAAETSPKSSSSYEIVTLTTWLLQQERTGAIDNEMTIVLASISTACKQIAALVQRAPISNLTGVQGAVNVQGEDQKKLDVVSNEVFSNCLKSSGRTGVIASEEEDVPVAVEQSYSGNYIVVFDPLDGSSNIDAAVSTGSIFGIYNPNDECLADVDDNDTLDSVEQRCIVNVCQPGSNLLAAGYCMYSSSVIFVLTVGTGVYVFTLDPMYGEFVLTQEKVQIPKAGKIYAFNEGNYALWDDKLKLYMDSLKEPGDSGKPYSARYIGSLVGDFHRTLLYGGIYGYPRDKKSKNGKLRLLYECAPMSFIVEQAGGKGSDGHQRILDITPTEIHQRVPLYIGSVEEVDKVEKFLA

SEQ ID NO: 8723 - DNA, 1142 bp, Zea mays subsp. mays
  misc_feature (1)..(1142): Ceres Seq. ID no. 12376498
  misc_feature (1)..(1142): Ortholog of  Ceres SEQ ID NO 15175591 as cited in SEQ ID NO 57544
gcacgagaccattacctagaacatcctaatcgaaaagccgagcagcaaaccaaccagcccacccgccggttggtcacgctcctccccgatcccgaattcccgatctccggccgacgccatggcagccccctccgcggccgtcataggggtgctcgtcctcctcgtcgtgggggcctcgggcgcgcgcctcccaggccgcggcagcaccacccggggagctgcgctgccgcgcgggggagcgccggccacggcggtgttcgcgctgggaagcttctggcggtcggaggcggcgttcgggtgcctccacggcgtgatccgcacctccgtcggctacgctggcggctccaagtccaaccccgagtaccgcaacctcgccgaccacgccgagtgcgtcaaggttgagtatgatccccggttgattcactacaggcaacttttggatgtgttctgggcaagtcatgacccacgtgaggtgtttgggcaagggccagatgttggcaaccagtatagatctgtcatcttcactaatggaaccatcgaggccagattggctggtcttagcaaagaaaaagaacaagctaaagaccgtagcagcgttgttaccacacagatccaaccattgggggtctttcatcatgctgaaccagaacatcagaaatttgaactgaagcgtaaaccgttcctcttgcaattgattgggaatttgccggaggaggagctcctgacatcaacactagctgcaaaactgaatgcatatgccgctgagctctgccctgtgaatacccaaaagagaattaactccaagattgatgaggtcacaaagaaaggatggcccattttaagggacatttaactctttctagcttttggactgaaaccgatcgatgcaatgtagacacagaagaggtgcatgattttgcaaagaagatttttaggaatatttcagctgttcgccactgccatgatgacctcaatcatccattcttcattttgctcacaaagattatatagttggtcataacatgtcgttgtgttacgatatttgtaacgcatattcatggttcgaagcttactcaacagacaactttttttcgtattgtttgtttttcatttatgaaaatatagatgttttgtttttattg

SEQ ID NO: 8724 - protein, 244 aa, Zea mays subsp. mays
  peptide (1)..(244): Ceres Seq. ID no. 12376499
MAAPSAAVIGVLVLLVVGASGARLPGRGSTTRGAALPRGGAPATAVFALGSFWRSEAAFGCLHGVIRTSVGYAGGSKSNPEYRNLADHAECVKVEYDPRLIHYRQLLDVFWASHDPREVFGQGPDVGNQYRSVIFTNGTIEARLAGLSKEKEQAKDRSSVVTTQIQPLGVFHHAEPEHQKFELKRKPFLLQLIGNLPEEELLTSTLAAKLNAYAAELCPVNTQKRINSKIDEVTKKGWPILRDI

SEQ ID NO: 8725 - protein, 133 aa, Zea mays subsp. mays
  peptide (1)..(133): Ceres Seq. ID no. 12376500
ARDHYLEHPNRKAEQQTNQPTRRLVTLLPDPEFPISGRRHGSPLRGRHRGARPPRRGGLGRAPPRPRQHHPGSCAAARGSAGHGGVRAGKLLAVGGGVRVPPRRDPHLRRLRWRLQVQPRVPQPRRPRRVRQG

SEQ ID NO: 8726 - DNA, 1498 bp, Zea mays subsp. mays
  misc_feature (1)..(1498): Ceres Seq. ID no. 13570285
  misc_feature (1)..(1498): Ortholog of  Ceres SEQ ID NO 14302243 as cited in SEQ ID NO 64663
agcaaaaaggaagagtaacagggaggccggaatctttcgatcgagggcaccaccggcggcgggggtagtagcacaggaggggagccgtggagcgatccgtcgggcatctgcgcccgatgtgggcgtggggctgcgtcgagcgcgtggccgcgggcttcctcggcggccccctcgccgccggcggccgctggaacaccgccgtcgccgtcggggtcacggccgccgcgggcctcgtgctcgtcgccatcgtcgtctcttcccgcagaggcgggctcaaatctccgtggtggcggcggcggaggaaggcgccacttacggcgcaagagtggtgcgacctgttcacaccgcaggggaagcttcaggacggcggagtgaagcttctgaagaaagttcggagcggagggattgaaccgagtatcagagcgcaagtctggccgttccttctgggagtgtaagtaatctggagtgttgatcacgaaaccgttgttttcatgcttggagatgtacaattagatccacacgatactttggaacaagatatgtgcrkgctaattccttaattacttcatmcgaagagattatattgcaattataataacattaaccatggtccatgagatggatgaacctgcattttasggagacakgtactttatatcatcaagctgaacttaagaagttgtggactactaaatgggcacaacaaaattcataaattttcttgctagatgtacaaatgaacacgcaatatttgtttttttctttattttttccacagttcaaccagatttgacgtsgtgkadggccattgaaggaccacatttatttgcatctgawccatctgccgcctgaggttytcaaagaraggctccctggcatttctgaaactgctgctatttttgctggtgttgacgtcaccaaggagcccattccagttttgcctactgtgcwytacaatatgggtggtatcccaacgaactaccatggggaggtagtggatatcaagggtgataatccagatgctgttrtycctggkctaatggctgctggtgaagcagcctgtgcatctgttcatggtgcgaataggctaggcgcaaattcgcttcttgacatagttgtttttggcagagcttgtgcaaacagggtagcagatatttctaaaccaggtgagaagcagaaacctctggaaaaagatgctggagaaaagaccatagcctggttggacaagctgaggaatgcgaatgggtcattgccaacttccaagatccgtctcaacatgcagcgtgttatgcaaaataatgctgctgtattccgtacacaagaaacacttgaagaaggttgtgagctgattagcaaaacatgggaaagtttccatgatgtgaagctcagtgaccggagtctcatttggaactctgacctgatagagacccttgagctggaaaatcttttgataaatgcatgcataaccatgtwttcggcagaggctcggaaggaaagc

SEQ ID NO: 8727 - protein, 180 aa, Zea mays subsp. mays
  peptide (1)..(180): Ceres Seq. ID no. 15222583
  misc_feature (24)..(24): Xaa is any aa, unknown or other
  misc_feature (26)..(26): Xaa is any aa, unknown or other
  misc_feature (172)..(172): Xaa is any aa, unknown or other
MGGIPTNYHGEVVDIKGDNPDAVXPXLMAAGEAACASVHGANRLGANSLLDIVVFGRACANRVADISKPGEKQKPLEKDAGEKTIAWLDKLRNANGSLPTSKIRLNMQRVMQNNAAVFRTQETLEEGCELISKTWESFHDVKLSDRSLIWNSDLIETLELENLLINACITMXSAEARKES

SEQ ID NO: 8728 - protein, 153 aa, Zea mays subsp. mays
  peptide (1)..(153): Ceres Seq. ID no. 15222584
  misc_feature (145)..(145): Xaa is any aa, unknown or other
MAAGEAACASVHGANRLGANSLLDIVVFGRACANRVADISKPGEKQKPLEKDAGEKTIAWLDKLRNANGSLPTSKIRLNMQRVMQNNAAVFRTQETLEEGCELISKTWESFHDVKLSDRSLIWNSDLIETLELENLLINACITMXSAEARKES

SEQ ID NO: 8729 - protein, 135 aa, Zea mays subsp. mays
  peptide (1)..(135): Ceres Seq. ID no. 15222585
AKRKSNREAGIFRSRAPPAAGVVAQEGSRGAIRRASAPDVGVGLRRARGRGLPRRPPRRRRPLEHRRRRRGHGRRGPRARRHRRLFPQRRAQISVVAAAEEGATYGARVVRPVHTAGEASGRRSEASEESSERRD

SEQ ID NO: 8730 - DNA, 1649 bp, Zea mays subsp. mays
  misc_feature (1)..(1649): Ceres Seq. ID no. 12372859
  misc_feature (1)..(1649): Ortholog of  Ceres SEQ ID NO 14315063 as cited in SEQ ID NO 52256
  misc_feature (1)..(1649): Ortholog of  Ceres SEQ ID NO 13594345 as cited in SEQ ID NO 58043
  misc_feature (1)..(1649): Ortholog of  Ceres SEQ ID NO 14308594 as cited in SEQ ID NO 60384
  misc_feature (1)..(1649): Ortholog of  Ceres SEQ ID NO 12614112 as cited in SEQ ID NO 60891
  misc_feature (1)..(1649): Ortholog of  Ceres SEQ ID NO 13596513 as cited in SEQ ID NO 62279
  misc_feature (1)..(1649): Ortholog of  Ceres SEQ ID NO 14302832 as cited in SEQ ID NO 64926
  misc_feature (1)..(1649): Ortholog of  Ceres SEQ ID NO 13662880 as cited in SEQ ID NO 65422
  misc_feature (1)..(1649): Ortholog of  Ceres SEQ ID NO 13596089 as cited in SEQ ID NO 68373
tagttcatttatgatttcctgcgagcacaaagctagcgaagataccaaacaatggggagcacgagcgccacaggcaccacgtcgtcttcctcatcggctgcccacgggggcggtgccgcacacgtactgctcctgccgtacccgggcgcgcagggccatacaaacccgctgctccagttcggccgctgcctcgcctaccacggcctccgccccacgctcgtcacctcgcggtacgtgctctccaccaccccgcctcccggggagcccttcagggtggccgccatttccgatggcttcgacgacggcggggcggccgcgtgccccgacctcgacgtgtactggcgccagctcgaggccgtcggctcggagacgctggcggagctgatccgctccgaggccgccgatgggcggcctgtgcgcgtgctggtttacgacccgcacctgccgtgggcgcgacgggtggcacaggcggccgggctggcggcagcggcgttcctatcgcagccatgcgccgtcgacgtcgtctacggggaggtgtgtgcaggacggctgccactgccggtggtggacgggaaagagctgtttgcacgcgggctgctgggtgtcgagctcggtcccgacgacgttccgccgttcgcagcaaagccagactggtgccctgtgttccttcgggcatcactgcggcaatttgaggggctggaggacgccgacgacgtgctcgtcaactcattccacgagatcgaacccaaggaggcagattatatggccctaacatggcatgcaaagacaataggcccaactttgccatcattttatcttgatgatgaccgtttgcccttgaacaagacttacggtttcaacctcttcaacagcagcgagtcatgtctggcttggcttgacaaacagcttccgtgttctgttgttcttgtatcctatggtactgtctctgattatgatgaagcacagttagaggagcttggcaatggattgtacaattctggcaaaccattcatttgggttgtgaggtcaaacgaagaacacaagttgtccaatgaacttcgtgacaagtgcaaggaacgtggccttattgtttcttggtgcccccagctggaagttctagcacataaagctacaggttgtttcttcacacattgcggatggaactcgacattggaagcaattgttaatggtgtgccaatggtggcaataccacactgggcagaccagccgaccatatcaaaatatatggagagcatgtggggcttgggtgtccgagtgcgcaaggatgagaaaggcttggtaacgagggacgaggtggaaaggtgcatcaaggatgtcatggatggtgatagtaaggataagtataggaagagtgccactatgtggatgcaaaaggccaaggcagctatgcagaatggagggagctcggccaagaatattacagaattcgccgcgaagtattctttaagttaatttttcaaatatttcgtaaaaaaagttaattttcaaagatataatgatagtgttataattacttcctataccttcatggattgtatgccttcctgcatgttatatttttgtctcgggattgtgcgtattacgttttgacttgatgatgtacatgctacagcagcaacctccacgtc

SEQ ID NO: 8731 - protein, 473 aa, Zea mays subsp. mays
  peptide (1)..(473): Ceres Seq. ID no. 12372860
MGSTSATGTTSSSSSAAHGGGAAHVLLLPYPGAQGHTNPLLQFGRCLAYHGLRPTLVTSRYVLSTTPPPGEPFRVAAISDGFDDGGAAACPDLDVYWRQLEAVGSETLAELIRSEAADGRPVRVLVYDPHLPWARRVAQAAGLAAAAFLSQPCAVDVVYGEVCAGRLPLPVVDGKELFARGLLGVELGPDDVPPFAAKPDWCPVFLRASLRQFEGLEDADDVLVNSFHEIEPKEADYMALTWHAKTIGPTLPSFYLDDDRLPLNKTYGFNLFNSSESCLAWLDKQLPCSVVLVSYGTVSDYDEAQLEELGNGLYNSGKPFIWVVRSNEEHKLSNELRDKCKERGLIVSWCPQLEVLAHKATGCFFTHCGWNSTLEAIVNGVPMVAIPHWADQPTISKYMESMWGLGVRVRKDEKGLVTRDEVERCIKDVMDGDSKDKYRKSATMWMQKAKAAMQNGGSSAKNITEFAAKYSLS

SEQ ID NO: 8732 - protein, 236 aa, Zea mays subsp. mays
  peptide (1)..(236): Ceres Seq. ID no. 12372861
MALTWHAKTIGPTLPSFYLDDDRLPLNKTYGFNLFNSSESCLAWLDKQLPCSVVLVSYGTVSDYDEAQLEELGNGLYNSGKPFIWVVRSNEEHKLSNELRDKCKERGLIVSWCPQLEVLAHKATGCFFTHCGWNSTLEAIVNGVPMVAIPHWADQPTISKYMESMWGLGVRVRKDEKGLVTRDEVERCIKDVMDGDSKDKYRKSATMWMQKAKAAMQNGGSSAKNITEFAAKYSLS

SEQ ID NO: 8733 - DNA, 1205 bp, Zea mays subsp. mays
  misc_feature (1)..(1205): Ceres Seq. ID no. 12361617
  misc_feature (1)..(1205): Ortholog of  Ceres SEQ ID NO 13663839 as cited in SEQ ID NO 60834
  misc_feature (1)..(1205): Ortholog of  Ceres SEQ ID NO 14313284 as cited in SEQ ID NO 67146
  misc_feature (1)..(1205): Ortholog of  Ceres SEQ ID NO 14308925 as cited in SEQ ID NO 0
ctctcgattcggaaaacctccaaccctagccgcgatccgacaacgcctccatccctagccgactgctgcaagcttcagagctcaagagtcagggcgccatggcgacagagacggagaccttcgcctttcaggctgagatcaaccagctgctctcactcatcatcaacaccttctattccaacaaggagatcttcctccgggagctcatttccaactcttccgatgcgttggacaaaatcaggttcgagagcctcactgacaagagcaagctcgatgcgcagccggagctgttcatccacattgtaccagacaaggcttcgaacacgctctccatcatcgacagcggcatcggcatgaccaagtccgaccttgtcaacaacctcggtaccatcgccaggtccgggaccaaggagttcatggaagcccttgctgctggcgctgatgtgtctatgattgggcagttcggtgtcggtttctactctgcctacctcgtcgccgagagggtcgtcgtgaccaccaagcataacgatgacgagcagtacgtgtgggaatcccaggcgggcgggtcgttcactgttactcgtgacacgtctggggagcagcttggcaggggtactaagattacacttttcctcaaggaagatcagttagaataccttgaggagcgtcgcctcaaggatttggtcaagaagcactctgagttcatcagctaccccatctccctgtggaccgaaaagacaacggagaaggagatttctgatgatgaagatgaggaagagaagaaagacgctgaggagggaaaggttgaggatgttgacgaggagaaggaagagaaagaaaaaaagaaaaagaagatcaaggaggtttctcacgagtggtcattgatcaacaagcagaagcccatctggatgaggaagccagaagagatcacaaaggaagaatatgctgccttctacaaaagcttgacaaatgactgggaggagcatctggctgtgaagcacttctctgtggagggtcagctggagttcaaggctgttctctttgttcctaagagggccccgtttgatctcttcgacacaaggaagaagcaaaacaacatcaagctctatgtgcgcagggtgtttatcatggacaactgtgaggaactgatccctgagtggctgagttttgttaagggtattgttgactctgaggaccttcccctc

SEQ ID NO: 8734 - protein, 369 aa, Zea mays subsp. mays
  peptide (1)..(369): Ceres Seq. ID no. 12361618
MATETETFAFQAEINQLLSLIINTFYSNKEIFLRELISNSSDALDKIRFESLTDKSKLDAQPELFIHIVPDKASNTLSIIDSGIGMTKSDLVNNLGTIARSGTKEFMEALAAGADVSMIGQFGVGFYSAYLVAERVVVTTKHNDDEQYVWESQAGGSFTVTRDTSGEQLGRGTKITLFLKEDQLEYLEERRLKDLVKKHSEFISYPISLWTEKTTEKEISDDEDEEEKKDAEEGKVEDVDEEKEEKEKKKKKIKEVSHEWSLINKQKPIWMRKPEEITKEEYAAFYKSLTNDWEEHLAVKHFSVEGQLEFKAVLFVPKRAPFDLFDTRKKQNNIKLYVRRVFIMDNCEELIPEWLSFVKGIVDSEDLPL

SEQ ID NO: 8735 - protein, 284 aa, Zea mays subsp. mays
  peptide (1)..(284): Ceres Seq. ID no. 12361619
MTKSDLVNNLGTIARSGTKEFMEALAAGADVSMIGQFGVGFYSAYLVAERVVVTTKHNDDEQYVWESQAGGSFTVTRDTSGEQLGRGTKITLFLKEDQLEYLEERRLKDLVKKHSEFISYPISLWTEKTTEKEISDDEDEEEKKDAEEGKVEDVDEEKEEKEKKKKKIKEVSHEWSLINKQKPIWMRKPEEITKEEYAAFYKSLTNDWEEHLAVKHFSVEGQLEFKAVLFVPKRAPFDLFDTRKKQNNIKLYVRRVFIMDNCEELIPEWLSFVKGIVDSEDLPL

SEQ ID NO: 8736 - protein, 263 aa, Zea mays subsp. mays
  peptide (1)..(263): Ceres Seq. ID no. 12361620
MEALAAGADVSMIGQFGVGFYSAYLVAERVVVTTKHNDDEQYVWESQAGGSFTVTRDTSGEQLGRGTKITLFLKEDQLEYLEERRLKDLVKKHSEFISYPISLWTEKTTEKEISDDEDEEEKKDAEEGKVEDVDEEKEEKEKKKKKIKEVSHEWSLINKQKPIWMRKPEEITKEEYAAFYKSLTNDWEEHLAVKHFSVEGQLEFKAVLFVPKRAPFDLFDTRKKQNNIKLYVRRVFIMDNCEELIPEWLSFVKGIVDSEDLPL

SEQ ID NO: 8737 - DNA, 732 bp, Zea mays subsp. mays
  misc_feature (1)..(732): Ceres Seq. ID no. 12401713
  misc_feature (1)..(732): Ortholog of  Ceres SEQ ID NO 14313670 as cited in SEQ ID NO 54491
ttgatgatgaggagaggccctatttacctaagcacattctctacaggcaaaaggaacagttcagtgatggtgttgggtatagttggatcgatggattgaaggaccatgccagccaacatgtctccgattccatgatgatgaatgctggctttgtttacccagagaacacacccacaacaaaagaagggtactactacagaatgatattcgagaaattctttcccaagcctgcagcaaggtcaactgttcctggaggtcctagtgtggcctgcagcactgccaaagctgttgaatgggacgcatcctggtccaagaaccttgatccttctggccgtgctgctttgggtgttcacgatgctgcgtatgaagacactgcagggaaaactcctgcctctgctgatcctgtctcagacaagggccttcgtccagctattggcgaaagcctagggacacccgttgcttcagccacagctgtctaaccttatgtttatcacccagcaatgcttgaaacagcaaaggttgtccattgcttgtttcagtttccttccgatcatgtttttagttccatcaatcaagcaatggagacatgcttgtgcttcatacttggcagcatcgtgtttgggttttcactgggcagtactgtttaatttttatggactgaaaagactcagttttgtaaatattcgtcactgtgaccaattcctgtggtggtttatgtgatntgcagattgc

SEQ ID NO: 8738 - protein, 158 aa, Zea mays subsp. mays
  peptide (1)..(158): Ceres Seq. ID no. 12401714
DDEERPYLPKHILYRQKEQFSDGVGYSWIDGLKDHASQHVSDSMMMNAGFVYPENTPTTKEGYYYRMIFEKFFPKPAARSTVPGGPSVACSTAKAVEWDASWSKNLDPSGRAALGVHDAAYEDTAGKTPASADPVSDKGLRPAIGESLGTPVASATAV

SEQ ID NO: 8739 - protein, 115 aa, Zea mays subsp. mays
  peptide (1)..(115): Ceres Seq. ID no. 12401715
MMMNAGFVYPENTPTTKEGYYYRMIFEKFFPKPAARSTVPGGPSVACSTAKAVEWDASWSKNLDPSGRAALGVHDAAYEDTAGKTPASADPVSDKGLRPAIGESLGTPVASATAV

SEQ ID NO: 8740 - protein, 114 aa, Zea mays subsp. mays
  peptide (1)..(114): Ceres Seq. ID no. 12401716
MMNAGFVYPENTPTTKEGYYYRMIFEKFFPKPAARSTVPGGPSVACSTAKAVEWDASWSKNLDPSGRAALGVHDAAYEDTAGKTPASADPVSDKGLRPAIGESLGTPVASATAV

SEQ ID NO: 8741 - DNA, 1759 bp, Zea mays subsp. mays
  misc_feature (1)..(1759): Ceres Seq. ID no. 12382113
  misc_feature (1)..(1759): Ortholog of  Ceres SEQ ID NO 15175785 as cited in SEQ ID NO 56970
  misc_feature (1)..(1759): Ortholog of  Ceres SEQ ID NO 13597407 as cited in SEQ ID NO 64106
  misc_feature (1)..(1759): Ortholog of  Ceres SEQ ID NO 14303309 as cited in SEQ ID NO 67739
atcatctacaccgccgaggcgccgacaaccacttggcgaccatgagcacgggcacggacgccgtcccggtcgccgtggcgccggcgaagcgcccgcccatcaacaagtacgccttcgcctgcgccctgctcgcctccatgaactccgtcctcctcggctatgacatctcggtgatgagcggcgcgcagctgttcatgaaggaggacctcaagatcacggacacgcagatcgagatcctcgccggcgtcatcaacatctactcgctcttcggctccctcgccgcgggcctcacctccgactggctcggccgccgctacaccatggtgctggcggccgccatcttcttcacgggcgcgctcctcatgggcctcgccccggactacgggttcctcatggcgggccgcttcgtggccggcatcggcgtcggcttcgcgctcatgatcgcccccgtgtacaccgccgaggtggcgcccacctccgcgcgcggcttcctcacctccttcccggaggtcttcaacaacttcggcatcctcctcggctacgtctccaacttcgccttcgcgcgcctgcccgtccacctcagctggcgcgccatgttcctggtcggcgccgtgccgcccgtcttcctcggcgtcgccgtcctcgccatgccggagtcgccgcgctggctcgtcatgcggggccgcatcgacgacgcgcgccgcgtgctgcagaagacctccgactcccccgccgaggccgaggagcgtctgctcgacatcaagaaggtggtcggcatccccgagggcgtgaccgacgccgacgacgtggccgccatcgtccgcgccagcagcaaggcatcgtcgtcgtcgtcgtcgtcgcgccacgacggggtgtggaaggagctgctcatcaacccttcccgccccgtgcgccgcatgctcgtggcggggctcggcctcatgttcatccagcaggccacgggcgtggactgcgtggtgatgtacagcccgcgggtgttcgagcgggcgggcatcaagtccaagaccaactcgctgggcgcgtccatggcggtgggcgcgtgcaagaccttcttcatacccatctccacgctgctcctggaccgcatcggccgccgcccgctgctgctggccagcggcggcgggatgaccatcttcctcttcacgctggccacgtccttgcacatgatggaccggcgccccgagggggaggccgcggcactgggcgcggtgagcatcgcggccatgctgtcgttcgtggcgtcgttcgcgtccggcctgggccccgtcgcctgggtctactgctccgagatctacccgctgcggctgcgcgcgcaggctgctgccatcggcacggggctcaaccggatcatgagcggcgccaccaccatgtccttcctctcgctctccaacgccatcaccatcgccggcagcttctacctctacgcgtgcatcgccgccgcaggctgggtgttcatgtacttcttcctgccggagaccatgggcaggagcctggaggacaccgtgaagctcttcggcaaggacgcggacgacgaggacgtcggcgacagccgtcgtcacgcgcccagtaagaagccctccacttccactgagcttgagctcagtgctcagcactgagtgatgtgccatgcaacacgtgtcctcccgagtgtgaccgaagcttatgtctaaagcttcgatgatacagtctactcctagtatcttgtgtgctcgaactgtggtgaatcttttgtagatcc

SEQ ID NO: 8742 - protein, 544 aa, Zea mays subsp. mays
  peptide (1)..(544): Ceres Seq. ID no. 12382114
HLHRRGADNHLATMSTGTDAVPVAVAPAKRPPINKYAFACALLASMNSVLLGYDISVMSGAQLFMKEDLKITDTQIEILAGVINIYSLFGSLAAGLTSDWLGRRYTMVLAAAIFFTGALLMGLAPDYGFLMAGRFVAGIGVGFALMIAPVYTAEVAPTSARGFLTSFPEVFNNFGILLGYVSNFAFARLPVHLSWRAMFLVGAVPPVFLGVAVLAMPESPRWLVMRGRIDDARRVLQKTSDSPAEAEERLLDIKKVVGIPEGVTDADDVAAIVRASSKASSSSSSSRHDGVWKELLINPSRPVRRMLVAGLGLMFIQQATGVDCVVMYSPRVFERAGIKSKTNSLGASMAVGACKTFFIPISTLLLDRIGRRPLLLASGGGMTIFLFTLATSLHMMDRRPEGEAAALGAVSIAAMLSFVASFASGLGPVAWVYCSEIYPLRLRAQAAAIGTGLNRIMSGATTMSFLSLSNAITIAGSFYLYACIAAAGWVFMYFFLPETMGRSLEDTVKLFGKDADDEDVGDSRRHAPSKKPSTSTELELSAQH

SEQ ID NO: 8743 - protein, 531 aa, Zea mays subsp. mays
  peptide (1)..(531): Ceres Seq. ID no. 12382115
MSTGTDAVPVAVAPAKRPPINKYAFACALLASMNSVLLGYDISVMSGAQLFMKEDLKITDTQIEILAGVINIYSLFGSLAAGLTSDWLGRRYTMVLAAAIFFTGALLMGLAPDYGFLMAGRFVAGIGVGFALMIAPVYTAEVAPTSARGFLTSFPEVFNNFGILLGYVSNFAFARLPVHLSWRAMFLVGAVPPVFLGVAVLAMPESPRWLVMRGRIDDARRVLQKTSDSPAEAEERLLDIKKVVGIPEGVTDADDVAAIVRASSKASSSSSSSRHDGVWKELLINPSRPVRRMLVAGLGLMFIQQATGVDCVVMYSPRVFERAGIKSKTNSLGASMAVGACKTFFIPISTLLLDRIGRRPLLLASGGGMTIFLFTLATSLHMMDRRPEGEAAALGAVSIAAMLSFVASFASGLGPVAWVYCSEIYPLRLRAQAAAIGTGLNRIMSGATTMSFLSLSNAITIAGSFYLYACIAAAGWVFMYFFLPETMGRSLEDTVKLFGKDADDEDVGDSRRHAPSKKPSTSTELELSAQH

SEQ ID NO: 8744 - protein, 499 aa, Zea mays subsp. mays
  peptide (1)..(499): Ceres Seq. ID no. 12382116
MNSVLLGYDISVMSGAQLFMKEDLKITDTQIEILAGVINIYSLFGSLAAGLTSDWLGRRYTMVLAAAIFFTGALLMGLAPDYGFLMAGRFVAGIGVGFALMIAPVYTAEVAPTSARGFLTSFPEVFNNFGILLGYVSNFAFARLPVHLSWRAMFLVGAVPPVFLGVAVLAMPESPRWLVMRGRIDDARRVLQKTSDSPAEAEERLLDIKKVVGIPEGVTDADDVAAIVRASSKASSSSSSSRHDGVWKELLINPSRPVRRMLVAGLGLMFIQQATGVDCVVMYSPRVFERAGIKSKTNSLGASMAVGACKTFFIPISTLLLDRIGRRPLLLASGGGMTIFLFTLATSLHMMDRRPEGEAAALGAVSIAAMLSFVASFASGLGPVAWVYCSEIYPLRLRAQAAAIGTGLNRIMSGATTMSFLSLSNAITIAGSFYLYACIAAAGWVFMYFFLPETMGRSLEDTVKLFGKDADDEDVGDSRRHAPSKKPSTSTELELSAQH

SEQ ID NO: 8745 - DNA, 1572 bp, Zea mays subsp. mays
  misc_feature (1)..(1572): Ceres Seq. ID no. 12354017
  misc_feature (1)..(1572): Ortholog of  Ceres SEQ ID NO 13595525 as cited in SEQ ID NO 56679
  misc_feature (1)..(1572): Ortholog of  Ceres SEQ ID NO 15226984 as cited in SEQ ID NO 62173
  misc_feature (1)..(1572): Ortholog of  Ceres SEQ ID NO 14302236 as cited in SEQ ID NO 68793
aaccgaaacggaaccttttattttcccgtcccgcgttctcccccaccgtcccgcgtccgccgtgcctccccaccggcggccaccgctaccggcccacctatctccggcacccggcgctcctcaccctcccttctccacgcgatggcgattcgccgcggcggtagccagtcctacggcttcccgatctactgcgccgcctggctcccgctcgcccacatcctgaagcccgaccgtcccgccgccgaggcggacgcggatgccccctcaccctcccctcccccgcctccgatggttttgctcgggggcggtggtgggaagggacggaacggcgtgccgaacaagctcgtgatggcggccctcgccgccggcgaagaggccgcgccggccctctcccccgatacggtgattgaggtgaggacccaagaggaggtgccgtacaaaatggccgtacaccctcgcggcgacggcgtgttctgcgctttccccaacggctgcaagttgtatcgatgggaatcacaggaaggagaggggctacagaacttgtctttggagccagaccaggaagctttagcggagctgaaagaagatggtttgcagttggccatatccttcagtcaagaaggttcaatacttgccattggtggtgaagatgggcatttaagagtcttcaagtggccggctatggcgcctgttctcacagaaactgatactaaaacatcaattaaggatcttaccatcagttccgatgagaggtttattgccgtgaataggagcagtggcccatgcagagtgtgggatttgcattcatctgaagttgtagccagtctgccaagagaagcaggggaaatgtttggattctgcagattttgtaataaggcagacaacagtcatgtcctatttataacagcaatggaaggtgattatggaaaaatagtatcttggaatactacctcatggacaagaacagggtcaaagaaaataactcgtgaggcaatttcagcttttgcggtgtcgccccaacggtgctctccttgcaattggaacaatcgaaggaagcgtcgtcatagtcgactcaaaagacatgcggacacttgtaacagttaaaaaggcccatcttggtgttgtgactacactgtccttctctcaggattcaagaacattgctgtcaacttcctttgactctactgcaagggtgacgtacgttggttccccgaagagtaatggaacaagtatatggcccatcctactagctatcattcttgcagttttagtgtactactgtatgcagcacaaagaagacattctggcgatgttgccgcgttgagatagatttctgttgagccccaccgctcccctgactgatctactctactggacatattagtagtgttgcttcagagattggacaagttttggacttaggtcaacttcattattttctcaaggatacaacaatacagcaaaaggtgttgagccctttcatgtttgtagtagaaagggtcatgtactcaggttgtccaagttttgtaagttgatgatggccgcaagtgatagtcatctgtgtttatgttt

SEQ ID NO: 8746 - protein, 367 aa, Zea mays subsp. mays
  peptide (1)..(367): Ceres Seq. ID no. 12354018
NRNGTFYFPVPRSPPPSRVRRASPPAATATGPPISGTRRSSPSLLHAMAIRRGGSQSYGFPIYCAAWLPLAHILKPDRPAAEADADAPSPSPPPPPMVLLGGGGGKGRNGVPNKLVMAALAAGEEAAPALSPDTVIEVRTQEEVPYKMAVHPRGDGVFCAFPNGCKLYRWESQEGEGLQNLSLEPDQEALAELKEDGLQLAISFSQEGSILAIGGEDGHLRVFKWPAMAPVLTETDTKTSIKDLTISSDERFIAVNRSSGPCRVWDLHSSEVVASLPREAGEMFGFCRFCNKADNSHVLFITAMEGDYGKIVSWNTTSWTRTGSKKITREAISAFAVSPQRCSPCNWNNRRKRRHSRLKRHADTCNS

SEQ ID NO: 8747 - protein, 320 aa, Zea mays subsp. mays
  peptide (1)..(320): Ceres Seq. ID no. 12354019
MAIRRGGSQSYGFPIYCAAWLPLAHILKPDRPAAEADADAPSPSPPPPPMVLLGGGGGKGRNGVPNKLVMAALAAGEEAAPALSPDTVIEVRTQEEVPYKMAVHPRGDGVFCAFPNGCKLYRWESQEGEGLQNLSLEPDQEALAELKEDGLQLAISFSQEGSILAIGGEDGHLRVFKWPAMAPVLTETDTKTSIKDLTISSDERFIAVNRSSGPCRVWDLHSSEVVASLPREAGEMFGFCRFCNKADNSHVLFITAMEGDYGKIVSWNTTSWTRTGSKKITREAISAFAVSPQRCSPCNWNNRRKRRHSRLKRHADTCNS

SEQ ID NO: 8748 - protein, 271 aa, Zea mays subsp. mays
  peptide (1)..(271): Ceres Seq. ID no. 12354020
MVLLGGGGGKGRNGVPNKLVMAALAAGEEAAPALSPDTVIEVRTQEEVPYKMAVHPRGDGVFCAFPNGCKLYRWESQEGEGLQNLSLEPDQEALAELKEDGLQLAISFSQEGSILAIGGEDGHLRVFKWPAMAPVLTETDTKTSIKDLTISSDERFIAVNRSSGPCRVWDLHSSEVVASLPREAGEMFGFCRFCNKADNSHVLFITAMEGDYGKIVSWNTTSWTRTGSKKITREAISAFAVSPQRCSPCNWNNRRKRRHSRLKRHADTCNS

SEQ ID NO: 8749 - DNA, 822 bp, Zea mays subsp. mays
  misc_feature (1)..(822): Ceres Seq. ID no. 12354021
  misc_feature (1)..(822): Ortholog of  Ceres SEQ ID NO 13655108 as cited in SEQ ID NO 62996
attcctgtcggcaaggtgaacgcgagagccgaccgtctcagtgtgcgcgcgaagaagagaaggaggaggaggaggaggaagaagtagaagaatgtatccggccaagcccaccgtcgccaccgccagcgagccggtaaccgggatggcggcgccgccggtgaccggcatcccgatcagcagccccggccccgcagtcgcggccagccagtggtcctcgggcctctgcgcctgcttcgacgactgcggcctctgctgcatgacgtgctggtgcccgtgcgtgacgttcgggcggatcgcggagatcgtggaccgcggcgcgacgtcgtgcgcggctgcggggggccatctacacgctgctggcctgcttcacggggttccagtgccactggatctactcctgcacgtaccgctccaagatgcgcgcgcagctggggctccccgacgtcggctgctgcgactgctgcgtccacttctgctgcgagccgtgcgcgctctgccagcagtacagggagctcagggcacgcggcttggaccccgcgctcggctgggacgtcaacgcccagaaggcggccaataataacgccggcgccggcatgacgatgtacccgccgacggcgcaggggatgggccgctaattacgctaccagctccatcggtaaactcatatgtgttgtgttgtgttgtgtcagccagatcatcgcgtacgtacgggtatacttgtgatatgtaatgtcagggaccggcatgcccatgtgtttcaagatatttcacgttcgagtcctttctgtccgctcactatccgaatgaaaatcattttccttg

SEQ ID NO: 8750 - protein, 161 aa, Zea mays subsp. mays
  peptide (1)..(161): Ceres Seq. ID no. 12354022
MYPAKPTVATASEPVTGMAAPPVTGIPISSPGPAVAASQWSSGLCACFDDCGLCCMTCWCPCVTFGRIAEIVDRGATSCAAAGGHLHAAGLLHGVPVPLDLLLHVPLQDARAAGAPRRRLLRLLRPLLLRAVRALPAVQGAQGTRLGPRARLGRQRPEGGQ

SEQ ID NO: 8751 - protein, 144 aa, Zea mays subsp. mays
  peptide (1)..(144): Ceres Seq. ID no. 12354023
MAAPPVTGIPISSPGPAVAASQWSSGLCACFDDCGLCCMTCWCPCVTFGRIAEIVDRGATSCAAAGGHLHAAGLLHGVPVPLDLLLHVPLQDARAAGAPRRRLLRLLRPLLLRAVRALPAVQGAQGTRLGPRARLGRQRPEGGQ

SEQ ID NO: 8752 - protein, 106 aa, Zea mays subsp. mays
  peptide (1)..(106): Ceres Seq. ID no. 12354024
MTCWCPCVTFGRIAEIVDRGATSCAAAGGHLHAAGLLHGVPVPLDLLLHVPLQDARAAGAPRRRLLRLLRPLLLRAVRALPAVQGAQGTRLGPRARLGRQRPEGGQ

SEQ ID NO: 8753 - DNA, 1117 bp, Zea mays subsp. mays
  misc_feature (1)..(1117): Ceres Seq. ID no. 12355198
  misc_feature (1)..(1117): Ortholog of  Ceres SEQ ID NO 15169248 as cited in SEQ ID NO 55022
  misc_feature (1)..(1117): Ortholog of  Ceres SEQ ID NO 14315042 as cited in SEQ ID NO 56959
  misc_feature (1)..(1117): Ortholog of  Ceres SEQ ID NO 12608620 as cited in SEQ ID NO 60192
  misc_feature (1)..(1117): Ortholog of  Ceres SEQ ID NO 15173077 as cited in SEQ ID NO 64566
  misc_feature (1)..(1117): Ortholog of  Ceres SEQ ID NO 13662898 as cited in SEQ ID NO 66199
  misc_feature (1)..(1117): Ortholog of  Ceres SEQ ID NO 13654314 as cited in SEQ ID NO 67914
ccccgagccgcaaacctgcaaccaccttcccaaatcctagttctcgcttctcgtcgtctagcctcggcccgttccaaaagccccgcagctctcgcatctcatcagacgccaccaccacctccggcgaccgaaagatgatctctccggatgcagcccgcaacgtcgtaggcatcatcggcaatgtcatctccttcggcctcttcctctccccagtgctgacgttctggcggatctgcaaggccagggacgtggaggagtttaagcctgacccctacctggcgacgctgctcaactgcatgctctgggtgttctacggcatccccgtcgtccaccccaacagcatcctcgtcgtcaccatcaacggcgtcgggctcgtcatcgaggccatctacctcaccatcttcttcctttactctgatggcccgaaacgcaggaaagcgttcggaatcctggccgtggagattttgttcatggtcgccgtggtgcttggtgtgattttgggcgcccacacgcacgagaagcgctccatgatcgtcggcattctctgcgtcattttcggctcgatgatgtacgcctccccactcaccattatgagccgtgtgatcaagaccaagagcgttgagtacatgcccttcctcctctcgctggtgagcttcctcaatggctgctgctggacggcctacgcgctcatccgcttcgacctctacgttacgatccccaacgcccttggcgccttcttcggcctcatccagctaatcctctacttctgctactacaagtcgacccccaaggagaagaatgtggagctgcccaccgtctccagcaacgccggcggcggcaacgtcaccgtcagcgtcgagcgataggcgacgtagctgcagcggcagcgccgccgcccgtcgagaaagaactcgacgagacgtactttagcaatagtagttgccattcatcgctcttctaggatggtttgttttaagtgagtgctacctagttttgcccggtgcgtgtcgtgtcaaagaacagttaggggtgtttggttcacccaattaaataaagttaaagtttagtatttgctctgaatgtttgaatagtaattatgactattaaatatagtttt

SEQ ID NO: 8754 - protein, 287 aa, Zea mays subsp. mays
  peptide (1)..(287): Ceres Seq. ID no. 12355199
PSRKPATTFPNPSSRFSSSSLGPFQKPRSSRISSDATTTSGDRKMISPDAARNVVGIIGNVISFGLFLSPVLTFWRICKARDVEEFKPDPYLATLLNCMLWVFYGIPVVHPNSILVVTINGVGLVIEAIYLTIFFLYSDGPKRRKAFGILAVEILFMVAVVLGVILGAHTHEKRSMIVGILCVIFGSMMYASPLTIMSRVIKTKSVEYMPFLLSLVSFLNGCCWTAYALIRFDLYVTIPNALGAFFGLIQLILYFCYYKSTPKEKNVELPTVSSNAGGGNVTVSVER

SEQ ID NO: 8755 - protein, 243 aa, Zea mays subsp. mays
  peptide (1)..(243): Ceres Seq. ID no. 12355200
MISPDAARNVVGIIGNVISFGLFLSPVLTFWRICKARDVEEFKPDPYLATLLNCMLWVFYGIPVVHPNSILVVTINGVGLVIEAIYLTIFFLYSDGPKRRKAFGILAVEILFMVAVVLGVILGAHTHEKRSMIVGILCVIFGSMMYASPLTIMSRVIKTKSVEYMPFLLSLVSFLNGCCWTAYALIRFDLYVTIPNALGAFFGLIQLILYFCYYKSTPKEKNVELPTVSSNAGGGNVTVSVER

SEQ ID NO: 8756 - protein, 189 aa, Zea mays subsp. mays
  peptide (1)..(189): Ceres Seq. ID no. 12355201
MLWVFYGIPVVHPNSILVVTINGVGLVIEAIYLTIFFLYSDGPKRRKAFGILAVEILFMVAVVLGVILGAHTHEKRSMIVGILCVIFGSMMYASPLTIMSRVIKTKSVEYMPFLLSLVSFLNGCCWTAYALIRFDLYVTIPNALGAFFGLIQLILYFCYYKSTPKEKNVELPTVSSNAGGGNVTVSVER

SEQ ID NO: 8757 - DNA, 1005 bp, Zea mays subsp. mays
  misc_feature (1)..(1005): Ceres Seq. ID no. 12348092
  misc_feature (1)..(1005): Ortholog of  Ceres SEQ ID NO 15177842 as cited in SEQ ID NO 51547
  misc_feature (1)..(1005): Ortholog of  Ceres SEQ ID NO 13594859 as cited in SEQ ID NO 51974
  misc_feature (1)..(1005): Ortholog of  Ceres SEQ ID NO 13597887 as cited in SEQ ID NO 64295
atcatcatgtatcctaaatccaaagccagcgaagaagagattccgccggtgccgtagccgctgagctaaccaccagccggttcttgtcgcgttgtctgcaactttgcaagtaagcaactcgtcaccggtcagccaccaacaaggcaccttggttatcgtcttgcacgtccaagaaatcgagaactcaggcaggcgtcgcccacttgccctcctcctcctcctcccgtcgtgaattccacgctggttcagggatgtcgatcgagctcctgacgaaattcctcacattgctgttcgggtatgccatgccagcgctggagtgcttcaaggcgatcgagcagcggcccggccgggcagatcagctccgcttctggtgcgagtattggatcatcctagtcctcctcgtcatgttcgacgaaattgctggggttctcatttctaagatcccaatgtactacgagctgaagctagccttcctcgtctacttgtggtacccaaagacaaggggaacggacatcgtgtacgagaccttcctccagccgctggtgatgcagtaccagcccaacatcgaggccaggctccagtacctgcgcgccaatgccggtgacatcctcgtcttctacctcaagaacttcaccgagagaggctacgagctcttcctccgagtgcttgactacgtccggtcgcaggcgtccagagggtcaagaacacggagtttcttctcgttccgaggtgaacgttcggagaggccaagcttcaccgatgactatgtcactggcggcgaccggagggacgggggaaggcaccgtcgaccacgcagtggctactagtagaccaagtagtcactggatgtataggatgtgcacagaaacatatacgattactggtatagtgttaggtaggagtaggatcaaatcaagcaaaccttacggacagaacttgtaggatccactggaaaaacagatagcttcttataaattttctattcatattgtcactttgtcagcc

SEQ ID NO: 8758 - protein, 191 aa, Zea mays subsp. mays
  peptide (1)..(191): Ceres Seq. ID no. 12348093
MSIELLTKFLTLLFGYAMPALECFKAIEQRPGRADQLRFWCEYWIILVLLVMFDEIAGVLISKIPMYYELKLAFLVYLWYPKTRGTDIVYETFLQPLVMQYQPNIEARLQYLRANAGDILVFYLKNFTERGYELFLRVLDYVRSQASRGSRTRSFFSFRGERSERPSFTDDYVTGGDRRDGGRHRRPRSGY

SEQ ID NO: 8759 - protein, 174 aa, Zea mays subsp. mays
  peptide (1)..(174): Ceres Seq. ID no. 12348094
MPALECFKAIEQRPGRADQLRFWCEYWIILVLLVMFDEIAGVLISKIPMYYELKLAFLVYLWYPKTRGTDIVYETFLQPLVMQYQPNIEARLQYLRANAGDILVFYLKNFTERGYELFLRVLDYVRSQASRGSRTRSFFSFRGERSERPSFTDDYVTGGDRRDGGRHRRPRSGY

SEQ ID NO: 8760 - protein, 140 aa, Zea mays subsp. mays
  peptide (1)..(140): Ceres Seq. ID no. 12348095
MFDEIAGVLISKIPMYYELKLAFLVYLWYPKTRGTDIVYETFLQPLVMQYQPNIEARLQYLRANAGDILVFYLKNFTERGYELFLRVLDYVRSQASRGSRTRSFFSFRGERSERPSFTDDYVTGGDRRDGGRHRRPRSGY

SEQ ID NO: 8761 - DNA, 769 bp, Zea mays subsp. mays
  misc_feature (1)..(769): Ceres Seq. ID no. 12382102
  misc_feature (1)..(769): Ortholog of  Ceres SEQ ID NO 13597182 as cited in SEQ ID NO 63654
atgcgtgcatggcgtgctagctaggtaccttgcggccaagagcgaggcggaccactacaagcgggagatgagaagggagcaggaggagatcatcgccgtcccagacaccgaggccgctgagattggagagatcatgtcacggtatgggctcgagccgcaggagtacggccctgtcgtcgccgggctcaggcggaaccctcaagcttggctagacttcatgatgaggttcgagctgggactggagagaccggatcccagaagggctctgcagagcgccttcacgatcgcactgtcctacgtggtcggcgggctggtccctctcctgccctacgtgctcgtctccgccgcgcaggatgccatgctcacatccgtcggagtcacgctggccgcgctgcttttcttcggctacgtcaagggccgcttcacgggggaaccggccgttcgccagtgccgtccagaccgctgtcattggagcgctcgcttcggcggcggcgtacgggatggcgaaggctgttcaggcgaggtagttgtttgttggtgaggcggcgtcaggcgttttgggaaccagggctgcggtaaaactgaagaaagctgcatacttctgatcctttggggacttctcgttacagtgttaatcgcgggatctaatgctagtctactcttttgaataaatctagggaaggagataatcatagataaaatatatcttcgcctcactttggttaatgtaaagactctgaactacatattcaatcattattacaagcct

SEQ ID NO: 8762 - protein, 179 aa, Zea mays subsp. mays
  peptide (1)..(179): Ceres Seq. ID no. 12382103
CVHGVLARYLAAKSEADHYKREMRREQEEIIAVPDTEAAEIGEIMSRYGLEPQEYGPVVAGLRRNPQAWLDFMMRFELGLERPDPRRALQSAFTIALSYVVGGLVPLLPYVLVSAAQDAMLTSVGVTLAALLFFGYVKGRFTGEPAVRQCRPDRCHWSARFGGGVRDGEGCSGEVVVCW

SEQ ID NO: 8763 - protein, 157 aa, Zea mays subsp. mays
  peptide (1)..(157): Ceres Seq. ID no. 12382104
MRREQEEIIAVPDTEAAEIGEIMSRYGLEPQEYGPVVAGLRRNPQAWLDFMMRFELGLERPDPRRALQSAFTIALSYVVGGLVPLLPYVLVSAAQDAMLTSVGVTLAALLFFGYVKGRFTGEPAVRQCRPDRCHWSARFGGGVRDGEGCSGEVVVCW

SEQ ID NO: 8764 - protein, 135 aa, Zea mays subsp. mays
  peptide (1)..(135): Ceres Seq. ID no. 12382105
MSRYGLEPQEYGPVVAGLRRNPQAWLDFMMRFELGLERPDPRRALQSAFTIALSYVVGGLVPLLPYVLVSAAQDAMLTSVGVTLAALLFFGYVKGRFTGEPAVRQCRPDRCHWSARFGGGVRDGEGCSGEVVVCW

SEQ ID NO: 8765 - DNA, 1140 bp, Zea mays subsp. mays; identical to SEQ ID NO: 4797
  misc_feature (1)..(1140): Ceres Seq. ID no. 12386869
  misc_feature (1)..(1140): Ortholog of  Ceres SEQ ID NO 14301423 as cited in SEQ ID NO 52204
  misc_feature (1)..(1140): Ortholog of  Ceres SEQ ID NO 12621037 as cited in SEQ ID NO 66448
  misc_feature (1)..(1140): Ortholog of  Ceres SEQ ID NO 12635639 as cited in SEQ ID NO 0
  misc_feature (1)..(1140): Ortholog of  Ceres SEQ ID NO 14305144 as cited in SEQ ID NO 0

SEQ ID NO: 8766 - protein, 274 aa, Zea mays subsp. mays; identical to SEQ ID NO: 4798
  peptide (1)..(274): Ceres Seq. ID no. 12386870

SEQ ID NO: 8767 - protein, 212 aa, Zea mays subsp. mays; identical to SEQ ID NO: 4799
  peptide (1)..(212): Ceres Seq. ID no. 12386871

SEQ ID NO: 8768 - protein, 178 aa, Zea mays subsp. mays; identical to SEQ ID NO: 4800
  peptide (1)..(178): Ceres Seq. ID no. 12386872

SEQ ID NO: 8769 - DNA, 1267 bp, Zea mays subsp. mays
  misc_feature (1)..(1267): Ceres Seq. ID no. 12373164
  misc_feature (1)..(1267): Ortholog of  Ceres SEQ ID NO 15177022 as cited in SEQ ID NO 57405
  misc_feature (1)..(1267): Ortholog of  Ceres SEQ ID NO 13597427 as cited in SEQ ID NO 64038
actctccagtctccactagcatcagtcgccgccgcctatcctcgagcaccatttccatcaacagcatccgcctctggcaagctagcgacagcaactcatggcactccgcgcgctcgacaacacgatgcccgccgccgtcgaggagcggcccaagaaggtggctaaggtgggcgtccccgccgccgccgccaaggccgccgcctccccctcccccgggagtggcggcaagaagaagaaggggaacgacgagaactcggcgccaagggccacggccgcggcggcggagcaggcggtggagtacatctcgtcggaggagctggaggcggcggccagccccaaggccaaggccgcggggctggtgcgcggacctggactccaaggactgggtcaggacctgcgaggcgctcaacgacgcgcgccgcctcgcgatccaccaccccgcgctgctgaacccgatcctggagaaggtggtgctggcggtcgtgaagacgatgaagagcccccgcagcgcggtgctcaagacgtccatcatggcctgcgccgacatcttcagttccttcggcaacctcctcgcctccgtctccgacgacaccttcgacaagctgctgctccagctcctgctgaaggcgtcccaggacaagcggttcgtgtgcgaggaggccgagaaggcgacgcgcgcgatggcggcgtcgatggcgccgctgccgctgctgaagaagctcaaggcgtacgtccaccacgccaacctcagggtcagggctaaggccgccgtcgccatctcccactgcgccgcccggatggacatcggcgcgatgaaggagttcgggatgtcggcgctgctgcagctggcggcggagctgctgaacgaccggctgccggaggcgagggaggccgcccgcggcgtggtggcgtcgacgcacgcggccttcgccaaggaggccgccgcgagcggccaggaggacgacgcggccgcgtcctgggagagcctctgcgcgctcagcctcccgcccatctccgcgcaggccgtcgccaagatcgctgccgccgccgcctcctcgcagtagccactgcacgcgtgcggacgtgcgccgctggcgttgattttgggggtcgtctggttcggttcagaagtagcgctcgtgagtcttcagacagagctcgtttgtcgccgccgccgccgagtctgtttgtttgttctttctactccatgctatctcgcatggttagtgttctgtttatggcttcgtcaagtaataacatatcaatt

SEQ ID NO: 8770 - protein, 353 aa, Zea mays subsp. mays
  peptide (1)..(353): Ceres Seq. ID no. 12373165
SPVSTSISRRRLSSSTISINSIRLWQASDSNSWHSARSTTRCPPPSRSGPRRWLRWASPPPPPRPPPPPPPGVAARRRRGTTRTRRQGPRPRRRSRRWSTSRRRSWRRRPAPRPRPRGWCADLDSKDWVRTCEALNDARRLAIHHPALLNPILEKVVLAVVKTMKSPRSAVLKTSIMACADIFSSFGNLLASVSDDTFDKLLLQLLLKASQDKRFVCEEAEKATRAMAASMAPLPLLKKLKAYVHHANLRVRAKAAVAISHCAARMDIGAMKEFGMSALLQLAAELLNDRLPEAREAARGVVASTHAAFAKEAAASGQEDDAAASWESLCALSLPPISAQAVAKIAAAAASSQ

SEQ ID NO: 8771 - protein, 221 aa, Zea mays subsp. mays
  peptide (1)..(221): Ceres Seq. ID no. 12373166
MALRALDNTMPAAVEERPKKVAKVGVPAAAAKAAASPSPGSGGKKKKGNDENSAPRATAAAAEQAVEYISSEELEAAASPKAKAAGLVRGPGLQGLGQDLRGAQRRAPPRDPPPRAAEPDPGEGGAGGREDDEEPPQRGAQDVHHGLRRHLQFLRQPPRLRLRRHLRQAAAPAPAEGVPGQAVRVRGGREGDARDGGVDGAAAAAEEAQGVRPPRQPQGQG

SEQ ID NO: 8772 - protein, 212 aa, Zea mays subsp. mays
  peptide (1)..(212): Ceres Seq. ID no. 12373167
MPAAVEERPKKVAKVGVPAAAAKAAASPSPGSGGKKKKGNDENSAPRATAAAAEQAVEYISSEELEAAASPKAKAAGLVRGPGLQGLGQDLRGAQRRAPPRDPPPRAAEPDPGEGGAGGREDDEEPPQRGAQDVHHGLRRHLQFLRQPPRLRLRRHLRQAAAPAPAEGVPGQAVRVRGGREGDARDGGVDGAAAAAEEAQGVRPPRQPQGQG

SEQ ID NO: 8773 - DNA, 1112 bp, Zea mays subsp. mays
  misc_feature (1)..(1112): Ceres Seq. ID no. 12382179
  misc_feature (1)..(1112): Ortholog of  Ceres SEQ ID NO 13639514 as cited in SEQ ID NO 55736
  misc_feature (1)..(1112): Ortholog of  Ceres SEQ ID NO 14312254 as cited in SEQ ID NO 59148
  misc_feature (1)..(1112): Ortholog of  Ceres SEQ ID NO 13662804 as cited in SEQ ID NO 65394
  misc_feature (1)..(1112): Ortholog of  Ceres SEQ ID NO 13656519 as cited in SEQ ID NO 69226
gcaggctgctccggcagactccttcaccgcgaagacttctcctctcctctctcctctctcccttccactcgcgctctcctggataccgcgcgcggcgacgagatggcgatagatcacgggacccctctcgggctgaagcggagaggcgccatgggcggaggtggcgagtgctgcgacgacggcagcgagacccggcggtggccgccgtggctgaggccgctgctgtccgcgagcttcttcgtccaatgcagggtccacgccgacgcgcacaagagcgagtgcaacatgtactgcctcgactgcatgggcgacgctctctgcgcgctctgcctcgccgcgcgccaccgcgaccaccactccatccagatacggaggtcgtcgtaccacgacgtgatccgggtgtcggagatacagaaggtgctggacatcgccggcgtgcagacgtacatcatcaacagcgcgcgcgtggtgttcctgaacgagcggccgcagccccgcccgggcaagggcgtcaccaacacctgcgaggtctgcgagcgcagcctcctcgactgcttccgcttctgctcccttgggtgcaagatagtgggcacggcccgtggctaccgtcctgggaagaagaagcacggcggcggcggcggtaacaagaagagggcggcgccggcgccggcgcttaaggacgtgcggtctgactcggaggactcgtgcaccagcaccagcggcgccagcagcgacaagagcagcgtcgtgcagagctcccctccgccgccgacctctgccagccaccgcccccccgggaacaagcgccggaagggcgtcccgcaccggtcgcccttgggcagcctcatcgtcgagctctaggactcttcgtcagcgccaaggcaaggcaaggcaacgcactctgtactgtacatgacataccccccgaagagaagggaataacaaacagtaagcctctggacgtggagggcgaagggcgacagcggtaagccgtaagatcggacaatccttagttttgcttcttctcaggttttgttttgcttttacagttactagcactctagcagtggtaccatcagtaagataaccgcgactaagttttgcagccttgt

SEQ ID NO: 8774 - protein, 286 aa, Zea mays subsp. mays
  peptide (1)..(286): Ceres Seq. ID no. 12382180
AGCSGRLLHREDFSSPLSSLPSTRALLDTARGDEMAIDHGTPLGLKRRGAMGGGGECCDDGSETRRWPPWLRPLLSASFFVQCRVHADAHKSECNMYCLDCMGDALCALCLAARHRDHHSIQIRRSSYHDVIRVSEIQKVLDIAGVQTYIINSARVVFLNERPQPRPGKGVTNTCEVCERSLLDCFRFCSLGCKIVGTARGYRPGKKKHGGGGGNKKRAAPAPALKDVRSDSEDSCTSTSGASSDKSSVVQSSPPPPTSASHRPPGNKRRKGVPHRSPLGSLIVEL

SEQ ID NO: 8775 - protein, 252 aa, Zea mays subsp. mays
  peptide (1)..(252): Ceres Seq. ID no. 12382181
MAIDHGTPLGLKRRGAMGGGGECCDDGSETRRWPPWLRPLLSASFFVQCRVHADAHKSECNMYCLDCMGDALCALCLAARHRDHHSIQIRRSSYHDVIRVSEIQKVLDIAGVQTYIINSARVVFLNERPQPRPGKGVTNTCEVCERSLLDCFRFCSLGCKIVGTARGYRPGKKKHGGGGGNKKRAAPAPALKDVRSDSEDSCTSTSGASSDKSSVVQSSPPPPTSASHRPPGNKRRKGVPHRSPLGSLIVEL

SEQ ID NO: 8776 - protein, 236 aa, Zea mays subsp. mays
  peptide (1)..(236): Ceres Seq. ID no. 12382182
MGGGGECCDDGSETRRWPPWLRPLLSASFFVQCRVHADAHKSECNMYCLDCMGDALCALCLAARHRDHHSIQIRRSSYHDVIRVSEIQKVLDIAGVQTYIINSARVVFLNERPQPRPGKGVTNTCEVCERSLLDCFRFCSLGCKIVGTARGYRPGKKKHGGGGGNKKRAAPAPALKDVRSDSEDSCTSTSGASSDKSSVVQSSPPPPTSASHRPPGNKRRKGVPHRSPLGSLIVEL

SEQ ID NO: 8777 - DNA, 1388 bp, Zea mays subsp. mays; identical to SEQ ID NO: 1761
  misc_feature (1)..(1388): Ceres Seq. ID no. 12588453
  misc_feature (1)..(1388): Ortholog of  Ceres SEQ ID NO 13654583 as cited in SEQ ID NO 68599

SEQ ID NO: 8778 - protein, 378 aa, Zea mays subsp. mays; identical to SEQ ID NO: 1762
  peptide (1)..(378): Ceres Seq. ID no. 12588454

SEQ ID NO: 8779 - protein, 300 aa, Zea mays subsp. mays; identical to SEQ ID NO: 1763
  peptide (1)..(300): Ceres Seq. ID no. 12588455

SEQ ID NO: 8780 - protein, 249 aa, Zea mays subsp. mays; identical to SEQ ID NO: 1764
  peptide (1)..(249): Ceres Seq. ID no. 12588456

SEQ ID NO: 8781 - DNA, 1186 bp, Zea mays subsp. mays
  misc_feature (1)..(1186): Ceres Seq. ID no. 12373161
  misc_feature (1)..(1186): Ortholog of  Ceres SEQ ID NO 14306565 as cited in SEQ ID NO 53000
  misc_feature (1)..(1186): Ortholog of  Ceres SEQ ID NO 14312192 as cited in SEQ ID NO 59249
acaaaacccgccttcctctcattccccaatcgccacaactctcgtcggagctccgagccctaaacaacagccttcgccggccgactcccgggcggaggaggcggccggggagatggacgacatcggcggcggcgcaccgggtgcctgccccaagaacaagaagccccggcacctgtcccgctcgctgacctaccaccaccacccgtaccaggggcgccaggtgctgccggcgccggcgcccaacccgcagcgcccgcagtcggtggtcctgtacacgacgtcgctccgcggcgtgcgccgcacgttcgcggactgctgcgcggtgcgcgccgcgctgcggggcctccgcgtcgccgtggacgagcgccacgtctccatggacgcggcgctccggcgcgagctgcaggggatcctcgcggcacggggccgcgggttctcgctcccgcagctcctggtcgggggcgcgctcgtcggcggcgccgacgaggtccgccggctgcacgagtccggcgagctccgccgcgtcctcgaaggcgcccccgggcaggaccccgccttcgtctgcggcgcctgcggcgggttccggttcgcgccctgtccggcctgcgacggctcccgcaaggtgttcgtggaggaagaggggcgagcccgccgctgcctggagtgcaacgaaaacggcttggtacgctgccccaattgctgttcttgatagcttgtttaagttgagtgtatacgagaacttaaggattgcttgattagaggtagtgggagaggaaaagagcatttcttgtgttctttggctgctgtatattgtggacgcagttgggaggataggtattgggtatgccatcagtgttttgaaaggatagcgaatgggttcttggccctcaagttatcacgtctggagtaccatcgatggtaaggtgccatctcatagtacttcatgtacatgtgtgtgtctgtgaatgtgtattgatagaccttcttcaagttggaaaagaaggcccaaagcaaagggttagagatttagaggttgtgctacatagcggcaagaaaaggtggagccttccttgattctttgggcgtgctattagcatattctgagaagggcaatatggcttctggccctatagtttgagattgtataaaatatgtatattatacattgataaccagagtgggtttg

SEQ ID NO: 8782 - protein, 235 aa, Zea mays subsp. mays
  peptide (1)..(235): Ceres Seq. ID no. 12373162
QNPPSSHSPIATTLVGAPSPKQQPSPADSRAEEAAGEMDDIGGGAPGACPKNKKPRHLSRSLTYHHHPYQGRQVLPAPAPNPQRPQSVVLYTTSLRGVRRTFADCCAVRAALRGLRVAVDERHVSMDAALRRELQGILAARGRGFSLPQLLVGGALVGGADEVRRLHESGELRRVLEGAPGQDPAFVCGACGGFRFAPCPACDGSRKVFVEEEGRARRCLECNENGLVRCPNCCS

SEQ ID NO: 8783 - protein, 198 aa, Zea mays subsp. mays
  peptide (1)..(198): Ceres Seq. ID no. 12373163
MDDIGGGAPGACPKNKKPRHLSRSLTYHHHPYQGRQVLPAPAPNPQRPQSVVLYTTSLRGVRRTFADCCAVRAALRGLRVAVDERHVSMDAALRRELQGILAARGRGFSLPQLLVGGALVGGADEVRRLHESGELRRVLEGAPGQDPAFVCGACGGFRFAPCPACDGSRKVFVEEEGRARRCLECNENGLVRCPNCCS

SEQ ID NO: 8784 - DNA, 1331 bp, Zea mays subsp. mays
  misc_feature (1)..(1331): Ceres Seq. ID no. 12365852
  misc_feature (1)..(1331): Ortholog of  Ceres SEQ ID NO 15178931 as cited in SEQ ID NO 1125
  misc_feature (1)..(1331): Ortholog of  Ceres SEQ ID NO 13596648 as cited in SEQ ID NO 63080
cttgcgacctgattcgccatgccctgcgtgtcctttcgaaaacggctgtcgacactgcccctctcgctcgctttccactcgattccagcaggcgtgcgtggcccaagtacccaacgcaccaccaggtggggcatctgctccacccccactccacttccactagcaccaacaccaacagcctcgccgccagccgcagccacgcgacacgacgcgacgcgagacgcggagcggtacaaaaggtggactgggtgggtggctggttccgtggttcaactcctaccactaccacagcaccaacgacggaccaggcagcagagaaaaagcagaccagacgagacctctcgcgttccgtcctcctcccccctgcccctgctgccgttccccttcttcctcagttctcccgcccgctgctgccctccgtccgcgtccagatcccgccaccaaccgatccggcgccctccagcatggcgggggcgggggcgaaggcggcgggagccctggctctggcgctcgtgctcgcgctcgcgggggccaactccgagggcgacgcgctctcggcgctgcgccggagcctcagggaccccggcggcgttctgcagagctgggaccccacgctcgtcaacccctgcacctggttccacgtcacctgcgaccgcgacaaccgcgtcacccgcctagatcttggtaatttgaacttatctggtcatctggtgcctgagcttgggaaactggagcatcttcagtatctggaactttataagaataacattcaaggaacagtcccttctgagcttggcaacttgaagaatctaataagcttcgacttgtacaagaacaacatttcggggacaatacctcctgcccttggaaagttgaagtcccttgtattcttgcgtctcaatggcaatcatttgactgggcccatcccaagggaactcgctggaatatctagtctcaaagttgttgatgtttcaagtaatgatttgtgcgggacgattcccacgtctggaccatttgaacatattcctctgagcaactttgagaagaacccgcgcttggaaggtccagagctacaaggcctggccatatacgacaccaactgctagaggcaccacgaagataagaactgctagaaagtaacgagcgaacaaggttacgagaaattgggcgatatagatttactaggtctggatctgtaatcctccctgcatagctcttattcgtaactcgctgcctgcacgaaagttggtgtgtgttttagcagaatgctttctgtccgtgaaagtaaacttgaactgcttattacgactgaaatgatattgtcgttcctc

SEQ ID NO: 8785 - protein, 367 aa, Zea mays subsp. mays
  peptide (1)..(367): Ceres Seq. ID no. 12365853
CDLIRHALRVLSKTAVDTAPLARFPLDSSRRAWPKYPTHHQVGHLLHPHSTSTSTNTNSLAASRSHATRRDARRGAVQKVDWVGGWFRGSTPTTTTAPTTDQAAEKKQTRRDLSRSVLLPPAPAAVPLLPQFSRPLLPSVRVQIPPPTDPAPSSMAGAGAKAAGALALALVLALAGANSEGDALSALRRSLRDPGGVLQSWDPTLVNPCTWFHVTCDRDNRVTRLDLGNLNLSGHLVPELGKLEHLQYLELYKNNIQGTVPSELGNLKNLISFDLYKNNISGTIPPALGKLKSLVFLRLNGNHLTGPIPRELAGISSLKVVDVSSNDLCGTIPTSGPFEHIPLSNFEKNPRLEGPELQGLAIYDTNC

SEQ ID NO: 8786 - protein, 219 aa, Zea mays subsp. mays
  peptide (1)..(219): Ceres Seq. ID no. 12365854
MPCVSFRKRLSTLPLSLAFHSIPAGVRGPSTQRTTRWGICSTPTPLPLAPTPTASPPAAATRHDATRDAERYKRWTGWVAGSVVQLLPLPQHQRRTRQQRKSRPDETSRVPSSSPLPLLPFPFFLSSPARCCPPSASRSRHQPIRRPPAWRGRGRRRREPWLWRSCSRSRGPTPRATRSRRCAGASGTPAAFCRAGTPRSSTPAPGSTSPATATTASPA

SEQ ID NO: 8787 - protein, 213 aa, Zea mays subsp. mays; identical to SEQ ID NO: 1607
  peptide (1)..(213): Ceres Seq. ID no. 12365855

SEQ ID NO: 8788 - DNA, 1175 bp, Zea mays subsp. mays
  misc_feature (1)..(1175): Ceres Seq. ID no. 12358359
  misc_feature (1)..(1175): Ortholog of  Ceres SEQ ID NO 12558659 as cited in SEQ ID NO 20727
  misc_feature (1)..(1175): Ortholog of  Ceres SEQ ID NO 14314534 as cited in SEQ ID NO 52434
  misc_feature (1)..(1175): Ortholog of  Ceres SEQ ID NO 14308640 as cited in SEQ ID NO 60489
  misc_feature (1)..(1175): Ortholog of  Ceres SEQ ID NO 15175034 as cited in SEQ ID NO 62432
  misc_feature (1)..(1175): Ortholog of  Ceres SEQ ID NO 12619999 as cited in SEQ ID NO 66123
  misc_feature (1)..(1175): Ortholog of  Ceres SEQ ID NO 13656436 as cited in SEQ ID NO 69154
aaatccacaaaggcacaaagatggaaaaggtgtattggactctttttaaagctaaaaaaacagttcaaaagattgctgcttttcgcttcagtgctgctccgattctgtttcagaagattaacaatttgaaattgtgacgatcctaattgccatcttctcgataataatgaggaaaaaaagattgacgcgcttttcgtgtcctcagaaactgcgggtttgctgaaattctcctccactttcccaagcaaagaacaaagaaccgcccttgttctctgcgactctgcccggccggtctccgaggcgggcggagggaaccagagagcaaggcgaggagcgcggaagggctgagggaaggggcggcggggcatggctcgccggccggcgtcgtgggagcagggcggcgacgagtacgactatctcttcaaggtcgtgctcatcggcgactctggcgtggggaagtccaacctgctctcccgcttcaccaagaacaccttcgccctcgactccaagtccaccatcggcgttgagttcgccacgcgcacactccaggtggagaacaagattataaaagctcaaatctgggacactgctgggcaggagaggtaccgagcaattacaagtgcttactatcgaggagctgtcggggcgttgctagtctacgatgtcactaaagtaatgacatttgagaatgtgaagaggtggttgaaggagctccgggaccatgctgactcgaacatagtcgtaatgctcattggcaacaagactgaccttaggcacctgcgctctgtcgccgttgaggatgctgcaagctttgcaggagagcgaaaggttttgttcttcatcgagacctctgcgctcgatgcgacaaacgtcgagaaggccttccacaccgttctagccgagatctaccggataatcagcaagaagcccctgtcttcggaggagtctggtttggggtccggtaacctcagagagggacagtccatccaagtgtcagccacaaattctggcgcccttacgtcgcggtgctgctcttcttagagccacgcccaccagaatcatctgaagaacaacagttcgtcaagaaggtcctctcttccgaagtcgaaatatttactcccctttgtgtgaacaataagcgtagatttaaagaatgtcagactcagacgctgact

SEQ ID NO: 8789 - protein, 224 aa, Zea mays subsp. mays
  peptide (1)..(224): Ceres Seq. ID no. 12358360
MARRPASWEQGGDEYDYLFKVVLIGDSGVGKSNLLSRFTKNTFALDSKSTIGVEFATRTLQVENKIIKAQIWDTAGQERYRAITSAYYRGAVGALLVYDVTKVMTFENVKRWLKELRDHADSNIVVMLIGNKTDLRHLRSVAVEDAASFAGERKVLFFIETSALDATNVEKAFHTVLAEIYRIISKKPLSSEESGLGSGNLREGQSIQVSATNSGALTSRCCSS

SEQ ID NO: 8790 - protein, 121 aa, Zea mays subsp. mays
  peptide (1)..(121): Ceres Seq. ID no. 12358361
MTFENVKRWLKELRDHADSNIVVMLIGNKTDLRHLRSVAVEDAASFAGERKVLFFIETSALDATNVEKAFHTVLAEIYRIISKKPLSSEESGLGSGNLREGQSIQVSATNSGALTSRCCSS

SEQ ID NO: 8791 - DNA, 702 bp, Zea mays subsp. mays
  misc_feature (1)..(702): Ceres Seq. ID no. 12346922
  misc_feature (1)..(702): Ortholog of  Ceres SEQ ID NO 12780534 as cited in SEQ ID NO 65670
  misc_feature (1)..(702): Ortholog of  Ceres SEQ ID NO 13598301 as cited in SEQ ID NO 68281
taaagatgacctgtctcaaattggatttgatgtcgaatcaattcagaaaatggttgctggattggagggaaagatcgagttacttgagaacaaacaggacgtggctaatactggtatctggtatctctgccaagtagcaggcggtttaaaagatggaataaacaccaggtttttccaggaaaccagtgagaagctgaagctctcacattcagctcaacctgaaaacaagccagtgaaggggcttgaatttttttcggaaagcaccatggaacagaaagtagctgactccaaaccaattgcggtgacagtcgacgctgagaagcctgagaaaaccgctgctgtaatgggcaccacagtgcacaggtctatcaggttctcatatcggaatgcaggccttgctttgtgatcaaatcctctccgcttgagatgcacgtggccttcctggttgctttttcttttttggcaacaaccttcctggttgctttgtgtgatggtcagaaaacatagaagaataacctgcaactggagtgacagaatttcttttccccgcagtagacaggtgtgcgttatttggttggaattatctccagtccactatcaattttttttccttggattttgattcattttatgtttcgatttgttgccttatatactgtaaagtcattggaaagaataaataaaacacgaatgttttttgtt

SEQ ID NO: 8792 - protein, 134 aa, Zea mays subsp. mays
  peptide (1)..(134): Ceres Seq. ID no. 12346923
KDDLSQIGFDVESIQKMVAGLEGKIELLENKQDVANTGIWYLCQVAGGLKDGINTRFFQETSEKLKLSHSAQPENKPVKGLEFFSESTMEQKVADSKPIAVTVDAEKPEKTAAVMGTTVHRSIRFSYRNAGLAL

SEQ ID NO: 8793 - protein, 118 aa, Zea mays subsp. mays
  peptide (1)..(118): Ceres Seq. ID no. 12346924
MVAGLEGKIELLENKQDVANTGIWYLCQVAGGLKDGINTRFFQETSEKLKLSHSAQPENKPVKGLEFFSESTMEQKVADSKPIAVTVDAEKPEKTAAVMGTTVHRSIRFSYRNAGLAL

SEQ ID NO: 8794 - DNA, 1997 bp, Zea mays subsp. mays
  misc_feature (1)..(1997): Ceres Seq. ID no. 12373157
  misc_feature (1)..(1997): Ortholog of  Ceres SEQ ID NO 15169092 as cited in SEQ ID NO 60430
  misc_feature (1)..(1997): Ortholog of  Ceres SEQ ID NO 14303680 as cited in SEQ ID NO 66019
  misc_feature (1)..(1997): Ortholog of  Ceres SEQ ID NO 15224940 as cited in SEQ ID NO 0
attcgatagttccatcctcctccctcccccttcgccggcctcgcttcgtccctcccgctctcccccttttaaatcaaaccctctctcggctcctttataaatcctagtcgaagcaagggtgcgcgcacttcactacccaacctgaccccgaagatcgcgtccgcagagacagtagccgcgtcatggcgaccccgccgccgccgctcccgcccatgccgccgaggcacgtctcctgcggctcacttctacaggaactgcaggaactatggggagaaattggtcaggatgaaatgaaaagagataggatgatactgcaactggaggaggattgtctcaatgtttacaagcaaaaagtgaatcagactaggaaacagaaggcagacctgcttcaagagctgtcccttggcgaagctgatatagacaagatcctttctgctcttggagagagagaaacatttcctaggtcagagaagcttgggggcacattaatggaacaactcgctaagatagagccagtgctagaagatttgaggcgtaggagggatgagagagtaaatgagttcaaggctattcagtcaaagattgtatgtctacaagcagaaatttcaggagccattgatcatggggatcctgctgctcctgtggtagatgagaatgatttatccttgaaaagatcaggggaattgaaggagcatcttaatgatcttcagacagaaaagaatggaaggctgcaaaaaattgacatccagactaacagtattcatgaaatgtgcaacataatgtctattgatctcaaaatggcactaaaggatgttcatcccagttacgctgagctggggagaagcaaacccatgagtattagcaacagttcgcttgatagactatctgaaaaagtacatgcgttaaatcatgaaaagaaacaaaggcttcggaagcttcaagatcttggcagcacactcattgagttatggaacctcatggatacaccaactgatgaacagagattttttgaccatgtgacttctcttattaaagtctcaccaactacagcgatgccccaagggtgccttgcacacgaaataattgaaaaggtagagactgaggttaagagactgactaagttgaaagctagcaaaatgaaagagctagtcttcaagaaattgactgatcttgaggaaatctacagaagtgttcacatggatattgatagtgattctgagcggcaaaccctcaatgatctcattgattctggtagagcagatctttcagagttgctggcaagaatggatattcgaattgcggaggcaaaagaacatgcattaagtagaaaggatattttagaaaaggtggagaagtggacattggcatcagaagaggagacttggcttgatgaatacgaaagggatcaaaaccgatataatgctgtccgaggagctcacataaatctcaagcgtgcggagaaagctaggatattggtcagcaaacttccatctcttttggagaacttgactgctaaaattaaagcctgggaaaaggaaatgggtattccatttatatttaacaaggtgaggctgttggactgtttagatgaatacacctgtacaagacagcaaaaagaagaggaaaagcgccgatcaagggaattgaagaaactgcaagaacagtttgctacagagcaaggtgccaagttcggaacgaaaccaagccctatccgtcctctttcttcaaggaagcctcttgggcagagctctaatgccaatattattggtggaactccgaccagccgccgtgtttctacccccatgtcacggaagggtaggccatcttctggaagggtgcaggaagctgtcaagactgctgtggcaccagcaaactatgttgcccttcccaaggactgctcagacatttctaccctttgaagtgtaatcacctactctgaccatcgattgacttctcacttgatcgacctacatactatatagtcttgactccagtgc

SEQ ID NO: 8795 - protein, 578 aa, Zea mays subsp. mays
  peptide (1)..(578): Ceres Seq. ID no. 12373158
MATPPPPLPPMPPRHVSCGSLLQELQELWGEIGQDEMKRDRMILQLEEDCLNVYKQKVNQTRKQKADLLQELSLGEADIDKILSALGERETFPRSEKLGGTLMEQLAKIEPVLEDLRRRRDERVNEFKAIQSKIVCLQAEISGAIDHGDPAAPVVDENDLSLKRSGELKEHLNDLQTEKNGRLQKIDIQTNSIHEMCNIMSIDLKMALKDVHPSYAELGRSKPMSISNSSLDRLSEKVHALNHEKKQRLRKLQDLGSTLIELWNLMDTPTDEQRFFDHVTSLIKVSPTTAMPQGCLAHEIIEKVETEVKRLTKLKASKMKELVFKKLTDLEEIYRSVHMDIDSDSERQTLNDLIDSGRADLSELLARMDIRIAEAKEHALSRKDILEKVEKWTLASEEETWLDEYERDQNRYNAVRGAHINLKRAEKARILVSKLPSLLENLTAKIKAWEKEMGIPFIFNKVRLLDCLDEYTCTRQQKEEEKRRSRELKKLQEQFATEQGAKFGTKPSPIRPLSSRKPLGQSSNANIIGGTPTSRRVSTPMSRKGRPSSGRVQEAVKTAVAPANYVALPKDCSDISTL

SEQ ID NO: 8796 - protein, 568 aa, Zea mays subsp. mays
  peptide (1)..(568): Ceres Seq. ID no. 12373159
MPPRHVSCGSLLQELQELWGEIGQDEMKRDRMILQLEEDCLNVYKQKVNQTRKQKADLLQELSLGEADIDKILSALGERETFPRSEKLGGTLMEQLAKIEPVLEDLRRRRDERVNEFKAIQSKIVCLQAEISGAIDHGDPAAPVVDENDLSLKRSGELKEHLNDLQTEKNGRLQKIDIQTNSIHEMCNIMSIDLKMALKDVHPSYAELGRSKPMSISNSSLDRLSEKVHALNHEKKQRLRKLQDLGSTLIELWNLMDTPTDEQRFFDHVTSLIKVSPTTAMPQGCLAHEIIEKVETEVKRLTKLKASKMKELVFKKLTDLEEIYRSVHMDIDSDSERQTLNDLIDSGRADLSELLARMDIRIAEAKEHALSRKDILEKVEKWTLASEEETWLDEYERDQNRYNAVRGAHINLKRAEKARILVSKLPSLLENLTAKIKAWEKEMGIPFIFNKVRLLDCLDEYTCTRQQKEEEKRRSRELKKLQEQFATEQGAKFGTKPSPIRPLSSRKPLGQSSNANIIGGTPTSRRVSTPMSRKGRPSSGRVQEAVKTAVAPANYVALPKDCSDISTL

SEQ ID NO: 8797 - protein, 542 aa, Zea mays subsp. mays
  peptide (1)..(542): Ceres Seq. ID no. 12373160
MKRDRMILQLEEDCLNVYKQKVNQTRKQKADLLQELSLGEADIDKILSALGERETFPRSEKLGGTLMEQLAKIEPVLEDLRRRRDERVNEFKAIQSKIVCLQAEISGAIDHGDPAAPVVDENDLSLKRSGELKEHLNDLQTEKNGRLQKIDIQTNSIHEMCNIMSIDLKMALKDVHPSYAELGRSKPMSISNSSLDRLSEKVHALNHEKKQRLRKLQDLGSTLIELWNLMDTPTDEQRFFDHVTSLIKVSPTTAMPQGCLAHEIIEKVETEVKRLTKLKASKMKELVFKKLTDLEEIYRSVHMDIDSDSERQTLNDLIDSGRADLSELLARMDIRIAEAKEHALSRKDILEKVEKWTLASEEETWLDEYERDQNRYNAVRGAHINLKRAEKARILVSKLPSLLENLTAKIKAWEKEMGIPFIFNKVRLLDCLDEYTCTRQQKEEEKRRSRELKKLQEQFATEQGAKFGTKPSPIRPLSSRKPLGQSSNANIIGGTPTSRRVSTPMSRKGRPSSGRVQEAVKTAVAPANYVALPKDCSDISTL

SEQ ID NO: 8798 - DNA, 2063 bp, Zea mays subsp. mays
  misc_feature (1)..(2063): Ceres Seq. ID no. 12406630
  misc_feature (1)..(2063): Ortholog of  Ceres SEQ ID NO 13599324 as cited in SEQ ID NO 0
gatctgcgaggcttttattttagacgttgtaataaactccgcttgcaaccgcaccgaactaatcgcgccagtatcagttacttctaggagcagtcctcccgttgttccagccagcgctttccccatcggccaaggatctgtgcgatctaactaagtccccttcgaatctccccacggtctaggctaactccgtctccgccgctcgccgtcggccccgccttcggttgctgcagatcgcgaccatgggaccccgcggcgtcgccctagcgctcctcgcggcggcgctcctccaggccctcgcccccgcgtcggcgncggcggcggcggcgncggcggcggggggcctggtgcgggtcgcgctgaagaagcagcccgtcgaccagaacgcccgcgtcgccgcgcgcctctccgctgaggagaggcagcgcctcctcctccgcggcgccaacgccctgggctcggccggcggcgacgacgactccgacgtcatcgcgctcaataactacatgaacgcgcagtactttggggagatcggcgtcgggacgccgccgcagaagttcaccgtcatcttcgacaccggcagctccaacctctgggtgccgtcctccaagtgctatttctcgatcgcttgctacttccactcgcgctacaagtcagggcagtcaagtacttataagaagaacggaaaacctgctgccattcaatatggaaccggtgcaattgctggttttttcagtgaggatagcgttaaattaggtgatctggatgtgaatgatcaggaatttattgaagctacaaaggagccaggccttaccttcatggttgcaaaatttgatggcattcttgggctaggctttcaggaaatatctgttgggaatgcaacacctgtgtggtataacatggtaaaacaaggtctcatcagtgaccctgttttctctttctggtttaaccgacatgctggtgaaggagaaggtggtgaaattgtgtttggtggaatggattctagtcactacaagggtgatcacacctatgtcccagtcactcagaagggatactggcagtttaatatgggtgatgtcctggttgatggaaagttccactgggttttgtgctggtggttgtgcagcaatagcagattctggaacttccttgcttgctggccccacagccattattactgaaatcaacgaaaagatcggtgctgctggtgtagtcagccaggagtgcaagactgttgtttctcaatacggacaacagatcctagatcttctgctagctgagacgcaaccagcgaagatctgttctcaggttggcctgtgcacttttgatggcactcacggtgttagcactggaattcgtagcgtagtggatgacaaagctgggaaatcaaatggtggtctcaagagtgatccaatgtgcaatgcctgtgagatggctgtggtatggatgcagaaccaactggcccagaacaagacacaggagctcatcctgacctacattaatcagctttgtgagcgtcttccttctcccatgggagaatcagccgtggactgtgccagtcttgggtccatgcccgacattgcgttcaccattggaggcaagaagttcaagctgaaaccggagcagtacattctgaaggtcggtgaaggacaagctgcccagtgcatcagtggattcacagctatggacatcccaccacctcgtggccccctctggatcctgggcgatgttttcatgggagtctaccacaccgtcttcgattacggcaagctgagggttggcttcgcggagtcggcctaaggaacgtatggtttggcgcctcctccagaggaggcaaaacgcatgcgccgagagaaaagcttcgcttgtttttaacttgtgtatttatgcggccggcggtgtgtgtatatatgctacatgtttagtgatgctttccgagacctgagacaatgcccgtctgttttaacctggcacaaggaaatttctcgatgtgtttgccaagccaatcttgtacccaattgtcaccgtgcatcctggcaacgtgtactcaaagtatttttcct

SEQ ID NO: 8799 - protein, 312 aa, Zea mays subsp. mays
  peptide (1)..(312): Ceres Seq. ID no. 12406631
  misc_feature (25)..(25): Xaa is any aa, unknown or other
  misc_feature (30)..(30): Xaa is any aa, unknown or other
MGPRGVALALLAAALLQALAPASAXAAAAXAAGGLVRVALKKQPVDQNARVAARLSAEERQRLLLRGANALGSAGGDDDSDVIALNNYMNAQYFGEIGVGTPPQKFTVIFDTGSSNLWVPSSKCYFSIACYFHSRYKSGQSSTYKKNGKPAAIQYGTGAIAGFFSEDSVKLGDLDVNDQEFIEATKEPGLTFMVAKFDGILGLGFQEISVGNATPVWYNMVKQGLISDPVFSFWFNRHAGEGEGGEIVFGGMDSSHYKGDHTYVPVTQKGYWQFNMGDVLVDGKFHWVLCWWLCSNSRFWNFLACWPHSHYY

SEQ ID NO: 8800 - protein, 281 aa, Zea mays subsp. mays
  peptide (1)..(281): Ceres Seq. ID no. 12406632
MLVKEKVVKLCLVEWILVTTRVITPMSQSLRRDTGSLIWVMSWLMESSTGFCAGGCAAIADSGTSLLAGPTAIITEINEKIGAAGVVSQECKTVVSQYGQQILDLLLAETQPAKICSQVGLCTFDGTHGVSTGIRSVVDDKAGKSNGGLKSDPMCNACEMAVVWMQNQLAQNKTQELILTYINQLCERLPSPMGESAVDCASLGSMPDIAFTIGGKKFKLKPEQYILKVGEGQAAQCISGFTAMDIPPPRGPLWILGDVFMGVYHTVFDYGKLRVGFAESA

SEQ ID NO: 8801 - protein, 256 aa, Zea mays subsp. mays
  peptide (1)..(256): Ceres Seq. ID no. 12406633
MSQSLRRDTGSLIWVMSWLMESSTGFCAGGCAAIADSGTSLLAGPTAIITEINEKIGAAGVVSQECKTVVSQYGQQILDLLLAETQPAKICSQVGLCTFDGTHGVSTGIRSVVDDKAGKSNGGLKSDPMCNACEMAVVWMQNQLAQNKTQELILTYINQLCERLPSPMGESAVDCASLGSMPDIAFTIGGKKFKLKPEQYILKVGEGQAAQCISGFTAMDIPPPRGPLWILGDVFMGVYHTVFDYGKLRVGFAESA

SEQ ID NO: 8802 - DNA, 948 bp, Zea mays subsp. mays
  misc_feature (1)..(948): Ceres Seq. ID no. 12348096
  misc_feature (1)..(948): Ortholog of  Ceres SEQ ID NO 15173284 as cited in SEQ ID NO 61828
  misc_feature (1)..(948): Ortholog of  Ceres SEQ ID NO 15178906 as cited in SEQ ID NO 0
aaacggaaacgggggcagttggtgagttgggacttgggagccgacgctgtcggggtgatccagtcgccgccgacgccgccgaacgcgcccgcgcccgagcctccctctacgcggacgcgggaggacccttccactcccagagccgggcgtgtccgatcgtgagcccatggcggaatccatcgtctccggcgccgccgccccgccgccgggcgcgccctcgttctcctacctggccgtgttctccaactgcccgctcgtcgccgcggtgctcgccttcgccatcgcgcagtccatcaaggtcctcaccacctggtataaggagaaccggtgggacgcgaagcagctggtgggctccggcgggatgccgtcctcgcactcggccaccgtcaccgcgctcgccgtcgccgtcgggctgcaggaggggttcgccagctcgctgttcgccaccaccgccgtcttcgcctccgtggtgatgtatgatgcctttggtgttaggctacatgcagggaagcaagcagaggtcttgaaccagattgtgtacgagcttccatcagaacatccactagctgaaacaagaccgctgcgagagctgctagggcacacacctccacaggtatttgctggcggagtgcttggatttgcagtagccacatttacagcgatgatcgctgggcttggtagttgactccgcatttgaagaaatggtcaacattcgcattgaagttctggaattcaaattggacacatgtttcctagccagcttatgatagataatgcgttgtgtataggtgtatttaatatgcaaattgctgtcaatttgttgaagagaaacttgcgccattcttttgtagttaatcgacgagtgaactatatgctgtattcgttcctgtccaaagtatttggagtgattgaaagtacctcgtgataaagcattcatgagatttccgc

SEQ ID NO: 8803 - protein, 172 aa, Zea mays subsp. mays
  peptide (1)..(172): Ceres Seq. ID no. 12348097
MAESIVSGAAAPPPGAPSFSYLAVFSNCPLVAAVLAFAIAQSIKVLTTWYKENRWDAKQLVGSGGMPSSHSATVTALAVAVGLQEGFASSLFATTAVFASVVMYDAFGVRLHAGKQAEVLNQIVYELPSEHPLAETRPLRELLGHTPPQVFAGGVLGFAVATFTAMIAGLGS

SEQ ID NO: 8804 - protein, 156 aa, Zea mays subsp. mays
  peptide (1)..(156): Ceres Seq. ID no. 12348098
TETGAVGELGLGSRRCRGDPVAADAAERARARASLYADAGGPFHSQSRACPIVSPWRNPSSPAPPPRRRARPRSPTWPCSPTARSSPRCSPSPSRSPSRSSPPGIRRTGGTRSSWWAPAGCRPRTRPPSPRSPSPSGCRRGSPARCSPPPPSSPPW

SEQ ID NO: 8805 - protein, 107 aa, Zea mays subsp. mays
  peptide (1)..(107): Ceres Seq. ID no. 12348099
MPSSHSATVTALAVAVGLQEGFASSLFATTAVFASVVMYDAFGVRLHAGKQAEVLNQIVYELPSEHPLAETRPLRELLGHTPPQVFAGGVLGFAVATFTAMIAGLGS

SEQ ID NO: 8806 - DNA, 1283 bp, Zea mays subsp. mays
  misc_feature (1)..(1283): Ceres Seq. ID no. 13494403
  misc_feature (1)..(1283): Ortholog of  Ceres SEQ ID NO 14313583 as cited in SEQ ID NO 55431
  misc_feature (1)..(1283): Ortholog of  Ceres SEQ ID NO 14302844 as cited in SEQ ID NO 65379
  misc_feature (1)..(1283): Ortholog of  Ceres SEQ ID NO 15226354 as cited in SEQ ID NO 0
gcgctctgtgcacagacgaccttcttcccatcccttcccttccctctgctagtctgcttcgttcctcggccatggtggtcctcgccaagggtgagctcgagcagatcgccctcccggctgcagagccgcccccggccgacgtgcggtcggtggacctgtccgccccggcgggccccgcgcgcgaggccgcggcgcgcgcgctggtggcggcgtgcgaggagcacgggttcttccgggtgacgggccacggcgtgccgkgccagactcgtgcgcgccgcggaggccgcggcggccggngttcttcgcgcggccacagggcgagaaggaggaggagggccccacgctcgggtacggaagcaagcgcatcggcggcaacggcgacctcggctgggtcgagtacctcctgctcggtggcacacccgccgccgccgcgtcctcctcggcattattgccctgcgccgccgccccgtcgccgtccgcgccggccgggccgttacgggaccttctggacgagtacacggtggcggtgcggcggatggcgtgcgcggtgctggagctgatggcggaggggctgggcatcgccggggacgcgccgcagctggcgcggctggtggcgcgcgcggacagcgactgcatgctgcgggtgaaccactacccgccgcggccggcgctcaaccccagcctcacggggttcggcgagcacaccgacccgcagatcatctcggtgctccgcgccaacggcacctccggcctggagatcgcgctgcgggacggcgcctgggcctccgtcccgcccgacggggacgccttcttcgtcaacgtcggcgacaccctgcaggtgttgacgaacgggaggttcaggagcgtgaggcacagggtggtggtgaacagcgagaagtcccgggtgtccatggtcttcttcggcggcccgccgcccggcgagaggctgggcccgctgccgcagctcctgggcgacggcggccggagccggtaccgggacttcacctggagcgagttcaagaccagcgggtgcaggaccaggctcgcggaagaccgcctgtcccgcttcgagaagaagtagctagaggctacgtcatttgcatgaccggcggtaggatcgattaccatgtatgcttctctgtatatgtcagttgcattgccacagctctagctactggcgcccgtacgtgtatattagtggccatgctcgtattgtacgtgcacgtgtatgcacgcatatacatggtggcaccacacagggtatcatgcatccattgttatct

SEQ ID NO: 8807 - protein, 185 aa, Zea mays subsp. mays
  peptide (1)..(185): Ceres Seq. ID no. 15222925
  misc_feature (86)..(86): Xaa is any aa, unknown or other
  misc_feature (99)..(99): Xaa is any aa, unknown or other
ALCTDDLLPIPSLPSASLLRSSAMVVLAKGELEQIALPAAEPPPADVRSVDLSAPAGPAREAAARALVAACEEHGFFRVTGHGVPXQTRARRGGRGGRXSSRGHRARRRRRAPRSGTEASASAATATSAGSSTSCSVAHPPPPRPPRHYCPAPPPRRRPRRPGRYGTFWTSTRWRCGGWRARCWS

SEQ ID NO: 8808 - protein, 181 aa, Zea mays subsp. mays
  peptide (1)..(181): Ceres Seq. ID no. 15222926
MACAVLELMAEGLGIAGDAPQLARLVARADSDCMLRVNHYPPRPALNPSLTGFGEHTDPQIISVLRANGTSGLEIALRDGAWASVPPDGDAFFVNVGDTLQVLTNGRFRSVRHRVVVNSEKSRVSMVFFGGPPPGERLGPLPQLLGDGGRSRYRDFTWSEFKTSGCRTRLAEDRLSRFEKK

SEQ ID NO: 8809 - protein, 173 aa, Zea mays subsp. mays
  peptide (1)..(173): Ceres Seq. ID no. 15222927
MAEGLGIAGDAPQLARLVARADSDCMLRVNHYPPRPALNPSLTGFGEHTDPQIISVLRANGTSGLEIALRDGAWASVPPDGDAFFVNVGDTLQVLTNGRFRSVRHRVVVNSEKSRVSMVFFGGPPPGERLGPLPQLLGDGGRSRYRDFTWSEFKTSGCRTRLAEDRLSRFEKK

SEQ ID NO: 8810 - DNA, 1761 bp, Zea mays subsp. mays
  misc_feature (1)..(1761): Ceres Seq. ID no. 12349307
  misc_feature (1)..(1761): Ortholog of  Ceres SEQ ID NO 13662164 as cited in SEQ ID NO 67158
atctcttcttcctcccccagagcccctgccctcttccgccgacagcgagaaagcacgcggcgcacagcaacacgtccctgccgttccttttgactccggggatccctctcctccttgcctgccgaggaacccactagcttcctactacttcccctccgtcctctcgatccctctccccgttcccttgaccacccgagcatcaagtggcggggagggaacgcggcggcgcgggcgaggaccgatggagaaggggagcgcgccggcgatggccctggcgctcgccatgcttctcgcctgctccagcatcgctgccgtcacggcgcaggagaccgagcggatcgaaggaagcgctggtgatgtgttagaagataaccctgttgggaggctcaaggtctttgtctatgatctccccagcaaatacaacaagaagctgctgaagaaggatcctaggtgcctgaaccacatgtttgccgccgagatcttcatgcacaggttcctgttgtcgagtgctgtccgaacttttaatcctgaggaagcagattggttctacacgcccgtatacacgacatgcgatctcacccccaagggtcttcccttgcctttcaagtctcctcgaatgatgcgcagcgcgatccagctgattgctacgaattggccttactggaatagatcagagggcgctgatcatttctttgtcacgccccatgactttggtgcttgctttcattatcaggaagaaaaagcaatcggacggggaatccttcccttgcttcagcgtgctacgctggttcagaccttcggacagaagaaccatgtctgcctgaaggatgggtccatcaccatcccaccatacgcgcctcctcagaagatgcagactcaccttatccctgcagacacccctcgatccatcttcgtgtacttccgaggtctgttctatgacaccggcaatgaccccgagggtggttattatgcgagaggtgctcgcgcgtcggtctgggagaacttcaagaacaacccgctgtttgacatctcgaccgaccacccaccgacatactacgaagacatgcagcgctccgtgttctgcctctgcccgttgggctgggcaccgtggagtcccaggctggtggaggccgtggtcttcggctgcatcccggtgatcatcgcagacgacatcgtccttcccttcgcggacgccatcccgtgggaggagatcggcgtctttgtcgccgaggaggatgtcccgcggctggacagcatcctgacgtccattcccacggacgtcgtgctgaggaagcaacggctcctcgcgaacccgtctatgaagcaggccatgctgttcccacagcctgctcaagcaggagacgcgttccaccagattctgaacggtctcgcgcgcaagctcccgcacggtagcaatgtgttcctgaagcccggtgagagggccctgaactggacagccggaccaccaggcgacctcaagccttggtagcgtcttgtggatggatatgacctcttctctggaaaggaagtatggacaacatgattaatatacctgtgcctttgaactgccatgggtgcacatagtgctgaccacaagccaaatgtacattttttttgtatgtttttttcttctatctacaactgttacatatatatcttcatttctttttttctctttcccatttgcttgatgatataagagttccaaaccctgtcgaccatgtgtggatatatcataaatggaatttacaagattgtact

SEQ ID NO: 8811 - protein, 495 aa, Zea mays subsp. mays
  peptide (1)..(495): Ceres Seq. ID no. 12349308
SLLPPPEPLPSSADSEKARGAQQHVPAVPFDSGDPSPPCLPRNPLASYYFPSVLSIPLPVPLTTRASSGGEGTRRRGRGPMEKGSAPAMALALAMLLACSSIAAVTAQETERIEGSAGDVLEDNPVGRLKVFVYDLPSKYNKKLLKKDPRCLNHMFAAEIFMHRFLLSSAVRTFNPEEADWFYTPVYTTCDLTPKGLPLPFKSPRMMRSAIQLIATNWPYWNRSEGADHFFVTPHDFGACFHYQEEKAIGRGILPLLQRATLVQTFGQKNHVCLKDGSITIPPYAPPQKMQTHLIPADTPRSIFVYFRGLFYDTGNDPEGGYYARGARASVWENFKNNPLFDISTDHPPTYYEDMQRSVFCLCPLGWAPWSPRLVEAVVFGCIPVIIADDIVLPFADAIPWEEIGVFVAEEDVPRLDSILTSIPTDVVLRKQRLLANPSMKQAMLFPQPAQAGDAFHQILNGLARKLPHGSNVFLKPGERALNWTAGPPGDLKPW

SEQ ID NO: 8812 - protein, 415 aa, Zea mays subsp. mays
  peptide (1)..(415): Ceres Seq. ID no. 12349309
MEKGSAPAMALALAMLLACSSIAAVTAQETERIEGSAGDVLEDNPVGRLKVFVYDLPSKYNKKLLKKDPRCLNHMFAAEIFMHRFLLSSAVRTFNPEEADWFYTPVYTTCDLTPKGLPLPFKSPRMMRSAIQLIATNWPYWNRSEGADHFFVTPHDFGACFHYQEEKAIGRGILPLLQRATLVQTFGQKNHVCLKDGSITIPPYAPPQKMQTHLIPADTPRSIFVYFRGLFYDTGNDPEGGYYARGARASVWENFKNNPLFDISTDHPPTYYEDMQRSVFCLCPLGWAPWSPRLVEAVVFGCIPVIIADDIVLPFADAIPWEEIGVFVAEEDVPRLDSILTSIPTDVVLRKQRLLANPSMKQAMLFPQPAQAGDAFHQILNGLARKLPHGSNVFLKPGERALNWTAGPPGDLKPW

SEQ ID NO: 8813 - protein, 407 aa, Zea mays subsp. mays
  peptide (1)..(407): Ceres Seq. ID no. 12349310
MALALAMLLACSSIAAVTAQETERIEGSAGDVLEDNPVGRLKVFVYDLPSKYNKKLLKKDPRCLNHMFAAEIFMHRFLLSSAVRTFNPEEADWFYTPVYTTCDLTPKGLPLPFKSPRMMRSAIQLIATNWPYWNRSEGADHFFVTPHDFGACFHYQEEKAIGRGILPLLQRATLVQTFGQKNHVCLKDGSITIPPYAPPQKMQTHLIPADTPRSIFVYFRGLFYDTGNDPEGGYYARGARASVWENFKNNPLFDISTDHPPTYYEDMQRSVFCLCPLGWAPWSPRLVEAVVFGCIPVIIADDIVLPFADAIPWEEIGVFVAEEDVPRLDSILTSIPTDVVLRKQRLLANPSMKQAMLFPQPAQAGDAFHQILNGLARKLPHGSNVFLKPGERALNWTAGPPGDLKPW

SEQ ID NO: 8814 - DNA, 1878 bp, Zea mays subsp. mays
  misc_feature (1)..(1878): Ceres Seq. ID no. 13498997
  misc_feature (1)..(1878): Ortholog of  Ceres SEQ ID NO 12614112 as cited in SEQ ID NO 60891
  misc_feature (1)..(1878): Ortholog of  Ceres SEQ ID NO 13597678 as cited in SEQ ID NO 65375
  misc_feature (1)..(1878): Ortholog of  Ceres SEQ ID NO 13596180 as cited in SEQ ID NO 67941
  misc_feature (1)..(1878): Ortholog of  Ceres SEQ ID NO 13591190 as cited in SEQ ID NO 68044
  misc_feature (1)..(1878): Ortholog of  Ceres SEQ ID NO 13595961 as cited in SEQ ID NO 68223
  misc_feature (1)..(1878): Ortholog of  Ceres SEQ ID NO 13596089 as cited in SEQ ID NO 68373
gcacgagaccattacctagaacatcctaatcgaaaacttctctgccttcgtgaaccaccgcgcgagagagagtcgagatccgtcgctgccgtgcggcttgagagagaagcaccgtgccgggcgaacctccaccgttgggctcaatcgattgggtcagtggggttcggcaacgctcgagagaacgggcgaagtggtgatcggagcaagtggcgatttcatgccggagtcggagctccgccgcggattccgctgcgccccgcgggcagactacttcgcagctgtcgctggccgcgaccacgtcgtcatcttccctttcatggcgaagggccacatgctcccgctgctccacttcgccacggcactctcgtgcgcaacacgggaggctccgcgtgaccctgggtcaccaccccgggcaacgtggccttcgcccggagccgtctgcccgcgtcggtgggcctcgtcgcgctcccgttcccgtcgttcccgccgctgccggagggcgtcgagtccaccnacnccctcccgtgcccatcgctgcacctgacgttcatgcaggcgacggggctcctgcgcgggccgttcgccgagttcctggcgtcgctcccgtccccgccgctcgcgctcgtctccgacttcttcctcgggttcacgcgccgcgtggcggccgacgccggcgtccgccgcatcgtgttcaatggcatgtcctgcttcgcctcggcgatctgcaaggcgctcgctgcgagcccgccgaccagcttcgagcccgggaccatgatccaggtgcccggcatgccggagcacgtggcggtcagggcggaggaggttcccgatggggtcaccaagagggccgaccccgacaacccgttcacgcgcttcttcatggacgagatcggtgattcggacgtgcgcagctggggagtcctcagcaacagcctcgacgcgctcgacgcggcctacgtgtcggccttggagtcattctacgagacgggcgcccgtgcctggctcgtgggcccgctgttcatggccgccggcgacatgccggatggcgagaagaaggagcaagaccccgagggctgtctctcgtggctcgacgagagggcggcgcatctggggtcggtggtgtacatctcgttcgggacgcaggcccacatcacggacgcgcagctggacgagctggtgcacgggctggtgcagtccggccatcccttcctctgggccgtccgatctgacacgtggtcgccgccgttggacgtggggcccaacaaccggatcgtccgtggttgggttccgcagagaagtattctggcccacaaggcagttggtgggttcgtgagccattgcgggtggaactctgtgatggagagcctcgccgccgggaagcccatgctggcgtggccgatgatcgcggagcagcacctgaacgcaaggcacgtggccaacatcttaggcgccggcgtcaggatagccctgaaggttggcgctgacgtcgtcgggagcacggaggtggaggagaaggttcgggagctgatggacgctgaaagcaaggcggcgaagcggatgcgggagagggctgcgtgggcgcagcaagcagccaagtcagcggtgagccacggtggaacctgccatggctttgctcaagcttgtggaagagctacaggagacctatgatgatggggtcgtaggcaaatgtgcgaatagtgtttagaatgatctttccagtaattctgttaagctggtgtttagaatgatcttgctagtacttctattaggcttagctacgtatgtgtcattagcgtctatggtgtcttctcaaaacacaaatcaatcgactcttagcaggtgttttgataattgatcataaataaaaatcaacgacat

SEQ ID NO: 8815 - protein, 372 aa, Zea mays subsp. mays
  peptide (1)..(372): Ceres Seq. ID no. 13498998
MQATGLLRGPFAEFLASLPSPPLALVSDFFLGFTRRVAADAGVRRIVFNGMSCFASAICKALAASPPTSFEPGTMIQVPGMPEHVAVRAEEVPDGVTKRADPDNPFTRFFMDEIGDSDVRSWGVLSNSLDALDAAYVSALESFYETGARAWLVGPLFMAAGDMPDGEKKEQDPEGCLSWLDERAAHLGSVVYISFGTQAHITDAQLDELVHGLVQSGHPFLWAVRSDTWSPPLDVGPNNRIVRGWVPQRSILAHKAVGGFVSHCGWNSVMESLAAGKPMLAWPMIAEQHLNARHVANILGAGVRIALKVGADVVGSTEVEEKVRELMDAESKAAKRMRERAAWAQQAAKSAVSHGGTCHGFAQACGRATGDL

SEQ ID NO: 8816 - protein, 322 aa, Zea mays subsp. mays
  peptide (1)..(322): Ceres Seq. ID no. 13498999
MSCFASAICKALAASPPTSFEPGTMIQVPGMPEHVAVRAEEVPDGVTKRADPDNPFTRFFMDEIGDSDVRSWGVLSNSLDALDAAYVSALESFYETGARAWLVGPLFMAAGDMPDGEKKEQDPEGCLSWLDERAAHLGSVVYISFGTQAHITDAQLDELVHGLVQSGHPFLWAVRSDTWSPPLDVGPNNRIVRGWVPQRSILAHKAVGGFVSHCGWNSVMESLAAGKPMLAWPMIAEQHLNARHVANILGAGVRIALKVGADVVGSTEVEEKVRELMDAESKAAKRMRERAAWAQQAAKSAVSHGGTCHGFAQACGRATGDL

SEQ ID NO: 8817 - protein, 298 aa, Zea mays subsp. mays
  peptide (1)..(298): Ceres Seq. ID no. 13499000
MIQVPGMPEHVAVRAEEVPDGVTKRADPDNPFTRFFMDEIGDSDVRSWGVLSNSLDALDAAYVSALESFYETGARAWLVGPLFMAAGDMPDGEKKEQDPEGCLSWLDERAAHLGSVVYISFGTQAHITDAQLDELVHGLVQSGHPFLWAVRSDTWSPPLDVGPNNRIVRGWVPQRSILAHKAVGGFVSHCGWNSVMESLAAGKPMLAWPMIAEQHLNARHVANILGAGVRIALKVGADVVGSTEVEEKVRELMDAESKAAKRMRERAAWAQQAAKSAVSHGGTCHGFAQACGRATGDL

SEQ ID NO: 8818 - DNA, 1291 bp, Zea mays subsp. mays
  misc_feature (1)..(1291): Ceres Seq. ID no. 12401920
  misc_feature (1)..(1291): Ortholog of  Ceres SEQ ID NO 12467471 as cited in SEQ ID NO 55509
aaaaaaaattgcacgcaagggtccacgcggcgaacagatcgtgccgttccgcggcggcgtcggtgcggcgctggagccgaagtgaaaagtcgatcgggattgggccgttgggggtgcgatacccctcgcctcgaatgcgagctccgtaggtccgcccccccggcggatggccgagctgggccgccgccgccgcccgctgggatgaggcagcgtgaggagtcgcgctcgcggcttccctgcccccaggcctccgctctgaatatccccgacgcgacggtaaccgaacaagcctcagttagaaaggctaagatcagagcatctccgtgtctccacaacacatcctggattcgcaattattgaggtgcctccactataaaaggccaaccatcctcaaggaatgaacacagccagccagcaagcaagcagagaacaaggataacacagcaactgaaaaccttattaccaagaacaaacaactacaagaggctttgcaagttcacagaggcagctgttcactgcgaatgaacaaccagaggaagcctggagactggaactgcaagaactgccagcatctcaacttcagccgccgtgactactgccagcgttgccgtgatccacgccctgacttgcagttcggcgacggctatagcacggttggtgtgctgacctccctggacatccgcccaggtgactggtactgcagctgcggctaccacaacttcgccagccgcagcagctgcttcaagtgcggcacgatcgtcagagacttcccagcggggcaaggcgcagccggtgctgagggtgactttgctggtggacgcgacagcgccgcagtccgtgctgggtggaaagctggcgactggatctgcacgaggcctggttgcaacgtacacaactttgcgagcaggatggagtgctataggtgcaatgcaccaagggaggcagcaggcaccgggaggtaagaggcgactggggtgataccaagagcgtgagatgtgacgagctgggccgagcagtggaacctactgccgtcacacactcaccatcaggcatccaggaaggatgagtctactacgtacacgactatattgctgattgccgcgcgtagtgccgctgctgtggtttgcgtgggtggagaagtacccaagcgcaacacctgttacgtgtgttgtttgctcctttttgaggctgttgattcagtgacagctgagttgtacggcctgatgatgtactcgcattgtgtatttgtcttaaacagcatatataattatgtaataataagtgcttgctt

SEQ ID NO: 8819 - protein, 146 aa, Zea mays subsp. mays
  peptide (1)..(146): Ceres Seq. ID no. 12401921
MNNQRKPGDWNCKNCQHLNFSRRDYCQRCRDPRPDLQFGDGYSTVGVLTSLDIRPGDWYCSCGYHNFASRSSCFKCGTIVRDFPAGQGAAGAEGDFAGGRDSAAVRAGWKAGDWICTRPGCNVHNFASRMECYRCNAPREAAGTGR

SEQ ID NO: 8820 - protein, 119 aa, Zea mays subsp. mays
  peptide (1)..(119): Ceres Seq. ID no. 12401922
KKNCTQGSTRRTDRAVPRRRRCGAGAEVKSRSGLGRWGCDTPRLECELRRSAPPADGRAGPPPPPAGMRQREESRSRLPCPQASALNIPDATVTEQASVRKAKIRASPCLHNTSWIRNY

SEQ ID NO: 8821 - DNA, 1725 bp, Zea mays subsp. mays; identical to SEQ ID NO: 7622
  misc_feature (1)..(1725): Ceres Seq. ID no. 12408676
  misc_feature (1)..(1725): Ortholog of  Ceres SEQ ID NO 13600071 as cited in SEQ ID NO 0

SEQ ID NO: 8822 - protein, 498 aa, Zea mays subsp. mays; identical to SEQ ID NO: 7623
  peptide (1)..(498): Ceres Seq. ID no. 12408677

SEQ ID NO: 8823 - protein, 460 aa, Zea mays subsp. mays; identical to SEQ ID NO: 3042
  peptide (1)..(460): Ceres Seq. ID no. 12408678

SEQ ID NO: 8824 - protein, 280 aa, Zea mays subsp. mays; identical to SEQ ID NO: 2639
  peptide (1)..(280): Ceres Seq. ID no. 12408679

SEQ ID NO: 8825 - DNA, 1207 bp, Zea mays subsp. mays; identical to SEQ ID NO: 7796
  misc_feature (1)..(1207): Ceres Seq. ID no. 13492697
  misc_feature (1)..(1207): Ortholog of  Ceres SEQ ID NO 13594341 as cited in SEQ ID NO 57917
  misc_feature (1)..(1207): Ortholog of  Ceres SEQ ID NO 13656441 as cited in SEQ ID NO 65703

SEQ ID NO: 8826 - protein, 320 aa, Zea mays subsp. mays; identical to SEQ ID NO: 7797
  peptide (1)..(320): Ceres Seq. ID no. 13492698

SEQ ID NO: 8827 - DNA, 599 bp, Zea mays subsp. mays
  misc_feature (1)..(599): Ceres Seq. ID no. 12381635
  misc_feature (1)..(599): Ortholog of  Ceres SEQ ID NO 13596509 as cited in SEQ ID NO 62004
gtgattgggttggtcgcttggttcttccctgccggaagatacctttcgttcggtgtcgccaactcgccattcttgggaggtcttggtcgggaccggtgctgatggaggagaggtacgaggcgctgaaggagctgggggccggcaacttcggcgtggcgaggctggtcagggacaagcggaccaaggagctggtagccgtcaagtacatcgagaggggcaagaagattgatgagaacgtgcagagggagatcatcaatcaccagtcgctccggcaccctaacatcgtacggttcaaggaggtttgtctaacacccacacatcttgctattgtcatggaatatgctgctggtggagagctatttgagaaaatctgctcagcagggcgattcagtgaagatgagtccaggtatttcttccaacagctgatatcaggggtcagctactgccattctatggaaatttgtcaccgtgatcttaaacttgagaacaccctccttgatgggagtccaacacctcgtatgaaaatttgcgactttggttactcaaagtctgctttgctgcattccaaaccaaaatcaacagttggaactccagcatac

SEQ ID NO: 8828 - protein, 199 aa, Zea mays subsp. mays
  peptide (1)..(199): Ceres Seq. ID no. 12381636
DWVGRLVLPCRKIPFVRCRQLAILGRSWSGPVLMEERYEALKELGAGNFGVARLVRDKRTKELVAVKYIERGKKIDENVQREIINHQSLRHPNIVRFKEVCLTPTHLAIVMEYAAGGELFEKICSAGRFSEDESRYFFQQLISGVSYCHSMEICHRDLKLENTLLDGSPTPRMKICDFGYSKSALLHSKPKSTVGTPAY

SEQ ID NO: 8829 - protein, 166 aa, Zea mays subsp. mays
  peptide (1)..(166): Ceres Seq. ID no. 12381637
MEERYEALKELGAGNFGVARLVRDKRTKELVAVKYIERGKKIDENVQREIINHQSLRHPNIVRFKEVCLTPTHLAIVMEYAAGGELFEKICSAGRFSEDESRYFFQQLISGVSYCHSMEICHRDLKLENTLLDGSPTPRMKICDFGYSKSALLHSKPKSTVGTPAY

SEQ ID NO: 8830 - DNA, 600 bp, Zea mays subsp. mays
  misc_feature (1)..(600): Ceres Seq. ID no. 12350602
  misc_feature (1)..(600): Ortholog of  Ceres SEQ ID NO 12637709 as cited in SEQ ID NO 384
accagccggtgttggtttcagcttgtattcccactctgtcgcacagcgtcgcccgtcgccgctgagatcctaggaagaaatggagctctctcgcaagctcttcacggccgtcctcctcgtcatgctgctgctgctgtccgcagaggtcgggccggtggcggtggcggaggcgcggacgtgccagtcgcagagccacaggttccggggcccctgcctccgccggtccaactgcgccaacgtctgcaggaccgaggggttccccggcggcaggtgccgcggcttccgccgccgctgcttctgcaccacgcactgccactgattcgctcgcccagcggccggctggcgtcgccgtcgatcgcgtcgcgaccagtccatggctccatgcatgaataacaagggtgtgcgcggtttgtgatgccaaattgtatcgtcgtcgtgtgttgaagcgttcgatcgtcggtctagtagtgtgcctgtgagcagcggcgtgctgttgtacgtacgtctgcctctgttgttccatgtttcgggattttccatagcaaatgcatgcgtcgagatctactccgaaagaaattcgatagatttcgcataatttcc

SEQ ID NO: 8831 - protein, 130 aa, Zea mays subsp. mays
  peptide (1)..(130): Ceres Seq. ID no. 12350603
TSRCWFQLVFPLCRTASPVAAEILGRNGALSQALHGRPPRHAAAAVRRGRAGGGGGGADVPVAEPQVPGPLPPPVQLRQRLQDRGVPRRQVPRLPPPLLLHHALPLIRSPSGRLASPSIASRPVHGSMHE

SEQ ID NO: 8832 - protein, 79 aa, Zea mays subsp. mays
  peptide (1)..(79): Ceres Seq. ID no. 12350604
MELSRKLFTAVLLVMLLLLSAEVGPVAVAEARTCQSQSHRFRGPCLRRSNCANVCRTEGFPGGRCRGFRRRCFCTTHCH

SEQ ID NO: 8833 - protein, 65 aa, Zea mays subsp. mays
  peptide (1)..(65): Ceres Seq. ID no. 12350605
MLLLLSAEVGPVAVAEARTCQSQSHRFRGPCLRRSNCANVCRTEGFPGGRCRGFRRRCFCTTHCH

SEQ ID NO: 8834 - DNA, 881 bp, Zea mays subsp. mays
  misc_feature (1)..(881): Ceres Seq. ID no. 12356648
  misc_feature (1)..(881): Ortholog of  Ceres SEQ ID NO 13594466 as cited in SEQ ID NO 51247
  misc_feature (1)..(881): Ortholog of  Ceres SEQ ID NO 13622409 as cited in SEQ ID NO 0
aagtttttgtattcgtccaagcccggcccatccaccatccgctgctactcttcatcacaaaccctaataaacccatctccgcctctggttcgtcctccatctcctcccaaatcgcggcaccaagcacccgaccgctttccgcatggcttcccacatcgacttccgctgcttggatgagggcctcggcggcgagcgcggcaagcgcaagcgccgcgaggatgccgaggcggcggccgcggattccatggacctcgatgccgacgcgcaccggccgtctaagctccgcgccatgccttccctctccgacccctcgaagccggcctccttcggccagcccacctacgacggcgtcatcgcagggcggttgtcgggacggcggtggaaggaggcccgcacccggcgagcgtcggccgtggcggtgtcgcggaagccgaccccgctggagcagcgcgtccgggagaagtcgctgaagcgcgcgtaccaggcccgcaaggcggagctcaaggaagagatccggcagaacaaggtggccaagcggaaggcccgcgaggagcgtgagaagcggaagcaggagaacgtgctccgcacgggcaccaaactgcaaagggtcaccaacccaaagacgatccagaagatcgccaagtccaagaagcgcaagcagctcaaggtcgtccccgacgagttcctcggcggcaagaagtcggtggccaaccggcgcatgcaggtgcctggactcgaaaattgaatctgacaggcctcgatctctctgtatctgttcggtggcggcgttgagttggcaaggttagttcgacgacgattttgtacttgtttctggttatgtagtttgaagcgtgattaaattaagcgattaaaatggcgtg

SEQ ID NO: 8835 - protein, 200 aa, Zea mays subsp. mays
  peptide (1)..(200): Ceres Seq. ID no. 12356649
MASHIDFRCLDEGLGGERGKRKRREDAEAAAADSMDLDADAHRPSKLRAMPSLSDPSKPASFGQPTYDGVIAGRLSGRRWKEARTRRASAVAVSRKPTPLEQRVREKSLKRAYQARKAELKEEIRQNKVAKRKAREEREKRKQENVLRTGTKLQRVTNPKTIQKIAKSKKRKQLKVVPDEFLGGKKSVANRRMQVPGLEN

SEQ ID NO: 8836 - protein, 166 aa, Zea mays subsp. mays
  peptide (1)..(166): Ceres Seq. ID no. 12356650
MDLDADAHRPSKLRAMPSLSDPSKPASFGQPTYDGVIAGRLSGRRWKEARTRRASAVAVSRKPTPLEQRVREKSLKRAYQARKAELKEEIRQNKVAKRKAREEREKRKQENVLRTGTKLQRVTNPKTIQKIAKSKKRKQLKVVPDEFLGGKKSVANRRMQVPGLEN

SEQ ID NO: 8837 - protein, 155 aa, Zea mays subsp. mays
  peptide (1)..(155): Ceres Seq. ID no. 12356651
VFVFVQARPIHHPLLLFITNPNKPISASGSSSISSQIAAPSTRPLSAWLPTSTSAAWMRASAASAASASAARMPRRRPRIPWTSMPTRTGRLSSAPCLPSPTPRSRPPSASPPTTASSQGGCRDGGGRRPAPGERRPWRCRGSRPRWSSASGRSR

SEQ ID NO: 8838 - DNA, 1643 bp, Zea mays subsp. mays
  misc_feature (1)..(1643): Ceres Seq. ID no. 12347478
  misc_feature (1)..(1643): Ortholog of  Ceres SEQ ID NO 13662984 as cited in SEQ ID NO 64419
gtgcgggcgtgttgtggtccgctgatctcgttcgcgggacgccggggggtggtggtggtggcagcggtggttggtggtgcgcggcgtgaaagaaagaaagaaaaaaaaaaaaggcccgccgctttgcgctgctctgcttccgtaggtgtcacgagatttggccctagcctttcgctttcctttttcatctcgctcacaagggaagggaccgagggacgagggagacgttggggaggggagcgagcgagccgtaacatccgagctgttccaatggcgacccctgccgttgctttcgtcgccagcgctttgttggggcggtggtagcgctaggagcggagcagtactaggttggtaggtggttgtagctttgcgcgtgacccgagcgcgcgctcgctcgctcctgtgcctctctacctcgcttgcgtgcgccgggaaggcagtgggtggctggtcggttctcgcaagaggttgctggtgctgttcctcctcccccggttgatgagcatggggcattgctccgagcagcggacggggttcgaggtgactaaggactggaacggcgccgaccagttcgcgatccggtccccgcggggggcgtccgttcgggtctgcctgcacggcgggcaggtcgtctcgtggaggaaccaccgcggcgaggagctcctcttcagcagcagcaaggcaatcttcaagccgccaagagcgacccgtggtggcattccgatatgcttcccacagtttggaaactgtggaacattggagcagcatggatttgcaaggaacaagatatggacaatagacgatgaggctccacctctaaattatggtgataataacagcaacaaagcttctgttgaccttctgctaaagccatctgaagatgacctgaagtgctggccacactgttttgagttacgtctcagagtctctctttcaatggatggagacctttcactgatatcacgggtcagaaatgttaatgggaagccattcagtttcgcatttgcttaccatacatacctttctgtttctgacatcagtgaagtgaggatagaaggtctggagacccttgattatcttgacaaccttagccagcgggaacgttttaccgaacagggagatgccataacatttgaatcagaggttgatcgagtctatgttggctgcccaggcgtaatagctgttcttgaccatggaaagaaacgcacattcatcgtgcggaaagaagggcttcctgatattgttgtgtggaacccctgggagaagaagtccaagacgatggcagacttcggcgacgacgagtacaagcagatgctgtgcgtggatgcagccgcggtcgagagggccatcacgctgaagcccggggaggagtggacggggaagctggagctctccgccgtggcgtcgaccaactgcagcgaccacctggatcgcccgggcaggctgtagagcgctgggtgggtgggttcgttcgcccctgacgaaaggcatgtactagttttttttcatgtacatgggggcgctaggtccggcccttgcaggctgcagtatcatctacctgtcaggtgtgtcatgtgtgagtttaaacttatgtcagatccaagtattgctgtgatcgacatgttcgatgttcctggactgcg

SEQ ID NO: 8839 - protein, 316 aa, Zea mays subsp. mays; identical to SEQ ID NO: 1486
  peptide (1)..(316): Ceres Seq. ID no. 12347479

SEQ ID NO: 8840 - protein, 314 aa, Zea mays subsp. mays; identical to SEQ ID NO: 1487
  peptide (1)..(314): Ceres Seq. ID no. 12347480

SEQ ID NO: 8841 - protein, 170 aa, Zea mays subsp. mays; identical to SEQ ID NO: 1488
  peptide (1)..(170): Ceres Seq. ID no. 12347481

SEQ ID NO: 8842 - DNA, 1680 bp, Zea mays subsp. mays
  misc_feature (1)..(1680): Ceres Seq. ID no. 12349311
  misc_feature (1)..(1680): Ortholog of  Ceres SEQ ID NO 13581327 as cited in SEQ ID NO 51165
  misc_feature (1)..(1680): Ortholog of  Ceres SEQ ID NO 12610002 as cited in SEQ ID NO 55823
  misc_feature (1)..(1680): Ortholog of  Ceres SEQ ID NO 14308310 as cited in SEQ ID NO 58573
  misc_feature (1)..(1680): Ortholog of  Ceres SEQ ID NO 14308795 as cited in SEQ ID NO 59140
  misc_feature (1)..(1680): Ortholog of  Ceres SEQ ID NO 14313354 as cited in SEQ ID NO 61520
  misc_feature (1)..(1680): Ortholog of  Ceres SEQ ID NO 13596744 as cited in SEQ ID NO 62765
atagccaacccttttgataaagaaacgggcctacactacacgggacacctgcctcctcttctcccatctctccctcttcccctctccctctcgtggccacgactgccgctgccgccctacgccaggtgtccaggtcatctccggcccattcgccggcgacgagcaccccactagatcgaccgagatatggacggcctgtggcatctgggggacgagctccgcgggcagcccaaggtggtggaggaccgccagtggtcgctcatgacgtccaagctggcagagatcaccaggtccaggggcgagaggacgaacgacctcgactacgccaggatgaacgccgcccccgacgccaagcggtggggcaaggcggcgtcctaccagcaccatgacgagggcaggatggaccaccacgtcggcctcagcctcaagatgaacgatctcaagatgaacgaggccgccgctgccgccgtcatgaagctccccttccgcggcgtgccctacaacgtcaacccgatgtaccccaaggggagcaacgccaacgccaatgtcaacgcgttcaagatgaatgtcggggtgaacaagtactccagcagcgcgaacgggaaagacgccggcgggaaaagcagtggcggcggcagcaacaacaacagcggcggcggaggcaacggcaatgggaccgccaacggcagttccgcggtcgacaagcgcttcaagacgttgccgacgagcgagatgctgccgaagaacgaagtccttggtgggtacatctttgtctgcaacaacgataccatgcaggaggacctcaagaggcagctttttggattgccagcaagatatcgtgattcagtccgggcaattactcctggcctgccgcttttcctctataactacaccactcaccagcttcatggggtatttgaggctgccagtttcggtgggtctaatatcgatcccactgcatgggaggataagaagtgtaaaggtgaatctagattcccagcgcaggtgaggatccgcgttaggaagctctgcaagccgttggaagaggattccttcaggccagttttgcaccactatgatggtccaaagtttcgcctcgagctctccatcgcggagaccctgtccctgctagacctatgcgagaaggaaggcatctgagctgttggctgcctcgtgaggttctagtaaatatcaatcatccttgtatgttctgtagatggtggttggcaatgttgtttatttttcaagcgcaagctgctgccggtctcgttttccctgtcctggatggaagcaaagggacctggtactttgaaggccccccctcaaacataagctgtgagcctgtcagtgcacgtgtccgccgttgtcgtcaagaaccaaaccaaatcatgaaatcttgcgccgacggagagttggagcgtgtatgttttgctatctctatctacatgtctcagtagagtggatataccctggggtccccaaaagatgggggcctcaggcctgtatgtaacactacgtgtaatggttaaggtgaatgtgccgtgaggccccccaaaagttggagtgtgtatttttgttgtcaccttgaaccgactttgcgtatgctttttttagtgctgctaccttttgcgctgtgtttggcttctggttcatgtttttgtaatataaggtggcttgcgc

SEQ ID NO: 8843 - protein, 323 aa, Zea mays subsp. mays
  peptide (1)..(323): Ceres Seq. ID no. 12349312
MDGLWHLGDELRGQPKVVEDRQWSLMTSKLAEITRSRGERTNDLDYARMNAAPDAKRWGKAASYQHHDEGRMDHHVGLSLKMNDLKMNEAAAAAVMKLPFRGVPYNVNPMYPKGSNANANVNAFKMNVGVNKYSSSANGKDAGGKSSGGGSNNNSGGGGNGNGTANGSSAVDKRFKTLPTSEMLPKNEVLGGYIFVCNNDTMQEDLKRQLFGLPARYRDSVRAITPGLPLFLYNYTTHQLHGVFEAASFGGSNIDPTAWEDKKCKGESRFPAQVRIRVRKLCKPLEEDSFRPVLHHYDGPKFRLELSIAETLSLLDLCEKEGI

SEQ ID NO: 8844 - protein, 298 aa, Zea mays subsp. mays
  peptide (1)..(298): Ceres Seq. ID no. 12349313
MTSKLAEITRSRGERTNDLDYARMNAAPDAKRWGKAASYQHHDEGRMDHHVGLSLKMNDLKMNEAAAAAVMKLPFRGVPYNVNPMYPKGSNANANVNAFKMNVGVNKYSSSANGKDAGGKSSGGGSNNNSGGGGNGNGTANGSSAVDKRFKTLPTSEMLPKNEVLGGYIFVCNNDTMQEDLKRQLFGLPARYRDSVRAITPGLPLFLYNYTTHQLHGVFEAASFGGSNIDPTAWEDKKCKGESRFPAQVRIRVRKLCKPLEEDSFRPVLHHYDGPKFRLELSIAETLSLLDLCEKEGI

SEQ ID NO: 8845 - protein, 275 aa, Zea mays subsp. mays
  peptide (1)..(275): Ceres Seq. ID no. 12349314
MNAAPDAKRWGKAASYQHHDEGRMDHHVGLSLKMNDLKMNEAAAAAVMKLPFRGVPYNVNPMYPKGSNANANVNAFKMNVGVNKYSSSANGKDAGGKSSGGGSNNNSGGGGNGNGTANGSSAVDKRFKTLPTSEMLPKNEVLGGYIFVCNNDTMQEDLKRQLFGLPARYRDSVRAITPGLPLFLYNYTTHQLHGVFEAASFGGSNIDPTAWEDKKCKGESRFPAQVRIRVRKLCKPLEEDSFRPVLHHYDGPKFRLELSIAETLSLLDLCEKEGI

SEQ ID NO: 8846 - DNA, 1431 bp, Zea mays subsp. mays
  misc_feature (1)..(1431): Ceres Seq. ID no. 12407603
  misc_feature (1)..(1431): Ortholog of  Ceres SEQ ID NO 15169244 as cited in SEQ ID NO 58988
acacttcgatcagtgtcgccaacaagtagctagacgatgagcagaggagctgagaagaagaattggccgccgtctcggtcttcttcctcctcctcttcttcaccgacgtcgtcgtgggtcgccagcaggtccatggcggggttctaccgctacccgtcctccactcgcacctccggcaaggacagaacccagccgccgccagcaccagctgcaccgacacaacaacaaggcgacaagagcagcagcaagaagaagaggaggagtatcagcatcggccggagcatcacgtgcgcgggctccatctgcagtaccaaggagagctcggtcatgagccgggaccgccgcggcgcctccagcaggtcgctcagggcaccctacgtcgacgtcgacgtcaacgacgcctctgccgccgccatctccgccacgtcgtccttcaactcggagaccaccgtggcgtcgacgaccaccgtcacgtcctcgtcctcgtcctcgtcctcgtcctcgtccgtcgggacctccttcaggggcgtgcacatcaggaagctctccggctgctacgagtgccactccgtcttcgaccccaggagcttcggcgccgccgccttcccctgcgcggactgcgacgaggtgttcgccaaggcagagtcgctacagctccacagggcaaccaggcatgcagttttggagctgggccccgaggacacgagcaggaacatcgtggagatcatcttccagtccagctggccggccgggaagcagcagcaggcgccggtctgcaagatcgagcgggtactcaaggtgcagagcagcgacaggaccctggagaggttcgagcagtacaaggagagcgtcagggagagggcgagcagcgaccggggcaggaagaacaaccctcggtgcgtcgccgacggcaacgagctcctcaggttccactgcaccaccttcacctgctccctcggcctcgccggcagcaccgcgctgtgccgggcgccgtgcaagctgtgcgccatcgtcagggacggtttcagggtcgacgacgacggcaagattgcgacgatgggcaccagcgggcgcgcccacgacatggcgcaggtgctgtcggagtcggacggtgacaagagagcaatgctcgtgtgcagggtcgtcgcggggagggtgaagaagaaggccagcgatgagaagaagccttcagaggactctggctttgactctgtcagccccagcacagaaggcgtctgctccgatttggatcaactctttgtcttcaatcagagagctatactgccctgctttgtagtcatatacagtggctattagggttgtagggacctaagttataacttattagctagttttgtttcctttcactgtcacctgctcctttaatccagttcttcttttttttatgggccagaagtgcaagttttggcg

SEQ ID NO: 8847 - protein, 426 aa, Zea mays subsp. mays
  peptide (1)..(426): Ceres Seq. ID no. 12407604
MSRGAEKKNWPPSRSSSSSSSSPTSSWVASRSMAGFYRYPSSTRTSGKDRTQPPPAPAAPTQQQGDKSSSKKKRRSISIGRSITCAGSICSTKESSVMSRDRRGASSRSLRAPYVDVDVNDASAAAISATSSFNSETTVASTTTVTSSSSSSSSSSSVGTSFRGVHIRKLSGCYECHSVFDPRSFGAAAFPCADCDEVFAKAESLQLHRATRHAVLELGPEDTSRNIVEIIFQSSWPAGKQQQAPVCKIERVLKVQSSDRTLERFEQYKESVRERASSDRGRKNNPRCVADGNELLRFHCTTFTCSLGLAGSTALCRAPCKLCAIVRDGFRVDDDGKIATMGTSGRAHDMAQVLSESDGDKRAMLVCRVVAGRVKKKASDEKKPSEDSGFDSVSPSTEGVCSDLDQLFVFNQRAILPCFVVIYSGY

SEQ ID NO: 8848 - protein, 394 aa, Zea mays subsp. mays
  peptide (1)..(394): Ceres Seq. ID no. 12407605
MAGFYRYPSSTRTSGKDRTQPPPAPAAPTQQQGDKSSSKKKRRSISIGRSITCAGSICSTKESSVMSRDRRGASSRSLRAPYVDVDVNDASAAAISATSSFNSETTVASTTTVTSSSSSSSSSSSVGTSFRGVHIRKLSGCYECHSVFDPRSFGAAAFPCADCDEVFAKAESLQLHRATRHAVLELGPEDTSRNIVEIIFQSSWPAGKQQQAPVCKIERVLKVQSSDRTLERFEQYKESVRERASSDRGRKNNPRCVADGNELLRFHCTTFTCSLGLAGSTALCRAPCKLCAIVRDGFRVDDDGKIATMGTSGRAHDMAQVLSESDGDKRAMLVCRVVAGRVKKKASDEKKPSEDSGFDSVSPSTEGVCSDLDQLFVFNQRAILPCFVVIYSGY

SEQ ID NO: 8849 - protein, 329 aa, Zea mays subsp. mays
  peptide (1)..(329): Ceres Seq. ID no. 12407606
MSRDRRGASSRSLRAPYVDVDVNDASAAAISATSSFNSETTVASTTTVTSSSSSSSSSSSVGTSFRGVHIRKLSGCYECHSVFDPRSFGAAAFPCADCDEVFAKAESLQLHRATRHAVLELGPEDTSRNIVEIIFQSSWPAGKQQQAPVCKIERVLKVQSSDRTLERFEQYKESVRERASSDRGRKNNPRCVADGNELLRFHCTTFTCSLGLAGSTALCRAPCKLCAIVRDGFRVDDDGKIATMGTSGRAHDMAQVLSESDGDKRAMLVCRVVAGRVKKKASDEKKPSEDSGFDSVSPSTEGVCSDLDQLFVFNQRAILPCFVVIYSGY

SEQ ID NO: 8850 - DNA, 2052 bp, Zea mays subsp. mays
  misc_feature (1)..(2052): Ceres Seq. ID no. 12354033
  misc_feature (1)..(2052): Ortholog of  Ceres SEQ ID NO 15171212 as cited in SEQ ID NO 56899
  misc_feature (1)..(2052): Ortholog of  Ceres SEQ ID NO 13657610 as cited in SEQ ID NO 66165
  misc_feature (1)..(2052): Ortholog of  Ceres SEQ ID NO 12613725 as cited in SEQ ID NO 68196
  misc_feature (1)..(2052): Ortholog of  Ceres SEQ ID NO 13598312 as cited in SEQ ID NO 68448
agactctctctcgcgtcgggcacgcagtcgcacaagtagtgaactcaaacgggatctcctgctctgcctccctcgtcttcctctgcccgtgcgcgtttcagagcacgtacggagagggcgagcagcagcttgcggccgggcaccatcatggaggacgtcgcgccgggtgcggagccgtgggaggggtacgtggactggaggaaccggccggcgaccaggtcccggcacggcggcatggccgccgcctccttcgtgctcgtggtggaggtgctggagaacctggcgttcctggcgaacgccagcaacctggtgacctacctgatggggttcatgcactactcgccgtcgcagtcggccacggcggtcaccaacttcatgggcacggccttcctgctcgcgctcctcggcggcttcctctccgacgccttcttcaccacctacaccatctacatcgccagcgccttcatcgagctcatggggctggtgatcctgacggtccaggcgcggacgcagtcgctgatgccaccgcagtgcgccaagccagcggctccgtgcgagcccgtgtcgggcgccaagaaggcgatgctgttcgcggggctgtacctcacggcgctgggcgtgggcgggatcaagggctccctcccctcccacggcgcggagcagttcgacgagcatgcggcgcgggggcgcaagggccgctccaccttcttcaactacttcgtcttctgcctctcctgcggcgccctcgtcgccgtcaccttcgccgtctgggtcgaggacaacaagggctggcagtgggggttcggcatctccaccatcgccatcctgctctccatcccgctcttcgtcgccggctccagccgctaccggaacaaggtgcccacggggagcccgctcaccaccatcgccaaggtcctcatcgccgccgcgctcgcgcgccgcggctgcgcgccgagctccagcaacggcgccgtcatcgaccgcgcgcccagccccacggggagcaccgacatgaaagagtactgcaagcccggggacatggaggagatcacggtctccggcgccgcgatcgtggcgtcgtcgcccgccgagccgtcccgcgaactcgcgttcctcaaccgcgcggtgcagtgccagccgccgcggcacggccgcctggcgtgcacggtccaggaggtggaggacgtcaagatcgtgctcatggtgctgcccatcttcttgtccaccatcatgctcaactgctgcctggcgcagctgtccaccttctcggtcgagcaagcggccaccatggacacgcgcgtgggcagcctcaccgtgccgccggcgtcgctccccgtcttccctgtcacgttcatcatcatcctcgcgcccgtctacgatcacgtcatcgtcccgttcgcgcgccgcgtcacggggaccgagatgggcatcacacacctccagcgtatcggcaccgggctggtgctgtccatcgtcgcgatggccgtggccgccgtcgtcgaggtcaagcgcaagaacgtggcgtcccacaacgggatgctggactccaccaagccgctgcccatcaccttcttctggatcgcgttccagtacctgttcctgggttccgcggacctgttcacgttggcggggctgctcgagttcttcttcagcgaggcgccggcgcggatgagatccctggcgacgtcgctgtcgtgggcgtcgctggcgctgggttattacctcagctcggtgctggtgtccatcgtcaacagcgtgacagggcgcggcgaccaccggccgtggctgcagggtgccagcctgaaccattaccacctcgagaggttctactgggtcatgtgcgtgctcagcaccatcaactacctcttcttcctgttcttggccgtcaggtacaagtacagaaacgcgggggtcatcaaaggctaatgccatcttcatatggccagtcggcgttgccattaatccccgtggtcttgagcaatgctgggtgtaactaactgtttatataggtggaaaacagagggttgaagaaaatgtaggttaattttctgc

SEQ ID NO: 8851 - protein, 664 aa, Zea mays subsp. mays
  peptide (1)..(664): Ceres Seq. ID no. 12354034
TLSRVGHAVAQVVNSNGISCSASLVFLCPCAFQSTYGEGEQQLAAGHHHGGRRAGCGAVGGVRGLEEPAGDQVPARRHGRRLLRARGGGAGEPGVPGERQQPGDLPDGVHALLAVAVGHGGHQLHGHGLPARAPRRLPLRRLLHHLHHLHRQRLHRAHGAGDPDGPGADAVADATAVRQASGSVRARVGRQEGDAVRGAVPHGAGRGRDQGLPPLPRRGAVRRACGAGAQGPLHLLQLLRLLPLLRRPRRRHLRRLGRGQQGLAVGVRHLHHRHPALHPALRRRLQPLPEQGAHGEPAHHHRQGPHRRRARAPRLRAELQQRRRHRPRAQPHGEHRHERVLQARGHGGDHGLRRRDRGVVARRAVPRTRVPQPRGAVPAAAARPPGVHGPGGGGRQDRAHGAAHLLVHHHAQLLPGAAVHLLGRASGHHGHARGQPHRAAGVAPRLPCHVHHHPRARLRSRHRPVRAPRHGDRDGHHTPPAYRHRAGAVHRRDGRGRRRRGQAQERGVPQRDAGLHQAAAHHLLLDRVPVPVPGFRGPVHVGGAARVLLQRGAGADEIPGDVAVVGVAGAGLLPQLGAGVHRQQRDRARRPPAVAAGCQPEPLPPREVLLGHVRAQHHQLPLLPVLGRQVQVQKRGGHQRLMPSSYGQSALPLIPVVLSNAGCN

SEQ ID NO: 8852 - protein, 592 aa, Zea mays subsp. mays
  peptide (1)..(592): Ceres Seq. ID no. 12354035
MEDVAPGAEPWEGYVDWRNRPATRSRHGGMAAASFVLVVEVLENLAFLANASNLVTYLMGFMHYSPSQSATAVTNFMGTAFLLALLGGFLSDAFFTTYTIYIASAFIELMGLVILTVQARTQSLMPPQCAKPAAPCEPVSGAKKAMLFAGLYLTALGVGGIKGSLPSHGAEQFDEHAARGRKGRSTFFNYFVFCLSCGALVAVTFAVWVEDNKGWQWGFGISTIAILLSIPLFVAGSSRYRNKVPTGSPLTTIAKVLIAAALARRGCAPSSSNGAVIDRAPSPTGSTDMKEYCKPGDMEEITVSGAAIVASSPAEPSRELAFLNRAVQCQPPRHGRLACTVQEVEDVKIVLMVLPIFLSTIMLNCCLAQLSTFSVEQAATMDTRVGSLTVPPASLPVFPVTFIIILAPVYDHVIVPFARRVTGTEMGITHLQRIGTGLVLSIVAMAVAAVVEVKRKNVASHNGMLDSTKPLPITFFWIAFQYLFLGSADLFTLAGLLEFFFSEAPARMRSLATSLSWASLALGYYLSSVLVSIVNSVTGRGDHRPWLQGASLNHYHLERFYWVMCVLSTINYLFFLFLAVRYKYRNAGVIKG

SEQ ID NO: 8853 - protein, 563 aa, Zea mays subsp. mays
  peptide (1)..(563): Ceres Seq. ID no. 12354036
MAAASFVLVVEVLENLAFLANASNLVTYLMGFMHYSPSQSATAVTNFMGTAFLLALLGGFLSDAFFTTYTIYIASAFIELMGLVILTVQARTQSLMPPQCAKPAAPCEPVSGAKKAMLFAGLYLTALGVGGIKGSLPSHGAEQFDEHAARGRKGRSTFFNYFVFCLSCGALVAVTFAVWVEDNKGWQWGFGISTIAILLSIPLFVAGSSRYRNKVPTGSPLTTIAKVLIAAALARRGCAPSSSNGAVIDRAPSPTGSTDMKEYCKPGDMEEITVSGAAIVASSPAEPSRELAFLNRAVQCQPPRHGRLACTVQEVEDVKIVLMVLPIFLSTIMLNCCLAQLSTFSVEQAATMDTRVGSLTVPPASLPVFPVTFIIILAPVYDHVIVPFARRVTGTEMGITHLQRIGTGLVLSIVAMAVAAVVEVKRKNVASHNGMLDSTKPLPITFFWIAFQYLFLGSADLFTLAGLLEFFFSEAPARMRSLATSLSWASLALGYYLSSVLVSIVNSVTGRGDHRPWLQGASLNHYHLERFYWVMCVLSTINYLFFLFLAVRYKYRNAGVIKG

SEQ ID NO: 8854 - DNA, 1838 bp, Zea mays subsp. mays
  misc_feature (1)..(1838): Ceres Seq. ID no. 12372855
  misc_feature (1)..(1838): Ortholog of  Ceres SEQ ID NO 14312423 as cited in SEQ ID NO 55259
accaacccgacgcaaagccgccggctttccccgatggcgacgacgatgtcagtttcggcggtgtccccgcccgccgcggctgtcacgcggccgcggacgatggtctgcgtgccggcgacggcgcgggcgccgcgggagatggcggcggagctggccgccgccgccgcgctcggcgccgacgtggcggagcttcgcctcgactgcctcgccgggttcacgccgcgcagggacctgcccgtcatcctcgccaagccccgcccgctccccgctctcgtcacctacaggcccaagtgggaaggaggcgaatacgaaggcgatgacgattcacggtttgaggctctgctattagcaatggagctgggagctgaatatgtggatgtcgagcttaaggtggctgacaaatttatgaaacttatttctgggaggaaacctgataactgtaaacttatagtttcatcccacaactatgagaccactccatcgtccgaggaacttgcaaatttggtggctcagattcaagcaacgggggctgatatcgtgaaaatagctacaaccgctactgaaattgttgatgtggcaaaaatgtttcaaatacttgttcactgccaggtgccaatcattgggctgctgatgaacgacagaggttttatttctcgggttctttgcccaaaatatggtggattccttacttttgggtcactcaagaaaggaaaagagtctgcacctgcacagccaactgctgcagacttgataaatctgtacaatattaggcagatagggccagacactaaggtctttggtataattggtaaaccagttggccatagcaaaagcccaattttgcataatgaagctttcagatcagtgggtttcaacgctgtgtatgttccatttttggtggatgacttggctaaatttcttgatacatactcttcaccagactttgctggcttcagttgcacaattccacacaaagaagctgctgttaggtgctgtgacgaggtcgatcccattgccagggacattggagctgttaacacaattgttagaagacctgatggaaagcttgttggctataatactgactatgttggtgctatatctgctattgaggatggaataaaagcatcagaatcagaaccaacagatccagacaaatcaccactggctggaaggctttttgttgttataggggctggtggtgcgggaaaagcactagcatatggggcaaaagagaaaggagcaagagttgtaattgcaaaccgtacctttgcacgagcacaagaacttgccaacttaattggtgggcctgcattgactcttgcggatttggaaaactaccatccagaggaagggatgattcttgcaaatacaacagccattggaatgcatccaaatgtgaatgaaactcctctatctaagcaagcactcagatcttatgctgttgtgtttgatgcggtctacacaccaaaagagaccagacttctccgagaagctgcagaatgtggagccacagttgttagtggtctggagatgtttatacggcaagctatgggccagtttgagcatttcacgggcatgccagtggatgattacaaattccgagcaattgcaagttcattggacaatcctaacaccatgaagcctcgtctgtgagagattcatccatgcccacaaacttccttgtttttcctttttagattcggattcagtgatcagtttgcctctcagccattgtaaattaatttgatgttccgagctgaaacattttggtgtgccttatttgtatcagcatgaacagcagtgggtttgaatcagtctcttcatatttgcgttcc

SEQ ID NO: 8855 - protein, 551 aa, Zea mays subsp. mays
  peptide (1)..(551): Ceres Seq. ID no. 12372856
TNPTQSRRLSPMATTMSVSAVSPPAAAVTRPRTMVCVPATARAPREMAAELAAAAALGADVAELRLDCLAGFTPRRDLPVILAKPRPLPALVTYRPKWEGGEYEGDDDSRFEALLLAMELGAEYVDVELKVADKFMKLISGRKPDNCKLIVSSHNYETTPSSEELANLVAQIQATGADIVKIATTATEIVDVAKMFQILVHCQVPIIGLLMNDRGFISRVLCPKYGGFLTFGSLKKGKESAPAQPTAADLINLYNIRQIGPDTKVFGIIGKPVGHSKSPILHNEAFRSVGFNAVYVPFLVDDLAKFLDTYSSPDFAGFSCTIPHKEAAVRCCDEVDPIARDIGAVNTIVRRPDGKLVGYNTDYVGAISAIEDGIKASESEPTDPDKSPLAGRLFVVIGAGGAGKALAYGAKEKGARVVIANRTFARAQELANLIGGPALTLADLENYHPEEGMILANTTAIGMHPNVNETPLSKQALRSYAVVFDAVYTPKETRLLREAAECGATVVSGLEMFIRQAMGQFEHFTGMPVDDYKFRAIASSLDNPNTMKPRL

SEQ ID NO: 8856 - protein, 540 aa, Zea mays subsp. mays
  peptide (1)..(540): Ceres Seq. ID no. 12372857
MATTMSVSAVSPPAAAVTRPRTMVCVPATARAPREMAAELAAAAALGADVAELRLDCLAGFTPRRDLPVILAKPRPLPALVTYRPKWEGGEYEGDDDSRFEALLLAMELGAEYVDVELKVADKFMKLISGRKPDNCKLIVSSHNYETTPSSEELANLVAQIQATGADIVKIATTATEIVDVAKMFQILVHCQVPIIGLLMNDRGFISRVLCPKYGGFLTFGSLKKGKESAPAQPTAADLINLYNIRQIGPDTKVFGIIGKPVGHSKSPILHNEAFRSVGFNAVYVPFLVDDLAKFLDTYSSPDFAGFSCTIPHKEAAVRCCDEVDPIARDIGAVNTIVRRPDGKLVGYNTDYVGAISAIEDGIKASESEPTDPDKSPLAGRLFVVIGAGGAGKALAYGAKEKGARVVIANRTFARAQELANLIGGPALTLADLENYHPEEGMILANTTAIGMHPNVNETPLSKQALRSYAVVFDAVYTPKETRLLREAAECGATVVSGLEMFIRQAMGQFEHFTGMPVDDYKFRAIASSLDNPNTMKPRL

SEQ ID NO: 8857 - protein, 536 aa, Zea mays subsp. mays
  peptide (1)..(536): Ceres Seq. ID no. 12372858
MSVSAVSPPAAAVTRPRTMVCVPATARAPREMAAELAAAAALGADVAELRLDCLAGFTPRRDLPVILAKPRPLPALVTYRPKWEGGEYEGDDDSRFEALLLAMELGAEYVDVELKVADKFMKLISGRKPDNCKLIVSSHNYETTPSSEELANLVAQIQATGADIVKIATTATEIVDVAKMFQILVHCQVPIIGLLMNDRGFISRVLCPKYGGFLTFGSLKKGKESAPAQPTAADLINLYNIRQIGPDTKVFGIIGKPVGHSKSPILHNEAFRSVGFNAVYVPFLVDDLAKFLDTYSSPDFAGFSCTIPHKEAAVRCCDEVDPIARDIGAVNTIVRRPDGKLVGYNTDYVGAISAIEDGIKASESEPTDPDKSPLAGRLFVVIGAGGAGKALAYGAKEKGARVVIANRTFARAQELANLIGGPALTLADLENYHPEEGMILANTTAIGMHPNVNETPLSKQALRSYAVVFDAVYTPKETRLLREAAECGATVVSGLEMFIRQAMGQFEHFTGMPVDDYKFRAIASSLDNPNTMKPRL

SEQ ID NO: 8858 - DNA, 1266 bp, Zea mays subsp. mays
  misc_feature (1)..(1266): Ceres Seq. ID no. 12358430
  misc_feature (1)..(1266): Ortholog of  Ceres SEQ ID NO 13589020 as cited in SEQ ID NO 68432
gtcaaagcagagtctgcccctccccgcgccgttctttttggttccccactccccagtccccgccgccgccgaaacccgcagatggaggtcgtcgtcgccgcgaagcagaaggcgaagaaacacatacacctcttctactgctcagaatgcgaggagctcgcccttaagatcgccgccagctccgacgccatcgagctccaatccatcaactggcggagcttcgacgacgggttcccgaacctgttcatcaacaaggcgcacgacatccgtgggcagcacgtggcgttcctggcctccttcagctcgccgtcggtcatattcgagcagatctccgtcatcttcgcgctgcccaagctattcattgcctcattcactctcgtgctgcctttcttccccacgggctcattcgagcgcgttgaggaggagggcgatgtcgccaccgcgttcaccctcgcgcgcattctctcgatgatccccaagtcgcgcggcgggcctaccagcgtcgtcatctacgacatccacgcgctccaggagaggttctacttcggggacgacgtcctgccatgcttcgagacagggatcccgctcctgctgcagcgcctccgccagctcccggacgcagaaaatatcaccattgcctttccagatgacggtgcgtggaagcggttccacaagctgttacagcactttccaatgatagtctgtaacaaggttcgggaaggtgacaagagaatagttcgtataaaggaaggactacctgaaggccgtcatgttgttattgttgatgatttagtgcaatctgggggaactcttagagaatgccagaaagttctagctttgcatggcgctgcaaaagtcagtgcttatgtgactcatgctgtgtttcctaagcagtcatatgaacgtttcatggcgtctagttctgctgggccaggtgacagatttgcttacttctggatcacggactcatgcccacacacagtaaaagctattgggcaaagacctccatttgaggttctgagcctcgctggctcaattgcagatgctcttcagatatgagcgtacactggtagatgggcatgggcttggattgttgatgcccaccagattgaaacttgtactatgaggtggaatgctcccgcttttcctaaatgtaagagttggtttccagttcctggaaaagcaaataatgtgtagtaagttaagtacctgaaggttccataaacagccctgtggtttgtaataaaatcaggcattggatactcg

SEQ ID NO: 8859 - protein, 352 aa, Zea mays subsp. mays
  peptide (1)..(352): Ceres Seq. ID no. 12358431
VKAESAPPRAVLFGSPLPSPRRRRNPQMEVVVAAKQKAKKHIHLFYCSECEELALKIAASSDAIELQSINWRSFDDGFPNLFINKAHDIRGQHVAFLASFSSPSVIFEQISVIFALPKLFIASFTLVLPFFPTGSFERVEEEGDVATAFTLARILSMIPKSRGGPTSVVIYDIHALQERFYFGDDVLPCFETGIPLLLQRLRQLPDAENITIAFPDDGAWKRFHKLLQHFPMIVCNKVREGDKRIVRIKEGLPEGRHVVIVDDLVQSGGTLRECQKVLALHGAAKVSAYVTHAVFPKQSYERFMASSSAGPGDRFAYFWITDSCPHTVKAIGQRPPFEVLSLAGSIADALQI

SEQ ID NO: 8860 - protein, 325 aa, Zea mays subsp. mays
  peptide (1)..(325): Ceres Seq. ID no. 12358432
MEVVVAAKQKAKKHIHLFYCSECEELALKIAASSDAIELQSINWRSFDDGFPNLFINKAHDIRGQHVAFLASFSSPSVIFEQISVIFALPKLFIASFTLVLPFFPTGSFERVEEEGDVATAFTLARILSMIPKSRGGPTSVVIYDIHALQERFYFGDDVLPCFETGIPLLLQRLRQLPDAENITIAFPDDGAWKRFHKLLQHFPMIVCNKVREGDKRIVRIKEGLPEGRHVVIVDDLVQSGGTLRECQKVLALHGAAKVSAYVTHAVFPKQSYERFMASSSAGPGDRFAYFWITDSCPHTVKAIGQRPPFEVLSLAGSIADALQI

SEQ ID NO: 8861 - protein, 196 aa, Zea mays subsp. mays
  peptide (1)..(196): Ceres Seq. ID no. 12358433
MIPKSRGGPTSVVIYDIHALQERFYFGDDVLPCFETGIPLLLQRLRQLPDAENITIAFPDDGAWKRFHKLLQHFPMIVCNKVREGDKRIVRIKEGLPEGRHVVIVDDLVQSGGTLRECQKVLALHGAAKVSAYVTHAVFPKQSYERFMASSSAGPGDRFAYFWITDSCPHTVKAIGQRPPFEVLSLAGSIADALQI

SEQ ID NO: 8862 - DNA, 1095 bp, Zea mays subsp. mays
  misc_feature (1)..(1095): Ceres Seq. ID no. 12386489
  misc_feature (1)..(1095): Ortholog of  Ceres SEQ ID NO 14304969 as cited in SEQ ID NO 53193
  misc_feature (1)..(1095): Ortholog of  Ceres SEQ ID NO 14314851 as cited in SEQ ID NO 54014
  misc_feature (1)..(1095): Ortholog of  Ceres SEQ ID NO 14307442 as cited in SEQ ID NO 54239
  misc_feature (1)..(1095): Ortholog of  Ceres SEQ ID NO 15227214 as cited in SEQ ID NO 55368
  misc_feature (1)..(1095): Ortholog of  Ceres SEQ ID NO 13638897 as cited in SEQ ID NO 55839
  misc_feature (1)..(1095): Ortholog of  Ceres SEQ ID NO 14302561 as cited in SEQ ID NO 56543
  misc_feature (1)..(1095): Ortholog of  Ceres SEQ ID NO 15177758 as cited in SEQ ID NO 57504
  misc_feature (1)..(1095): Ortholog of  Ceres SEQ ID NO 15177710 as cited in SEQ ID NO 59217
  misc_feature (1)..(1095): Ortholog of  Ceres SEQ ID NO 13596958 as cited in SEQ ID NO 63319
  misc_feature (1)..(1095): Ortholog of  Ceres SEQ ID NO 12614814 as cited in SEQ ID NO 68816
gcactctttccccttcccttcccttcccactcccaggctcccactctcaccccttccgcctacccacgcaaacggcacacgaactaacagccacctctcacgtcccccaccctctggttcatgtcctgctgctccccatgtcgcctccactcgagctcgactacataggcctctcgccgccggcggcagccgccgccgctgaaaacgacgaactgaagggtactgagctccgcctcgggctgccagggtccgggtcgccggaccgccgtgtcgtggctgccaccgcgaccaccctggacctgctcccggccaagggcgccaagcgcgggttttctgacgaggcgcccccgccatcgcctgttgccgctgccggaaagggaaagaaggtggcagaagaggagtacgacgagaagaaggtggcagcgaccccgcagccggccgccaaagcacaagtggtgggatggccaccagtctgcaactaccgcaagaacacgatgactgccacccagctgaagggcagcaaggaggatggtgatgccaagcagggtcaggggttcctgtacgtcaaggtcagcatggatggcgcgccgtacctcaggaagatcgacctcaagacttacaagaactacaaggacctgtcgaccgcgcttgagaagatgttcagtggcttcagtactggcaaggacggctcatctgagtaccgcaaggatggtgaatatgttctgacttacgaggacaaggatggagattggatgcttgtcggcgacgtaccatgggactgccacatcgtctttcgctccaattgtaggatgttcgccggctcctgccgcaggctcaggatcatgaaaggctcagatgcgattggactcgctccaagggcagccgataagtccaagaaccgcaactagaacggtggcttcctatccttacacagtccggtacgagggaggagatgcagtgacttgtagggatctttacgaaaaccgaaaaagtctactaacagctatgacttgtgagaagaattctggcttatggtattggtctgcactagaatggcttggtacatcgtctatggacaaaacacgctattcgatt

SEQ ID NO: 8863 - protein, 301 aa, Zea mays subsp. mays
  peptide (1)..(301): Ceres Seq. ID no. 12386490
TLSPSLPFPLPGSHSHPFRLPTQTAHELTATSHVPHPLVHVLLLPMSPPLELDYIGLSPPAAAAAAENDELKGTELRLGLPGSGSPDRRVVAATATTLDLLPAKGAKRGFSDEAPPPSPVAAAGKGKKVAEEEYDEKKVAATPQPAAKAQVVGWPPVCNYRKNTMTATQLKGSKEDGDAKQGQGFLYVKVSMDGAPYLRKIDLKTYKNYKDLSTALEKMFSGFSTGKDGSSEYRKDGEYVLTYEDKDGDWMLVGDVPWDCHIVFRSNCRMFAGSCRRLRIMKGSDAIGLAPRAADKSKNRN

SEQ ID NO: 8864 - protein, 256 aa, Zea mays subsp. mays
  peptide (1)..(256): Ceres Seq. ID no. 12386491
MSPPLELDYIGLSPPAAAAAAENDELKGTELRLGLPGSGSPDRRVVAATATTLDLLPAKGAKRGFSDEAPPPSPVAAAGKGKKVAEEEYDEKKVAATPQPAAKAQVVGWPPVCNYRKNTMTATQLKGSKEDGDAKQGQGFLYVKVSMDGAPYLRKIDLKTYKNYKDLSTALEKMFSGFSTGKDGSSEYRKDGEYVLTYEDKDGDWMLVGDVPWDCHIVFRSNCRMFAGSCRRLRIMKGSDAIGLAPRAADKSKNRN

SEQ ID NO: 8865 - DNA, 1763 bp, Zea mays subsp. mays; identical to SEQ ID NO: 2255
  misc_feature (1)..(1763): Ceres Seq. ID no. 12410839
  misc_feature (1)..(1763): Ortholog of  Ceres SEQ ID NO 14303423 as cited in SEQ ID NO 54243
  misc_feature (1)..(1763): Ortholog of  Ceres SEQ ID NO 12611314 as cited in SEQ ID NO 56535
  misc_feature (1)..(1763): Ortholog of  Ceres SEQ ID NO 15178046 as cited in SEQ ID NO 60380
  misc_feature (1)..(1763): Ortholog of  Ceres SEQ ID NO 14312016 as cited in SEQ ID NO 60412
  misc_feature (1)..(1763): Ortholog of  Ceres SEQ ID NO 13661438 as cited in SEQ ID NO 61414

SEQ ID NO: 8866 - protein, 401 aa, Zea mays subsp. mays; identical to SEQ ID NO: 2256
  peptide (1)..(401): Ceres Seq. ID no. 12410840

SEQ ID NO: 8867 - protein, 391 aa, Zea mays subsp. mays; identical to SEQ ID NO: 2257
  peptide (1)..(391): Ceres Seq. ID no. 12410841

SEQ ID NO: 8868 - protein, 383 aa, Zea mays subsp. mays; identical to SEQ ID NO: 2258
  peptide (1)..(383): Ceres Seq. ID no. 12410842

SEQ ID NO: 8869 - DNA, 766 bp, Zea mays subsp. mays
  misc_feature (1)..(766): Ceres Seq. ID no. 12346859
  misc_feature (1)..(766): Ortholog of  Ceres SEQ ID NO 13597325 as cited in SEQ ID NO 63935
acccaacaccccagtatcctgatgcggcttagcgcaccgaggtagaccgagcgagacagccagccagcggggcaagctgaaaaacctatcttctatcaccacctcggagcccgagtggaaggggaaggcaggaatcgccccgcacgcgcccccatccgcctgccggcgacggcccacatgccgaccgcctacagcctccgcgcgccgccctccaccgcgcagcagcgcctcaggctgcccccgccaccgctgccgctttgcccggcgggtggaggggccgcccgccggaggagggttgtcggggtagcgtccgcgtccgcgtcgcccttcgacgagctgtacgcgcgggggaggcccgcacatggaccctccaagaaatccatgctctggaacttgatccaggacatagagcctctggaccttagtgtcattcagaaagatgttgctcctgaaacggtagatgcaatgaagaggactatttcgggcatgttgggtctgcttccatctgatcagttccgtgtcattgtagaagctctttggaatcccttcttcaagttattggtatcttcaattatgactgggtatactctgcgaaatgctgaatacaggctttcttttgaaagaaatcttggactgtctgaagaagttgcagaatgcccaaaaagtgatgtcattgaagataatcatcatgacatcaatttgggtacacctgtcactatttttagattagcagaagaagacatgccccaggaccctgcggcacgag

SEQ ID NO: 8870 - protein, 196 aa, Zea mays subsp. mays
  peptide (1)..(196): Ceres Seq. ID no. 12346860
MPTAYSLRAPPSTAQQRLRLPPPPLPLCPAGGGAARRRRVVGVASASASPFDELYARGRPAHGPSKKSMLWNLIQDIEPLDLSVIQKDVAPETVDAMKRTISGMLGLLPSDQFRVIVEALWNPFFKLLVSSIMTGYTLRNAEYRLSFERNLGLSEEVAECPKSDVIEDNHHDINLGTPVTIFRLAEEDMPQDPAAR

SEQ ID NO: 8871 - protein, 128 aa, Zea mays subsp. mays
  peptide (1)..(128): Ceres Seq. ID no. 12346861
MLWNLIQDIEPLDLSVIQKDVAPETVDAMKRTISGMLGLLPSDQFRVIVEALWNPFFKLLVSSIMTGYTLRNAEYRLSFERNLGLSEEVAECPKSDVIEDNHHDINLGTPVTIFRLAEEDMPQDPAAR

SEQ ID NO: 8872 - protein, 100 aa, Zea mays subsp. mays
  peptide (1)..(100): Ceres Seq. ID no. 12346862
MKRTISGMLGLLPSDQFRVIVEALWNPFFKLLVSSIMTGYTLRNAEYRLSFERNLGLSEEVAECPKSDVIEDNHHDINLGTPVTIFRLAEEDMPQDPAAR

SEQ ID NO: 8873 - DNA, 751 bp, Zea mays subsp. mays
  misc_feature (1)..(751): Ceres Seq. ID no. 12403104
  misc_feature (1)..(751): Ortholog of  Ceres SEQ ID NO 12610648 as cited in SEQ ID NO 56246
acagccccgactgggctatattcgttctcccggcgtgctccgtctctcctctcagcgcgacgattacggtaacgccgtcgccgccctacggctcagatcttcgtcgtcatcttctccggcaacgagcacccaaagatggtggtccttcaaccagatcggttcctgagcgagctgacgagcatgtacgagcggagcacgggagaagggctccgtctgggtcaccatgaagcgatcaactctcaagggcaaggcacagttgcggaagatggagaataaggggcaggaggtagagcacaggtgcctcgtccgcgcctccaatggcaagaagaacatctccacctcggtttctctaaaggagtacacaaagtttcaagcttcatacgcaacagttcttaaggcccatatgcatgctctgaagaaaagggagaggaaagacaagaagaagactgcagatgctgagaaggcaattgagaccgcacccaagaagcagaagaaagcatnttcaaagaaatnttcagggtccaagtcataaggcgctcacagaactcagtgtgtcttctcctttatgttgtttaccgccagactaattagagtgtcgtgaagttttacttatctggtttttattcgaattcgtgtctggaagatgaaagcctgtgaatacacctttatagagccgtgtcatcgatgctaacattttttgaagcagagttttgaggtgaatgtgaggcgctgtgctgccctgattggcatt

SEQ ID NO: 8874 - protein, 102 aa, Zea mays subsp. mays
  peptide (1)..(102): Ceres Seq. ID no. 12403105
  misc_feature (93)..(93): Xaa is any aa, unknown or other
  misc_feature (97)..(97): Xaa is any aa, unknown or other
MKRSTLKGKAQLRKMENKGQEVEHRCLVRASNGKKNISTSVSLKEYTKFQASYATVLKAHMHALKKRERKDKKKTADAEKAIETAPKKQKKAXSKKXSGSKS

SEQ ID NO: 8875 - protein, 88 aa, Zea mays subsp. mays
  peptide (1)..(88): Ceres Seq. ID no. 12403106
  misc_feature (79)..(79): Xaa is any aa, unknown or other
  misc_feature (83)..(83): Xaa is any aa, unknown or other
MENKGQEVEHRCLVRASNGKKNISTSVSLKEYTKFQASYATVLKAHMHALKKRERKDKKKTADAEKAIETAPKKQKKAXSKKXSGSKS

SEQ ID NO: 8876 - protein, 74 aa, Zea mays subsp. mays
  peptide (1)..(74): Ceres Seq. ID no. 12403107
SPDWAIFVLPACSVSPLSATITVTPSPPYGSDLRRHLLRQRAPKDGGPSTRSVPERADEHVRAEHGRRAPSGSP

SEQ ID NO: 8877 - DNA, 988 bp, Zea mays subsp. mays
  misc_feature (1)..(988): Ceres Seq. ID no. 12349284
  misc_feature (1)..(988): Ortholog of  Ceres SEQ ID NO 14311074 as cited in SEQ ID NO 53253
gacaagctcccccaaaatctccactctcggagtgagctccccaccaccacctccgtccccaaatgtcccgtcaccatcaccacgccgccgccatcgctgctgccgtgctcttcctcctcacagcgcctccttgcgccgccgaccctaacgacgagcgttgcctgactcacctccaccagtccctctccgattcctccggaaggctcaactggaccaaggcggcgatctcggcgccgtgcgacggcttcttctcgcacctccaaggcgtgacctgcaacaacgggcgcgtgtacaagctagccctcccggatctctcgcttgggggcaccgtcccgccggagctctccaactgcaccaacctccagtcgctggacctgtccgcgaacgcgctgtccggcgccataccgacggagctctccgcgctgctgaacctcgccgtgctcaacctctccgcgaacgcgctctctggcgccatcccgcgggagctcgctagctgcgcctacctcaacgtcatagatctccatggcaaccagctgtccggccccatccccgaggaactcggcctcctcgtccggctctcgaccttcgacgtctcctacaaccgcctctctggccccatccccgtgctcctcgccaaccgctccggcgccggcacggcagccgtcgggacggcgaggttcaacgccagctccttcgtagggaacaagggcttgtacgggtacccgctgccgccgatgcggacgcgggggctctccgtgctcgccatcgttggcatcggccttggcagcgggctgctcagccttgtgctcagcttctccgccgtgtgtctgtggctccgcgccacggaccggcggactcccaccaccactggcgaggagggcaagatctcccagctcatgccgaactactgaatccatcaaaggttgcatctttggacatataattcctcgtaattgaactaaacacgagatttttcagctgggcttgg

SEQ ID NO: 8878 - protein, 282 aa, Zea mays subsp. mays
  peptide (1)..(282): Ceres Seq. ID no. 12349285
MSRHHHHAAAIAAAVLFLLTAPPCAADPNDERCLTHLHQSLSDSSGRLNWTKAAISAPCDGFFSHLQGVTCNNGRVYKLALPDLSLGGTVPPELSNCTNLQSLDLSANALSGAIPTELSALLNLAVLNLSANALSGAIPRELASCAYLNVIDLHGNQLSGPIPEELGLLVRLSTFDVSYNRLSGPIPVLLANRSGAGTAAVGTARFNASSFVGNKGLYGYPLPPMRTRGLSVLAIVGIGLGSGLLSLVLSFSAVCLWLRATDRRTPTTTGEEGKISQLMPNY

SEQ ID NO: 8879 - DNA, 509 bp, Zea mays subsp. mays
  misc_feature (1)..(509): Ceres Seq. ID no. 13635129
  misc_feature (1)..(509): Ortholog of  Ceres SEQ ID NO 13594970 as cited in SEQ ID NO 56328
  misc_feature (1)..(509): Ortholog of  Ceres SEQ ID NO 12585079 as cited in SEQ ID NO 63137
aatatccattccaccttggtccatcagcagcgagcgaacaggcaaaaaggaaaggccgagaagcgctttatccggccgtacgtagcgataagagtggtgcacccgtagcggcacggcatggcggccacggcgtactccgtggcgctcctcggcggcgcacgctgccggccgccttcctccctcgacgcagcagcgtgtgccaccaccagcttcgcctccaagacgcaccgaggctgatctccctgcaccgtgccagggccgcttccgaggacacgtcggcctccggcggcgacgagctcatcgaagacctcaaggcaaagtgggacgccgttgaggacaagcccaccgtcctcctgtacggcggcggcgntccgtncgcgctatggttgacgtccgttgtcgtcggcgccatcaacgccgtgccgctgctccccaagatcctggagctcgttggcctcggctacaccggctggttcgtctaccgctacctcctcttcaagcaaagcagg

SEQ ID NO: 8880 - protein, 169 aa, Zea mays subsp. mays
  peptide (1)..(169): Ceres Seq. ID no. 13635130
  misc_feature (123)..(123): Xaa is any aa, unknown or other
  misc_feature (125)..(125): Xaa is any aa, unknown or other
YPFHLGPSAASEQAKRKGREALYPAVRSDKSGAPVAARHGGHGVLRGAPRRRTLPAAFLPRRSSVCHHQLRLQDAPRLISLHRARAASEDTSASGGDELIEDLKAKWDAVEDKPTVLLYGGGXPXALWLTSVVVGAINAVPLLPKILELVGLGYTGWFVYRYLLFKQSR

SEQ ID NO: 8881 - DNA, 870 bp, Zea mays subsp. mays
  misc_feature (1)..(870): Ceres Seq. ID no. 12376501
  misc_feature (1)..(870): Ortholog of  Ceres SEQ ID NO 14312124 as cited in SEQ ID NO 57290
atggcgaatgtctcgcacacactcccctgccgctgtgccgcacccgcacccctccagcgcgcgggggcacgagcacgagtacgaggctccatcgccggacgaccaggtagttgcactgccgccgccgtcgacgacgaccgacggcgacgatggcccggccgcagcaacggtaccgcggcgtgcggcagcgccactggggctcctgggtctccgagatccgccaccctctcctgaaggcgcggatatggctgggcaccttcgagacggcagaggacgcggcgcgcgcctacgacgaggcggcgcggatcatgtgcgggccccgcgcgcgcaccaacttccccgccgacgccaacggcccgccgccgtcgttcctctccgcggcgctcgtcgacaagctgcaccggttcaacctggcgtccgtgcaggccgcgcagcggcagagagaggctgcggcggcggcggcggcagcagcagcagcagcaacttccgcgccggcgacgccaccggccgcgcagtggggcggcggtaggtccctggaggagcagcacgtggagcagatgatcgaggaactgctggactccgacttctccatggagatttgctgctagtgctaggctagccgcgacgcgacctgcctagcgactagctagcgcccccggccggcccgtcaccgccgcgctccgctccaactctcctctgttcttgcacttgcaccatgcgtcgcgctcgcgctcttctttgtactcgtgccgacgtgcgtagtatcgctcagccgctgcagcgtgcgtaggagcctgatttgtgtacgccacgtgtatagctgtagctgtacgtataagtatatatgtaatcgagcattctcattcttgc

SEQ ID NO: 8882 - protein, 175 aa, Zea mays subsp. mays
  peptide (1)..(175): Ceres Seq. ID no. 12376502
WRMSRTHSPAAVPHPHPSSARGHEHEYEAPSPDDQVVALPPPSTTTDGDDGPAAATVPRRAAAPLGLLGLRDPPPSPEGADMAGHLRDGRGRGARLRRGGADHVRAPRAHQLPRRRQRPAAVVPLRGARRQAAPVQPGVRAGRAAAERGCGGGGGSSSSSNFRAGDATGRAVGRR

SEQ ID NO: 8883 - protein, 173 aa, Zea mays subsp. mays
  peptide (1)..(173): Ceres Seq. ID no. 12376503
MSRTHSPAAVPHPHPSSARGHEHEYEAPSPDDQVVALPPPSTTTDGDDGPAAATVPRRAAAPLGLLGLRDPPPSPEGADMAGHLRDGRGRGARLRRGGADHVRAPRAHQLPRRRQRPAAVVPLRGARRQAAPVQPGVRAGRAAAERGCGGGGGSSSSSNFRAGDATGRAVGRR

SEQ ID NO: 8884 - protein, 152 aa, Zea mays subsp. mays
  peptide (1)..(152): Ceres Seq. ID no. 12376504
MARPQQRYRGVRQRHWGSWVSEIRHPLLKARIWLGTFETAEDAARAYDEAARIMCGPRARTNFPADANGPPPSFLSAALVDKLHRFNLASVQAAQRQREAAAAAAAAAAAATSAPATPPAAQWGGGRSLEEQHVEQMIEELLDSDFSMEICC

SEQ ID NO: 8885 - DNA, 1061 bp, Zea mays subsp. mays
  misc_feature (1)..(1061): Ceres Seq. ID no. 12377591
  misc_feature (1)..(1061): Ortholog of  Ceres SEQ ID NO 15176306 as cited in SEQ ID NO 52784
  misc_feature (1)..(1061): Ortholog of  Ceres SEQ ID NO 13582624 as cited in SEQ ID NO 56287
  misc_feature (1)..(1061): Ortholog of  Ceres SEQ ID NO 14316536 as cited in SEQ ID NO 60272
  misc_feature (1)..(1061): Ortholog of  Ceres SEQ ID NO 13597264 as cited in SEQ ID NO 63897
  misc_feature (1)..(1061): Ortholog of  Ceres SEQ ID NO 13598570 as cited in SEQ ID NO 65434
  misc_feature (1)..(1061): Ortholog of  Ceres SEQ ID NO 13656452 as cited in SEQ ID NO 65745
  misc_feature (1)..(1061): Ortholog of  Ceres SEQ ID NO 13596238 as cited in SEQ ID NO 68834
  misc_feature (1)..(1061): Ortholog of  Ceres SEQ ID NO 15174329 as cited in SEQ ID NO 0
cgcaattaaccctcactaaagggaacaaaagctggagctccaccgcggtggcggccgctctagaactagtggatcccccgggctgcaggaattcgcacgagaccattacctagaacatcctaatcgaaaagaaactcactcgccatcgccgggcatcgcgggcatcgcacacaaacgcaacctgcagccatggcacagaagctcgcgccaccgacggcggcggtcgtcgtcgtcctgctggcgctcgccttgtcggccgccgcgcagaactgcgggtgcgcgtcgggcctgtgctgcagccggttcgggtactgcgggacgggcgaggactactgcggcgccgggtgccagtcgggcccctgcgacgtgccggagaccaacaacgcgtccgtggccagcatcgtgacgccggccttcttcgacgcgctcctcgcgcaggccgccgcctcgtgcgaggccaacggcttctacacccgcgacgccttcctcgccgccgccggctactacccggcgttcggccgcaccggcaccgtcgacgactccaagcgcgagatcgccgccttcttcggcaacgccaaccacgagaccataaagttctgctacatcaacgagatcgacgggccgagcaagaactactgcgaccggaacaacacgcagtggccgtgccaggcggggaaggggtactacggccgcggcccgctgcagatctcctggaacttcaactacgggcccgcggggcagagcatcggcttcgacgggctgggcgaccccgacgcggtggcgcgcagcgccgtgctcgcgttccgctccgcgctctggtactggatgaacaacgtgcacggggccatcgtctccggccagggcttcggcgccaccatccgggccatcaacggcgcgctcgagtgcgacggcaagaaccccaactccgtcaacaaccgcgtcgcctactacaagcagttctgccaggatttcggcgtcgacccgggcaacaacctcacctgctgaatgatctctctctcattgggttgttgtcctgtacttacacatgtgttggttgatgg

SEQ ID NO: 8886 - protein, 271 aa, Zea mays subsp. mays
  peptide (1)..(271): Ceres Seq. ID no. 12377592
MAQKLAPPTAAVVVVLLALALSAAAQNCGCASGLCCSRFGYCGTGEDYCGAGCQSGPCDVPETNNASVASIVTPAFFDALLAQAAASCEANGFYTRDAFLAAAGYYPAFGRTGTVDDSKREIAAFFGNANHETIKFCYINEIDGPSKNYCDRNNTQWPCQAGKGYYGRGPLQISWNFNYGPAGQSIGFDGLGDPDAVARSAVLAFRSALWYWMNNVHGAIVSGQGFGATIRAINGALECDGKNPNSVNNRVAYYKQFCQDFGVDPGNNLTC

SEQ ID NO: 8887 - DNA, 699 bp, Zea mays subsp. mays
  misc_feature (1)..(699): Ceres Seq. ID no. 12346268
  misc_feature (1)..(699): Ortholog of  Ceres SEQ ID NO 12557607 as cited in SEQ ID NO 8
  misc_feature (1)..(699): Ortholog of  Ceres SEQ ID NO 12611808 as cited in SEQ ID NO 59894
  misc_feature (1)..(699): Ortholog of  Ceres SEQ ID NO 13600599 as cited in SEQ ID NO 0
ctcactctccctgctgcaacccaaccaagcccgcacgacacgacaccaagtcgaggagctcgagagggcaccaataatggccggcgtgaactccagcgtcgtcgggctcaagcccgccgcggcagtgccgcaggccgccgccgcctcatcgccggcgaagcgggtgcagctggccgcgcccgagggccgccgcgccgctctgctcggcctggnggncgtnttcgccgtcncggccaccaccgggtcggccaaggccacgatcttcgatgagtacctcgagaagagcaaggccaacaaggagctgaacgacaagaagaggctggccaccagtggagccaactttgcgcgcgcctacaccgtggagttcggcagctgccagttcccctacaacttcactgggtgccaggacctcgccaagcagaagaaagtccccttcatcagcgacgacctcgagattgagtgcgaggggaaggagaagttcaagtgcggctccaacgttttctggaagtggtgaagcagctagcagcagcgtctgatgggaatggaggagatcatcacctgtcttgtcgaccctagatatgtccaaactgcagggaaattaaatcttcatgtgtaattgtgctcattctgtttcaatcatctcaacatccgatcatgaacctcttgcattattaactggctcgatcgtcttctcagttc

SEQ ID NO: 8888 - protein, 170 aa, Zea mays subsp. mays
  peptide (1)..(170): Ceres Seq. ID no. 12346269
  misc_feature (71)..(71): Xaa is any aa, unknown or other
  misc_feature (72)..(72): Xaa is any aa, unknown or other
  misc_feature (73)..(73): Xaa is any aa, unknown or other
  misc_feature (77)..(77): Xaa is any aa, unknown or other
SLSLLQPNQARTTRHQVEELERAPIMAGVNSSVVGLKPAAAVPQAAAASSPAKRVQLAAPEGRRAALLGLXXXFAVXATTGSAKATIFDEYLEKSKANKELNDKKRLATSGANFARAYTVEFGSCQFPYNFTGCQDLAKQKKVPFISDDLEIECEGKEKFKCGSNVFWKW

SEQ ID NO: 8889 - protein, 145 aa, Zea mays subsp. mays
  peptide (1)..(145): Ceres Seq. ID no. 12346270
  misc_feature (46)..(46): Xaa is any aa, unknown or other
  misc_feature (47)..(47): Xaa is any aa, unknown or other
  misc_feature (48)..(48): Xaa is any aa, unknown or other
  misc_feature (52)..(52): Xaa is any aa, unknown or other
MAGVNSSVVGLKPAAAVPQAAAASSPAKRVQLAAPEGRRAALLGLXXXFAVXATTGSAKATIFDEYLEKSKANKELNDKKRLATSGANFARAYTVEFGSCQFPYNFTGCQDLAKQKKVPFISDDLEIECEGKEKFKCGSNVFWKW

SEQ ID NO: 8890 - protein, 89 aa, Zea mays subsp. mays
  peptide (1)..(89): Ceres Seq. ID no. 12346271
  misc_feature (71)..(71): Xaa is any aa, unknown or other
  misc_feature (72)..(72): Xaa is any aa, unknown or other
  misc_feature (74)..(74): Xaa is any aa, unknown or other
  misc_feature (77)..(77): Xaa is any aa, unknown or other
LTLPAATQPSPHDTTPSRGAREGTNNGRRELQRRRAQARRGSAAGRRRLIAGEAGAAGRARGPPRRSARPXXRXRRXGHHRVGQGHDLR

SEQ ID NO: 8891 - DNA, 1111 bp, Zea mays subsp. mays
  misc_feature (1)..(1111): Ceres Seq. ID no. 12401978
  misc_feature (1)..(1111): Ortholog of  Ceres SEQ ID NO 14302919 as cited in SEQ ID NO 20338
  misc_feature (1)..(1111): Ortholog of  Ceres SEQ ID NO 13595497 as cited in SEQ ID NO 51127
  misc_feature (1)..(1111): Ortholog of  Ceres SEQ ID NO 14306765 as cited in SEQ ID NO 53275
  misc_feature (1)..(1111): Ortholog of  Ceres SEQ ID NO 14314046 as cited in SEQ ID NO 59316
accaactccggcggccggtgcagcagctagcagtggacgtacttatacgtcttcccccagcttacctctaccttaggtagcatagtggtgcggccgcttggtttaaactagacacatggcgcctcaaagcttggatcttgggctgagtctcggcctgggcgtggcggcgttccagcccagcagcttctgccaccccggcaatgccgtcgtcgtccccgcggcggcggagcgggaggccagcccggccgcggcggaggagagggagcggaggtgctcgcccgccggcagcccggtgtcgagcggcagcggcagcgggaataagcgcgccgcggcggagaggtcgnccggcgccggcgccggtagcggcgacgaggacgacgacggtgccgcacgcaagaagctgcggctgtccaaagaccaggccgccgtgctcgaggagtgcttcaagacgcaccacacgctcactccgaagcagaaggtggcgctggccagcagcctgggcctccggccgcggcaggtggaggtgtggttccagaaccggcgcgcccggaccaagctgaagcagacggaggtggactgcgagtacctcaagcgctggtgcgagcagctcgccgaggagaaccgccgcctgggcaaggaggtcgccgagctcagggcgctcagcgccgcgccggcggccccgctcaccaccctcacgatgtgcctctcctgccggcgcgtcgcctcctcgtccccgtcgtcgtcgtcgtcgcccaggcctagcatccccggcgccgcagctgccagtggcgggagcatggcctctccggcggcggcggcgacgttgcccgcccacaggcagttcttctgcgggttcagagacgccggggcggcggccgcggcgtacgggacagcctcggcggggctcgcgaagcctgtcagggctgccagataggcttagttggcgtcgatgccatggaaatgcatgggtccgtttaagttacaactgcaaagcaagtgttgtggctgaaactgaaactgaaagctgaaagctgaaatttttttatgtatctttagagggaaaggaatgcatgcatgcaatgcaaatgtcttctttttaacaaggttaatt

SEQ ID NO: 8892 - protein, 272 aa, Zea mays subsp. mays
  peptide (1)..(272): Ceres Seq. ID no. 12401979
  misc_feature (77)..(77): Xaa is any aa, unknown or other
MAPQSLDLGLSLGLGVAAFQPSSFCHPGNAVVVPAAAEREASPAAAEERERRCSPAGSPVSSGSGSGNKRAAAERSXGAGAGSGDEDDDGAARKKLRLSKDQAAVLEECFKTHHTLTPKQKVALASSLGLRPRQVEVWFQNRRARTKLKQTEVDCEYLKRWCEQLAEENRRLGKEVAELRALSAAPAAPLTTLTMCLSCRRVASSSPSSSSSPRPSIPGAAAASGGSMASPAAAATLPAHRQFFCGFRDAGAAAAAYGTASAGLAKPVRAAR

SEQ ID NO: 8893 - DNA, 1737 bp, Zea mays subsp. mays
  misc_feature (1)..(1737): Ceres Seq. ID no. 12365824
  misc_feature (1)..(1737): Ortholog of  Ceres SEQ ID NO 14307871 as cited in SEQ ID NO 67222
agtgtcggtgtcggcgttggcgagtggcgactggcgacttctctgcctcgtcctccccgttttcccctccgcgtccagcccggcgcgacgccaccacgcacctagccgcggatccgaggcgcagatccaatccagcgatggcgtccacggcggcgaggcggttgcgggagctgcaggcccagacggggaacaagacctgcgtggactgcgcgcagcggaacccgcagtgggcgagcgtctcctacggcgtgttcatgtgcctcgagtgctccggcaagcaccggggcctcggcgtgcacatcagtttcgtgcgctcggtcaccatggactcctggaccgaggcgcagctccgcaagatggaggccggcggcaacgaccgcctcaacgccttcctcacagcgcggggcgttcccaaggagacgtcccacgtcgcgaagtacaactccaacgccgcggccgcctaccgcgaccgcatcgccgcgctcgctgagggcaagccttggaccgacccgcccgtagtcaaggagacgcccggatctggcgcgcccgccccggctaggaagccacccttgcacgcctccggaggcggcggcgggtgggacgactgggacgatgattttcggtcggacatgaggcggaatcagtcggttggatcattcgccgccgcgggggcgcagtcagggaggcagccgccgaggtccaaatcaacacaggacatctacactaggcagcagctggaggcgtcggcggctaataaggatgatttcttcgccaggaggatggcggagaacgagtccaagcctgagggtatcccgccatcccagggcggcaagtacgttgggttcggatccagcccagcgccatcggctaataggaacggcggtgctgctcagggcgatgtcttgcaggtcgtctctcagggatttggacgcctttcattagttgcagcctctgctgcccagtctgctgccagtgttgtccaagtcggcacaaaagaaatccaatcaaagatgagggatgggggctatgaccagaaggtgaatgaaactgtcagtgttgttgccaataaaactgcagagattggaagcaagacctgggggatcatgagaggagttatggcaatggcctcacaaaaggtcgaggaatatgccaaggaaggaggaatgagtggctggggagaggattggcaacgcagcgagcagaacggtgagccttaccaaaggtttgagcacgcgaccaacagcaacagttggaattcctcccaaaattcttcatcgaagaacaacaattccagttcttgggacgattgggacgaccaaggcaagaagggtgaacctgcgaaaccgcaccaaagcagtgactcctgggctggctgggatgatgggaaggacgatggttttgatagtcctggttacaacaaccacaacagctctaacaaggggagcaaccacaacgggacttccggtggctcattttggagggaaggcggcttccgctgaaaccgttctcttctccatagagttatactttcagagttgttacattggcaggtaaccagggtccagtggttggtattatccgggatactgaaaccgtcgagtgaaaggggttgtgttttgtaccacatctgttattatatctactgagatatattcctatggtcaatgcccattcaaaagtgcccaaattgactaggaaatgtcgagttgaaactgtaatttacccaactttgtcgcc

SEQ ID NO: 8894 - protein, 498 aa, Zea mays subsp. mays
  peptide (1)..(498): Ceres Seq. ID no. 12365825
CRCRRWRVATGDFSASSSPFSPPRPARRDATTHLAADPRRRSNPAMASTAARRLRELQAQTGNKTCVDCAQRNPQWASVSYGVFMCLECSGKHRGLGVHISFVRSVTMDSWTEAQLRKMEAGGNDRLNAFLTARGVPKETSHVAKYNSNAAAAYRDRIAALAEGKPWTDPPVVKETPGSGAPAPARKPPLHASGGGGGWDDWDDDFRSDMRRNQSVGSFAAAGAQSGRQPPRSKSTQDIYTRQQLEASAANKDDFFARRMAENESKPEGIPPSQGGKYVGFGSSPAPSANRNGGAAQGDVLQVVSQGFGRLSLVAASAAQSAASVVQVGTKEIQSKMRDGGYDQKVNETVSVVANKTAEIGSKTWGIMRGVMAMASQKVEEYAKEGGMSGWGEDWQRSEQNGEPYQRFEHATNSNSWNSSQNSSSKNNNSSSWDDWDDQGKKGEPAKPHQSSDSWAGWDDGKDDGFDSPGYNNHNSSNKGSNHNGTSGGSFWREGGFR

SEQ ID NO: 8895 - protein, 453 aa, Zea mays subsp. mays
  peptide (1)..(453): Ceres Seq. ID no. 12365826
MASTAARRLRELQAQTGNKTCVDCAQRNPQWASVSYGVFMCLECSGKHRGLGVHISFVRSVTMDSWTEAQLRKMEAGGNDRLNAFLTARGVPKETSHVAKYNSNAAAAYRDRIAALAEGKPWTDPPVVKETPGSGAPAPARKPPLHASGGGGGWDDWDDDFRSDMRRNQSVGSFAAAGAQSGRQPPRSKSTQDIYTRQQLEASAANKDDFFARRMAENESKPEGIPPSQGGKYVGFGSSPAPSANRNGGAAQGDVLQVVSQGFGRLSLVAASAAQSAASVVQVGTKEIQSKMRDGGYDQKVNETVSVVANKTAEIGSKTWGIMRGVMAMASQKVEEYAKEGGMSGWGEDWQRSEQNGEPYQRFEHATNSNSWNSSQNSSSKNNNSSSWDDWDDQGKKGEPAKPHQSSDSWAGWDDGKDDGFDSPGYNNHNSSNKGSNHNGTSGGSFWREGGFR

SEQ ID NO: 8896 - protein, 414 aa, Zea mays subsp. mays
  peptide (1)..(414): Ceres Seq. ID no. 12365827
MCLECSGKHRGLGVHISFVRSVTMDSWTEAQLRKMEAGGNDRLNAFLTARGVPKETSHVAKYNSNAAAAYRDRIAALAEGKPWTDPPVVKETPGSGAPAPARKPPLHASGGGGGWDDWDDDFRSDMRRNQSVGSFAAAGAQSGRQPPRSKSTQDIYTRQQLEASAANKDDFFARRMAENESKPEGIPPSQGGKYVGFGSSPAPSANRNGGAAQGDVLQVVSQGFGRLSLVAASAAQSAASVVQVGTKEIQSKMRDGGYDQKVNETVSVVANKTAEIGSKTWGIMRGVMAMASQKVEEYAKEGGMSGWGEDWQRSEQNGEPYQRFEHATNSNSWNSSQNSSSKNNNSSSWDDWDDQGKKGEPAKPHQSSDSWAGWDDGKDDGFDSPGYNNHNSSNKGSNHNGTSGGSFWREGGFR

SEQ ID NO: 8897 - DNA, 495 bp, Zea mays subsp. mays
  misc_feature (1)..(495): Ceres Seq. ID no. 4611687
  misc_feature (1)..(495): Ortholog of  Ceres SEQ ID NO 13589020 as cited in SEQ ID NO 68432
aaagcagagtctgcccctccccgcgccgttctttttggttccccagtccccgccgccgccgaaacccgcagatggaggtcgtcgtcgccgcgamssagaaggcgaagaaacacatacacctcttctactgctcagaatgcgaggagctcgccctcaagatcgccgccagctccgacgccatcgagctccaatccatcaactggcggassttcgacgacgggttcccgaacctattcatcgcctcattcacgctcgtgctgccattcttccccacgggctcattcgagcgcgttgaggaggagggcgatgtcgccaccgcgttcaccctcgcgcgcattctctcgatgatccccaagtcgcgcggcgggcctaccagcgtcgtcatctacgacatccacgcgctccaggagaggttttacttcggggacgatgtctgccatgcttcgagacagggatcccgctcctgctgcagcgcctccgccagctcccggacgc

SEQ ID NO: 8898 - protein, 164 aa, Zea mays subsp. mays
  peptide (1)..(164): Ceres Seq. ID no. 4611688
  misc_feature (31)..(31): Xaa is any aa, unknown or other
  misc_feature (32)..(32): Xaa is any aa, unknown or other
  misc_feature (69)..(69): Xaa is any aa, unknown or other
SRVCPSPRRSFWFPSPRRRRNPQMEVVVAAXXKAKKHIHLFYCSECEELALKIAASSDAIELQSINWRXFDDGFPNLFIASFTLVLPFFPTGSFERVEEEGDVATAFTLARILSMIPKSRGGPTSVVIYDIHALQERFYFGDDVCHASRQGSRSCCSASASSRT

SEQ ID NO: 8899 - protein, 141 aa, Zea mays subsp. mays
  peptide (1)..(141): Ceres Seq. ID no. 4611689
  misc_feature (8)..(8): Xaa is any aa, unknown or other
  misc_feature (9)..(9): Xaa is any aa, unknown or other
  misc_feature (46)..(46): Xaa is any aa, unknown or other
MEVVVAAXXKAKKHIHLFYCSECEELALKIAASSDAIELQSINWRXFDDGFPNLFIASFTLVLPFFPTGSFERVEEEGDVATAFTLARILSMIPKSRGGPTSVVIYDIHALQERFYFGDDVCHASRQGSRSCCSASASSRT

SEQ ID NO: 8900 - protein, 115 aa, Zea mays subsp. mays
  peptide (1)..(115): Ceres Seq. ID no. 4611690
  misc_feature (32)..(32): Xaa is any aa, unknown or other
  misc_feature (70)..(70): Xaa is any aa, unknown or other
KAESAPPRAVLFGSPVPAAAETRRWRSSSPRXRRRRNTYTSSTAQNARSSPSRSPPAPTPSSSNPSTGGXSTTGSRTYSSPHSRSCCHSSPRAHSSALRRRAMSPPRSPSRAFSR

SEQ ID NO: 8901 - DNA, 986 bp, Zea mays subsp. mays
  misc_feature (1)..(986): Ceres Seq. ID no. 12369222
  misc_feature (1)..(986): Ortholog of  Ceres SEQ ID NO 14306110 as cited in SEQ ID NO 1363
  misc_feature (1)..(986): Ortholog of  Ceres SEQ ID NO 12609333 as cited in SEQ ID NO 51833
  misc_feature (1)..(986): Ortholog of  Ceres SEQ ID NO 12610381 as cited in SEQ ID NO 55740
  misc_feature (1)..(986): Ortholog of  Ceres SEQ ID NO 14308433 as cited in SEQ ID NO 59065
  misc_feature (1)..(986): Ortholog of  Ceres SEQ ID NO 12615300 as cited in SEQ ID NO 62948
attcgagaggaaaggaagaagaactggagaggaaaaaaagtgtaggatcgagggagatggagagcggccaagcgtggaccaacgactcctcttctccgatcctcccgcagctgcaggccgtagctagctctataaaaagctaagggagcctgcctgccatcgtcgtgcatcgtcatccaccacgatcgataaagctaattaagctgctactgctacgctagcctcgatcgatcaagcaagcagctcacagacccaccggcccacccacccacccacatggcggcgtcccgttccgctctgatcacgctgctcgtccttgtgagctccgtcgcggcggcctcggcgaccacgttcaccgtcggcgacagtagcggctggagtcgtagcgtcaactacgacaactgggccagtggcaagaccttcacggatggagatcagctagtgttcaacttcgccaccgggaaccacgacgtggtggaggtggacaagagcggatacgacggctgctccaccaccaacgccgccaacacaatccaaaacggcccggccaccgtcaacctcacctccggcacccactactacatctgcggcttcaccggccactgcagcgccgggatgaagctcgctgtcaccgtcggctccggctccggctccgggtcccccacccccggcggcggctcgcccagcacacccacaccaaccaccccgagcgcccccacccccgacactccggccagcgcgtccgtgcgcctcacggccggcccagcgctcgccgtggccgccaccgtgctcgtcgccctcttctgatctgatctgatctgatactgcatgcatgcaccgtgccaggaccaggatagaggcagtgcaggatcatagtattcttgtgtacgtacgtacatactttgttgttgagctagcgttttcattctgacgacggcggattattgtactctcgtacgtttttatttccacatgtactactgtct

SEQ ID NO: 8902 - protein, 176 aa, Zea mays subsp. mays
  peptide (1)..(176): Ceres Seq. ID no. 12369223
MAASRSALITLLVLVSSVAAASATTFTVGDSSGWSRSVNYDNWASGKTFTDGDQLVFNFATGNHDVVEVDKSGYDGCSTTNAANTIQNGPATVNLTSGTHYYICGFTGHCSAGMKLAVTVGSGSGSGSPTPGGGSPSTPTPTTPSAPTPDTPASASVRLTAGPALAVAATVLVALF

SEQ ID NO: 8903 - DNA, 927 bp, Zea mays subsp. mays
  misc_feature (1)..(927): Ceres Seq. ID no. 12355214
  misc_feature (1)..(927): Ortholog of  Ceres SEQ ID NO 15173027 as cited in SEQ ID NO 61785
  misc_feature (1)..(927): Ortholog of  Ceres SEQ ID NO 12584242 as cited in SEQ ID NO 67900
agcagtccagcagagtttccgtctccccgactcccgagtcccgactgccggccctgacctgccctgcgccgcgcggagccgcggaccgcccgcccaccaccgaaaccctagagcaagcagggatgcacagtccggtcccgctcctcctcctcctgctcctctgcacggccgcggcggcctccgacggctcccagccccaggcgcaggcgcaggcacctggcgcggcacggcgggggatggtgccggtggcccccgcggaggcggagctcggcgccgtgaaggcgctcgccctcaacggcacgcggcgccggctcgggggcagcttccagctctgcgcgccctgcacctgctgcggcggggccagcggcgcctgcatcctcgcgccctgctgctactccatcaactgcaacatccccaaccgccccttcgggtactgctccttcacgcccaagtcctgccagtgcgtcggatgcaacctctgagctccgtggccgcgggattcattggattggattggtcagagtgtgtttgtgtgtgtgtgtgtgagagagagagagagtggggtggtaacgaatctgtataaaaaattccccacatccttagttaagtggcgattgctattacttctacctagtagtattttgctgtgatcactgctacgctcgacttagttgagggaaaaaaaagagaaaggggtctgggttgatctagaggtcactactctggggttttgcttttctgtcgccacacattggatgtctgattaggatgctacttgttcatagtggtttgttgttgatagctggaataaatatacctgtttaggtgcatggatctagtcatctagtgcattttagtggatgccatctcttccgtcctgatcagtgcctactgccctggaatgtgaatatgtgatagctctagctc

SEQ ID NO: 8904 - protein, 193 aa, Zea mays subsp. mays
  peptide (1)..(193): Ceres Seq. ID no. 12355215
AVQQSFRLPDSRVPTAGPDLPCAARSRGPPAHHRNPRASRDAQSGPAPPPPAPLHGRGGLRRLPAPGAGAGTWRGTAGDGAGGPRGGGARRREGARPQRHAAPARGQLPALRALHLLRRGQRRLHPRALLLLHQLQHPQPPLRVLLLHAQVLPVRRMQPLSSVAAGFIGLDWSECVCVCVCEREREWGGNESV

SEQ ID NO: 8905 - protein, 159 aa, Zea mays subsp. mays
  peptide (1)..(159): Ceres Seq. ID no. 12355216
QSSRVSVSPTPESRLPALTCPAPRGAADRPPTTETLEQAGMHSPVPLLLLLLLCTAAAASDGSQPQAQAQAPGAARRGMVPVAPAEAELGAVKALALNGTRRRLGGSFQLCAPCTCCGGASGACILAPCCYSINCNIPNRPFGYCSFTPKSCQCVGCNL

SEQ ID NO: 8906 - protein, 119 aa, Zea mays subsp. mays
  peptide (1)..(119): Ceres Seq. ID no. 12355217
MHSPVPLLLLLLLCTAAAASDGSQPQAQAQAPGAARRGMVPVAPAEAELGAVKALALNGTRRRLGGSFQLCAPCTCCGGASGACILAPCCYSINCNIPNRPFGYCSFTPKSCQCVGCNL

SEQ ID NO: 8907 - DNA, 876 bp, Zea mays subsp. mays
  misc_feature (1)..(876): Ceres Seq. ID no. 12359909
  misc_feature (1)..(876): Ortholog of  Ceres SEQ ID NO 15172691 as cited in SEQ ID NO 56148
  misc_feature (1)..(876): Ortholog of  Ceres SEQ ID NO 15226850 as cited in SEQ ID NO 62501
aaatcgctctctgcccccgatcaccggtcgcctcccttccgctcccctgcctgcctaatccctccggccaccccgaaaccgctcgctcgctcgctcgctccccgcgcccagagacaagcccggagaccatggcggaccagctcactgacgaccaaatcgccgagttcaaggaggccttcagcctcttcgataaggacggcgacggttgcatcacaaccaaggagcttggaactgtcatgcgttcactgggtcagaacccaacggaggctgaactccaggacatgatcaatgaggtggatgccgacggcatggcacgatcgacttccccgagttcctcaacctcatggcccgcaagatgaaggacaccgactccgaggaggagctcaaggaggcgttcagggtgttcgacaaggaccagaacggcttcatctctgccgcggagctccgccacgtgatgaccaacctaggcgagaagctgaccgacgaggaggtcgacgagatgatccgcgaggccgacgttgatggcgatggccagatcaactacgaggagttcgtcaaggtcatgatggccaagtgagtaaagcctgcggtaatggtatagtaaccccgctcggaaggaggaaaccgtgcgttgcatattagtaaggcaatgcaatgcagctcttgtttccttcttcccgtgaagaaaccgtactagctgtagctgctgaacgtttgagtccctctgctgccacccttatctccattgtgccgtcgaacctccttgcttcccctgtgtgaatctgtacggattttcgtgttctgaacactgattgcagttgaatccagtttgtagttctatttgttcatcgaattcgaatctgcccgattcctttc

SEQ ID NO: 8908 - protein, 118 aa, Zea mays subsp. mays
  peptide (1)..(118): Ceres Seq. ID no. 12359910
IALCPRSPVASLPLPCLPNPSGHPETARSLARSPRPETSPETMADQLTDDQIAEFKEAFSLFDKDGDGCITTKELGTVMRSLGQNPTEAELQDMINEVDADGMARSTSPSSSTSWPAR

SEQ ID NO: 8909 - protein, 94 aa, Zea mays subsp. mays
  peptide (1)..(94): Ceres Seq. ID no. 12359911
KSLSAPDHRSPPFRSPACLIPPATPKPLARSLAPRAQRQARRPWRTSSLTTKSPSSRRPSASSIRTATVASQPRSLELSCVHWVRTQRRLNSRT

SEQ ID NO: 8910 - protein, 77 aa, Zea mays subsp. mays
  peptide (1)..(77): Ceres Seq. ID no. 12359912
MARKMKDTDSEEELKEAFRVFDKDQNGFISAAELRHVMTNLGEKLTDEEVDEMIREADVDGDGQINYEEFVKVMMAK

SEQ ID NO: 8911 - protein, 76 aa, Zea mays subsp. mays
  peptide (1)..(76): Ceres Seq. ID no. 12359913
MADQLTDDQIAEFKEAFSLFDKDGDGCITTKELGTVMRSLGQNPTEAELQDMINEVDADGMARSTSPSSSTSWPAR

SEQ ID NO: 8912 - DNA, 1008 bp, Zea mays subsp. mays
  misc_feature (1)..(1008): Ceres Seq. ID no. 12360007
  misc_feature (1)..(1008): Ortholog of  Ceres SEQ ID NO 15173858 as cited in SEQ ID NO 61930
gcttgccagcccagccctcaagcaacacgacgcattgcactagctagaccttgggctcgcaaacctcacacacccttccgcttaacctgcagcccttcggtcatcatcagcactcagcagtagcataggcaccaaggtagcgacccccgacacaatgcagtacggcgcggcggcggcggagcaggcgtggtcgtacatgccggtggtggcaccgtcgtcggccgtggagacggcggcggagcgcgtggagcggctggcgtcggagagcgcggtggtggtgttcagcgtgagcacctgctgcatgtgccacgccgtgaagcgcctcttctgcggcatgggcgtgcacccgacggtgcacgagctggaccacgacccgcggggccgcgagctggagcgcgccctcgcctgcctcctcggcgcctccggagcctcggcggcgggcgcgccggtcgtgcccgtcgtgttcatcggcggcaggctggtcggcgccatggaccgcgtcatggccgcgcacatcaacggcaccctcgtgccgctgctcaaggacgccggcgcgctctggctgtgatctcatcgccggccgctagctactagccattgccgccgttgcagctgttcgatcggggggctagctgatagtaaggcaggttacttattaattaatacacccaaagtagtgagttattaatcatagagtgcgtgcgcttgtgtgtttgtgtgtgtgttagtgggtgtgagagagagaggtcggtgattctttttactgatgctgcctccgtcttgtgtgtgggagctagctagttagatcgtgcttgcatgcccacgcgcgtatgtacgagtgtgtgtgcactgctactgctactgctagctaggtttggtcggtgctagaagagatcgatcggtttagtgttcttctcttccatgcatcttattaatcagtttggcttggggttccggcccctcgtctttgtgttttcatatcagagccatgcgtgcgtgcatctgggc

SEQ ID NO: 8913 - protein, 137 aa, Zea mays subsp. mays
  peptide (1)..(137): Ceres Seq. ID no. 12360008
MQYGAAAAEQAWSYMPVVAPSSAVETAAERVERLASESAVVVFSVSTCCMCHAVKRLFCGMGVHPTVHELDHDPRGRELERALACLLGASGASAAGAPVVPVVFIGGRLVGAMDRVMAAHINGTLVPLLKDAGALWL

SEQ ID NO: 8914 - protein, 123 aa, Zea mays subsp. mays
  peptide (1)..(123): Ceres Seq. ID no. 12360009
MPVVAPSSAVETAAERVERLASESAVVVFSVSTCCMCHAVKRLFCGMGVHPTVHELDHDPRGRELERALACLLGASGASAAGAPVVPVVFIGGRLVGAMDRVMAAHINGTLVPLLKDAGALWL

SEQ ID NO: 8915 - protein, 88 aa, Zea mays subsp. mays
  peptide (1)..(88): Ceres Seq. ID no. 12360010
MCHAVKRLFCGMGVHPTVHELDHDPRGRELERALACLLGASGASAAGAPVVPVVFIGGRLVGAMDRVMAAHINGTLVPLLKDAGALWL

SEQ ID NO: 8916 - DNA, 920 bp, Zea mays subsp. mays
  misc_feature (1)..(920): Ceres Seq. ID no. 12436141
  misc_feature (1)..(920): Ortholog of  Ceres SEQ ID NO 14301738 as cited in SEQ ID NO 61201
acagacaactcagatcgtttctaatcattccatctcaaagacaggagttcgtctccttgttaggcaaagaccggtagcaaaatgatcagctccaagaagctagctcagttgtccaagaagatgcagggaatgggtgcagttgggcgaagaagggtcacagtagtgagaaaggaaatcaacccatcttgcagcagcatagttgcagggaagggcaactgcatcgtctactcttctgatgggaagcggtttgagatccccctttcttacctccacacggcagtgtttgtagagctcctgaagctgtcgcaggaagagtttgggttcacaagtgatgggaggatcacactgccttgcgataaagcagtgatggagtatgtgatgtgtttgctaaggagagaagcctccgaggatgttgagaaggcgctcctcagttccatagtgatgtcttgccaccacacaaacaggatggtgcaaccaccaagtggagtgaaccaccacttcgctgtgtgcagctcctgaagatgaagatatccatggcttggagcttgtttcagcacttccctgtgtgcagctcctgaagatgaagatatccatgtcctggagcttgtttcccttctttttttcgcttccatcttttttcccagaagtaccttggagcacggtttttgtgcgatgtttttccaatggtacactgaggatgtacagatggatgcgtgattagaaaagaaggaatcaagattgccactgagacaataaagtagtgttgatttagaacctacgaaagaagataccatgatgtttgcactgtaaaaccagagctgccaaatggtctagtactgtagcgaatagcatctttcctttttccttagccctctacatgcaagggcaacagtaaattaaactatttacatggggtgctc

SEQ ID NO: 8917 - protein, 145 aa, Zea mays subsp. mays
  peptide (1)..(145): Ceres Seq. ID no. 12436142
MISSKKLAQLSKKMQGMGAVGRRRVTVVRKEINPSCSSIVAGKGNCIVYSSDGKRFEIPLSYLHTAVFVELLKLSQEEFGFTSDGRITLPCDKAVMEYVMCLLRREASEDVEKALLSSIVMSCHHTNRMVQPPSGVNHHFAVCSS

SEQ ID NO: 8918 - protein, 132 aa, Zea mays subsp. mays
  peptide (1)..(132): Ceres Seq. ID no. 12436143
MQGMGAVGRRRVTVVRKEINPSCSSIVAGKGNCIVYSSDGKRFEIPLSYLHTAVFVELLKLSQEEFGFTSDGRITLPCDKAVMEYVMCLLRREASEDVEKALLSSIVMSCHHTNRMVQPPSGVNHHFAVCSS

SEQ ID NO: 8919 - protein, 129 aa, Zea mays subsp. mays
  peptide (1)..(129): Ceres Seq. ID no. 12436144
MGAVGRRRVTVVRKEINPSCSSIVAGKGNCIVYSSDGKRFEIPLSYLHTAVFVELLKLSQEEFGFTSDGRITLPCDKAVMEYVMCLLRREASEDVEKALLSSIVMSCHHTNRMVQPPSGVNHHFAVCSS

SEQ ID NO: 8920 - DNA, 1162 bp, Zea mays subsp. mays
  misc_feature (1)..(1162): Ceres Seq. ID no. 12349689
  misc_feature (1)..(1162): Ortholog of  Ceres SEQ ID NO 15180350 as cited in SEQ ID NO 0
accgcacccagaggaggcaaggagcccatccacatccacctggtcctgctctcaccacaccgccgcgccaatggcggctcgccggcagcaccgccgcggcttcccgctggtcccgctcctgctctccctcctggccgccgccgcgtacggccgcctcatctccgacggcggcccgtccgcgcagctcctctcggtgatccgcctctcggggtcctcgccggccgcgggggcggccgccaaggccgaggagaagtgcgagcagtcctacgggttcctcccctgcaccaccaccgtgctcgggaacctcttcctcgtgctgacgtacggctacctcatgtacaaggcggccacgtacctgtcggcggggagcgagctgctgctcgagatcatggggcccggcctcgtcggcggcctcctcctccccatcctcggcgccctccccgacgcgctcctcgtgctcgtatctggcctgtccgggagtaaagaggaggcacagagtcaggtactgatcggaatggggctgcttgctggttccaccgtcttcctcctcaccctgctttgggggacctgtgtcgttgttggcaaatgtgaccttgggccaaaccgtgaggcagttgatgtaacagacgccaagggcttcagcttgactggcactggtattacaaccgacgtgcagaccagctatgcagcgcggatcatggggctatctgttatccccttcatcatcgctcagttcccaaagatgttgaagacccaccacgagcagcgtctagctatgttgctggccctcattgtgtcattcttgctcgtgctttcctactgtctgtatcaggttttccagccttggattcagaggaggaagcttgcatacgcaaagcacaagcacgtgatctctgggatactgaggcacgcccagatgcagtcactcggccgtctgctaaacgatgatggcacgcccaatgacgacgtcatcagaaagctgttccgcaagatcgacatggaccagagcgaatccctgtcccgtgctgagctgcacgccctcatcgtcggtatcaacttcgaggaggttgactttgacaggacggatgcggtggacaaggtcatggacgacttcgacacgtcccgcaacgatgtcgttgagcaggaggagtttgtgcagggg

SEQ ID NO: 8921 - protein, 387 aa, Zea mays subsp. mays
  peptide (1)..(387): Ceres Seq. ID no. 12349690
PHPEEARSPSTSTWSCSHHTAAPMAARRQHRRGFPLVPLLLSLLAAAAYGRLISDGGPSAQLLSVIRLSGSSPAAGAAAKAEEKCEQSYGFLPCTTTVLGNLFLVLTYGYLMYKAATYLSAGSELLLEIMGPGLVGGLLLPILGALPDALLVLVSGLSGSKEEAQSQVLIGMGLLAGSTVFLLTLLWGTCVVVGKCDLGPNREAVDVTDAKGFSLTGTGITTDVQTSYAARIMGLSVIPFIIAQFPKMLKTHHEQRLAMLLALIVSFLLVLSYCLYQVFQPWIQRRKLAYAKHKHVISGILRHAQMQSLGRLLNDDGTPNDDVIRKLFRKIDMDQSESLSRAELHALIVGINFEEVDFDRTDAVDKVMDDFDTSRNDVVEQEEFVQG

SEQ ID NO: 8922 - protein, 364 aa, Zea mays subsp. mays
  peptide (1)..(364): Ceres Seq. ID no. 12349691
MAARRQHRRGFPLVPLLLSLLAAAAYGRLISDGGPSAQLLSVIRLSGSSPAAGAAAKAEEKCEQSYGFLPCTTTVLGNLFLVLTYGYLMYKAATYLSAGSELLLEIMGPGLVGGLLLPILGALPDALLVLVSGLSGSKEEAQSQVLIGMGLLAGSTVFLLTLLWGTCVVVGKCDLGPNREAVDVTDAKGFSLTGTGITTDVQTSYAARIMGLSVIPFIIAQFPKMLKTHHEQRLAMLLALIVSFLLVLSYCLYQVFQPWIQRRKLAYAKHKHVISGILRHAQMQSLGRLLNDDGTPNDDVIRKLFRKIDMDQSESLSRAELHALIVGINFEEVDFDRTDAVDKVMDDFDTSRNDVVEQEEFVQG

SEQ ID NO: 8923 - protein, 276 aa, Zea mays subsp. mays
  peptide (1)..(276): Ceres Seq. ID no. 12349692
MYKAATYLSAGSELLLEIMGPGLVGGLLLPILGALPDALLVLVSGLSGSKEEAQSQVLIGMGLLAGSTVFLLTLLWGTCVVVGKCDLGPNREAVDVTDAKGFSLTGTGITTDVQTSYAARIMGLSVIPFIIAQFPKMLKTHHEQRLAMLLALIVSFLLVLSYCLYQVFQPWIQRRKLAYAKHKHVISGILRHAQMQSLGRLLNDDGTPNDDVIRKLFRKIDMDQSESLSRAELHALIVGINFEEVDFDRTDAVDKVMDDFDTSRNDVVEQEEFVQG

SEQ ID NO: 8924 - DNA, 935 bp, Zea mays subsp. mays
  misc_feature (1)..(935): Ceres Seq. ID no. 12363238
  misc_feature (1)..(935): Ortholog of  Ceres SEQ ID NO 13662677 as cited in SEQ ID NO 63824
gcacgagaccattacctagaacatcctaatcgaaaaatctatatctaaggcctatagctaactagctcggtccggcgatagaggccgccatggcgtccatcatcgtcatcgccgccgtgctcgtcctggacgtcctcgccttcgtgctcgccatcggcgccgagcgccgccggagctacgtgaactacgtgagcgtggacccggccggggggtcctactgcgtgtacagctccgacgcgtcgacggcgtacggcgtgagcgcgctgctgctgctgctcgccgcgcaggccgtggccatggtcgccacccgctgcttctgctgcggccgcgcgctctcgccgggccgctggcgggcgtggtccggcatctgcttcatcgtctgctgggtgacgttcgtgatcgcggagctgtgcctgctggccgggtcggtccggaacgcgtatcacaccaagtacttccccaagggcgacggcccgccgccgtgcgccatgctgcgcaagggcgtcttcgccgccggcgccgccttcaccttcctcaccgcgctgttcaccgagctgcactacctcttctacgccagggcgcgcgacgccgccgccgtggccccgcccatcgtcggcggcatcggcatgacccgcatgtgatgtggaggatatagctgcatgtgatagtactgtactactgtgactacagcgtgctggaactgttgggtttgtaattctgttattgttagccatcgcaacatagctgcattgttagccatcgcccatcggcattcagcagcagactggactagtttttttttccctctccctgcgcgtacattcaccacaaatcagcagaggtggatctgtcccagtccggcgcttgacgagaagcacaacgcacaaaggtgatcaaaagccagaaaatgttcagaatggtgacaacattattgc

SEQ ID NO: 8925 - protein, 183 aa, Zea mays subsp. mays
  peptide (1)..(183): Ceres Seq. ID no. 12363239
MASIIVIAAVLVLDVLAFVLAIGAERRRSYVNYVSVDPAGGSYCVYSSDASTAYGVSALLLLLAAQAVAMVATRCFCCGRALSPGRWRAWSGICFIVCWVTFVIAELCLLAGSVRNAYHTKYFPKGDGPPPCAMLRKGVFAAGAAFTFLTALFTELHYLFYARARDAAAVAPPIVGGIGMTRM

SEQ ID NO: 8926 - protein, 114 aa, Zea mays subsp. mays
  peptide (1)..(114): Ceres Seq. ID no. 12363240
MVATRCFCCGRALSPGRWRAWSGICFIVCWVTFVIAELCLLAGSVRNAYHTKYFPKGDGPPPCAMLRKGVFAAGAAFTFLTALFTELHYLFYARARDAAAVAPPIVGGIGMTRM

SEQ ID NO: 8927 - DNA, 1067 bp, Zea mays subsp. mays
  misc_feature (1)..(1067): Ceres Seq. ID no. 12354075
  misc_feature (1)..(1067): Ortholog of  Ceres SEQ ID NO 13503499 as cited in SEQ ID NO 68684
atatagatagataggagtacactgcgtaggagacagcaagagggcgaggctgtgtgtgagagagggagaggcagagaacattcggcagtgtgagaatcggaatcggagtcggagatggcttggaatggccgcttcggcaacgacgaggaggggagcggccttgagctcagccttagcctcccgggctacttctccggatcaccaacccaagctgcagcaggtttcgaggacaaagcagacggcggctctgctgctgctgctgctgctgcgcgagcaaagggaagcaatggcttcaaggccaggccggcggcagctgctccggtcgtgggatggccgccagtgcgcgcgttccggcggaacctcgcctcggcgtcctccaagccgtcccgcgatccgccaccaagccacagaggaaacgagtccgcgagcgtcggcgccggcggcaaggccgtcgagggcggcaacaagggcctgttcgtcaaggtcaacatggacggcgtgcccatcggccggaagctcgacctgggcggccacgccggctacgacacgctaaccgccgccgtcgaccacctcttccgcggcctcctctccgctcaaacgtcgggaccaggcggcgagcggcaggcggtcgcggggatcctgaacggtggcggcgagtacacgctggtgtacgaggacgacgagggagaccagatgctggtcggggacgtgccgtggcagatgttcgccgccaccgccaggcgtctgcgcgtgctgcggagctccgatctcaacccctcgtcgctaagggcagctaccaggaagagagctgcagcttagtgcttcgctggcgtaccctggagtctcaactctgaacattttgcggccttttcggagggccaccaatgtaaaattgaagcggtttttcgtggattttagttaccattaccatcatgtatgtgatcaagtagggaagcaggaatctagaggtgatgagcggtgttggtagaatcacgtaatttagtgctaggaccagcagtgtctcaacttttctgaaagtctaacaaggtgtcttggcgctggagtgt

SEQ ID NO: 8928 - protein, 234 aa, Zea mays subsp. mays
  peptide (1)..(234): Ceres Seq. ID no. 12354076
MAWNGRFGNDEEGSGLELSLSLPGYFSGSPTQAAAGFEDKADGGSAAAAAAARAKGSNGFKARPAAAAPVVGWPPVRAFRRNLASASSKPSRDPPPSHRGNESASVGAGGKAVEGGNKGLFVKVNMDGVPIGRKLDLGGHAGYDTLTAAVDHLFRGLLSAQTSGPGGERQAVAGILNGGGEYTLVYEDDEGDQMLVGDVPWQMFAATARRLRVLRSSDLNPSSLRAATRKRAAA

SEQ ID NO: 8929 - protein, 174 aa, Zea mays subsp. mays
  peptide (1)..(174): Ceres Seq. ID no. 12354077
MAASARVPAEPRLGVLQAVPRSATKPQRKRVRERRRRRQGRRGRQQGPVRQGQHGRRAHRPEARPGRPRRLRHANRRRRPPLPRPPLRSNVGTRRRAAGGRGDPERWRRVHAGVRGRRGRPDAGRGRAVADVRRHRQASARAAELRSQPLVAKGSYQEESCSLVLRWRTLESQL

SEQ ID NO: 8930 - protein, 142 aa, Zea mays subsp. mays
  peptide (1)..(142): Ceres Seq. ID no. 12354078
MAASATTRRGAALSSALASRATSPDHQPKLQQVSRTKQTAALLLLLLLREQREAMASRPGRRQLLRSWDGRQCARSGGTSPRRPPSRPAIRHQATEETSPRASAPAARPSRAATRACSSRSTWTACPSAGSSTWAATPATTR

SEQ ID NO: 8931 - DNA, 711 bp, Zea mays subsp. mays
  misc_feature (1)..(711): Ceres Seq. ID no. 12346855
  misc_feature (1)..(711): Ortholog of  Ceres SEQ ID NO 15173284 as cited in SEQ ID NO 61828
  misc_feature (1)..(711): Ortholog of  Ceres SEQ ID NO 15178906 as cited in SEQ ID NO 0
gaagcgacggacgagacgaggcacggaacggagcgagccagactacccacctaggcccagcggcatgaggggcagcgagatgttgaccgccgcggggggcgccggcacggccccgtccacggtctcctcgggggcggccgcggccgcggacctggttgctggagccgggggcacgggcgctatcggcgcgggcggaggacgcggcaacttccccctcgccgtcgccctcctcgccttcgccttcgcaaacttcgttaacctcgtctccatctggttaaaagagaagaggtgggatgcaaggaaatttcttacttcagctggagtcatgtcatctctttctgcaactgtggggagcttggccgttgctgtgggtcaacaagaaggcgcagatagctctgcatttgcccttgcattgatttttgctgccgttgtaatgtatgatgcatcaggaattagatggcacacaggtcgccaagctgcgttgttgaatcaaatagtctgtgatttcccaccagaacatccaatcatttcaacctttcggccactacgggaacctcttggacacagcccacttcaggtttttgcaggagcacttgttggttgtgcagctgcttatttcatgggaaaatctgtataaggaataggaatgtatagggtttggcttgtacacgaattccattgacttatttttgtaaaaaaatatcattgatc

SEQ ID NO: 8932 - protein, 211 aa, Zea mays subsp. mays
  peptide (1)..(211): Ceres Seq. ID no. 12346856
KRRTRRGTERSEPDYPPRPSGMRGSEMLTAAGGAGTAPSTVSSGAAAAADLVAGAGGTGAIGAGGGRGNFPLAVALLAFAFANFVNLVSIWLKEKRWDARKFLTSAGVMSSLSATVGSLAVAVGQQEGADSSAFALALIFAAVVMYDASGIRWHTGRQAALLNQIVCDFPPEHPIISTFRPLREPLGHSPLQVFAGALVGCAAAYFMGKSV

SEQ ID NO: 8933 - protein, 190 aa, Zea mays subsp. mays
  peptide (1)..(190): Ceres Seq. ID no. 12346857
MRGSEMLTAAGGAGTAPSTVSSGAAAAADLVAGAGGTGAIGAGGGRGNFPLAVALLAFAFANFVNLVSIWLKEKRWDARKFLTSAGVMSSLSATVGSLAVAVGQQEGADSSAFALALIFAAVVMYDASGIRWHTGRQAALLNQIVCDFPPEHPIISTFRPLREPLGHSPLQVFAGALVGCAAAYFMGKSV

SEQ ID NO: 8934 - protein, 185 aa, Zea mays subsp. mays
  peptide (1)..(185): Ceres Seq. ID no. 12346858
MLTAAGGAGTAPSTVSSGAAAAADLVAGAGGTGAIGAGGGRGNFPLAVALLAFAFANFVNLVSIWLKEKRWDARKFLTSAGVMSSLSATVGSLAVAVGQQEGADSSAFALALIFAAVVMYDASGIRWHTGRQAALLNQIVCDFPPEHPIISTFRPLREPLGHSPLQVFAGALVGCAAAYFMGKSV

SEQ ID NO: 8935 - DNA, 852 bp, Zea mays subsp. mays
  misc_feature (1)..(852): Ceres Seq. ID no. 12372297
  misc_feature (1)..(852): Ortholog of  Ceres SEQ ID NO 13594430 as cited in SEQ ID NO 60181
atcggcccctcccttccttctctagttcccttcccttatagtattaactacgacgatggtggtggatgctggtgttggtgttggcggcggcggcggcgccgggacatgtgccgtcggaggattcgcagtctgggacgtgctgctgtggcgccggggccgcgccgacgtgagcgcctgcctgctggcgggcaccgtctcctcctggctgctcttgtacggcggctacaccttggtgtccctcgcctccaacgtgctgctcctgctcctcaccgtgctcttcctgtgggccaaagcggcgcgcctcctgaacaggccgcagcctcccgtcccggagctgcgcgttccgcagcaggccgtggacgaggcggcggcgctgctgcgctctgctctggacgccgcctcggacgccttccgggacatcgcgctgggcagggactcgctgctcttctacagagtcttcctctgcctgtggagcgtgtccatcgtcggcagcgttacagatttcccgaccgcctgctacgcaagtgtggtggctgctctgaccatcccggcgctgtaccacaggcaccaagagtgcatcgccacctacatgagcttcgcctacatgaacctccggatgtacgagatggcgtacgagaggctgtccatgaaatgcttcctcaaggtcagggactggacaatggagctactcaaggatccatgatcccttggttgtttgcgagtgagtgcttcaggtatagagttgattgattggtagatagaatagtggtggttttgattgatgctgactcttgttgtttgatcgatcagtgtgctctggtagatatagtagtggttttgattgtttggtcc

SEQ ID NO: 8936 - protein, 249 aa, Zea mays subsp. mays
  peptide (1)..(249): Ceres Seq. ID no. 12372298
IGPSLPSLVPFPYSINYDDGGGCWCWCWRRRRRRDMCRRRIRSLGRAAVAPGPRRRERLPAGGHRLLLAALVRRLHLGVPRLQRAAPAPHRALPVGQSGAPPEQAAASRPGAARSAAGRGRGGGAAALCSGRRLGRLPGHRAGQGLAALLQSLPLPVERVHRRQRYRFPDRLLRKCGGCSDHPGAVPQAPRVHRHLHELRLHEPPDVRDGVREAVHEMLPQGQGLDNGATQGSMIPWLFASECFRYRVD

SEQ ID NO: 8937 - protein, 215 aa, Zea mays subsp. mays
  peptide (1)..(215): Ceres Seq. ID no. 12372299
MVVDAGVGVGGGGGAGTCAVGGFAVWDVLLWRRGRADVSACLLAGTVSSWLLLYGGYTLVSLASNVLLLLLTVLFLWAKAARLLNRPQPPVPELRVPQQAVDEAAALLRSALDAASDAFRDIALGRDSLLFYRVFLCLWSVSIVGSVTDFPTACYASVVAALTIPALYHRHQECIATYMSFAYMNLRMYEMAYERLSMKCFLKVRDWTMELLKDP

SEQ ID NO: 8938 - protein, 214 aa, Zea mays subsp. mays
  peptide (1)..(214): Ceres Seq. ID no. 12372300
MCRRRIRSLGRAAVAPGPRRRERLPAGGHRLLLAALVRRLHLGVPRLQRAAPAPHRALPVGQSGAPPEQAAASRPGAARSAAGRGRGGGAAALCSGRRLGRLPGHRAGQGLAALLQSLPLPVERVHRRQRYRFPDRLLRKCGGCSDHPGAVPQAPRVHRHLHELRLHEPPDVRDGVREAVHEMLPQGQGLDNGATQGSMIPWLFASECFRYRVD

SEQ ID NO: 8939 - DNA, 1746 bp, Zea mays subsp. mays
  misc_feature (1)..(1746): Ceres Seq. ID no. 13492837
  misc_feature (1)..(1746): Ortholog of  Ceres SEQ ID NO 14303831 as cited in SEQ ID NO 52976
  misc_feature (1)..(1746): Ortholog of  Ceres SEQ ID NO 12619453 as cited in SEQ ID NO 65952
gttctcccccaaccccaattcgccttcacctcgccgcttcctccattgaccgccaccgttgacgtcgtcttccggcgaggtagctcgccggaagacctcacctggactttcccgaagcaccctccacacactctttaaccctccggaatggccgcctgcttctagctcgtcgacgccccaatctccgcttgcttcctcgacagccccatccgcctcttctcgctctcgctacggctcctctgcctgttcgccatggcgatccgcatcaccgtctcctactccggctacgtggcgcagaacctcgccgcgtcgctcggccaccgcttctcctccgcctccgcctcgggcagccgcctcctccatgacggcgcctggcgccccttctgcatcttcacctccacccgccagcccgagaagcaccgcagtagcggcagcgaccgccatgacggaggcgactacaaccacccgaagccccaggccatcgccgccggagctcactcgttgctgctcacgcgtgcgtgcttatcgtccaagtcgccgccgccgtctcttgccgtgggggctgctctcggtgctcgcgcagaggacgggaccgacgcctggaaccaccggatcggcggcatctctctcaggctcgtcgccgatttccctcggtttcaaccccacctccttcctcccgttcctgcagacagcgaggtggctcccgtgcagcgaccttgccacctcgtcgtcttcggcaccctcttcccctccccgctcgcttgcgccttcggctccccccaagaaggcgttgattggtgctgctactggttctaccggaattgcgacgagcagtggtgctggtgcagcgatgagcaggagcaactggctgtcgaggtgggtcagctcctgctccgatgacgccaagacggcgtttgcggctgtgaccgtgccacttctctacggctcgtccctggccgagccgaagtccatcccgtccaagtccatgtacccgaccttcgatgtcggtgatcggattcttgctgagaaggtctcatacatattccgggatccagaaatttcggacatcgtgatcttccgggctcccccaggacttcaggtttatggctacagctcaggtgatgtgttcatcaagagagttgttgccaagggaggagactatgtcgaagtgcgtgatggcaagctgtttgttaatggagtagttcaggatgaggattttgtgctggagccacacaactacgagatggaaccagtgcttgtgccggaaggttatgtgttcgtgctgggagacaaccgcaacaacagctttgattcccacaactggggtccacttccagtgaggaacattgtcgggagatctatcctccggtattggccgccatcgaagatcaatgatacaatttatgagcctgatgtgtcccgcctcgcggtgccgtcctcgtagtagtcgttgcagtgatgctggatatccagtgtgtgtgtacaatgaccttattacttcgtggagcctcatttgatgagctgagctccagttccaattctctcagaatattttgtctcctgagtgttccctgtaaattctctttgcctgacagatttgttttccctgccgcttggcagatgcttgttcaaagcacgggaaagtgtagtaccttgcatcttgcaatataaactaattaaaccggttacccttttttttcttttatcgagataaactctgcttttaagaaagcaataaggtttcgt

SEQ ID NO: 8940 - protein, 360 aa, Zea mays subsp. mays
  peptide (1)..(360): Ceres Seq. ID no. 13492838
MTAPGAPSASSPPPASPRSTAVAAATAMTEATTTTRSPRPSPPELTRCCSRVRAYRPSRRRRLLPWGLLSVLAQRTGPTPGTTGSAASLSGSSPISLGFNPTSFLPFLQTARWLPCSDLATSSSSAPSSPPRSLAPSAPPKKALIGAATGSTGIATSSGAGAAMSRSNWLSRWVSSCSDDAKTAFAAVTVPLLYGSSLAEPKSIPSKSMYPTFDVGDRILAEKVSYIFRDPEISDIVIFRAPPGLQVYGYSSGDVFIKRVVAKGGDYVEVRDGKLFVNGVVQDEDFVLEPHNYEMEPVLVPEGYVFVLGDNRNNSFDSHNWGPLPVRNIVGRSILRYWPPSKINDTIYEPDVSRLAVPSS

SEQ ID NO: 8941 - protein, 333 aa, Zea mays subsp. mays
  peptide (1)..(333): Ceres Seq. ID no. 13492839
MTEATTTTRSPRPSPPELTRCCSRVRAYRPSRRRRLLPWGLLSVLAQRTGPTPGTTGSAASLSGSSPISLGFNPTSFLPFLQTARWLPCSDLATSSSSAPSSPPRSLAPSAPPKKALIGAATGSTGIATSSGAGAAMSRSNWLSRWVSSCSDDAKTAFAAVTVPLLYGSSLAEPKSIPSKSMYPTFDVGDRILAEKVSYIFRDPEISDIVIFRAPPGLQVYGYSSGDVFIKRVVAKGGDYVEVRDGKLFVNGVVQDEDFVLEPHNYEMEPVLVPEGYVFVLGDNRNNSFDSHNWGPLPVRNIVGRSILRYWPPSKINDTIYEPDVSRLAVPSS

SEQ ID NO: 8942 - protein, 215 aa, Zea mays subsp. mays
  peptide (1)..(215): Ceres Seq. ID no. 13492840
MAIRITVSYSGYVAQNLAASLGHRFSSASASGSRLLHDGAWRPFCIFTSTRQPEKHRSSGSDRHDGGDYNHPKPQAIAAGAHSLLLTRACLSSKSPPPSLAVGAALGARAEDGTDAWNHRIGGISLRLVADFPRFQPHLLPPVPADSEVAPVQRPCHLVVFGTLFPSPLACAFGSPQEGVDWCCYWFYRNCDEQWCWCSDEQEQLAVEVGQLLLR

SEQ ID NO: 8943 - DNA, 968 bp, Zea mays subsp. mays; identical to SEQ ID NO: 7998
  misc_feature (1)..(968): Ceres Seq. ID no. 12380992
  misc_feature (1)..(968): Ortholog of  Ceres SEQ ID NO 14304654 as cited in SEQ ID NO 53301
  misc_feature (1)..(968): Ortholog of  Ceres SEQ ID NO 13658153 as cited in SEQ ID NO 66326
  misc_feature (1)..(968): Ortholog of  Ceres SEQ ID NO 14303011 as cited in SEQ ID NO 67226

SEQ ID NO: 8944 - protein, 260 aa, Zea mays subsp. mays; identical to SEQ ID NO: 7999
  peptide (1)..(260): Ceres Seq. ID no. 12380993

SEQ ID NO: 8945 - protein, 238 aa, Zea mays subsp. mays; identical to SEQ ID NO: 8000
  peptide (1)..(238): Ceres Seq. ID no. 12380994

SEQ ID NO: 8946 - protein, 218 aa, Zea mays subsp. mays; identical to SEQ ID NO: 8001
  peptide (1)..(218): Ceres Seq. ID no. 12380995

SEQ ID NO: 8947 - DNA, 1278 bp, Zea mays subsp. mays
  misc_feature (1)..(1278): Ceres Seq. ID no. 12413223
  misc_feature (1)..(1278): Ortholog of  Ceres SEQ ID NO 13595919 as cited in SEQ ID NO 67751
agttcgtggagtggagtcaccacagaatcaaagaaaagctttcccccgatcctctcgcggacaccagcgatgggttcccgctacgaggtggaggtcaccgtcggctccgcccgggacctcaagaacgtcaactggcgcaacggcgacctcaagccctacgccgtggtgtggatcgactccggcagcaagtgctcgacccgcgtcgacctcgacaacggcgagagcccggcgtgggacgagaagctgctcgtcccgctcccgcccacctcccgcctcgacgacgccgtcctctacgtcgacgtcgtccacgccaacgccgcccagggcgtcaagccgctcgtcggctccgcgcgcctcccgctccgcgacgtcctcgacgacgccggggtcgggggcaaggcctcgcgcagcctccgcctcaagcgcccctcgggccgcccccacggccgcctcgacgtccgcgtcgccgtcaaggagccgtccaggtactacgaccccaacccctacccggcccccgcggcctacgccaacacgggcggcggcacccgtgacccctacggctcgtccgctgctgctgccggcggctactacggctccggaggcggatacggttccggtggtggcgcctacggtggcggcggctacggcgccgcgcagccctacaccgcagcgcccccggcggggtacccttccacctacggcgccgcgccgccgcctcagccagcggcagcgtacggcgctcctcctgccgctgcatacggcgctcctcctgtcgccgccaccgccgcgtacggaaccggcgccgttgcttccgacgggaagaagaagaacaagatggggatggggacggggctggcagtgggcgcggcggcgggcgtgctcggagggctggcgctggccggcggggcgagctacctggaggacaagttcgaggagcgcgtgtcggagcgggtggaggacaacctggagagggaggagtcgtacggaggcggcggctacgggggtggctacgacgactatggcggcaacgacgactatggcggcgacgacgactactgatgggtcctgatcctccgatcgtttgcccggctgctacgcttgccatccaccttcaccttcgtcttgctgtcctagatgtttgctgtatcaatcgcatgttctctattcctgccttcagtttcttttctcagttgtggtttatcgaggcggggttgatgttgagatttgagatcctcacctgaggaatggaaaaatgctaaattgattaattcggttgcg

SEQ ID NO: 8948 - protein, 355 aa, Zea mays subsp. mays
  peptide (1)..(355): Ceres Seq. ID no. 12413224
VRGVESPQNQRKAFPRSSRGHQRWVPATRWRSPSAPPGTSRTSTGATATSSPTPWCGSTPAASARPASTSTTARARRGTRSCSSRSRPPPASTTPSSTSTSSTPTPPRASSRSSAPRASRSATSSTTPGSGARPRAASASSAPRAAPTAASTSASPSRSRPGTTTPTPTRPPRPTPTRAAAPVTPTARPLLLPAATTAPEADTVPVVAPTVAAATAPRSPTPQRPRRGTLPPTAPRRRLSQRQRTALLLPLHTALLLSPPPPRTEPAPLLPTGRRRTRWGWGRGWQWARRRACSEGWRWPAGRATWRTSSRSACRSGWRTTWRGRSRTEAAATGVATTTMAATTTMAATTTTDGS

SEQ ID NO: 8949 - protein, 352 aa, Zea mays subsp. mays
  peptide (1)..(352): Ceres Seq. ID no. 12413225
SSWSGVTTESKKSFPPILSRTPAMGSRYEVEVTVGSARDLKNVNWRNGDLKPYAVVWIDSGSKCSTRVDLDNGESPAWDEKLLVPLPPTSRLDDAVLYVDVVHANAAQGVKPLVGSARLPLRDVLDDAGVGGKASRSLRLKRPSGRPHGRLDVRVAVKEPSRYYDPNPYPAPAAYANTGGGTRDPYGSSAAAAGGYYGSGGGYGSGGGAYGGGGYGAAQPYTAAPPAGYPSTYGAAPPPQPAAAYGAPPAAAYGAPPVAATAAYGTGAVASDGKKKNKMGMGTGLAVGAAAGVLGGLALAGGASYLEDKFEERVSERVEDNLEREESYGGGGYGGGYDDYGGNDDYGGDDDY

SEQ ID NO: 8950 - protein, 329 aa, Zea mays subsp. mays
  peptide (1)..(329): Ceres Seq. ID no. 12413226
MGSRYEVEVTVGSARDLKNVNWRNGDLKPYAVVWIDSGSKCSTRVDLDNGESPAWDEKLLVPLPPTSRLDDAVLYVDVVHANAAQGVKPLVGSARLPLRDVLDDAGVGGKASRSLRLKRPSGRPHGRLDVRVAVKEPSRYYDPNPYPAPAAYANTGGGTRDPYGSSAAAAGGYYGSGGGYGSGGGAYGGGGYGAAQPYTAAPPAGYPSTYGAAPPPQPAAAYGAPPAAAYGAPPVAATAAYGTGAVASDGKKKNKMGMGTGLAVGAAAGVLGGLALAGGASYLEDKFEERVSERVEDNLEREESYGGGGYGGGYDDYGGNDDYGGDDDY

SEQ ID NO: 8951 - DNA, 1382 bp, Zea mays subsp. mays
  misc_feature (1)..(1382): Ceres Seq. ID no. 12365863
  misc_feature (1)..(1382): Ortholog of  Ceres SEQ ID NO 13664220 as cited in SEQ ID NO 61151
  misc_feature (1)..(1382): Ortholog of  Ceres SEQ ID NO 13597477 as cited in SEQ ID NO 65160
atcggcacgtcaatttactactagcactctatcagtagtgttcagctgctcccgagctagcgagcgaagcactgtcggcacagtaacccccccctgtgcgcgtcgcgtgccgagtgccgcagagcacgagaagctaggccgcacagcaagcttgacatcatggcagctgctgccactcgttcattgcactccttcctcgcgcttcttctcctgttggcagctgcggccgcggctgcggcgctgtcgtacgaaaccaagtccatagatcctggactcgtcgtgatgacgctgccggagccggtgtccgggccggagagtctcgccttcgacgggcgtggcggcgggccctactccggcgtctccgacggccgcgtcctccggtggcaaggtcccctccggggatggaccgagttcgcctacaactccaagcacaggagcgtggcgttgtgcgcgccggacaagaagctggtagtgccggagagcctgtgcgggcgcccgctgggcctgcagttccaccggcagtccggcgacctttacgtcgccgacgcctacctggggctgctcagggttgccgcgcgcggcgggctggcgcaggtcgtggcgacggaggccgccggggggccgttcaacttcctcaacgggctcgacgtcgaccagcggaccggcgacgtctacttcaccgatagcagcgccacgtacaggaggagcgactacctgctggtggtggccatgggcgacgagacgggccgcctgctgcgctacgagcggcggaccgggcgcgtgggcgtgctccaggcgggcctgtcgtacccgaacggcgtggcggtgagcgcggacggcacgcacgtggtggtggcgcacacggcgctttgcgagctgcggaggtactggatccgcggcgcccgggcgggcacgtccgacaccttcgccgagctgccggggtacccggacaacctgcgcgccgacggccgcggcgggtactgggtagcgctgagcagcggcgtcgcggctgatgaggcggccgccgcgcccacggtcgccgtcagggtctcccgcgacggcaacgtgacggaggcgcttgacgggttcagcttcgtgtccgtcagcgaggtggcccagcgcggcggcgcgctctgggtcggctccgtggacacgccgtacgccggccagctcaagcggcgtgccagctagtgccgtgccgttttgtcatccattgatatcatatatgcagttgtgttgcgtgtgcatgcaccgtgaacaacatttgactgtacgtaccccaatgtcgtcgtcgtcgtcgtctcgtagctagtgttcgtcgcaattgtggatgtggactccgttcgtggaatggttagtggttgtttggtctctggtgatct

SEQ ID NO: 8952 - protein, 343 aa, Zea mays subsp. mays
  peptide (1)..(343): Ceres Seq. ID no. 12365864
MAAAATRSLHSFLALLLLLAAAAAAAALSYETKSIDPGLVVMTLPEPVSGPESLAFDGRGGGPYSGVSDGRVLRWQGPLRGWTEFAYNSKHRSVALCAPDKKLVVPESLCGRPLGLQFHRQSGDLYVADAYLGLLRVAARGGLAQVVATEAAGGPFNFLNGLDVDQRTGDVYFTDSSATYRRSDYLLVVAMGDETGRLLRYERRTGRVGVLQAGLSYPNGVAVSADGTHVVVAHTALCELRRYWIRGARAGTSDTFAELPGYPDNLRADGRGGYWVALSSGVAADEAAAAPTVAVRVSRDGNVTEALDGFSFVSVSEVAQRGGALWVGSVDTPYAGQLKRRAS

SEQ ID NO: 8953 - protein, 302 aa, Zea mays subsp. mays
  peptide (1)..(302): Ceres Seq. ID no. 12365865
MTLPEPVSGPESLAFDGRGGGPYSGVSDGRVLRWQGPLRGWTEFAYNSKHRSVALCAPDKKLVVPESLCGRPLGLQFHRQSGDLYVADAYLGLLRVAARGGLAQVVATEAAGGPFNFLNGLDVDQRTGDVYFTDSSATYRRSDYLLVVAMGDETGRLLRYERRTGRVGVLQAGLSYPNGVAVSADGTHVVVAHTALCELRRYWIRGARAGTSDTFAELPGYPDNLRADGRGGYWVALSSGVAADEAAAAPTVAVRVSRDGNVTEALDGFSFVSVSEVAQRGGALWVGSVDTPYAGQLKRRAS

SEQ ID NO: 8954 - DNA, 1170 bp, Zea mays subsp. mays
  misc_feature (1)..(1170): Ceres Seq. ID no. 12356672
  misc_feature (1)..(1170): Ortholog of  Ceres SEQ ID NO 15178935 as cited in SEQ ID NO 0
atctgaagcctgtaacatctccgccatccgcctgaaggctcgaagcacgacgccaatggcctcccccaacgccgacccggctcagcaccacgcctcgacgccgccgctcctcctcgccgtacgccacctgccgttccccggcgtccaccggacgcgcgcgctccccggccccgacgtcctgacccctctcgcccgccgcctcgaggagctcgcgtccgcggcgacctcccacccgctcctgaagccgctcttcgccgcccactcacacctctcttccttctcccagggcaggaggcggctggtggcggcgcggcgtgcgacggtgctgtccggggggcactgcttcgcggcggtgctagggaactcggtggccgggttggtggtgtccaacggcatcaacaacttcctcaacctctacaacacggtgctcgtcgtcaggctcgtgctcacgtggttccccaacacgccgcccgccatcgtcgcgcctctcagcacgatatgtgacccgtacctgaacatcttccggggcatcatcccgccgctcgggggaacgctggacctgtcgccgatcctcgctttcctcgtcctcaacgccttcaccagcacggcggccgcgcttccggcggagctcccgagctcggcagcggcgcagcaccaccagaggactgctgcttcatccagctcggcgactcccagtcccaaccagaggaaatggatgcggagaatgcgatcaaagacatcacagggagaagatggtggtcactaggcatgtgagcttgtggctgggttcgtcaaatgccttattgttaccagctggggatcatgcttcgcatcagacgctcgagatctgcacagcaatgtgttggacatgcatgctcctcgctctctagccatcgaatgcaaactctgtcaatgccgcatgcagagttcgcccctttggttcaccacgttgcttcagagcttcaaatggtttttgtgcgttgtaatgcgttggcgttgcggagctttcttcaaatggtttttgtgctttgtaatgctttggcggtgagggctgtgctttctgctgcatgtatgtgtagcactttcggtcagctttcttgaattccgatagtgtgatcgcgatgcgtagccaaattcagtcttgagagagtaccaatcgaactttcatcg

SEQ ID NO: 8955 - protein, 254 aa, Zea mays subsp. mays
  peptide (1)..(254): Ceres Seq. ID no. 12356673
SEACNISAIRLKARSTTPMASPNADPAQHHASTPPLLLAVRHLPFPGVHRTRALPGPDVLTPLARRLEELASAATSHPLLKPLFAAHSHLSSFSQGRRRLVAARRATVLSGGHCFAAVLGNSVAGLVVSNGINNFLNLYNTVLVVRLVLTWFPNTPPAIVAPLSTICDPYLNIFRGIIPPLGGTLDLSPILAFLVLNAFTSTAAALPAELPSSAAAQHHQRTAASSSSATPSPNQRKWMRRMRSKTSQGEDGGH

SEQ ID NO: 8956 - protein, 236 aa, Zea mays subsp. mays
  peptide (1)..(236): Ceres Seq. ID no. 12356674
MASPNADPAQHHASTPPLLLAVRHLPFPGVHRTRALPGPDVLTPLARRLEELASAATSHPLLKPLFAAHSHLSSFSQGRRRLVAARRATVLSGGHCFAAVLGNSVAGLVVSNGINNFLNLYNTVLVVRLVLTWFPNTPPAIVAPLSTICDPYLNIFRGIIPPLGGTLDLSPILAFLVLNAFTSTAAALPAELPSSAAAQHHQRTAASSSSATPSPNQRKWMRRMRSKTSQGEDGGH

SEQ ID NO: 8957 - DNA, 756 bp, Zea mays subsp. mays
  misc_feature (1)..(756): Ceres Seq. ID no. 12356686
  misc_feature (1)..(756): Ortholog of  Ceres SEQ ID NO 12780566 as cited in SEQ ID NO 65822
attccgttccgagagccaaaaactccactgctttcatcaactccggcgacttggagaagacgaagttccagaatccgatcggaagtttggtgctcgcgccttgacggattgatttcggtgcgccgatggggcaggcgttccgcaagctgttcgattccttcttcggcaccagcgagatgagggttgtgatgcttggtctggatgctgccggtaaaaccaccatattgtacaagctgcatatcggggaggttttgtcgactgttcccacgattggtttcaacgtcgagaaagttcaatacaagaatgtgatgtttactgtgtgggatgttggtggccaagaaaagttgagggtgactacgtccgcaaaggagatgagtttgggtatttctcctttggagggagtacagtgatatgcgtcttcgagaaggacgccatccaatttgacgctgatctcgtggcaaacagcgaaaggtcactggagaccaagtcccggatctgcagaaagtttcgctcggatgacagacagagctgtaaactgtgtgcaggttaacagtagcgtatatttgatactagcaactgccactggtaggcaatactattatcacataatccaagactacatgtatagtcaggctagaggagtctggtttacggcggtgggcgtgggcatgggcattggcccagctgtcatcggctgagagctcactgcatggctcggtggtttttgcaatgacgatactaaccgtgcagttgctc

SEQ ID NO: 8958 - protein, 94 aa, Zea mays subsp. mays
  peptide (1)..(94): Ceres Seq. ID no. 12356687
MGQAFRKLFDSFFGTSEMRVVMLGLDAAGKTTILYKLHIGEVLSTVPTIGFNVEKVQYKNVMFTVWDVGGQEKLRVTTSAKEMSLGISPLEGVQ

SEQ ID NO: 8959 - protein, 77 aa, Zea mays subsp. mays
  peptide (1)..(77): Ceres Seq. ID no. 12356688
MRVVMLGLDAAGKTTILYKLHIGEVLSTVPTIGFNVEKVQYKNVMFTVWDVGGQEKLRVTTSAKEMSLGISPLEGVQ

SEQ ID NO: 8960 - protein, 73 aa, Zea mays subsp. mays
  peptide (1)..(73): Ceres Seq. ID no. 12356689
MLGLDAAGKTTILYKLHIGEVLSTVPTIGFNVEKVQYKNVMFTVWDVGGQEKLRVTTSAKEMSLGISPLEGVQ

SEQ ID NO: 8961 - DNA, 1641 bp, Zea mays subsp. mays
  misc_feature (1)..(1641): Ceres Seq. ID no. 12382117
  misc_feature (1)..(1641): Ortholog of  Ceres SEQ ID NO 15227139 as cited in SEQ ID NO 0
aaattagaaaacctgaaaacctatcctacaagatacactcttcatccaccccttacgctcagacgtcactagctagccatcatcacacaggcagcatggtgatgaaagaagcagccgaagagcacgatggccgccgcgacgtgaccgtcacggtggagccggcgctgccggtgcagcaacaccgcctgccgctgtccaacctggacctcctcctgccgccgctcgacgtcagcctcttcttctgctacctccacccggcgcccaccgcgatcgctctcaaggaggcactggccaagacgctggtggcgtactacccgttggccggggaggtggtggccaacggcgatggggagccggagctgctctgcagcggccgcggcgtggacttcacggagacggccgcggccggagtcgagctgcgggaggtccggctgggcgccgtggacgaaggcgttgagaagctggtccctgtcaagaagaccggcgtgacgatggcggtcaagctgagcaagttcacgtgcggcggcgccgtcgtcggctgcaccttcgaccaccgcgtctgcgacgcctactccttcaacatgttcctcgtcgcgtgggccgcagccgcccgtggcagctctgcgccaccaccgccggacccgtgcttccgccgctccctagtcgccccacgcgacacaccacatcggcgcgcgccgtccaccgacgccctcatcaaccgcctcttctctcctcgaagcgccgcgccaccgcctccacccgccgccgcaggctccgtcaaccggatctaccgcatagccgccgaggacatcgccgcgctgaaggcctcggcggggccggggcgcacgaagatggaggcgttcacggcgctcctgtggcagctctgcgcaagggcggcctccccgcgccagagccagtgctgcatgggcgtggtcgtggacgggcgcacccggatgttcccggacggcgccatgaaggcctacttcggaaacgtgctcaccatcccgtacggcgtcatcggctccgaagacctgcgctgcatggccctcgctgacgtggccgacgacgtgcaccggtgggtggcggaggccgccaccggcgaccatttccgcgggctcgtggactgggtggaggcgctgcggcctaagccggccgcggcgagggcgtacctgggagggaccggcggcaacgaggcgatggcgtgcatcgtgtcgtccggtatgagcttcccggtgggcaaggccgacttcgggactggcctccccgcgttcgcgtcgtaccatttcccgtggcccgccggcgccgggtacgtgatgccgatgccgagcgcgcgcgggaacggcgattgggtggtgtacgtgcacgtggcgccggaggtggcgaaggtgatggaggagtccaccgtgttccaagccctggtgaacagctatgcgtttgaatgatgatggagatgggccggcatattcgtggatgcgcgcgcgttgccgtccacgcgtgtgtctagagctagtgttgatgtgcatacggcatggagttctcactactcagcagtgctaccaatttgcctcgttggttactatgtttgccagaaaataataatagtaactccatgcatatatgtcacgtgacatatgtgtaatt

SEQ ID NO: 8962 - protein, 479 aa, Zea mays subsp. mays
  peptide (1)..(479): Ceres Seq. ID no. 12382118
IRKPENLSYKIHSSSTPYAQTSLASHHHTGSMVMKEAAEEHDGRRDVTVTVEPALPVQQHRLPLSNLDLLLPPLDVSLFFCYLHPAPTAIALKEALAKTLVAYYPLAGEVVANGDGEPELLCSGRGVDFTETAAAGVELREVRLGAVDEGVEKLVPVKKTGVTMAVKLSKFTCGGAVVGCTFDHRVCDAYSFNMFLVAWAAAARGSSAPPPPDPCFRRSLVAPRDTPHRRAPSTDALINRLFSPRSAAPPPPPAAAGSVNRIYRIAAEDIAALKASAGPGRTKMEAFTALLWQLCARAASPRQSQCCMGVVVDGRTRMFPDGAMKAYFGNVLTIPYGVIGSEDLRCMALADVADDVHRWVAEAATGDHFRGLVDWVEALRPKPAAARAYLGGTGGNEAMACIVSSGMSFPVGKADFGTGLPAFASYHFPWPAGAGYVMPMPSARGNGDWVVYVHVAPEVAKVMEESTVFQALVNSYAFE

SEQ ID NO: 8963 - protein, 448 aa, Zea mays subsp. mays
  peptide (1)..(448): Ceres Seq. ID no. 12382119
MVMKEAAEEHDGRRDVTVTVEPALPVQQHRLPLSNLDLLLPPLDVSLFFCYLHPAPTAIALKEALAKTLVAYYPLAGEVVANGDGEPELLCSGRGVDFTETAAAGVELREVRLGAVDEGVEKLVPVKKTGVTMAVKLSKFTCGGAVVGCTFDHRVCDAYSFNMFLVAWAAAARGSSAPPPPDPCFRRSLVAPRDTPHRRAPSTDALINRLFSPRSAAPPPPPAAAGSVNRIYRIAAEDIAALKASAGPGRTKMEAFTALLWQLCARAASPRQSQCCMGVVVDGRTRMFPDGAMKAYFGNVLTIPYGVIGSEDLRCMALADVADDVHRWVAEAATGDHFRGLVDWVEALRPKPAAARAYLGGTGGNEAMACIVSSGMSFPVGKADFGTGLPAFASYHFPWPAGAGYVMPMPSARGNGDWVVYVHVAPEVAKVMEESTVFQALVNSYAFE

SEQ ID NO: 8964 - protein, 446 aa, Zea mays subsp. mays
  peptide (1)..(446): Ceres Seq. ID no. 12382120
MKEAAEEHDGRRDVTVTVEPALPVQQHRLPLSNLDLLLPPLDVSLFFCYLHPAPTAIALKEALAKTLVAYYPLAGEVVANGDGEPELLCSGRGVDFTETAAAGVELREVRLGAVDEGVEKLVPVKKTGVTMAVKLSKFTCGGAVVGCTFDHRVCDAYSFNMFLVAWAAAARGSSAPPPPDPCFRRSLVAPRDTPHRRAPSTDALINRLFSPRSAAPPPPPAAAGSVNRIYRIAAEDIAALKASAGPGRTKMEAFTALLWQLCARAASPRQSQCCMGVVVDGRTRMFPDGAMKAYFGNVLTIPYGVIGSEDLRCMALADVADDVHRWVAEAATGDHFRGLVDWVEALRPKPAAARAYLGGTGGNEAMACIVSSGMSFPVGKADFGTGLPAFASYHFPWPAGAGYVMPMPSARGNGDWVVYVHVAPEVAKVMEESTVFQALVNSYAFE

SEQ ID NO: 8965 - DNA, 1024 bp, Zea mays subsp. mays
  misc_feature (1)..(1024): Ceres Seq. ID no. 13492744
  misc_feature (1)..(1024): Ortholog of  Ceres SEQ ID NO 14304202 as cited in SEQ ID NO 56346
  misc_feature (1)..(1024): Ortholog of  Ceres SEQ ID NO 12613472 as cited in SEQ ID NO 60611
acttcgattcgctcccacgcacacacactcctgcctgcggttgccactcgcgtagcaccagacagcgggagcagcacgcgcgcgacgttcgcaatggcggcgcgggcaaccgtcgtcctctgcgccgcnntcctcgnnctgctctccgccaccagctccctcgcgcagtcccccgcggccgcgccggctaaggcgccgcccaagtcctcctccaaggccacgccggccgccgcgcccgcgcccaagtcctcctccaaggccagcccattggcgccggccgccgcgccaaccaccccggcacccgcggcggcgccggccacgccaaagcccaaggcccccgcgcccgcgcccgccaccaaggccgcagccccggccccggctacccctgctcccgtcgccactccccccgcggcgacgcctcccgccgccgaggcgcccgtgcccgccgcggcgccggcccccgagaccaagcccgtcgaggcccccgcccccgcccccgcgccggccaagaagaagaagccgtcgtccccctcctccaaggacaagaagaagaagaagggcgcgtccgcccctgccccggccgccgacgcccccgtcgccaagaagcccagaaccgccgacgcgcccacgtccgcagccgaggctcccggggcccagcggcgacgccgccgctgccgacaccgcgagggccgcagcgaggaggacaccggcgggcgtgatcgcgtcgtcggccgtcgcggtgctgctgggtgcggcggccctgctcgcctagataagatccccggatgccaccatcacaggatttgatgcccttttcctgcttttactttttctttcgctattttgtggaaaaaaggggttttcttctgtgtagtagagtagtaccgtagcagtagactagtagggcggatgatttcttctgcttccagagatgatacgagagagagagtggttagagtagagaggggactgcccgtgtaatgttcagatttatctacatatttatatatccctgttatagccc

SEQ ID NO: 8966 - protein, 268 aa, Zea mays subsp. mays
  peptide (1)..(268): Ceres Seq. ID no. 13492745
  misc_feature (43)..(43): Xaa is any aa, unknown or other
  misc_feature (44)..(44): Xaa is any aa, unknown or other
  misc_feature (46)..(46): Xaa is any aa, unknown or other
TSIRSHAHTLLPAVATRVAPDSGSSTRATFAMAARATVVLCAXXLXLLSATSSLAQSPAAAPAKAPPKSSSKATPAAAPAPKSSSKASPLAPAAAPTTPAPAAAPATPKPKAPAPAPATKAAAPAPATPAPVATPPAATPPAAEAPVPAAAPAPETKPVEAPAPAPAPAKKKKPSSPSSKDKKKKKGASAPAPAADAPVAKKPRTADAPTSAAEAPGAQRRRRRCRHREGRSEEDTGGRDRVVGRRGAAGCGGPARLDKIPGCHHHRI

SEQ ID NO: 8967 - protein, 237 aa, Zea mays subsp. mays
  peptide (1)..(237): Ceres Seq. ID no. 13492746
  misc_feature (12)..(12): Xaa is any aa, unknown or other
  misc_feature (13)..(13): Xaa is any aa, unknown or other
  misc_feature (15)..(15): Xaa is any aa, unknown or other
MAARATVVLCAXXLXLLSATSSLAQSPAAAPAKAPPKSSSKATPAAAPAPKSSSKASPLAPAAAPTTPAPAAAPATPKPKAPAPAPATKAAAPAPATPAPVATPPAATPPAAEAPVPAAAPAPETKPVEAPAPAPAPAKKKKPSSPSSKDKKKKKGASAPAPAADAPVAKKPRTADAPTSAAEAPGAQRRRRRCRHREGRSEEDTGGRDRVVGRRGAAGCGGPARLDKIPGCHHHRI

SEQ ID NO: 8968 - DNA, 1425 bp, Zea mays subsp. mays
  misc_feature (1)..(1425): Ceres Seq. ID no. 12358365
  misc_feature (1)..(1425): Ortholog of  Ceres SEQ ID NO 15169244 as cited in SEQ ID NO 58988
aacatctagagcttggaggaaagctagctagcgagaggaataggatcgcaatggtggaacggccgggcagatcggcaggcgtcagggaggccaataagacttccgctgccgccatggtgaagacgacgacgacgacgaccaccaataaggaggagctggagagcccgtcctacaggttagcagcgttcaagagcctcttctcgtgcaggaacagccacgcgcggccgcgggcgccggacaccggcaacaggagcaagagggggctgggctgctccgcgccgtccatctgcaagctcaaggacgacagcgtgcccgtgccgcccaaggaaaccacgggcacggcgtcggcaggcgagccctgcaagcgccgcgcgtccgtgagcgggagcagcgatcggtgcgtgaagaagccccaatgtggcgctggcagcaacaagcagctgcagcgtggcgggtcgtcgtcgtcgtcgggcgggtcgtcgttcagggccggcatgcagctgaggcggctttcggggtgctacgagtgccacatggtggtggcgggcagcgcctccatgagggccaccaccatctgcccctgcccggactgcggcgaggtgttcgtcaggcaggagagcctccagctccaccagtccatcaggcacgcagtgtccgagcttggcactgacgacacgagccgcaacatcatcgagatcatcttccagtccagctggctcaagaagcagagccccgtgtgcaaggtcgaccgcatcctcaaggtgaacaacacgcccagaacgctggcccgcttcgaggagtaccgcgacgctgtcaaggccagggcgggcgccgagcagctggcggtagcggcggccaacagcaacaggcacccgcgctgcaccgccgacggcaacgagctgctccggttccactgcgccaccctggcctgctcgctcggcctcaacggcgccacgcacctctgcgacgccgcggggacctgcgcagcgtgcggcatcatccgcgacggcttcagcagcggcggggtgctgaccatggccacgagcggccgcgcgcacgacgccgtgcccgctgcggaggctggcgccggactggatgaggaaaccactccaagggcgatgctggtgtgccgggtcatcgcgggaagggtgaagcggcccaaagaagcggtaccagaggaggaggccgtcgccgaagccgccgaggagtcggagtacgactcggttgcggggtcggccggggtgtactccaacctggaggagctgctggtgttcaaccccagggccatcctcccatgctttgtcgttgtctacaaggcttagctactggtggttacactttacaatccatgcaatgcagtccttgtattaagtaacaaacaattcatgataaacctaatgtattgactgacgaatggtcactctc

SEQ ID NO: 8969 - protein, 439 aa, Zea mays subsp. mays
  peptide (1)..(439): Ceres Seq. ID no. 12358366
HLELGGKLASERNRIAMVERPGRSAGVREANKTSAAAMVKTTTTTTTNKEELESPSYRLAAFKSLFSCRNSHARPRAPDTGNRSKRGLGCSAPSICKLKDDSVPVPPKETTGTASAGEPCKRRASVSGSSDRCVKKPQCGAGSNKQLQRGGSSSSSGGSSFRAGMQLRRLSGCYECHMVVAGSASMRATTICPCPDCGEVFVRQESLQLHQSIRHAVSELGTDDTSRNIIEIIFQSSWLKKQSPVCKVDRILKVNNTPRTLARFEEYRDAVKARAGAEQLAVAAANSNRHPRCTADGNELLRFHCATLACSLGLNGATHLCDAAGTCAACGIIRDGFSSGGVLTMATSGRAHDAVPAAEAGAGLDEETTPRAMLVCRVIAGRVKRPKEAVPEEEAVAEAAEESEYDSVAGSAGVYSNLEELLVFNPRAILPCFVVVYKA

SEQ ID NO: 8970 - protein, 423 aa, Zea mays subsp. mays
  peptide (1)..(423): Ceres Seq. ID no. 12358367
MVERPGRSAGVREANKTSAAAMVKTTTTTTTNKEELESPSYRLAAFKSLFSCRNSHARPRAPDTGNRSKRGLGCSAPSICKLKDDSVPVPPKETTGTASAGEPCKRRASVSGSSDRCVKKPQCGAGSNKQLQRGGSSSSSGGSSFRAGMQLRRLSGCYECHMVVAGSASMRATTICPCPDCGEVFVRQESLQLHQSIRHAVSELGTDDTSRNIIEIIFQSSWLKKQSPVCKVDRILKVNNTPRTLARFEEYRDAVKARAGAEQLAVAAANSNRHPRCTADGNELLRFHCATLACSLGLNGATHLCDAAGTCAACGIIRDGFSSGGVLTMATSGRAHDAVPAAEAGAGLDEETTPRAMLVCRVIAGRVKRPKEAVPEEEAVAEAAEESEYDSVAGSAGVYSNLEELLVFNPRAILPCFVVVYKA

SEQ ID NO: 8971 - protein, 402 aa, Zea mays subsp. mays
  peptide (1)..(402): Ceres Seq. ID no. 12358368
MVKTTTTTTTNKEELESPSYRLAAFKSLFSCRNSHARPRAPDTGNRSKRGLGCSAPSICKLKDDSVPVPPKETTGTASAGEPCKRRASVSGSSDRCVKKPQCGAGSNKQLQRGGSSSSSGGSSFRAGMQLRRLSGCYECHMVVAGSASMRATTICPCPDCGEVFVRQESLQLHQSIRHAVSELGTDDTSRNIIEIIFQSSWLKKQSPVCKVDRILKVNNTPRTLARFEEYRDAVKARAGAEQLAVAAANSNRHPRCTADGNELLRFHCATLACSLGLNGATHLCDAAGTCAACGIIRDGFSSGGVLTMATSGRAHDAVPAAEAGAGLDEETTPRAMLVCRVIAGRVKRPKEAVPEEEAVAEAAEESEYDSVAGSAGVYSNLEELLVFNPRAILPCFVVVYKA

SEQ ID NO: 8972 - DNA, 1061 bp, Zea mays subsp. mays
  misc_feature (1)..(1061): Ceres Seq. ID no. 12403200
  misc_feature (1)..(1061): Ortholog of  Ceres SEQ ID NO 15171175 as cited in SEQ ID NO 57476
  misc_feature (1)..(1061): Ortholog of  Ceres SEQ ID NO 15178436 as cited in SEQ ID NO 57919
aacattaggtccagtccacccctccagccaacccaagtctccatccacaagagctcgagaacctggccacgagcccatgacggcaagaagcggtcatggccggtgatgaggaggaccacctagcagacgcgccgcgggtggtgggcgtcctctccgcgctcctggaacgtgtcgtggagcgcaacgacgcggttggccgatgagctcgccgccgggaccgagtccgcggcgccgccgtcggcgttccgggcgacggcgaggcccgacatctcggtgcgctcgtacatggcgcgcatcgcgcggttcgcagggtgcagcccggcttgctacgtcgtggcgtacgtctacctcgaccgcctcctgcgccgcgcccgcagcgcgcccgccgtggactcgtacaccgtgcaccgnctcctcatcaccgccgtgctcgcggccgtcaagttcatggatgacgtatgctacaacaacgcctacttcgccagggtcggcggcatcagcctgtcggagatgaactacctggaggtggacttcctcttcgccgtcgggttcgacctcaacgtgtcgccggagacgttcggccactactgcacggtcctccgggccgagatgctgtacctggagctggagggtcctcctcctccagccgccagtacaagtctgcacaggtgctgcttgtcagaagacgacgacggtagcagcagcaccagcagcagctagctgcatagagacaggtacagcggttgcttccaagcaagcaaccatgtatgaatgtgtccgtgtacactgtacagtacagacatgcttgcttgaaagcaaacacggagtacgtgacgtaggcatctgcgtgtgatcggtttgctatctggcggctggcgcttagttgtttttagctttgttattaggtaatctgttgctcttgtagtcttgtatagctgcattgctgttgttcatgtggaaatcggaaaaccgtaaggaacggtataaattgcagtcttggggcagtgtaattgttttcttgtccagcagtttatccatagtttatctaaaatattgttttt

SEQ ID NO: 8973 - protein, 144 aa, Zea mays subsp. mays
  peptide (1)..(144): Ceres Seq. ID no. 12403201
  misc_feature (42)..(42): Xaa is any aa, unknown or other
MARIARFAGCSPACYVVAYVYLDRLLRRARSAPAVDSYTVHXLLITAVLAAVKFMDDVCYNNAYFARVGGISLSEMNYLEVDFLFAVGFDLNVSPETFGHYCTVLRAEMLYLELEGPPPPAASTSLHRCCLSEDDDGSSSTSSS

SEQ ID NO: 8974 - protein, 104 aa, Zea mays subsp. mays
  peptide (1)..(104): Ceres Seq. ID no. 12403202
  misc_feature (71)..(71): Xaa is any aa, unknown or other
MSSPPGPSPRRRRRRSGRRRGPTSRCARTWRASRGSQGAARLATSWRTSTSTASCAAPAARPPWTRTPCTXSSSPPCSRPSSSWMTYATTTPTSPGSAASACRR

SEQ ID NO: 8975 - protein, 90 aa, Zea mays subsp. mays
  peptide (1)..(90): Ceres Seq. ID no. 12403203
MDDVCYNNAYFARVGGISLSEMNYLEVDFLFAVGFDLNVSPETFGHYCTVLRAEMLYLELEGPPPPAASTSLHRCCLSEDDDGSSSTSSS

SEQ ID NO: 8976 - DNA, 1112 bp, Zea mays subsp. mays
  misc_feature (1)..(1112): Ceres Seq. ID no. 12402142
  misc_feature (1)..(1112): Ortholog of  Ceres SEQ ID NO 15179926 as cited in SEQ ID NO 57010
  misc_feature (1)..(1112): Ortholog of  Ceres SEQ ID NO 14316075 as cited in SEQ ID NO 60059
gaaaccggccaccgggccggagcgaacccttagaagcgaccttggcccgtgaggaagccaatcagccagagacagaacaatccatccaccatgaacagcctgttctcgagctcatggaagcgcgacggcggggacatcgagtccggcggcgtggagatgtctgcgccgccgggcgccgcggcgggcgcgagcctggacaggttcttcgaggacgtggagtccatcaaggacgagctccgcgacctggagcgcatccagcggtcgctccacgacgccaacgaggggggaaagtcgatgcacgacgcggcggccgtgcgcggcctccgcgcgcggatggacgcggacgtggccgcggcgatcaagaaggccaaggtggtgaagctgcgcctcgagtcgctggaccgcgccaacgccgccaaccggtccgtgcccgggtgcgggccgggctcctccaccgaccgcacccggacgtccgtcgtggccgggctgcgcaagaagctccgggactcgatggagtccttctcgtcgctgcggtcccgcgtcgcggccgagtaccgggacacggtggcgcggcggtacttcacggtcacgggggcgcagcccgacgaggcgaccctggacgcgctggcggagtccggggaaggagagcggttcctgcagcgcgccatcgcggagcagggccaggggcgcggagaggtgctgggcgtggtggcggagatccaggancggcacggcgccgtggcggggctggagcgcagcctgctggagctgcagcaggtgttcaacgacatggccgtgctggtggccgcgcagggggagcagctggacgacatcgagggcaacgtcggccgcgccaggtccttcgtcgaccgcggacgcgagcagctgcaggtggcgcggaagcaccagaagagcacccgcaagtggaccttcatcgccatcatcatcctcctcgtcatcatcctcgtcatcgtcctccccatcgtgctcaagggcgtcaataagaactaggccgcctggcctgcgtaattcgttctagtttttcttttcgtggcctttgtatcatacatacggttcgttgatacggtcgtcttgattatatttttcttctt

SEQ ID NO: 8977 - protein, 333 aa, Zea mays subsp. mays
  peptide (1)..(333): Ceres Seq. ID no. 12402143
  misc_feature (242)..(242): Xaa is any aa, unknown or other
NRPPGRSEPLEATLAREEANQPETEQSIHHEQPVLELMEARRRGHRVRRRGDVCAAGRRGGREPGQVLRGRGVHQGRAPRPGAHPAVAPRRQRGGKVDARRGGRARPPRADGRGRGRGDQEGQGGEAAPRVAGPRQRRQPVRARVRAGLLHRPHPDVRRGRAAQEAPGLDGVLLVAAVPRRGRVPGHGGAAVLHGHGGAARRGDPGRAGGVRGRRAVPAARHRGAGPGARRGAGRGGGDPGXARRRGGAGAQPAGAAAGVQRHGRAGGRAGGAAGRHRGQRRPRQVLRRPRTRAAAGGAEAPEEHPQVDLHRHHHPPRHHPRHRPPHRAQGRQ

SEQ ID NO: 8978 - protein, 306 aa, Zea mays subsp. mays
  peptide (1)..(306): Ceres Seq. ID no. 12402144
  misc_feature (212)..(212): Xaa is any aa, unknown or other
MNSLFSSSWKRDGGDIESGGVEMSAPPGAAAGASLDRFFEDVESIKDELRDLERIQRSLHDANEGGKSMHDAAAVRGLRARMDADVAAAIKKAKVVKLRLESLDRANAANRSVPGCGPGSSTDRTRTSVVAGLRKKLRDSMESFSSLRSRVAAEYRDTVARRYFTVTGAQPDEATLDALAESGEGERFLQRAIAEQGQGRGEVLGVVAEIQXRHGAVAGLERSLLELQQVFNDMAVLVAAQGEQLDDIEGNVGRARSFVDRGREQLQVARKHQKSTRKWTFIAIIILLVIILVIVLPIVLKGVNKN

SEQ ID NO: 8979 - protein, 296 aa, Zea mays subsp. mays
  peptide (1)..(296): Ceres Seq. ID no. 12402145
  misc_feature (205)..(205): Xaa is any aa, unknown or other
MEARRRGHRVRRRGDVCAAGRRGGREPGQVLRGRGVHQGRAPRPGAHPAVAPRRQRGGKVDARRGGRARPPRADGRGRGRGDQEGQGGEAAPRVAGPRQRRQPVRARVRAGLLHRPHPDVRRGRAAQEAPGLDGVLLVAAVPRRGRVPGHGGAAVLHGHGGAARRGDPGRAGGVRGRRAVPAARHRGAGPGARRGAGRGGGDPGXARRRGGAGAQPAGAAAGVQRHGRAGGRAGGAAGRHRGQRRPRQVLRRPRTRAAAGGAEAPEEHPQVDLHRHHHPPRHHPRHRPPHRAQGRQ

SEQ ID NO: 8980 - DNA, 936 bp, Zea mays subsp. mays
  misc_feature (1)..(936): Ceres Seq. ID no. 12346933
  misc_feature (1)..(936): Ortholog of  Ceres SEQ ID NO 14310764 as cited in SEQ ID NO 55235
tcggatgacaagaaaggctcttcatcagggagtgaggggtccatctggccgaagtttgaaatcaccctgtcaaacagggaaaaggaagaggatttcctggtgttcaaaggatccaagctgcctcaaagacccaagaaaaaagctaaggtcatccagagaaccgtcaattttgtatgcccaggaacgtggctatgtgacttgactcttgaaagatatgaagtccgggagaagaaggtttccaagaagcgccccaggggattgaaagctatgcacgacatggacagtgactcggaataaataaaagaagatcactgaacatgagaagctgaatattagaaagaaggccaggacagatcctgcagatggaggccgacgagaaaacgtcctgatggaatgaatggccgtatcaacgattcgccacttctcgtgattgctactggagatcagtttgttccaaaaggacttatggagatcggaggacggccgaaatgtcaggaagctgcatggaagaacagaagagagccgcaggagctggaattcctggacattattattcagttccctctgtaaagcagcaacgctgttttgcaagcctcccatgctaatttcgcgctgccaaatattagcgtgatcgcgaagctagccagtcctggcgcgtctagtttgccgggttgtctgacaacaaaagttagtatgaatatgaaagggccttccttaatgttttttcccacttggtgctgtataaaggttcagtgtatattccattcaggagaatgagaaaaagttcaacactccagtgtgggtggattcaaaacaggcgacttttaattttgaaagtttcagtagatttgttagtttatagtttatattttgaaagtttcagtagtgtccaatggaactcgatgtgtaattcaaaacaggcagacttttaatttt

SEQ ID NO: 8981 - protein, 98 aa, Zea mays subsp. mays
  peptide (1)..(98): Ceres Seq. ID no. 12346934
SDDKKGSSSGSEGSIWPKFEITLSNREKEEDFLVFKGSKLPQRPKKKAKVIQRTVNFVCPGTWLCDLTLERYEVREKKVSKKRPRGLKAMHDMDSDSE

SEQ ID NO: 8982 - protein, 66 aa, Zea mays subsp. mays
  peptide (1)..(66): Ceres Seq. ID no. 12346935
RMTRKALHQGVRGPSGRSLKSPCQTGKRKRISWCSKDPSCLKDPRKKLRSSREPSILYAQERGYVT

SEQ ID NO: 8983 - protein, 65 aa, Zea mays subsp. mays
  peptide (1)..(65): Ceres Seq. ID no. 12346936
MTRKALHQGVRGPSGRSLKSPCQTGKRKRISWCSKDPSCLKDPRKKLRSSREPSILYAQERGYVT

SEQ ID NO: 8984 - DNA, 1528 bp, Zea mays subsp. mays
  misc_feature (1)..(1528): Ceres Seq. ID no. 12360551
  misc_feature (1)..(1528): Ortholog of  Ceres SEQ ID NO 15170403 as cited in SEQ ID NO 53457
  misc_feature (1)..(1528): Ortholog of  Ceres SEQ ID NO 13582619 as cited in SEQ ID NO 56520
  misc_feature (1)..(1528): Ortholog of  Ceres SEQ ID NO 14315846 as cited in SEQ ID NO 58094
  misc_feature (1)..(1528): Ortholog of  Ceres SEQ ID NO 14314632 as cited in SEQ ID NO 59923
  misc_feature (1)..(1528): Ortholog of  Ceres SEQ ID NO 13660872 as cited in SEQ ID NO 60830
  misc_feature (1)..(1528): Ortholog of  Ceres SEQ ID NO 15226831 as cited in SEQ ID NO 62916
  misc_feature (1)..(1528): Ortholog of  Ceres SEQ ID NO 12616221 as cited in SEQ ID NO 63291
gcacgagaccattacctagaacatcctaatcaaaagttttctcttgatcgctttgtcacttgaatccgtgcctgctctaacagagagcggagacgaccacgacgacggcgaggccaggctctgcgatggagcaggagccgcaccggcccatggagctgcccccgggcttccgcttccacccgaccgacgaggagctcatcacgcactacctggcccgcaaggccgccgacgcccgcttcgccgcgcttgccgtcgccgaggccgacctcaacaagtgcgagccctgggacctgccatcgctggcgaggatgggggagaaggagtggtacttcttctgcctcaaggaccgcaagtacccgacggggctgaggaccaaccgggccacggaggccgggtactggaaggccacgggcaaggacagggacgtcttcaggggcaaggcgctcgtcggttccaagaagacgctcgtcttctacacggggagggcgcccaggggcgagaagtccggatgggtcatgcacgagtaccgcctccacgccaagctccacggccacggccacggccaaggcgcagccgtcgtcgtcgtccccaaggccgccgggtccaagaacgagtgggtgctgtgcagggtgttcaagaagagcctggtcgtaggtggtgcagctgcagcagcagcaccaaccgcaggcaagaggggcggcacggagacgtcgtccaactacaagacgggcgacgtagaggccatcgcccacctccctccgctgatggacgtgtccggctccggctccggcgccggcgccgccgccgcggcggcggcacacgtgacctgcttctccgacgcgctggagggccagttcttggaccagacgacgaccacgccgccgccagaagccgccaccgccgccacggacgacgacggccacctcggcgccctcggcgcctcctcctcgcccttccagctgcccggcttcgcgcactactactacggcggcgggccgccgcacctgcaccagcaccacggcgccgccagcctggtgcagctcctggagggcagcgtgccgccgtgcaataagggcggcgagcgggagcgggagcggctgagcgcgtcgcaggacacggggctcacctccgacgtcaaccccgagatctcctcctcctccggccaacgcttcgaccacgaccacgaccatgaccaccacctctgctgctggggctactgatcgtcgattcgatgagcctacgacgactaccgagcgcgcatcatgcatgcgtcgcgttattactagcgattagtgtatagcacactgctgtaaataaaacatctactagtactacatctgcgtgaggtcgacgatcggccgtgtggtggtggtggtgcgtggcatgcatgcgtcgagctgcctacgtttcattatctgctcgtgtgatttgttactgtagacgagtgtgggggtgtgtaattagcattgttgatgtattattattcacgatttggtggaataatatctccttggttaatgacgccgcc

SEQ ID NO: 8985 - protein, 364 aa, Zea mays subsp. mays
  peptide (1)..(364): Ceres Seq. ID no. 12360552
MEQEPHRPMELPPGFRFHPTDEELITHYLARKAADARFAALAVAEADLNKCEPWDLPSLARMGEKEWYFFCLKDRKYPTGLRTNRATEAGYWKATGKDRDVFRGKALVGSKKTLVFYTGRAPRGEKSGWVMHEYRLHAKLHGHGHGQGAAVVVVPKAAGSKNEWVLCRVFKKSLVVGGAAAAAAPTAGKRGGTETSSNYKTGDVEAIAHLPPLMDVSGSGSGAGAAAAAAAHVTCFSDALEGQFLDQTTTTPPPEAATAATDDDGHLGALGASSSPFQLPGFAHYYYGGGPPHLHQHHGAASLVQLLEGSVPPCNKGGERERERLSASQDTGLTSDVNPEISSSSGQRFDHDHDHDHHLCCWGY

SEQ ID NO: 8986 - protein, 356 aa, Zea mays subsp. mays
  peptide (1)..(356): Ceres Seq. ID no. 12360553
MELPPGFRFHPTDEELITHYLARKAADARFAALAVAEADLNKCEPWDLPSLARMGEKEWYFFCLKDRKYPTGLRTNRATEAGYWKATGKDRDVFRGKALVGSKKTLVFYTGRAPRGEKSGWVMHEYRLHAKLHGHGHGQGAAVVVVPKAAGSKNEWVLCRVFKKSLVVGGAAAAAAPTAGKRGGTETSSNYKTGDVEAIAHLPPLMDVSGSGSGAGAAAAAAAHVTCFSDALEGQFLDQTTTTPPPEAATAATDDDGHLGALGASSSPFQLPGFAHYYYGGGPPHLHQHHGAASLVQLLEGSVPPCNKGGERERERLSASQDTGLTSDVNPEISSSSGQRFDHDHDHDHHLCCWGY

SEQ ID NO: 8987 - protein, 303 aa, Zea mays subsp. mays
  peptide (1)..(303): Ceres Seq. ID no. 12360554
MGEKEWYFFCLKDRKYPTGLRTNRATEAGYWKATGKDRDVFRGKALVGSKKTLVFYTGRAPRGEKSGWVMHEYRLHAKLHGHGHGQGAAVVVVPKAAGSKNEWVLCRVFKKSLVVGGAAAAAAPTAGKRGGTETSSNYKTGDVEAIAHLPPLMDVSGSGSGAGAAAAAAAHVTCFSDALEGQFLDQTTTTPPPEAATAATDDDGHLGALGASSSPFQLPGFAHYYYGGGPPHLHQHHGAASLVQLLEGSVPPCNKGGERERERLSASQDTGLTSDVNPEISSSSGQRFDHDHDHDHHLCCWGY

SEQ ID NO: 8988 - DNA, 1033 bp, Zea mays subsp. mays
  misc_feature (1)..(1033): Ceres Seq. ID no. 12365844
  misc_feature (1)..(1033): Ortholog of  Ceres SEQ ID NO 15176306 as cited in SEQ ID NO 52784
  misc_feature (1)..(1033): Ortholog of  Ceres SEQ ID NO 13582624 as cited in SEQ ID NO 56287
  misc_feature (1)..(1033): Ortholog of  Ceres SEQ ID NO 14316536 as cited in SEQ ID NO 60272
  misc_feature (1)..(1033): Ortholog of  Ceres SEQ ID NO 13597264 as cited in SEQ ID NO 63897
  misc_feature (1)..(1033): Ortholog of  Ceres SEQ ID NO 13598570 as cited in SEQ ID NO 65434
  misc_feature (1)..(1033): Ortholog of  Ceres SEQ ID NO 13656452 as cited in SEQ ID NO 65745
  misc_feature (1)..(1033): Ortholog of  Ceres SEQ ID NO 13596238 as cited in SEQ ID NO 68834
  misc_feature (1)..(1033): Ortholog of  Ceres SEQ ID NO 15174329 as cited in SEQ ID NO 0
cctgatttcctgaaacacagatcatcatcattcatggtcatggctatggcaaactcggcaacgatcctgaccgtcgttctggctctcgggctagcgttcctccgcgccgcagctccggcctccgcgcagaactgcggctgcccgccaggctactgctgcagcaagttcggttactgcggcaccagcttcgactactgcaatgccaacacgtgccagtccggcccgtgcacggccgggggcgccggtagcggcggcggcgcgaacgtgagtggcgtcgtcaccgacgcatttctcagcggcatcaagtcccaggccgggagcgggtgcgagggcagtagcttgagcttctactcgcgaagggcgttcctgagcgccgccagctcgtatcccggcttcgcccgtgcaggatcggaggccgacggcaagcgcgaggtcgccgccttcttcgcgcacgtcacgcacgagaccggccatttctgctacgtcagcgagatcaacaagaacaacagctactgcaactcgagcaacacgcagtggccgtgcgccccgggcaagaagtactacggacgcggcccgcctgcagatctcgtggaactacaactacggtcccgccgggaggagcgtcggcttcgacgggctggtgaacccggacatggtggcgcaggaccccgtggtctcgttcaagacggcgctctggttctggatgagcaacgcgcaccaggtcatgccgcgggggttcggcgccactatccgtgccatcaacggcgccctcgagtgcaacggcgagaaccccgccgccgtgaacgcgcgcgtgggctactacaaggagtactgcaagcagttcggcgtcggcccagggaacaacctcacctgctagaacctattcaagtgttgtgttgggttcatgcatatgcgggcttcaatggaaaactcagtccgctgtagtgaagctcagagtttgagagtacctgtttattatacaagaaaaatgaagcagttcctaatatacagattatatcatttaattaatggg

SEQ ID NO: 8989 - protein, 314 aa, Zea mays subsp. mays
  peptide (1)..(314): Ceres Seq. ID no. 12365845
PDFLKHRSSSFMVMAMANSATILTVVLALGLAFLRAAAPASAQNCGCPPGYCCSKFGYCGTSFDYCNANTCQSGPCTAGGAGSGGGANVSGVVTDAFLSGIKSQAGSGCEGSSLSFYSRRAFLSAASSYPGFARAGSEADGKREVAAFFAHVTHETGHFCYVSEINKNNSYCNSSNTQWPCAPGKKYYGRGPPADLVELQLRSRREERRLRRAGEPGHGGAGPRGLVQDGALVLDEQRAPGHAAGVRRHYPCHQRRPRVQRREPRRRERARGLLQGVLQAVRRRPREQPHLLEPIQVLCWVHAYAGFNGKLSPL

SEQ ID NO: 8990 - protein, 303 aa, Zea mays subsp. mays
  peptide (1)..(303): Ceres Seq. ID no. 12365846
MVMAMANSATILTVVLALGLAFLRAAAPASAQNCGCPPGYCCSKFGYCGTSFDYCNANTCQSGPCTAGGAGSGGGANVSGVVTDAFLSGIKSQAGSGCEGSSLSFYSRRAFLSAASSYPGFARAGSEADGKREVAAFFAHVTHETGHFCYVSEINKNNSYCNSSNTQWPCAPGKKYYGRGPPADLVELQLRSRREERRLRRAGEPGHGGAGPRGLVQDGALVLDEQRAPGHAAGVRRHYPCHQRRPRVQRREPRRRERARGLLQGVLQAVRRRPREQPHLLEPIQVLCWVHAYAGFNGKLSPL

SEQ ID NO: 8991 - protein, 301 aa, Zea mays subsp. mays
  peptide (1)..(301): Ceres Seq. ID no. 12365847
MAMANSATILTVVLALGLAFLRAAAPASAQNCGCPPGYCCSKFGYCGTSFDYCNANTCQSGPCTAGGAGSGGGANVSGVVTDAFLSGIKSQAGSGCEGSSLSFYSRRAFLSAASSYPGFARAGSEADGKREVAAFFAHVTHETGHFCYVSEINKNNSYCNSSNTQWPCAPGKKYYGRGPPADLVELQLRSRREERRLRRAGEPGHGGAGPRGLVQDGALVLDEQRAPGHAAGVRRHYPCHQRRPRVQRREPRRRERARGLLQGVLQAVRRRPREQPHLLEPIQVLCWVHAYAGFNGKLSPL

SEQ ID NO: 8992 - DNA, 1403 bp, Zea mays subsp. mays
  misc_feature (1)..(1403): Ceres Seq. ID no. 12350590
  misc_feature (1)..(1403): Ortholog of  Ceres SEQ ID NO 13595983 as cited in SEQ ID NO 68329
aacttcttgccttctcgcgctcgcctccgtttcgtgtcggctcgctctaaacgtgagatcggggaggtggtggacttggggtcgttgtggtatcggcggcgagccgcgggggcctagggtttcctgccttcctggtttggatccgcgccctggcccatgggatccggaggcttcgcggccgcggtggccgcgtgcccctccgccgccgaggccttccttaagtactatggtattgtatcaggaggtacaagtgcggagtcaagacaagcattggttgagctttcactagctatagacggaattgaaggaatgagggatgtgatatttgctgatattccaaagctcattccatttattgatctggaggatatgagcctattcagttgcttctacgattttgttttcttcatctgccgtgaaaagggtcaaaagagtgtcactattcagagagctgtagcagcatggaggattgttctaagtggaaggttccgtttgcttgatcgatggtgtaacttcgttgagaagtaccaacgccataacatatccgaggatacttggcagcagctgctagctttcagcaggtgtgtaaatgaagatctggaaggttatgacccacgaggtgcttggcctgttctgattgatgattttgttgagcaaatgcacagaatttatcactccactgactgcagcagtgcgatggaatcacagtgtaacatttccagtacccttaaaggactggatcctcaacctggatcaaagaggaaatgcccacacctcaaatccaatgaagaggatgtagagctttcggatagctttacgcgctctgtccatcttacaccaataaagcgactcaaggaaagccatgacgccagatatggagcgggggaatccgccaaaactacccatttctctaatagttcctctggtggttaccacgaggatatgaatttacacaactcaagaggttaccttcagaactccccctgtaatgttgaggatgccctgtccaaagggtttgagggttgtatttcgatgaaatgtccattttgatgtaacaaatttcgtgtcagcccagaagctatacattcccttttagcggcaaaatcatcctgtgtgtgtatctagtcattttgtgcaaaaaaaatgcagtaattgaatgcattttttttaaaatgctttaaagtgtattgatcagcatcggacctgtttttagaggcatcggtatgaagggagggctgttggttgtgtttgcttgacagcaaatccctcccattcaataccccgcactttctgaaaattgcgacttccatattcccttcccttgagctttgttaagacagtattgtattacaagatctgaatcgctgcaagcgtgcagaataatgaatgccatctttctatgc

SEQ ID NO: 8993 - protein, 297 aa, Zea mays subsp. mays
  peptide (1)..(297): Ceres Seq. ID no. 12350591
MGSGGFAAAVAACPSAAEAFLKYYGIVSGGTSAESRQALVELSLAIDGIEGMRDVIFADIPKLIPFIDLEDMSLFSCFYDFVFFICREKGQKSVTIQRAVAAWRIVLSGRFRLLDRWCNFVEKYQRHNISEDTWQQLLAFSRCVNEDLEGYDPRGAWPVLIDDFVEQMHRIYHSTDCSSAMESQCNISSTLKGLDPQPGSKRKCPHLKSNEEDVELSDSFTRSVHLTPIKRLKESHDARYGAGESAKTTHFSNSSSGGYHEDMNLHNSRGYLQNSPCNVEDALSKGFEGCISMKCPF

SEQ ID NO: 8994 - protein, 246 aa, Zea mays subsp. mays
  peptide (1)..(246): Ceres Seq. ID no. 12350592
MRDVIFADIPKLIPFIDLEDMSLFSCFYDFVFFICREKGQKSVTIQRAVAAWRIVLSGRFRLLDRWCNFVEKYQRHNISEDTWQQLLAFSRCVNEDLEGYDPRGAWPVLIDDFVEQMHRIYHSTDCSSAMESQCNISSTLKGLDPQPGSKRKCPHLKSNEEDVELSDSFTRSVHLTPIKRLKESHDARYGAGESAKTTHFSNSSSGGYHEDMNLHNSRGYLQNSPCNVEDALSKGFEGCISMKCPF

SEQ ID NO: 8995 - protein, 226 aa, Zea mays subsp. mays
  peptide (1)..(226): Ceres Seq. ID no. 12350593
MSLFSCFYDFVFFICREKGQKSVTIQRAVAAWRIVLSGRFRLLDRWCNFVEKYQRHNISEDTWQQLLAFSRCVNEDLEGYDPRGAWPVLIDDFVEQMHRIYHSTDCSSAMESQCNISSTLKGLDPQPGSKRKCPHLKSNEEDVELSDSFTRSVHLTPIKRLKESHDARYGAGESAKTTHFSNSSSGGYHEDMNLHNSRGYLQNSPCNVEDALSKGFEGCISMKCPF

SEQ ID NO: 8996 - DNA, 644 bp, Zea mays subsp. mays
  misc_feature (1)..(644): Ceres Seq. ID no. 12402849
  misc_feature (1)..(644): Ortholog of  Ceres SEQ ID NO 13594525 as cited in SEQ ID NO 51190
  misc_feature (1)..(644): Ortholog of  Ceres SEQ ID NO 13596039 as cited in SEQ ID NO 62117
accacacccaccccacgaaaccgtaagaagcgcagagtgtgagagagagaggagcatcaaggacgacgtgggcaagatgatgcaggtgttcgtgaagacgctggcggggaagacgatcacgctggaggtggagggcagcgacgacgccgtcgagaacgtgaaggccatgatccagggcaaggaaggcatcccgccggaggagcagcgcctcgtcttcgcgggcaagcagctggacgacgacggccgcaccctggccgactacggcgtccagaaggagtcgacgctgcacctggagctgcgcctccgcggcggcagcaggggcggctaccccatggggatcccgcccagcctccgcgagctcgcgcagaagtacaacgagaacaagatggtctgccgcaagtgctatgcgcggcttccgcctagggcaaccaactgccgcaagaagaagtgtgggcacagtaacgagctgaggtcgaagaaaaggttcatgtccaagattggcgggaaatgatcggcttttgtcattgcgtgacatatatggagcatcagctgaaatttcttagacgcttaataatttttactttaacgccgtggttgtgatcttttactgaataaagttgtagtagaaacaaaaaattcgtgcc

SEQ ID NO: 8997 - protein, 169 aa, Zea mays subsp. mays
  peptide (1)..(169): Ceres Seq. ID no. 12402850
PHPPHETVRSAECERERSIKDDVGKMMQVFVKTLAGKTITLEVEGSDDAVENVKAMIQGKEGIPPEEQRLVFAGKQLDDDGRTLADYGVQKESTLHLELRLRGGSRGGYPMGIPPSLRELAQKYNENKMVCRKCYARLPPRATNCRKKKCGHSNELRSKKRFMSKIGGK

SEQ ID NO: 8998 - protein, 144 aa, Zea mays subsp. mays
  peptide (1)..(144): Ceres Seq. ID no. 12402851
MMQVFVKTLAGKTITLEVEGSDDAVENVKAMIQGKEGIPPEEQRLVFAGKQLDDDGRTLADYGVQKESTLHLELRLRGGSRGGYPMGIPPSLRELAQKYNENKMVCRKCYARLPPRATNCRKKKCGHSNELRSKKRFMSKIGGK

SEQ ID NO: 8999 - protein, 143 aa, Zea mays subsp. mays
  peptide (1)..(143): Ceres Seq. ID no. 12402852
MQVFVKTLAGKTITLEVEGSDDAVENVKAMIQGKEGIPPEEQRLVFAGKQLDDDGRTLADYGVQKESTLHLELRLRGGSRGGYPMGIPPSLRELAQKYNENKMVCRKCYARLPPRATNCRKKKCGHSNELRSKKRFMSKIGGK

SEQ ID NO: 9000 - DNA, 1319 bp, Zea mays subsp. mays
  misc_feature (1)..(1319): Ceres Seq. ID no. 12407555
  misc_feature (1)..(1319): Ortholog of  Ceres SEQ ID NO 14313893 as cited in SEQ ID NO 54646
  misc_feature (1)..(1319): Ortholog of  Ceres SEQ ID NO 13656797 as cited in SEQ ID NO 65756
  misc_feature (1)..(1319): Ortholog of  Ceres SEQ ID NO 13658498 as cited in SEQ ID NO 66557
  misc_feature (1)..(1319): Ortholog of  Ceres SEQ ID NO 15227053 as cited in SEQ ID NO 0
ctgtaactggagtacttagtacgggcagtctatagcttctccattgcccggtttgcaagcaaggaattgatgaacaagcatggggctggccggccgtctgggctttgcgggcagggcaaggacgccgccagctaccacgtgctgtccttcctcctcggcgccgctctccccactgccctcctcttctacctcgcgtccgacccggctcggcgagggcttatccagcatctcaccgagcagctgggggagcagccgaaccccgacgacccagcagctagccggcgccactgatcacactgctcctacttctcctacctcccaaggtcaagagtccgaatttgcagaactggctgagctgctacccagagtcgccaccgacgacgacaggacggtgatcctcacgtcagtgaacgaagcatttgcgaggcctgactcgttgctcggcctgttccgcgagagcttcccgggccggcgaggggaccgagcacctccttgaccatgtcctcgtcgtcgccgtggacgccatggcgttcgtccactgcaaggccgtgcacccacactgctaccgcctcgaggtggattccgccacgtacctcagctccgagagcagcttcttgagcgcggcctacgtggagctcgtctgggccaagctctcgctgcagcagcgcgtcctcgagctcggctacaacttcctcttcacggacgtggacgtcgtgtggttgcgcaacccgttccggcacatcagcgtgtacccggacatgacgacgtcgagcgacatattccacggcgacgccaacagcctcgacaactggcccaacaccggcttctactacgtcaaggcaacgaaccggacggtggagatgctgcggcggtggcgggctgcgcggaggaggttccctccgaaccacgagcaggccatcttcaaccagatcaagcacgagctcgccgccgacctcggggtgcgcatccagttcctcgacacggcgcgttcgccggcttctgccggatcttccacagtgacatgggcgcgcgtgcaccatgcacgccaactgctgcttcgggctcgctaacaagctgcacgacctcagggaagtgctcggccagtggaggaactacaccgtccttccgccgctggagaagaagagccgaaagttcatctggaaggatcccggcaagtgcggaacgccggacaaaaagaattggtcgataaatacatgagatcacgcatccctagaagcgactagggcactgggctgcctgatataattctcgtttttcaaccacaaattggtgaaacaaataaaatggtatatgttgtt

SEQ ID NO: 9001 - protein, 181 aa, Zea mays subsp. mays
  peptide (1)..(181): Ceres Seq. ID no. 12407556
MAFVHCKAVHPHCYRLEVDSATYLSSESSFLSAAYVELVWAKLSLQQRVLELGYNFLFTDVDVVWLRNPFRHISVYPDMTTSSDIFHGDANSLDNWPNTGFYYVKATNRTVEMLRRWRAARRRFPPNHEQAIFNQIKHELAADLGVRIQFLDTARSPASAGSSTVTWARVHHARQLLLRAR

SEQ ID NO: 9002 - protein, 138 aa, Zea mays subsp. mays
  peptide (1)..(138): Ceres Seq. ID no. 12407557
MGLAGRLGFAGRARTPPATTCCPSSSAPLSPLPSSSTSRPTRLGEGLSSISPSSWGSSRTPTTQQLAGATDHTAPTSPTSQGQESEFAELAELLPRVATDDDRTVILTSVNEAFARPDSLLGLFRESFPGRRGDRAPP

SEQ ID NO: 9003 - protein, 103 aa, Zea mays subsp. mays
  peptide (1)..(103): Ceres Seq. ID no. 12407558
MTTSSDIFHGDANSLDNWPNTGFYYVKATNRTVEMLRRWRAARRRFPPNHEQAIFNQIKHELAADLGVRIQFLDTARSPASAGSSTVTWARVHHARQLLLRAR

SEQ ID NO: 9004 - DNA, 981 bp, Zea mays subsp. mays
  misc_feature (1)..(981): Ceres Seq. ID no. 12356692
  misc_feature (1)..(981): Ortholog of  Ceres SEQ ID NO 13654290 as cited in SEQ ID NO 62197
  misc_feature (1)..(981): Ortholog of  Ceres SEQ ID NO 14301924 as cited in SEQ ID NO 67731
actgccagctccggtccgcagagggagggaggaggacgccagttgccactgccgcgccgctcccgcctccctctctccatccgacgagctcgagaagccaccatgatctccgcgcgcaccgccgcagcttcccccgcctccctgtggaagcggggaggacaaagtgagggcggcggcagttgcgacggatgtcggacctacaggaacactttgcggagggccgcagcagcgaaggtgcgtgccttgccgtcgagggcggtggaggcggtcaaaatgggctccgccgcggaggtggagcaggaggaggcggaggtagccgcggccgcggacggcgtcgtcgtcgaggaccactacggcgaggacagcgccaccgaggagctgcccatcatgccctgggccttctccgtcgcaagcggttacaccctcttgagggatccacatcacaacaagggtcttgctttcacggagaaggagagggatgcacaccacttgcgtgggctgcttcctcctgcagttgttcctcaagaactccaaattaagaagatcatgcacaacctgcggcagtaccaggtccctttgcagcgctatatggccatgatggaccttcaggagaggaacgagaggcttttctacaagcttttaattgataacgtggaggagctgcttcctgtggtttatacaccaactgtaggtgaggcctgccagaagtatgggtccatctttcgacaaccacagggtctgtatgtcagcttgagggacaaagggaaggtcctagaagttctaaggaactggccacataggaacattcaagttatctgtgttactgatggtgagcgaatcttgggacttggagatttgggttctcagggaatgggaattcctgtaggcaaacttgctctatacactgctcttggaggagttcgtccatcagcttgtttgcctatcacaatcgatgttggcacaaataatgagaaactgctt

SEQ ID NO: 9005 - protein, 327 aa, Zea mays subsp. mays
  peptide (1)..(327): Ceres Seq. ID no. 12356693
TASSGPQREGGGRQLPLPRRSRLPLSIRRAREATMISARTAAASPASLWKRGGQSEGGGSCDGCRTYRNTLRRAAAAKVRALPSRAVEAVKMGSAAEVEQEEAEVAAAADGVVVEDHYGEDSATEELPIMPWAFSVASGYTLLRDPHHNKGLAFTEKERDAHHLRGLLPPAVVPQELQIKKIMHNLRQYQVPLQRYMAMMDLQERNERLFYKLLIDNVEELLPVVYTPTVGEACQKYGSIFRQPQGLYVSLRDKGKVLEVLRNWPHRNIQVICVTDGERILGLGDLGSQGMGIPVGKLALYTALGGVRPSACLPITIDVGTNNEKLL

SEQ ID NO: 9006 - protein, 293 aa, Zea mays subsp. mays
  peptide (1)..(293): Ceres Seq. ID no. 12356694
MISARTAAASPASLWKRGGQSEGGGSCDGCRTYRNTLRRAAAAKVRALPSRAVEAVKMGSAAEVEQEEAEVAAAADGVVVEDHYGEDSATEELPIMPWAFSVASGYTLLRDPHHNKGLAFTEKERDAHHLRGLLPPAVVPQELQIKKIMHNLRQYQVPLQRYMAMMDLQERNERLFYKLLIDNVEELLPVVYTPTVGEACQKYGSIFRQPQGLYVSLRDKGKVLEVLRNWPHRNIQVICVTDGERILGLGDLGSQGMGIPVGKLALYTALGGVRPSACLPITIDVGTNNEKLL

SEQ ID NO: 9007 - protein, 236 aa, Zea mays subsp. mays
  peptide (1)..(236): Ceres Seq. ID no. 12356695
MGSAAEVEQEEAEVAAAADGVVVEDHYGEDSATEELPIMPWAFSVASGYTLLRDPHHNKGLAFTEKERDAHHLRGLLPPAVVPQELQIKKIMHNLRQYQVPLQRYMAMMDLQERNERLFYKLLIDNVEELLPVVYTPTVGEACQKYGSIFRQPQGLYVSLRDKGKVLEVLRNWPHRNIQVICVTDGERILGLGDLGSQGMGIPVGKLALYTALGGVRPSACLPITIDVGTNNEKLL

SEQ ID NO: 9008 - DNA, 1072 bp, Zea mays subsp. mays
  misc_feature (1)..(1072): Ceres Seq. ID no. 12382121
  misc_feature (1)..(1072): Ortholog of  Ceres SEQ ID NO 13595158 as cited in SEQ ID NO 51008
  misc_feature (1)..(1072): Ortholog of  Ceres SEQ ID NO 13581682 as cited in SEQ ID NO 57913
  misc_feature (1)..(1072): Ortholog of  Ceres SEQ ID NO 14304144 as cited in SEQ ID NO 59152
  misc_feature (1)..(1072): Ortholog of  Ceres SEQ ID NO 13662050 as cited in SEQ ID NO 61580
  misc_feature (1)..(1072): Ortholog of  Ceres SEQ ID NO 14309388 as cited in SEQ ID NO 0
cccgtccacgcatcgccaccgcgccatatcggcatatccgcaagaagcacccggcacatcgcgtcgcccccaccttccccctcccaccaccgcaagcccggacacgcccagggcgcaaatccggacaagcgctgccccggtcgcggcaggcatgggtttcccggtgggctactcggagctggtgctcccgaagcagctgctccacctcctgctgctgctggggtacatccgccgcttcctcctctgggcgttcgacgccgtggggctcggcgacctgctggatctcggggacgaccaccaggcgctgctgcaggaccaccagcagcagcagcacggcgccgccgcgcaggggcgggacctgccgcagcaggcggcgatgctgcagcaccggcgcccggagttccggncggtgccggcgatggtcatcgaggaggtcctccccgtggtgcggttcgacgagctggagctggagccggagcccggagactgcgcggtgtgcctgagcggcatcggcggccgcgacgaggtgcggcggctcagcaactgccgccacgtcttccaccgggcctgcctcgaccgctggatggagcacgaccagcgcacgtgcccgctctgccgcgcgccgctcatccccgacgagatggccggcgcgctctgggccgccgccgccggcgtccccgacgcctccgacttcgacttctcctacctcggcgcgccgctggcgcccgtgccctccccgacgctgctgcggccgcacgagctgctgctcaccggcctgggcggctaccagtgagagctcaccaccgcccgccacttcccccgtggggaatgcgcgtctgcctggatccatcgacgcttgcttgcttgcttccgttccgtgggagggacggggacggacagcagccgaggcagagaagaaacccaaggctctcgaattgtacataggcaaaatgagtaaagcggccacccccccaaaaaaaggctaggagattagatccctcttgtgcataggtagattccgtcttccaagtttgtggagttgtgaatctttgcgcggattaaatttttgtcg

SEQ ID NO: 9009 - protein, 314 aa, Zea mays subsp. mays
  peptide (1)..(314): Ceres Seq. ID no. 12382122
  misc_feature (136)..(136): Xaa is any aa, unknown or other
PVHASPPRHIGISARSTRHIASPPPSPSHHRKPGHAQGANPDKRCPGRGRHGFPGGLLGAGAPEAAAPPPAAAGVHPPLPPLGVRRRGARRPAGSRGRPPGAAAGPPAAAARRRRAGAGPAAAGGDAAAPAPGVPXGAGDGHRGGPPRGAVRRAGAGAGARRLRGVPERHRRPRRGAAAQQLPPRLPPGLPRPLDGARPAHVPALPRAAHPRRDGRRALGRRRRRPRRLRLRLLLPRRAAGARALPDAAAAARAAAHRPGRLPVRAHHRPPLPPWGMRVCLDPSTLACLLPFRGRDGDGQQPRQRRNPRLSNCT

SEQ ID NO: 9010 - protein, 263 aa, Zea mays subsp. mays
  peptide (1)..(263): Ceres Seq. ID no. 12382123
  misc_feature (136)..(136): Xaa is any aa, unknown or other
PSTHRHRAISAYPQEAPGTSRRPHLPPPTTASPDTPRAQIRTSAAPVAAGMGFPVGYSELVLPKQLLHLLLLLGYIRRFLLWAFDAVGLGDLLDLGDDHQALLQDHQQQQHGAAAQGRDLPQQAAMLQHRRPEFRXVPAMVIEEVLPVVRFDELELEPEPGDCAVCLSGIGGRDEVRRLSNCRHVFHRACLDRWMEHDQRTCPLCRAPLIPDEMAGALWAAAAGVPDASDFDFSYLGAPLAPVPSPTLLRPHELLLTGLGGYQ

SEQ ID NO: 9011 - protein, 213 aa, Zea mays subsp. mays
  peptide (1)..(213): Ceres Seq. ID no. 12382124
  misc_feature (86)..(86): Xaa is any aa, unknown or other
MGFPVGYSELVLPKQLLHLLLLLGYIRRFLLWAFDAVGLGDLLDLGDDHQALLQDHQQQQHGAAAQGRDLPQQAAMLQHRRPEFRXVPAMVIEEVLPVVRFDELELEPEPGDCAVCLSGIGGRDEVRRLSNCRHVFHRACLDRWMEHDQRTCPLCRAPLIPDEMAGALWAAAAGVPDASDFDFSYLGAPLAPVPSPTLLRPHELLLTGLGGYQ

SEQ ID NO: 9012 - DNA, 1357 bp, Zea mays subsp. mays
  misc_feature (1)..(1357): Ceres Seq. ID no. 12358369
  misc_feature (1)..(1357): Ortholog of  Ceres SEQ ID NO 14313803 as cited in SEQ ID NO 54540
gtgcgggcggatgcacttgtttgcgtcccgtgcgcgcgtgatctgatcagcgcgttcgcgtggctcggtcgccacccaactcgacaccgcccacctccacctcctcctcctccgcgtccgcttttttgtccgggcacacccccgcccgacgccgccggaaccagaccagaccacaccacaccacaggagaggagaggagctccggcccgccaaaaaaaaatagcaggggcaggggccgcaggcgccgcgacccatgggcgtcaagcaggtcctcgtccgcccccgctacggcgacgaggatgtcgtcgaccagtcgccgccgccgcccatgtcgtcctcgccctgcggccgctacgtcctccaccgcgtctgcaggttcgacacgctcgccggcgtagccatcaagtacggcgtcgaggtggcggacgtgaagcgcgccaacggcctcaccaccgacctgcagatgttcgcgcacaagacgctgcgggtcccgctccacggcaggcacgcgccgtctcctccctcctcgtccccaagccacgccgccagagaatggactaaaaatgctgcttccctggacccgctccttaaaccaccacggagcacagtttcgccatccatgagccttctactacaggggtgccatggcctgacgccggctccaaagggggacctgaacctgaccgatgaatgcgctcaaggccatcacaggaaagccggaagcttatcgagcaccttgttgccgaggagagccgggcaagggctggccctgaggccaaagtctggcggtcgggcagacacgaacggcatccaccaggacctgttggctgcgtgggtgccctcgtacggggacgggttgcgcgcggtgaagagatcgtcgagcgctccggagttccaggattcggacagcgtcagcctcgcctcggcgtggctgaagagcaagtggaacctgaaaccggattatgccttcaccctggcgctgttcgacggcatctccaagcctctcctggacagcatccccaagcctctcctcgacaacatccccaactcgatcgttgcttggagaaacaaggcggccagagattagcagcttcgtttcgtctctttacagccaaaaaaaagaaggcctcgaacggttggacacactgtgctgaaatggcgcgatggatacagtgacacattacttgcacatacatactgtgctgaatctattgtgccaaagcagcagcagcagcagattgggagctgggagatgagcctgggggtgtattcttttcatttttgtacgtacacatataggaatgaaggcaaacgcctagcagcattcccatgacctaataaagaaatagcttgttct

SEQ ID NO: 9013 - protein, 277 aa, Zea mays subsp. mays
  peptide (1)..(277): Ceres Seq. ID no. 12358370
MGVKQVLVRPRYGDEDVVDQSPPPPMSSSPCGRYVLHRVCRFDTLAGVAIKYGVEVADVKRANGLTTDLQMFAHKTLRVPLHGRHAPSPPSSSPSHAAREWTKNAASLDPLLKPPRSTVSPSMSLLLQGCHGLTPAPKGDLNLTDECAQGHHRKAGSLSSTLLPRRAGQGLALRPKSGGRADTNGIHQDLLAAWVPSYGDGLRAVKRSSSAPEFQDSDSVSLASAWLKSKWNLKPDYAFTLALFDGISKPLLDSIPKPLLDNIPNSIVAWRNKAARD

SEQ ID NO: 9014 - protein, 252 aa, Zea mays subsp. mays
  peptide (1)..(252): Ceres Seq. ID no. 12358371
MSSSPCGRYVLHRVCRFDTLAGVAIKYGVEVADVKRANGLTTDLQMFAHKTLRVPLHGRHAPSPPSSSPSHAAREWTKNAASLDPLLKPPRSTVSPSMSLLLQGCHGLTPAPKGDLNLTDECAQGHHRKAGSLSSTLLPRRAGQGLALRPKSGGRADTNGIHQDLLAAWVPSYGDGLRAVKRSSSAPEFQDSDSVSLASAWLKSKWNLKPDYAFTLALFDGISKPLLDSIPKPLLDNIPNSIVAWRNKAARD

SEQ ID NO: 9015 - protein, 207 aa, Zea mays subsp. mays
  peptide (1)..(207): Ceres Seq. ID no. 12358372
MFAHKTLRVPLHGRHAPSPPSSSPSHAAREWTKNAASLDPLLKPPRSTVSPSMSLLLQGCHGLTPAPKGDLNLTDECAQGHHRKAGSLSSTLLPRRAGQGLALRPKSGGRADTNGIHQDLLAAWVPSYGDGLRAVKRSSSAPEFQDSDSVSLASAWLKSKWNLKPDYAFTLALFDGISKPLLDSIPKPLLDNIPNSIVAWRNKAARD

SEQ ID NO: 9016 - DNA, 936 bp, Zea mays subsp. mays; identical to SEQ ID NO: 6253
  misc_feature (1)..(936): Ceres Seq. ID no. 12361812
  misc_feature (1)..(936): Ortholog of  Ceres SEQ ID NO 13600689 as cited in SEQ ID NO 0
  misc_feature (1)..(936): Ortholog of  Ceres SEQ ID NO 15178120 as cited in SEQ ID NO 0

SEQ ID NO: 9017 - protein, 119 aa, Zea mays subsp. mays; identical to SEQ ID NO: 6254
  peptide (1)..(119): Ceres Seq. ID no. 12361813

SEQ ID NO: 9018 - protein, 107 aa, Zea mays subsp. mays; identical to SEQ ID NO: 6255
  peptide (1)..(107): Ceres Seq. ID no. 12361814

SEQ ID NO: 9019 - DNA, 681 bp, Zea mays subsp. mays
  misc_feature (1)..(681): Ceres Seq. ID no. 12357263
  misc_feature (1)..(681): Ortholog of  Ceres SEQ ID NO 13591265 as cited in SEQ ID NO 61046
  misc_feature (1)..(681): Ortholog of  Ceres SEQ ID NO 15224932 as cited in SEQ ID NO 62225
aagtagcagctacatacgtcctcctccattaatattggcagcaagctaggatcatcagcatctgagcttatatattactacatcgatcggttgccaaatggcggggatgacagtcggcaataagctggcgctggctgcggtgctgctgtgcgcggcggcggccatggccacggcgcagcaggcctccggcgtgcgcgccacctacaacttctacaacccgcagcagaacaactgggacctcaacgccgtgagcgcgtactgcgcgacgtgggacgccagcaagccgctgtcgtggcgcatgaagtacggctggacggccttctgcgggcccgccggccccaccggccaggccgcgtgcgggcagtgtcttctggtgaccaacacggcgacgggggcgtccatcacggtgaggatcgtggaccagtgcagcaacggcggcctggacctggactacgacacggcgttcaagcccatcgacaccaacggccagggcttccaggccggccacctcaccgtcaactaccagttcgtcaactgcggcgacaactgaactgatagattattcacctgtgcatgcacctatatgtactagcaccattattccaagagttatatggatgtgatcccacacgtaagagccaataaaacatatatgcccagtggaataaactgaattaccta

SEQ ID NO: 9020 - protein, 150 aa, Zea mays subsp. mays
  peptide (1)..(150): Ceres Seq. ID no. 12357264
MAGMTVGNKLALAAVLLCAAAAMATAQQASGVRATYNFYNPQQNNWDLNAVSAYCATWDASKPLSWRMKYGWTAFCGPAGPTGQAACGQCLLVTNTATGASITVRIVDQCSNGGLDLDYDTAFKPIDTNGQGFQAGHLTVNYQFVNCGDN

SEQ ID NO: 9021 - protein, 147 aa, Zea mays subsp. mays
  peptide (1)..(147): Ceres Seq. ID no. 12357265
MTVGNKLALAAVLLCAAAAMATAQQASGVRATYNFYNPQQNNWDLNAVSAYCATWDASKPLSWRMKYGWTAFCGPAGPTGQAACGQCLLVTNTATGASITVRIVDQCSNGGLDLDYDTAFKPIDTNGQGFQAGHLTVNYQFVNCGDN

SEQ ID NO: 9022 - protein, 128 aa, Zea mays subsp. mays
  peptide (1)..(128): Ceres Seq. ID no. 12357266
MATAQQASGVRATYNFYNPQQNNWDLNAVSAYCATWDASKPLSWRMKYGWTAFCGPAGPTGQAACGQCLLVTNTATGASITVRIVDQCSNGGLDLDYDTAFKPIDTNGQGFQAGHLTVNYQFVNCGDN

SEQ ID NO: 9023 - DNA, 741 bp, Zea mays subsp. mays
  misc_feature (1)..(741): Ceres Seq. ID no. 12402135
  misc_feature (1)..(741): Ortholog of  Ceres SEQ ID NO 13596625 as cited in SEQ ID NO 62876
cattttctgggtgttcttcactccagttatggtcagtgtggctaaatctttcgatgctccaataaagcttctgtttccaactgcagacgctgaacggccattctccatgcttggccttggtgacattgtaatacctggtatattcgtcgcacttgccttgcgttttgatgtctcaagaggtaccaagaagcgttacttcaacagtgcatttttgggatacgctgtgggtatgacggtgaccatcgttgtaatgaactggtttcaagcggcgcagcctgctctactataccttgttcctggtgtgattggttttgtcgctgttccctgtctgtggtatggagaagtgaaacagctactggagtttgacgagtcaaaaactgagtcggaggaaggcagtacagaagagaagcaagatgatgatagttccaaaggcaacaaaaaggtggactagcaggatttagttccggaggtaaaaggacaggaagacagttttcgtgtaatgtcgtctggcagctaaaaaaacgggtctgatgaccctctaataccggattcgctcgccttacttaagaacttagaagaaatggttcagcatgatacaagttttattttattttttgtttcattttgcggattatttgccctgggctggagagtgggaattgaggggaacaaaatagatgctgttactcgcgatgtactccctgattcgttaaggaattcaccagaactttgacttggccg

SEQ ID NO: 9024 - protein, 149 aa, Zea mays subsp. mays
  peptide (1)..(149): Ceres Seq. ID no. 12402136
IFWVFFTPVMVSVAKSFDAPIKLLFPTADAERPFSMLGLGDIVIPGIFVALALRFDVSRGTKKRYFNSAFLGYAVGMTVTIVVMNWFQAAQPALLYLVPGVIGFVAVPCLWYGEVKQLLEFDESKTESEEGSTEEKQDDDSSKGNKKVD

SEQ ID NO: 9025 - protein, 140 aa, Zea mays subsp. mays
  peptide (1)..(140): Ceres Seq. ID no. 12402137
MVSVAKSFDAPIKLLFPTADAERPFSMLGLGDIVIPGIFVALALRFDVSRGTKKRYFNSAFLGYAVGMTVTIVVMNWFQAAQPALLYLVPGVIGFVAVPCLWYGEVKQLLEFDESKTESEEGSTEEKQDDDSSKGNKKVD

SEQ ID NO: 9026 - protein, 114 aa, Zea mays subsp. mays
  peptide (1)..(114): Ceres Seq. ID no. 12402138
MLGLGDIVIPGIFVALALRFDVSRGTKKRYFNSAFLGYAVGMTVTIVVMNWFQAAQPALLYLVPGVIGFVAVPCLWYGEVKQLLEFDESKTESEEGSTEEKQDDDSSKGNKKVD

SEQ ID NO: 9027 - DNA, 765 bp, Zea mays subsp. mays
  misc_feature (1)..(765): Ceres Seq. ID no. 12346311
  misc_feature (1)..(765): Ortholog of  Ceres SEQ ID NO 12609037 as cited in SEQ ID NO 51306
  misc_feature (1)..(765): Ortholog of  Ceres SEQ ID NO 12610391 as cited in SEQ ID NO 55942
  misc_feature (1)..(765): Ortholog of  Ceres SEQ ID NO 14309068 as cited in SEQ ID NO 0
atctacgaacgggggccgggaaaagatcggctacagacagatgaggctctgtctccggcaagcggcggccaccagctcacccctcgcagctaccctccgcggcaagacttctacgagcaccctcgccccccatggccggctcagcttcagccacaccacgtcgctgcagacggcgcccgggcaccgctggctccgagcagggtgggcggtgcgcgtgctcccgctgacggaggagaacgtggagaaggtgctggacgaggtgcggccgagcctgatggcggacggcggcaacgtggcgctgcacgagatcgacggcctcgtcgtcgtgctcaagctgcagggcgcgtgcggctcctgccccagctccaccatgacgctcaagatgggcatcgagacgcgcctccgcgacaagatccccgacatcctcgaggtcgagcagatcgtcgacaccgagaccggcctcgacctcaccgccgacaacgtcgacaaggtgcttgatgagatcagaccgtacctctccggcactggaggtggaagcctcgagcttctccagattgacggatacgtcgtcaagatccggatcggcggacctgcagccggtgtaatgacagtacgagtagccgtgacacagaaactgagggagaaaataccttccatcttggctgttcagctcacagaatagaaatgcgagagctcacttgtgcatcatcacgacgaaactctggctttcaggcgaatgtgcagtgttcatcagtcttatatttc

SEQ ID NO: 9028 - protein, 226 aa, Zea mays subsp. mays
  peptide (1)..(226): Ceres Seq. ID no. 12346312
STNGGREKIGYRQMRLCLRQAAATSSPLAATLRGKTSTSTLAPHGRLSFSHTTSLQTAPGHRWLRAGWAVRVLPLTEENVEKVLDEVRPSLMADGGNVALHEIDGLVVVLKLQGACGSCPSSTMTLKMGIETRLRDKIPDILEVEQIVDTETGLDLTADNVDKVLDEIRPYLSGTGGGSLELLQIDGYVVKIRIGGPAAGVMTVRVAVTQKLREKIPSILAVQLTE

SEQ ID NO: 9029 - protein, 213 aa, Zea mays subsp. mays
  peptide (1)..(213): Ceres Seq. ID no. 12346313
MRLCLRQAAATSSPLAATLRGKTSTSTLAPHGRLSFSHTTSLQTAPGHRWLRAGWAVRVLPLTEENVEKVLDEVRPSLMADGGNVALHEIDGLVVVLKLQGACGSCPSSTMTLKMGIETRLRDKIPDILEVEQIVDTETGLDLTADNVDKVLDEIRPYLSGTGGGSLELLQIDGYVVKIRIGGPAAGVMTVRVAVTQKLREKIPSILAVQLTE

SEQ ID NO: 9030 - protein, 165 aa, Zea mays subsp. mays
  peptide (1)..(165): Ceres Seq. ID no. 12346314
IYERGPGKDRLQTDEALSPASGGHQLTPRSYPPRQDFYEHPRPPWPAQLQPHHVAADGARAPLAPSRVGGARAPADGGERGEGAGRGAAEPDGGRRQRGAARDRRPRRRAQAAGRVRLLPQLHHDAQDGHRDAPPRQDPRHPRGRADRRHRDRPRPHRRQRRQGA

SEQ ID NO: 9031 - DNA, 1721 bp, Zea mays subsp. mays
  misc_feature (1)..(1721): Ceres Seq. ID no. 12362091
  misc_feature (1)..(1721): Ortholog of  Ceres SEQ ID NO 14301916 as cited in SEQ ID NO 69281
agggagggaggggcagataaagaacactgcaccatttgatttgtgtgctcctgcagtctacaccctcacttgctttcaaacgtgcacctcctctcttcttcttcctcccctcatctccttccaacagtgccataaccacagcctccctctcctctctctcttgttgcacgaatatgacgccatgatctcccccgtgaacgacaaggagaagcagagtgctacataggtacatgtagggtactataggataggaactatacagctaggaggtagcgcggagggaggagcacgccgccagcagtagggatgtacaagaaccagctccaagaactggcgcagaggagctgcttcagcctgccgtcgtacgtgtgcacgcgcgagggccctgaccacgcgccgcgcttccgggcggccgtcaccttcaacggtgagaccttcgagggccccagcggctgcaccacgctccgccaggccgagcacgccgctgccgaagtcgccctcgcccgcctctccctccgcggcccgttccactaccctcgccgcccgggtcctcgatgagacgggggtgtacaagaacctgctgcaggagacggcccaccgggcggggctgaagctgccggcgtacaccacggtgcgatcgggcccgggccactcgccggtgttctcctccaccgtcgagctcgccggcttgagcttcgcgggcgaccccgccaggaccaagaagcaggcggagaagaacgccgccatggccgcctggtcctcgctcaaacagatgccggaggctcgcaaggagcccggcgccggcgacgagcaggagcacgtggctgtcgccagagcgctcgcggcgctgaagccgcgagacggcggcgacggaaaggcggcgccgcctctgcagaagcacagcagcaacggctcttcttcctccgctcttccgaacccgtcgctgtacagacaccaatggcggcctcggaccagtacccctgcccagcccctgccgccgaggacgggggccctgcccctgcagccgccggccggcccaaggatcctgcccccgctgcatctgctacaacagccggcgtgcggctccagggacgccgcggcggcagagctggtgcggatgctggagcgcgccatggtgcgcgaccgggaggcaacgccgccttcgccgtgctactacgcggcgcctgccgcctcggcgtaccgccacggcagcgcgccgaggaccttcgccgcgggcgggttccacgccccggctgtgagcgtgcggtcggtgatcccggtgtgcgccgccccgccgccgcagaccccggtcaaggaggaaaggaatggcccggcgacaccctcaggcgcatgcaagagggcgtgagcgacgtggtcagcttgtgaagcgcagcccagagaagaagaaagaaagagcctggctctgttgttgcaggggagttttggatcacaactttctctgtagtctgtacagaagttgtgtacgaggtcaactactacgcatctccctcgctctctgtgtgtgtttgaccaggatctagatggtgagatcttcgtcagaaaggcagccatggccatgatgaggctgtgaagggttttaggtggacgatgaacatatatgaatatatagttgtactgttctagggcttcagtagaagccatgctaccgtgttaacaagcgcatcgtatcatcccttcggctcggcaatctgcctgcctgc

SEQ ID NO: 9032 - protein, 206 aa, Zea mays subsp. mays
  peptide (1)..(206): Ceres Seq. ID no. 12362092
MAAWSSLKQMPEARKEPGAGDEQEHVAVARALAALKPRDGGDGKAAPPLQKHSSNGSSSSALPNPSLYRHQWRPRTSTPAQPLPPRTGALPLQPPAGPRILPPLHLLQQPACGSRDAAAAELVRMLERAMVRDREATPPSPCYYAAPAASAYRHGSAPRTFAAGGFHAPAVSVRSVIPVCAAPPPQTPVKEERNGPATPSGACKRA

SEQ ID NO: 9033 - protein, 197 aa, Zea mays subsp. mays
  peptide (1)..(197): Ceres Seq. ID no. 12362093
MPEARKEPGAGDEQEHVAVARALAALKPRDGGDGKAAPPLQKHSSNGSSSSALPNPSLYRHQWRPRTSTPAQPLPPRTGALPLQPPAGPRILPPLHLLQQPACGSRDAAAAELVRMLERAMVRDREATPPSPCYYAAPAASAYRHGSAPRTFAAGGFHAPAVSVRSVIPVCAAPPPQTPVKEERNGPATPSGACKRA

SEQ ID NO: 9034 - protein, 142 aa, Zea mays subsp. mays
  peptide (1)..(142): Ceres Seq. ID no. 12362094
MAASDQYPCPAPAAEDGGPAPAAAGRPKDPAPAASATTAGVRLQGRRGGRAGADAGARHGARPGGNAAFAVLLRGACRLGVPPRQRAEDLRRGRVPRPGCERAVGDPGVRRPAAADPGQGGKEWPGDTLRRMQEGVSDVVSL

SEQ ID NO: 9035 - DNA, 1478 bp, Zea mays subsp. mays
  misc_feature (1)..(1478): Ceres Seq. ID no. 12373137
  misc_feature (1)..(1478): Ortholog of  Ceres SEQ ID NO 14303479 as cited in SEQ ID NO 54254
  misc_feature (1)..(1478): Ortholog of  Ceres SEQ ID NO 13582619 as cited in SEQ ID NO 56520
  misc_feature (1)..(1478): Ortholog of  Ceres SEQ ID NO 12611392 as cited in SEQ ID NO 56826
  misc_feature (1)..(1478): Ortholog of  Ceres SEQ ID NO 14315846 as cited in SEQ ID NO 58094
  misc_feature (1)..(1478): Ortholog of  Ceres SEQ ID NO 14314632 as cited in SEQ ID NO 59923
  misc_feature (1)..(1478): Ortholog of  Ceres SEQ ID NO 13660872 as cited in SEQ ID NO 60830
  misc_feature (1)..(1478): Ortholog of  Ceres SEQ ID NO 15226831 as cited in SEQ ID NO 62916
  misc_feature (1)..(1478): Ortholog of  Ceres SEQ ID NO 12616221 as cited in SEQ ID NO 63291
  misc_feature (1)..(1478): Ortholog of  Ceres SEQ ID NO 14302355 as cited in SEQ ID NO 65830
ttaatcaaaaactaaacccaatcccccttccaccattcacacgtaccggcggagaaggaaggaattggtcgccgccgcctgcctctctccgatcctcctccgtcagtggcggtggccacgccgtgctaagctaagctaagcttgcgcaagtgacaagttctttggttggttggaggcagagccacatggcatcgtcgtcgcggctggatctcccgccggggttccgcttccaccccaccgacgaggaggtggtgtcgcactacctgacccacaaggcgctggacagccgcttctcctgcgtcgtcatcgccgacgccgacctgaacaagatcgagccgtgggatctcccaagcaaggctaagatgggcgagaaggagtggtacttcttctgccacaaggaccgcaagtacccgacggggatgcgcaccaaccgcgccaccgccagcgggtactggaaggccacgggcaaggacaaggagatcttccgcggcagtagtccccgccgcgtgctcgtcggcatgaagaagacgctcgtcttctacacgggccgcgcgccgcgcggaggcaagacgccgtgggtcatgcacgagtaccgcctcgagggcagcctgccgcccaacctccaccgcggggccaaggacgaatgggctgtgtgtaaggtgatcaacaaagacttggcgggcaaggctgggcagcaacaaatggcgccgccgcacgccgtgtccgtgggcatggagcgcagcgactcgctggccttcctcgacgacctggtgctcgacaacgccgacgacctgcccccgctcatcgactcgacaacgtacgccgcggcggggacgaccacgacgacgaacgacgacagcggcgggtaccaacaagccaccaaggcggagccgcagccgcatctgcccgcgccgagcaacagcccgtaccagcagcaggccatacggaggcactgcaaggcggaggcgccggcgccggcgatggttctgagcccgtcgcgcgagacgccgggcgcggacatgttccagctccagcatgtggacgagctgctccagctggacggcggcttcatggaggactactacaacatgaacatgtggaaggtctagttaggccgctcggatcgtcggttgcctggcggatgatggattgattagttggttgattggattaacctgttattagacgaagaggagtggaaaggccggccgcgccgattggcatggacgaggtctgtctgacgaagatgtgtcgagacctcgccggcggtgtggtttgtgagaattggttagttagctaatcttcattagctagctagctagctagctactgattagaacagctagcagtagtgtgtaaccgcgcgcgtgtcgttgcctctgctggtcgagaggattgaagcacgcatgtgtacataataataggtaggagtcgtcgtcgttgagtgatgagaaaaatgaatgaaacatactatatat

SEQ ID NO: 9036 - protein, 307 aa, Zea mays subsp. mays
  peptide (1)..(307): Ceres Seq. ID no. 12373138
MASSSRLDLPPGFRFHPTDEEVVSHYLTHKALDSRFSCVVIADADLNKIEPWDLPSKAKMGEKEWYFFCHKDRKYPTGMRTNRATASGYWKATGKDKEIFRGSSPRRVLVGMKKTLVFYTGRAPRGGKTPWVMHEYRLEGSLPPNLHRGAKDEWAVCKVINKDLAGKAGQQQMAPPHAVSVGMERSDSLAFLDDLVLDNADDLPPLIDSTTYAAAGTTTTTNDDSGGYQQATKAEPQPHLPAPSNSPYQQQAIRRHCKAEAPAPAMVLSPSRETPGADMFQLQHVDELLQLDGGFMEDYYNMNMWKV

SEQ ID NO: 9037 - protein, 248 aa, Zea mays subsp. mays
  peptide (1)..(248): Ceres Seq. ID no. 12373139
MGEKEWYFFCHKDRKYPTGMRTNRATASGYWKATGKDKEIFRGSSPRRVLVGMKKTLVFYTGRAPRGGKTPWVMHEYRLEGSLPPNLHRGAKDEWAVCKVINKDLAGKAGQQQMAPPHAVSVGMERSDSLAFLDDLVLDNADDLPPLIDSTTYAAAGTTTTTNDDSGGYQQATKAEPQPHLPAPSNSPYQQQAIRRHCKAEAPAPAMVLSPSRETPGADMFQLQHVDELLQLDGGFMEDYYNMNMWKV

SEQ ID NO: 9038 - protein, 229 aa, Zea mays subsp. mays
  peptide (1)..(229): Ceres Seq. ID no. 12373140
MRTNRATASGYWKATGKDKEIFRGSSPRRVLVGMKKTLVFYTGRAPRGGKTPWVMHEYRLEGSLPPNLHRGAKDEWAVCKVINKDLAGKAGQQQMAPPHAVSVGMERSDSLAFLDDLVLDNADDLPPLIDSTTYAAAGTTTTTNDDSGGYQQATKAEPQPHLPAPSNSPYQQQAIRRHCKAEAPAPAMVLSPSRETPGADMFQLQHVDELLQLDGGFMEDYYNMNMWKV

SEQ ID NO: 9039 - DNA, 1518 bp, Zea mays subsp. mays
  misc_feature (1)..(1518): Ceres Seq. ID no. 12382183
  misc_feature (1)..(1518): Ortholog of  Ceres SEQ ID NO 14302458 as cited in SEQ ID NO 66127
gaagttcattcagagagagcgcgagagggggtgtggctgtctatggcgtacgagaggatacacgaagctcctcagatggtggccatctcgccaaccaggctcaggatgaagctgctgggctccaatcacaaggacgaccccactcgcaagacgctgcaggcgtcgaggctcgacgacgatgaccaccccaacaacagcctcctgccgcaagagctcgacgaagagtaccccaaggaccaccgctccgactcttcccggtcgcggtccgacgccagccacgacaggatcagtggcagcgacgacgacagcggcaccaactttgagttctgcaaggacgagagggcgtccctgccggcttcggcggcgcccggaccgttcttccggcagcaggtgccgtccaagtggaacgacgcggagaagtggatcgcggggcgccaccaccgccacgtcgtgcactccaaccctgtcttctccaagaagcccgcggcgggcgcgcccaccgagctgtcgtctaataggtcctcgcacaagaagccccgcttctcgccggcggccgtgtcgacgcgggacgtcgggacggagatgacgcccgccgcgagccaggagcagtcgcgcagcggcacccccgccggcgccgccacgccggcgctcagcccgctctgctcggcgccgtccagcccgcggcgcggcggctcctcgtccgtgccggagcgggagctccggctccggacgcggcgggagatcgctgcgctcggcctgcagctcggcaagatgagcatcgcgtcgtgggccagcaaggaggagggtctcctcgccgccgcgtcgccggagaaggacaagcgctacgcggccgtcgacacggtggtcaggagcaaggcgttcgaagctcgcgccgccgcgtgggaggagtccaacaagtgtaaactcgcggcaagataccagaggaaagaggcgaagatagagggatgggaaagcttgcagaaatgcaagttcgaagccaagctgaggcaggccgaggcacgggctgagcagatgaaagcccgggcgaagcaggacctggcgaagaggctgtcagcgctgagccacaaggtggaggggaagcaggcgagggtggaggcgcgccggggccggcaggcgtcccggctggcgcggcaggtggagcgcatccgcgagaccggccgtgtgccgtgccggctccggcggtgctgcgcctggttcctgtagtgtagtgtagctagcatgctcccaatcgtcggaacaagtgctgatggcagtatgtcatggcatgggctgcttgatttgtaactacatgaaaattcatcgctggttcatgttcgtcccaatgccagggcagtggttggtagctgctcgccgctgtggtttggatgccgccgcctgcctttgtgccggttgtctagcttggcctgcaccctgcagccagctgatctagtgatgtggtgcccaaattcacgcacatgtaaagctccttgcaatttcaattaactcaggttattcttg

SEQ ID NO: 9040 - protein, 407 aa, Zea mays subsp. mays
  peptide (1)..(407): Ceres Seq. ID no. 12382184
EVHSERAREGVWLSMAYERIHEAPQMVAISPTRLRMKLLGSNHKDDPTRKTLQASRLDDDDHPNNSLLPQELDEEYPKDHRSDSSRSRSDASHDRISGSDDDSGTNFEFCKDERASLPASAAPGPFFRQQVPSKWNDAEKWIAGRHHRHVVHSNPVFSKKPAAGAPTELSSNRSSHKKPRFSPAAVSTRDVGTEMTPAASQEQSRSGTPAGAATPALSPLCSAPSSPRRGGSSSVPERELRLRTRREIAALGLQLGKMSIASWASKEEGLLAAASPEKDKRYAAVDTVVRSKAFEARAAAWEESNKCKLAARYQRKEAKIEGWESLQKCKFEAKLRQAEARAEQMKARAKQDLAKRLSALSHKVEGKQARVEARRGRQASRLARQVERIRETGRVPCRLRRCCAWFL

SEQ ID NO: 9041 - protein, 393 aa, Zea mays subsp. mays
  peptide (1)..(393): Ceres Seq. ID no. 12382185
MAYERIHEAPQMVAISPTRLRMKLLGSNHKDDPTRKTLQASRLDDDDHPNNSLLPQELDEEYPKDHRSDSSRSRSDASHDRISGSDDDSGTNFEFCKDERASLPASAAPGPFFRQQVPSKWNDAEKWIAGRHHRHVVHSNPVFSKKPAAGAPTELSSNRSSHKKPRFSPAAVSTRDVGTEMTPAASQEQSRSGTPAGAATPALSPLCSAPSSPRRGGSSSVPERELRLRTRREIAALGLQLGKMSIASWASKEEGLLAAASPEKDKRYAAVDTVVRSKAFEARAAAWEESNKCKLAARYQRKEAKIEGWESLQKCKFEAKLRQAEARAEQMKARAKQDLAKRLSALSHKVEGKQARVEARRGRQASRLARQVERIRETGRVPCRLRRCCAWFL

SEQ ID NO: 9042 - protein, 382 aa, Zea mays subsp. mays
  peptide (1)..(382): Ceres Seq. ID no. 12382186
MVAISPTRLRMKLLGSNHKDDPTRKTLQASRLDDDDHPNNSLLPQELDEEYPKDHRSDSSRSRSDASHDRISGSDDDSGTNFEFCKDERASLPASAAPGPFFRQQVPSKWNDAEKWIAGRHHRHVVHSNPVFSKKPAAGAPTELSSNRSSHKKPRFSPAAVSTRDVGTEMTPAASQEQSRSGTPAGAATPALSPLCSAPSSPRRGGSSSVPERELRLRTRREIAALGLQLGKMSIASWASKEEGLLAAASPEKDKRYAAVDTVVRSKAFEARAAAWEESNKCKLAARYQRKEAKIEGWESLQKCKFEAKLRQAEARAEQMKARAKQDLAKRLSALSHKVEGKQARVEARRGRQASRLARQVERIRETGRVPCRLRRCCAWFL

SEQ ID NO: 9043 - DNA, 1296 bp, Zea mays subsp. mays
  misc_feature (1)..(1296): Ceres Seq. ID no. 12359791
  misc_feature (1)..(1296): Ortholog of  Ceres SEQ ID NO 13639514 as cited in SEQ ID NO 55736
  misc_feature (1)..(1296): Ortholog of  Ceres SEQ ID NO 14312254 as cited in SEQ ID NO 59148
  misc_feature (1)..(1296): Ortholog of  Ceres SEQ ID NO 13662804 as cited in SEQ ID NO 65394
  misc_feature (1)..(1296): Ortholog of  Ceres SEQ ID NO 13656519 as cited in SEQ ID NO 69226
ctctgcttgcttcgcctcgtctgccctacccctgccctgtccacattttcttccattccggttgctcaacaaacaaaatatatatatcctcgctttccttcccgtcgccgcctgaaaccgctgcgctctcggcttggatagcaagggtctcagtctctcagagggagcaagaagaggatctgagggtgagatggcgatcgaccacgagtcccagttcaaggagctccgcctcaagaaccgaaggatcatgggcggcggcggccctgaccctgagccggaggaggagggcgccacggcggcgtacgcggagcggtggccgcggtggctgcagccgctgctgtccgcgcgcttcttcgcgcagtgcaggacgcacagctactccaaccgcagcggcgaatgcaacatgttctgcctggactgctcggccaccggggggcacgggcgcgggcgcgctctgctcgctgtgcctggcgcagcacgggcaccgcgaccaccacaccatccagatccggcgctcctcctaccacgacgtcatccgggtctcggacatccagcgcttcatggacatcgccggcgtgcagacctacgtcatcaacagcgcccgcgtcgtcttcctcaacgagcggccgcagcagcagaagccgggtggcggcaaggccgcgtcgtcgtcgtcggcctccgccaacctctgcgaggtctgcgcccgcagcctcctcgacaacttccgcttctgctccctcggctgcaaggtcgtcggctgctcccccgacgccgccaaggccaggaactggctcctccgggccgccgacggcgacggttccaccacatcctcctcggccccgcgcaacgccgacaggaagctgagcttcacgccgcccacgccgcagccgaccctgccgacgaagcgccgcaagggcatcccgcaccgcgccccgttcggcagcctcatcgtcgagtactagaatctccttctcccccagccatcgctgtccacgtccgttgcttctgcattggcagttggcactacacgcgcgcggtagagtggaagtactcttcaaacgacggaatggaatcgcacagtgagccagtgaatccagattacaggcaagccaataggttggccaccacttgggtggcctggcccgcctttctttgccacggcacttcggttggtgggtgcttatcgagatggatgccatttgctcgctggcttcgctttccagaaaggggagggaggagaaaggaaggtggatggattggatcggacatcggaggaagaatcaaaaccagcttttc

SEQ ID NO: 9044 - protein, 368 aa, Zea mays subsp. mays
  peptide (1)..(368): Ceres Seq. ID no. 12359792
MAIDHESQFKELRLKNRRIMGGGGPDPEPEEEGATAAYAERWPRWLQPLLSARFFAQCRTHSYSNRSGECNMFCLDCSATGGHGRGRALLAVPGAARAPRPPHHPDPALLLPRRHPGLGHPALHGHRRRADLRHQQRPRRLPQRAAAAAEAGWRQGRVVVVGLRQPLRGLRPQPPRQLPLLLPRLQGRRLLPRRRQGQELAPPGRRRRRFHHILLGPAQRRQEAELHAAHAAADPADEAPQGHPAPRPVRQPHRRVLESPSPPAIAVHVRCFCIGSWHYTRAVEWKYSSNDGMESHSEPVNPDYRQANRLATTWVAWPAFLCHGTSVGGCLSRWMPFARWLRFPERGGRRKEGGWIGSDIGGRIKTSF

SEQ ID NO: 9045 - protein, 349 aa, Zea mays subsp. mays
  peptide (1)..(349): Ceres Seq. ID no. 12359793
MGGGGPDPEPEEEGATAAYAERWPRWLQPLLSARFFAQCRTHSYSNRSGECNMFCLDCSATGGHGRGRALLAVPGAARAPRPPHHPDPALLLPRRHPGLGHPALHGHRRRADLRHQQRPRRLPQRAAAAAEAGWRQGRVVVVGLRQPLRGLRPQPPRQLPLLLPRLQGRRLLPRRRQGQELAPPGRRRRRFHHILLGPAQRRQEAELHAAHAAADPADEAPQGHPAPRPVRQPHRRVLESPSPPAIAVHVRCFCIGSWHYTRAVEWKYSSNDGMESHSEPVNPDYRQANRLATTWVAWPAFLCHGTSVGGCLSRWMPFARWLRFPERGGRRKEGGWIGSDIGGRIKTSF

SEQ ID NO: 9046 - protein, 319 aa, Zea mays subsp. mays
  peptide (1)..(319): Ceres Seq. ID no. 12359794
LLASPRLPYPCPVHIFFHSGCSTNKIYISSLSFPSPPETAALSAWIARVSVSQREQEEDLRVRWRSTTSPSSRSSASRTEGSWAAAALTLSRRRRAPRRRTRSGGRGGCSRCCPRASSRSAGRTATPTAAANATCSAWTARPPGGTGAGALCSLCLAQHGHRDHHTIQIRRSSYHDVIRVSDIQRFMDIAGVQTYVINSARVVFLNERPQQQKPGGGKAASSSSASANLCEVCARSLLDNFRFCSLGCKVVGCSPDAAKARNWLLRAADGDGSTTSSSAPRNADRKLSFTPPTPQPTLPTKRRKGIPHRAPFGSLIVEY

SEQ ID NO: 9047 - DNA, 705 bp, Zea mays subsp. mays
  misc_feature (1)..(705): Ceres Seq. ID no. 12354101
  misc_feature (1)..(705): Ortholog of  Ceres SEQ ID NO 13597065 as cited in SEQ ID NO 63504
tactttgctctgctctgctcctccatggccagcagctactactccctcatgctgctcctgctgctggcggccacggccgtagcagaagaagcagccgccgaggcgtccggaggcggcggcaacgcgaccgagacgtcgccgccgccgccgacggcgtacgagatgctggagcggtacggcttcccgcggggcatcctgccggcgggcgtgacagggtacgagctcggcgcggacggcgccttcgaggtgtacttcccgcgggcctgcgagttcctgctggcgaggacgtggctggtccgctacgaggcgcgcgtgtccgggtccgtcgccgcgggctcgctcacggcgctgcgggggatcagcgtgaaggtgctgttcctgtggctcggcgtcggcgaggtggaccgcgccggggagacgctcagcttctacatcggccccgtcgccacgtcgttcccgatcgacgacttcgccgagagcccgcgctgccgcggctatgatgccgaggcggcggcctcgtcgtgactcatgacgcagccttcagccggcggtgattattaggactgccttggtgatttagctggctatatatacacgtgtgcatcgatcgagtcggagccggcgattagctatttttcctcgtcctttaatttttgtttatttcgcggactttgagtaagctgtttgcggtgatcttgttgcccc

SEQ ID NO: 9048 - protein, 174 aa, Zea mays subsp. mays
  peptide (1)..(174): Ceres Seq. ID no. 12354102
YFALLCSSMASSYYSLMLLLLLAATAVAEEAAAEASGGGGNATETSPPPPTAYEMLERYGFPRGILPAGVTGYELGADGAFEVYFPRACEFLLARTWLVRYEARVSGSVAAGSLTALRGISVKVLFLWLGVGEVDRAGETLSFYIGPVATSFPIDDFAESPRCRGYDAEAAASS

SEQ ID NO: 9049 - protein, 166 aa, Zea mays subsp. mays
  peptide (1)..(166): Ceres Seq. ID no. 12354103
MASSYYSLMLLLLLAATAVAEEAAAEASGGGGNATETSPPPPTAYEMLERYGFPRGILPAGVTGYELGADGAFEVYFPRACEFLLARTWLVRYEARVSGSVAAGSLTALRGISVKVLFLWLGVGEVDRAGETLSFYIGPVATSFPIDDFAESPRCRGYDAEAAASS

SEQ ID NO: 9050 - protein, 165 aa, Zea mays subsp. mays
  peptide (1)..(165): Ceres Seq. ID no. 12354104
LCSALLLHGQQLLLPHAAPAAGGHGRSRRSSRRGVRRRRQRDRDVAAAADGVRDAGAVRLPAGHPAGGRDRVRARRGRRLRGVLPAGLRVPAGEDVAGPLRGARVRVRRRGLAHGAAGDQREGAVPVARRRRGGPRRGDAQLLHRPRRHVVPDRRLRREPALPRL

SEQ ID NO: 9051 - DNA, 882 bp, Zea mays subsp. mays
  misc_feature (1)..(882): Ceres Seq. ID no. 12402126
  misc_feature (1)..(882): Ortholog of  Ceres SEQ ID NO 13598305 as cited in SEQ ID NO 62209
gaatcaattcccacagcaccaccaaaccaataggcaggcagcaaacacaagccaataggcaacacccgcggcgacgcaagagggagaagcgagcgtgcagcggtcctcctctcgatccacatggccatggcggcagcggacggcaagagccggaggttcgcgctggcctgcggggtgctgagccagtacgtcaaggccgagcagcagcagcagcagcagatggcggccccgcgcgccccggccaccacgaccctgagcctgatgcccggcgcggacgtcggcgccgacgagcagcaggaggcggccgccgctggggccgaggagatgcccgggcccgcccccgccgcggcgccgccgctcaccatcttctacggcggcagggtggtggtgttcgaggacttcccggcggagaaggcggccgaggtcatgcgcctcgcggccggcgacgacctgcccatcgcccggaaggcgtcgctgcagcggttcctggccaagcgcaaagatcgcctcgtcgagcgcgcgccctacgcccgcccgtcgtcccccgcggaggcggtcaagccggcctcgggctcggcctcggcctcctggctcgggctccgcagcacggaagccgaccgcctcaccatcgcgctgtgatttactggatcgacctcgaccagtggcgatttaattggctaatgatgggttcatgatcatgcctgcctttggggctggaatgctggatggagatgggagacagagacaggattgtagagatgttttttttttcatttcttacgagagtttcgctgctgtcgtgagatctgattcgataatagagagaagatgaagatcgaacaatttgtgcctttcgttgtgcttgtgcacgtatattctcct

SEQ ID NO: 9052 - protein, 230 aa, Zea mays subsp. mays
  peptide (1)..(230): Ceres Seq. ID no. 12402127
INSHSTTKPIGRQQTQANRQHPRRRKREKRACSGPPLDPHGHGGSGRQEPEVRAGLRGAEPVRQGRAAAAAADGGPARPGHHDPEPDARRGRRRRRAAGGGRRWGRGDARARPRRGAAAHHLLRRQGGGVRGLPGGEGGRGHAPRGRRRPAHRPEGVAAAVPGQAQRSPRRARALRPPVVPRGGGQAGLGLGLGLLARAPQHGSRPPHHRAVIYWIDLDQWRFNWLMMGS

SEQ ID NO: 9053 - protein, 172 aa, Zea mays subsp. mays
  peptide (1)..(172): Ceres Seq. ID no. 12402128
MAMAAADGKSRRFALACGVLSQYVKAEQQQQQQMAAPRAPATTTLSLMPGADVGADEQQEAAAAGAEEMPGPAPAAAPPLTIFYGGRVVVFEDFPAEKAAEVMRLAAGDDLPIARKASLQRFLAKRKDRLVERAPYARPSSPAEAVKPASGSASASWLGLRSTEADRLTIAL

SEQ ID NO: 9054 - protein, 170 aa, Zea mays subsp. mays
  peptide (1)..(170): Ceres Seq. ID no. 12402129
MAAADGKSRRFALACGVLSQYVKAEQQQQQQMAAPRAPATTTLSLMPGADVGADEQQEAAAAGAEEMPGPAPAAAPPLTIFYGGRVVVFEDFPAEKAAEVMRLAAGDDLPIARKASLQRFLAKRKDRLVERAPYARPSSPAEAVKPASGSASASWLGLRSTEADRLTIAL

SEQ ID NO: 9055 - DNA, 1568 bp, Zea mays subsp. mays; identical to SEQ ID NO: 5586
  misc_feature (1)..(1568): Ceres Seq. ID no. 12409445
  misc_feature (1)..(1568): Ortholog of  Ceres SEQ ID NO 12618559 as cited in SEQ ID NO 64385

SEQ ID NO: 9056 - protein, 357 aa, Zea mays subsp. mays; identical to SEQ ID NO: 5587
  peptide (1)..(357): Ceres Seq. ID no. 12409446

SEQ ID NO: 9057 - protein, 197 aa, Zea mays subsp. mays; identical to SEQ ID NO: 5588
  peptide (1)..(197): Ceres Seq. ID no. 12409447

SEQ ID NO: 9058 - DNA, 1317 bp, Zea mays subsp. mays
  misc_feature (1)..(1317): Ceres Seq. ID no. 12406590
  misc_feature (1)..(1317): Ortholog of  Ceres SEQ ID NO 14308401 as cited in SEQ ID NO 55082
gcacgagaccattacctagaacatcctaatcgaaaaaaaaataactcgtcggagtcagtacggtgctctctccgtctcagccgtcgccaactaatctatccccgatcacgcggcgaaccgccgcaacaccactatcaccaatcgcaatggagaaccctccaccgtcctccgccggtccgtactcggcgcccgcgccggcagcgcagcatcaggacgcggcgaaggaggatcaggacgtggcgcagctcgtgctcaacctctgcatcccggagctccgcgagaaggccatcatcatcctttccaagaagcgagaaaaatgtgaagatcttgctctactactatggcactcttttggtacaatggctgcactactccaggaaattgtgtcaatttatcgattactttcacccccacaattatcttttgaccaatcaactcgagtctgcaatgtgcttgtactccttaagtgtgtggcatcacaccctgatactaggatgccatttttaaatgcacagtttccactgtacctgtaccctttcttgaacactacctacaaaacaagagaatatgagttcttgaggattagtagcctgagcgtgatcggtgctcttgtgaagtccgatgatcatgaagtcattgtgaatttgctgtgttctgaaatagttcctttgtgtctgcgtgctattgagatgggcagtgaactttcaaaaaaggtggccacttttattctccaaaagattatgcttgacgacacagggcttgcgtacgtatgcgcttcttctgaacgtttctgcgctgttgccaatgtgctagctcagatggtcgaagcacttgctgaacagccttccccgaggacgcttaagaacacaatccgctgctacctcaggctgacagatgatcgaagggcctgccaagcgttacgtgactacctccccatcgcgttgagggacgggacattcaacggcttaatcgaggtcgatctcacagcaaggctatggctccaccagctgctgcataacgtcatgatgtcagacagtggaggcggccctcgccctgccccgggtcctgtgatggggatgtgaatgaagccggtcgccacgcctcatcatctgtgaagatccaagagcgtgcgttgtagctgtaggtagcgaagtagtaacccacagggaagggaaagcaatcgtggtggtgttcacacccttttggagggaacaaacacaaacagctgagctttgtgccgtttggatggcgaagaagcaacgataacacgcgtcttcttgatacaagtctggctggccattggtcgttgggattttg

SEQ ID NO: 9059 - protein, 311 aa, Zea mays subsp. mays
  peptide (1)..(311): Ceres Seq. ID no. 12406591
MENPPPSSAGPYSAPAPAAQHQDAAKEDQDVAQLVLNLCIPELREKAIIILSKKREKCEDLALLLWHSFGTMAALLQEIVSIYRLLSPPQLSFDQSTRVCNVLVLLKCVASHPDTRMPFLNAQFPLYLYPFLNTTYKTREYEFLRISSLSVIGALVKSDDHEVIVNLLCSEIVPLCLRAIEMGSELSKKVATFILQKIMLDDTGLAYVCASSERFCAVANVLAQMVEALAEQPSPRTLKNTIRCYLRLTDDRRACQALRDYLPIALRDGTFNGLIEVDLTARLWLHQLLHNVMMSDSGGGPRPAPGPVMGM

SEQ ID NO: 9060 - protein, 240 aa, Zea mays subsp. mays
  peptide (1)..(240): Ceres Seq. ID no. 12406592
MAALLQEIVSIYRLLSPPQLSFDQSTRVCNVLVLLKCVASHPDTRMPFLNAQFPLYLYPFLNTTYKTREYEFLRISSLSVIGALVKSDDHEVIVNLLCSEIVPLCLRAIEMGSELSKKVATFILQKIMLDDTGLAYVCASSERFCAVANVLAQMVEALAEQPSPRTLKNTIRCYLRLTDDRRACQALRDYLPIALRDGTFNGLIEVDLTARLWLHQLLHNVMMSDSGGGPRPAPGPVMGM

SEQ ID NO: 9061 - protein, 195 aa, Zea mays subsp. mays
  peptide (1)..(195): Ceres Seq. ID no. 12406593
MPFLNAQFPLYLYPFLNTTYKTREYEFLRISSLSVIGALVKSDDHEVIVNLLCSEIVPLCLRAIEMGSELSKKVATFILQKIMLDDTGLAYVCASSERFCAVANVLAQMVEALAEQPSPRTLKNTIRCYLRLTDDRRACQALRDYLPIALRDGTFNGLIEVDLTARLWLHQLLHNVMMSDSGGGPRPAPGPVMGM

SEQ ID NO: 9062 - DNA, 1097 bp, Zea mays subsp. mays
  misc_feature (1)..(1097): Ceres Seq. ID no. 12363241
  misc_feature (1)..(1097): Ortholog of  Ceres SEQ ID NO 13654553 as cited in SEQ ID NO 68417
gcacgagaccattacctagaacatcctaatcgaaaagatcacgtactggcacgagctagcgagcagactcactcgaacacacactgaccaaccgctcctctctccttccgttccgtcattccgtgtgcagcagacgcggcgttctgcgtgtgcaagacgggcgtgcccgaccaggcgatgcaggcggcgatcgactacgcctgcgccaagggggccgactgcgcctccgcctccaagggcgcgccctgctacggcaacggcaacaaggtggccgtctgctcctacatctgcaacagctactaccagagccgcagcgccacgggcgccacctgcgacttcaacggcgtcgccacgctcaccggcaccgaccccagctccggcacctgcaagttcgcctccggccccagcagcgcaggcaccggcggtggcatgggcgctggcgcgggtaccggcggtggcatgggcgctggcgctggcaccggcgccgggacaggcgttggcaccggagcaggcacgggcatgggcactgggacggggaccagcaccggcaccggcgccggcgcaggggtcgcgacccccgggagcgccctgagcccaccgttcggcggcactggcgcgtacggcccgtcaggggcaggcagcacggactacaacgacgccgtcgccccgcgcgccgccgggctgcacgtggtggctgccctcgctctcgccgtcgccgtcgccgcacctctccaccgctaggggcggtgccatggcaactgggagctggcgggcacgacactcgcagacgggatcccgcctcggcggcccgccagcgcgggctctggtcgatgtccggcgttagtgcgtgcgcgtacctgatgaagtgatgatgggttttgatcgaccagccgtcagcgtagtgcggtcacggggtttacagtgttattcgaactgacctctctgcttcctcgtgctagtagtggtggctgccatgtgtgtgtgctgctggtagagaactagggattcttttttttttctgtcgcttccttgcttatatgtcccgtcgtgttaggctatgtttactatgcagtgtttggtggtggccgctttccatg

SEQ ID NO: 9063 - protein, 187 aa, Zea mays subsp. mays
  peptide (1)..(187): Ceres Seq. ID no. 12363242
MQAAIDYACAKGADCASASKGAPCYGNGNKVAVCSYICNSYYQSRSATGATCDFNGVATLTGTDPSSGTCKFASGPSSAGTGGGMGAGAGTGGGMGAGAGTGAGTGVGTGAGTGMGTGTGTSTGTGAGAGVATPGSALSPPFGGTGAYGPSGAGSTDYNDAVAPRAAGLHVVAALALAVAVAAPLHR

SEQ ID NO: 9064 - protein, 103 aa, Zea mays subsp. mays
  peptide (1)..(103): Ceres Seq. ID no. 12363243
MGAGAGTGGGMGAGAGTGAGTGVGTGAGTGMGTGTGTSTGTGAGAGVATPGSALSPPFGGTGAYGPSGAGSTDYNDAVAPRAAGLHVVAALALAVAVAAPLHR

SEQ ID NO: 9065 - protein, 93 aa, Zea mays subsp. mays
  peptide (1)..(93): Ceres Seq. ID no. 12363244
MGAGAGTGAGTGVGTGAGTGMGTGTGTSTGTGAGAGVATPGSALSPPFGGTGAYGPSGAGSTDYNDAVAPRAAGLHVVAALALAVAVAAPLHR

SEQ ID NO: 9066 - DNA, 846 bp, Zea mays subsp. mays
  misc_feature (1)..(846): Ceres Seq. ID no. 12594975
  misc_feature (1)..(846): Ortholog of  Ceres SEQ ID NO 15227036 as cited in SEQ ID NO 61662
  misc_feature (1)..(846): Ortholog of  Ceres SEQ ID NO 12635268 as cited in SEQ ID NO 0
attatccgaagttccgaacccaagccaagccccagggtccgaccgcagaaccgacccaaaatgtcgcccgcctgctccatgctcaccaccgcgtcgctctcctccccgctcccagccccgcgcctccgcgccgccgccgccttcgctccgccgcgccgcgcggcagtcacactcgtcgtgcgcgcggcgtccgcatcttccaagtcccctgccacggcggaggcggccccgaagaagaagagggcgaccggcatcacccagccgaagtccgtgtcgccggcgctgcaggcaatcgtgggcgacccggttattccccgcaccgaggtcctcaagcgcctctgggcctatatcaaggagcataacctccaggatccctctgataaaaaggtggtggtttgtgatgagaagctgaaggtcctgttcgcggggcgggagcgagtgggattccttgagatcgccaagcttctcaaccctcacttcgtgaagtgatgaggaggagccaggccacttccaggaatcgagttagcttatatggttggttggttacttgtggctggcctagagggtgcgcgtgcgttgggttttggtagcctgagttggctcgctcgactttgtagaatgctgttgttagcttttattagtagccttcagctcgtagcctggtatgcagttagcgtgtgtggtgttctgctatggtttaagtttaaccactgtccatagtcagtcaatgttagcttccttgtccttgcaatggatgttgctgtgtgaattatggtccaacatggattggttgctctgctatggtttagtcactgcccagtcagtctatatatattttttgatggt

SEQ ID NO: 9067 - protein, 162 aa, Zea mays subsp. mays
  peptide (1)..(162): Ceres Seq. ID no. 12594976
IIRSSEPKPSPRVRPQNRPKMSPACSMLTTASLSSPLPAPRLRAAAAFAPPRRAAVTLVVRAASASSKSPATAEAAPKKKRATGITQPKSVSPALQAIVGDPVIPRTEVLKRLWAYIKEHNLQDPSDKKVVVCDEKLKVLFAGRERVGFLEIAKLLNPHFVK

SEQ ID NO: 9068 - protein, 142 aa, Zea mays subsp. mays
  peptide (1)..(142): Ceres Seq. ID no. 12594977
MSPACSMLTTASLSSPLPAPRLRAAAAFAPPRRAAVTLVVRAASASSKSPATAEAAPKKKRATGITQPKSVSPALQAIVGDPVIPRTEVLKRLWAYIKEHNLQDPSDKKVVVCDEKLKVLFAGRERVGFLEIAKLLNPHFVK

SEQ ID NO: 9069 - protein, 136 aa, Zea mays subsp. mays
  peptide (1)..(136): Ceres Seq. ID no. 12594978
MLTTASLSSPLPAPRLRAAAAFAPPRRAAVTLVVRAASASSKSPATAEAAPKKKRATGITQPKSVSPALQAIVGDPVIPRTEVLKRLWAYIKEHNLQDPSDKKVVVCDEKLKVLFAGRERVGFLEIAKLLNPHFVK

SEQ ID NO: 9070 - DNA, 1280 bp, Zea mays subsp. mays
  misc_feature (1)..(1280): Ceres Seq. ID no. 13492847
  misc_feature (1)..(1280): Ortholog of  Ceres SEQ ID NO 14304969 as cited in SEQ ID NO 53193
  misc_feature (1)..(1280): Ortholog of  Ceres SEQ ID NO 14314851 as cited in SEQ ID NO 54014
  misc_feature (1)..(1280): Ortholog of  Ceres SEQ ID NO 15227214 as cited in SEQ ID NO 55368
  misc_feature (1)..(1280): Ortholog of  Ceres SEQ ID NO 13638897 as cited in SEQ ID NO 55839
  misc_feature (1)..(1280): Ortholog of  Ceres SEQ ID NO 15173484 as cited in SEQ ID NO 61804
  misc_feature (1)..(1280): Ortholog of  Ceres SEQ ID NO 13596958 as cited in SEQ ID NO 63319
  misc_feature (1)..(1280): Ortholog of  Ceres SEQ ID NO 12614573 as cited in SEQ ID NO 68344
  misc_feature (1)..(1280): Ortholog of  Ceres SEQ ID NO 12614814 as cited in SEQ ID NO 68816
aaatccttctctcggctacctccaccactgctctgctcagctcgaacgaacaaaaagaactcccctcggccctctcctcttgtgcttctgcttccccaaccgagtctcctcaaccccaggcactcgccctctttcccctcgcctcggcccgcgactccgatgccgccgccgctcctcgagccgcgcgactacctcggcgccggcgccacctcgtcgtgctgctcgtcgtcctgctcctccggccgcgagggcgcggggccccacctcgcgctgcggctcgggcttccggggtccgacgactcccccggccgcggcgcggacgcggagcacgcccgcgcccacgtcgacgccgcgctcaccctcggccccgcccccgcccccgcccccgcgcctcccaggggcagcgccaagcgcgggttcgccgactccctcgaccggtccgcgaagcgggacggcgttgccgcggatgacgctgctgggggcgtcacacgggtagctgaagctgctgccggagctccgcccgctgccaaggcacaagttgttggatggccgcctgttaggagctaccggaagaataccctagctgccagtgccacaaagacaaatgggggagatgaaggtaggagtgaggcgggatgctgttatgtcaaggtcagcatggatggagccccatacctaaggaaggtggacctcaagacctattcaagctatgaggatctctcgcttggtctggagaaaatgttcagttgcttcatcactggtcaaaacagttcatgcaagacatcaagaagggataggcttactgatggttctagggctgatgcccttcaggaccaagaatatgtcctcacttacgaagataaagatgctgactggatgctcgttggtgatctgccctgggacttgttcaccacattttgccggaaacttaggatcatgagaggctctgatgctgctggcatggctcctccaagaccaccggaacagacagttcggaacaaatgagggcggacagcttacttacctggcgctgaactgaagggagagcgacgctgccttggtcaggccttctttcacttgtgcagtgggaactgcgtcctgctgtctcggacgcccattttgcccacgagctggtcgtcacgtgctgtcgctttttgtctgggaaagatagcgtactgcttgctgtatgatactttcatctgtgttcggaagtttgtagcgcttcatatcctggaagggagtaaagaaaatgtccatgctgtccggtgagaatttcttcc

SEQ ID NO: 9071 - protein, 334 aa, Zea mays subsp. mays
  peptide (1)..(334): Ceres Seq. ID no. 13492848
KSFSRLPPPLLCSARTNKKNSPRPSPLVLLLPQPSLLNPRHSPSFPSPRPATPMPPPLLEPRDYLGAGATSSCCSSSCSSGREGAGPHLALRLGLPGSDDSPGRGADAEHARAHVDAALTLGPAPAPAPAPPRGSAKRGFADSLDRSAKRDGVAADDAAGGVTRVAEAAAGAPPAAKAQVVGWPPVRSYRKNTLAASATKTNGGDEGRSEAGCCYVKVSMDGAPYLRKVDLKTYSSYEDLSLGLEKMFSCFITGQNSSCKTSRRDRLTDGSRADALQDQEYVLTYEDKDADWMLVGDLPWDLFTTFCRKLRIMRGSDAAGMAPPRPPEQTVRNK

SEQ ID NO: 9072 - protein, 281 aa, Zea mays subsp. mays
  peptide (1)..(281): Ceres Seq. ID no. 13492849
MPPPLLEPRDYLGAGATSSCCSSSCSSGREGAGPHLALRLGLPGSDDSPGRGADAEHARAHVDAALTLGPAPAPAPAPPRGSAKRGFADSLDRSAKRDGVAADDAAGGVTRVAEAAAGAPPAAKAQVVGWPPVRSYRKNTLAASATKTNGGDEGRSEAGCCYVKVSMDGAPYLRKVDLKTYSSYEDLSLGLEKMFSCFITGQNSSCKTSRRDRLTDGSRADALQDQEYVLTYEDKDADWMLVGDLPWDLFTTFCRKLRIMRGSDAAGMAPPRPPEQTVRNK

SEQ ID NO: 9073 - DNA, 1466 bp, Zea mays subsp. mays
  misc_feature (1)..(1466): Ceres Seq. ID no. 12578918
  misc_feature (1)..(1466): Ortholog of  Ceres SEQ ID NO 13645078 as cited in SEQ ID NO 51158
gcacgagaccattacctagaacatcctaatcaaaagcattgtggctcctcacttccgcgccgccacccccttcaggtaaggaagaggaggagggcaggatgtcgcaccgtaagttcgagcacccgaggcacggctccctcggcttccttcccaggaagcgctcctcccgccaccgcggcaaggtgaagtcattccccagggatgaccccaagaagccttgccatctcactgccttccttggctacaaggctggcatgactcacattgtccgtgaggttgagaagccaggatccaaactccataagaaggaaacttgtgaggctgttaccatcattgaaacccctcctcttgtcattgttgggctcgtggcatatgtgaagactcctcgtggcctccgcacactcaactctgtttgggcccaacatcttagcgaagaagtgaggagaaggttttacaagaactggtgcaagagcaagaagaaggctttcacaaagtatgctctcaaatatgaaaatgatgctggcaagaaggaaattcagctgcagcttgagaagatgaagaaatatgcttctgttatccgtgtcattgctcatacccagattaggaagatgaagggtttgaagcagaagaaggctcacctgatggagattcaggtcaatggtggtaccattgctgacaaggtggactacggctacaaattttttgagaaagaggtccctgttgatgctgtcttccagaaggatgagatgattgacatcattggtgtgaccaaaggtaaaggttatgagggcgtggtcactcgttggggtgtcacccgccttccccgcaaaacccacaggggtctccgcaaggttgcttgtatcggtgcatggcatcctgctagggtctcctatacagttgcccgtgctggtcagaacgggtaccaccaccgcaccgagatgaacaagaaggtttacaagatcggcaaggctggacaagagacccacgatgcctccacagagtttgacaggaccgagaaggacatcactcccatgggtggcttcccccactatggtatcgtgaagggtgactacctgatgatcaagggatgctgtgtgggtccaaagaagagggtggtgaccctccgccagtccctcctgaagcagacttcccggctggcgctggaggagatcaagctcaagttcatcgacacatcgtccaaatttgggcatggtcgcttccagactaccgatgagaagcagaggttctttggtaagctcaaggcgtaaggtgctgcggtgcagcgacaagtcccatttgtcaaaatcatcaaactgtgaaacttttgtttgttaccttgctgtaccaagttttatagcaggatgatttgggagcatgttctggtcttctatggattgttctacgcttcagaactgcatcgactatgttttgttctattttggttgttttaatgccctaatcattgc

SEQ ID NO: 9074 - protein, 389 aa, Zea mays subsp. mays; identical to SEQ ID NO: 2421
  peptide (1)..(389): Ceres Seq. ID no. 12578919

SEQ ID NO: 9075 - protein, 337 aa, Zea mays subsp. mays; identical to SEQ ID NO: 2422
  peptide (1)..(337): Ceres Seq. ID no. 12578920

SEQ ID NO: 9076 - protein, 237 aa, Zea mays subsp. mays; identical to SEQ ID NO: 2423
  peptide (1)..(237): Ceres Seq. ID no. 12578921

SEQ ID NO: 9077 - DNA, 1013 bp, Zea mays subsp. mays
  misc_feature (1)..(1013): Ceres Seq. ID no. 12356700
  misc_feature (1)..(1013): Ortholog of  Ceres SEQ ID NO 13600110 as cited in SEQ ID NO 0
aattcgcttctctgtcaacttcacttcctcgtcgacgcctccggcccaccaaccatgccggcggctgcggcggcgcagaggctcctcgcggcgagcacgaaaatcatcggcgttgggcgcaactacatagcccactccaaggagctcggcaatccggtccccaaggagcccgtcctgttcctgaagccgacctcgtcgtttctccacgctgggtggcgtcctcctacctaggggtggtgtcgccggggtagcggccaacggatggagtggtagcggcccagggctccgcttggctcgaaggctctgcacctacgacgagagagatgacagggcactagaggaagaagttgagaagaaatttggatggatattgaagataatcttcctaggaactgctggcctagttggttaccaattctttccatacatgggtgataacctgcttcaacaatctatctcgcttttgcgtgtcaaggatcccttgttcaagcggatgggagcttctcgtttagctcgttttgcagtggatgaccaaagaagaatgaaggtggtagagatagggggagctcaggaactgcttaatgtattggaaggtgctaaagatgataaaacacgaaaagaaactctaaaagctcttgctgcgctttcaaaatctgaagaagctgcaggatttttggacaaggtcggcgcctacgctatagtcagttccactcccgactctcaagaatatgctgagatccaaacttacaagaccagtcttctgacggcatttgatcaactgaagtcatgatgtccaaatgccaatgggtatattaagcaacattttaactctgcactttgccgtggcggttaatgttctagtttcttgaatcgactcaatttatctctagaacatgctggacctcctttgttgaccaagtgggttgctgatggaaatgcatgtctggttcatttgtttcaaacaggacagtacattctttccttctgtgggccaataacaagagctttaattt

SEQ ID NO: 9078 - protein, 120 aa, Zea mays subsp. mays
  peptide (1)..(120): Ceres Seq. ID no. 12356701
MGDNLLQQSISLLRVKDPLFKRMGASRLARFAVDDQRRMKVVEIGGAQELLNVLEGAKDDKTRKETLKALAALSKSEEAAGFLDKVGAYAIVSSTPDSQEYAEIQTYKTSLLTAFDQLKS

SEQ ID NO: 9079 - protein, 98 aa, Zea mays subsp. mays
  peptide (1)..(98): Ceres Seq. ID no. 12356702
MGASRLARFAVDDQRRMKVVEIGGAQELLNVLEGAKDDKTRKETLKALAALSKSEEAAGFLDKVGAYAIVSSTPDSQEYAEIQTYKTSLLTAFDQLKS

SEQ ID NO: 9080 - protein, 82 aa, Zea mays subsp. mays
  peptide (1)..(82): Ceres Seq. ID no. 12356703
FASLSTSLPRRRLRPTNHAGGCGGAEAPRGEHENHRRWAQLHSPLQGARQSGPQGARPVPEADLVVSPRWVASSYLGVVSPG

SEQ ID NO: 9081 - DNA, 746 bp, Zea mays subsp. mays
  misc_feature (1)..(746): Ceres Seq. ID no. 12578762
  misc_feature (1)..(746): Ortholog of  Ceres SEQ ID NO 13581889 as cited in SEQ ID NO 50900
  misc_feature (1)..(746): Ortholog of  Ceres SEQ ID NO 13581902 as cited in SEQ ID NO 52223
cacaacgatctcaatctccctagcagcagatcctcgtgcaacgcaaagcgctagccttcctactgtcccgatggcccgcacgaagcagacggcgaggaagtccactggcggcaaggcgccaaggaagcagctggccaccaaggcggcgcgcaagtctgccccggcgaccggcggagtgaagaagccccaccgtttccgccccggcaccgtcgcgctccgggagatccgcaagtaccagaagagcacggagctgctgatccgcaagctgccgttccagcgcctggtgcgtgagatcgcccaggacttcaagaccgaccttcgcttccagagctccgccgtcgccgcgctgcaggaggcgtccgaggcctacctcgtcggtctcttcgaggacaccaacctctgcgccattcacgccaagcgcgtcaccatcatgcccaaggacatccagctcgcccgccgtatccgtgtggagagggcctaggcgtcgtggcggtggaggtcgaagtagtagtcgcagtttctgtcatcaccgtctggctagaaggtgtagagatgtgcccgggttctggagtttgggttatcggtcgaatcatgatgtagttggttcttcacagctgtaatttaactatgacgatgccatggcaatgaagttctcagctatgagttcccgtaaaaaaaaaaaaaaaaaatcgggtggacccggtcaacttcaagctcctaagccactgcctgctggtgagcccatc

SEQ ID NO: 9082 - protein, 159 aa, Zea mays subsp. mays
  peptide (1)..(159): Ceres Seq. ID no. 12578763
TTISISLAADPRATQSASLPTVPMARTKQTARKSTGGKAPRKQLATKAARKSAPATGGVKKPHRFRPGTVALREIRKYQKSTELLIRKLPFQRLVREIAQDFKTDLRFQSSAVAALQEASEAYLVGLFEDTNLCAIHAKRVTIMPKDIQLARRIRVERA

SEQ ID NO: 9083 - protein, 136 aa, Zea mays subsp. mays
  peptide (1)..(136): Ceres Seq. ID no. 12578764
MARTKQTARKSTGGKAPRKQLATKAARKSAPATGGVKKPHRFRPGTVALREIRKYQKSTELLIRKLPFQRLVREIAQDFKTDLRFQSSAVAALQEASEAYLVGLFEDTNLCAIHAKRVTIMPKDIQLARRIRVERA

SEQ ID NO: 9084 - DNA, 1476 bp, Zea mays subsp. mays
  misc_feature (1)..(1476): Ceres Seq. ID no. 12349426
  misc_feature (1)..(1476): Ortholog of  Ceres SEQ ID NO 13658032 as cited in SEQ ID NO 66092
gacaaatcctctcttggacaagccgaaccttcgctcgggtgcctcgggttcagccaacctcgcacatggcgcgctgctccgtcgcgaaaccgctctgcgccaccaccgcgactccccgccttacccgtcgctgccggcagctctccgcgaacgccaccaccccggccatggccaccagtaaagcacggttgccggccctaaacaaaccggccaaaccgccgccgcctctcctctcgcgtccgaagctccccgtgcccaccaacaccgccactgacaccactagcggcaaggattgcaccaagaaaccaccgccggaagctacggactcacatccgccctcgtccggcgccggcgacgtgctccgcctgatggacgcgctgggcatccctcccgacgaggacatctacatatccctcctcagggagtgcgccgacgcagcagaggtggcctccgtgcacgcgcacataaccgctcgtcgcgcctccgatggactcccgtcgccggtcgccaaccggctcctgctttcttacccgcgtgtggggacatcgaagctgcccgccgggtgttcgacggaatgcccaccaccaacggcatggcttgggcgaccatggtgtccgcctactcggatggctgcctccaccatgaagcgatgcgtctgttcgcccacatgtgccatagaacgccggtcctggacggcgattgctactcccatgccatcgtggccgtgctgcggtcatgtacccgtgcaggcgagctacgtctcggtgagcaggtacacgctctcgtcgtcaagaaaggcaggatccacggtgacattggcagctcgctagtgcagctgtactgcgatggaggcggttttcacagaagcgcgcggcgagttctcgcgacgacgatgcagcaccactgtcaggaaccagtccctgaggcggcctggacgagcctgatcacatcctgccaccgtgaaagcctactgagcgaggctgtggatgtcttcagggacatggcgtcctcgggcgttccaaggagcagcttctccctgtcgagcatcctcgcggtgttcgcagagtcacaggacccagggtgctgctgcgggcagcaggtgcacgccgacgccatcaagcgcggcgtggacacgaaccagttcgttggctccgggctcatacacatgtacgcgaagcaagggcggctggcggacgccgccagggcgttcgagacgatcggtggcaagcctgacgccgcgtgcttgagtgccctggccatggcctatgctcgcggcggacggtacagagaggccaccagaatcatgtaccagatgaaagctgccgggatgaatccttctaaggagatggccgatgcggttaggttggcttgtttcagatgatcctgaactagtagtcgagtaggagtgccaaagagtgagttactttgattgtacaattgtgttaagcagacgccagtgcactggtgtctgattcc

SEQ ID NO: 9085 - protein, 275 aa, Zea mays subsp. mays
  peptide (1)..(275): Ceres Seq. ID no. 12349427
QILSWTSRTFARVPRVQPTSHMARCSVAKPLCATTATPRLTRRCRQLSANATTPAMATSKARLPALNKPAKPPPPLLSRPKLPVPTNTATDTTSGKDCTKKPPPEATDSHPPSSGAGDVLRLMDALGIPPDEDIYISLLRECADAAEVASVHAHITARRASDGLPSPVANRLLLSYPRVGTSKLPAGCSTECPPPTAWLGRPWCPPTRMAASTMKRCVCSPTCAIERRSWTAIATPMPSWPCCGHVPVQASYVSVSRYTLSSSRKAGSTVTLAAR

SEQ ID NO: 9086 - protein, 268 aa, Zea mays subsp. mays
  peptide (1)..(268): Ceres Seq. ID no. 12349428
MPTTNGMAWATMVSAYSDGCLHHEAMRLFAHMCHRTPVLDGDCYSHAIVAVLRSCTRAGELRLGEQVHALVVKKGRIHGDIGSSLVQLYCDGGGFHRSARRVLATTMQHHCQEPVPEAAWTSLITSCHRESLLSEAVDVFRDMASSGVPRSSFSLSSILAVFAESQDPGCCCGQQVHADAIKRGVDTNQFVGSGLIHMYAKQGRLADAARAFETIGGKPDAACLSALAMAYARGGRYREATRIMYQMKAAGMNPSKEMADAVRLACFR

SEQ ID NO: 9087 - protein, 262 aa, Zea mays subsp. mays
  peptide (1)..(262): Ceres Seq. ID no. 12349429
MAWATMVSAYSDGCLHHEAMRLFAHMCHRTPVLDGDCYSHAIVAVLRSCTRAGELRLGEQVHALVVKKGRIHGDIGSSLVQLYCDGGGFHRSARRVLATTMQHHCQEPVPEAAWTSLITSCHRESLLSEAVDVFRDMASSGVPRSSFSLSSILAVFAESQDPGCCCGQQVHADAIKRGVDTNQFVGSGLIHMYAKQGRLADAARAFETIGGKPDAACLSALAMAYARGGRYREATRIMYQMKAAGMNPSKEMADAVRLACFR

SEQ ID NO: 9088 - DNA, 1222 bp, Zea mays subsp. mays
  misc_feature (1)..(1222): Ceres Seq. ID no. 12405362
  misc_feature (1)..(1222): Ortholog of  Ceres SEQ ID NO 14303116 as cited in SEQ ID NO 57665
aaaagtctgtcccgttctgttcgtgaacgtgggcctcctcaaccctttcccaccaaaaaatgcggtggcacacacatactgtactgtagcatcggccatggtcgcggccgccgccaccaccacctccaactcggactgacctctccccggtcccagctcccgaacaaaaccctagctaaccctatccgccgatggcgttcgcgacgccgcgcctcctcccgctgccccctcctccggcggcggcatccacgcgggccgtctccgcgcgcaaccacggggggcgcacggcgcccgagctctcgggcccgaccccgcgcgtggtggtcgtcacctccggcaagggcggcgtcggaaagacgaccaccaccgncaacttcgccgcctctctcgcgcgcctcggcctcccagccgtcgccgtcgacgccgatgctggcctccgcaacctcgacctcctgctcggcctcgagaaccgcgtccacctcaccgccgccgacgtcctcgcgggagactgccgactcgaccaggcgctcgtccgccaccgcgcgctccacgacctccacctcctctgcctctccaagccccgctccaagctgcccctcgcgttcggatccaagaccctcacctgggtcgcggacgcgctacgacgctcgaccagcccacccgcattcatcctcatcgactgccccgcaggtgttgatgctgggtttgtcactgccattgcacccgcagaagaggcggtgctcgttaccactcccgacattacggctctccgcgatgctgaccgtgtcgcgggactgctggagtgcgatggcatcaaagacatcaagatcgttgtcaaccgagtgcggccagacctggtgaagggggaggacatgatgtcagcgctggacgtgcaggaaatgctcgggttgcctttactaggcgtggtgccagaggacacggaggtgatccggagtacgaataggggcgtgccgctggtgctgaatgacccgcccacgcctgctggccttgctctggagcaggctacttggagattggtggaaagagatgcgatgacggcggtcatggtcgaagagcaggagaggcccgagaagaaaggaggcggaggcggcttcttctcgttcttcggcggcaggtgatgagtcaagtcagtctttaggctgtagatggtgtacaggctcggagtttatgaatgctttctaggctagtgcccgattcattc

SEQ ID NO: 9089 - protein, 315 aa, Zea mays subsp. mays
  peptide (1)..(315): Ceres Seq. ID no. 12405363
  misc_feature (60)..(60): Xaa is any aa, unknown or other
MAFATPRLLPLPPPPAAASTRAVSARNHGGRTAPELSGPTPRVVVVTSGKGGVGKTTTTXNFAASLARLGLPAVAVDADAGLRNLDLLLGLENRVHLTAADVLAGDCRLDQALVRHRALHDLHLLCLSKPRSKLPLAFGSKTLTWVADALRRSTSPPAFILIDCPAGVDAGFVTAIAPAEEAVLVTTPDITALRDADRVAGLLECDGIKDIKIVVNRVRPDLVKGEDMMSALDVQEMLGLPLLGVVPEDTEVIRSTNRGVPLVLNDPPTPAGLALEQATWRLVERDAMTAVMVEEQERPEKKGGGGGFFSFFGGR

SEQ ID NO: 9090 - protein, 286 aa, Zea mays subsp. mays
  peptide (1)..(286): Ceres Seq. ID no. 12405364
  misc_feature (124)..(124): Xaa is any aa, unknown or other
KSLSRSVRERGPPQPFPTKKCGGTHILYCSIGHGRGRRHHHLQLGLTSPRSQLPNKTLANPIRRWRSRRRASSRCPLLRRRHPRGPSPRATTGGARRPSSRARPRAWWSSPPARAASERRPPPXTSPPLSRASASQPSPSTPMLASATSTSCSASRTASTSPPPTSSRETADSTRRSSATARSTTSTSSASPSPAPSCPSRSDPRPSPGSRTRYDARPAHPHSSSSTAPQVLMLGLSLPLHPQKRRCSLPLPTLRLSAMLTVSRDCWSAMASKTSRSLSTECGQTW

SEQ ID NO: 9091 - DNA, 1122 bp, Zea mays subsp. mays
  misc_feature (1)..(1122): Ceres Seq. ID no. 12360011
  misc_feature (1)..(1122): Ortholog of  Ceres SEQ ID NO 12626036 as cited in SEQ ID NO 69091
atcccccgcaccgcacgtctcagcccacctcctcctaccaccctcgccgcggccgcgccacacaaaagcgtcacgccgtctgacagcggggaaaaaaaaggaggccatggaggagaacattcctcacccgagggaggcacaagggcccaccgtcgcccaaccggccccggcggtcgtcacgccccgcgacgacgctctagctcccgtagcccagctgctgtcgtcctcgggcgacgatgagtcgtccgacgacgagggggagctcgagctggaggtcgagttcgagttcccgttcgtctgcagggactcccccgcgggcacggccgccccggccgacgagctcttcgcggacggccggatcagggccttctacccggtgttcggccgcggcacggccgggtgcgtcccccgtggcggcggcggcggcggcagcggcagctgctgcacggcgctgccggccgctccgccgcgggtgaggggccagctgggacgcctgttccaggaggagacacgggagcgcagcacctccgccagctttacggcgtcgttcgggcccgccacggacgaggacggcggcctggatggcgcggcgccggggagctactgcgtgtggcgcccgggtccgtccgcgtccgcgtcgccctccccgccgccgcccaggaagagtgggtccacggggtccatggcgcggtggcgccgcatcagcgacctcgtcgtgggccgcagccacagcgacggcagggacaagttcctcttcctcgccgccgcgcccaggagggggcccaaggacaaggagcctgccgccactgccccgcccgcggtcgccgcccaccagatggcggcgtacctcgccaggggcgtcccaccgcggcgcacgttcctgccgtaccgcgaggagctcgtgggcttcttcgccaacgtgaacggcatcagtcggagccaccaccgtccgccgttctgacgtcttgtcagtggcctatgccatcggttaattaccctgattaattattcggtaatgtgattagcacttttcttagcagtagtggataagtaggcggtttgtataggtaatgattttgggtggatcacgcgacgcgatgaatggagaggcgttttctgtcg

SEQ ID NO: 9092 - protein, 319 aa, Zea mays subsp. mays
  peptide (1)..(319): Ceres Seq. ID no. 12360012
SPAPHVSAHLLLPPSPRPRHTKASRRLTAGKKKEAMEENIPHPREAQGPTVAQPAPAVVTPRDDALAPVAQLLSSSGDDESSDDEGELELEVEFEFPFVCRDSPAGTAAPADELFADGRIRAFYPVFGRGTAGCVPRGGGGGGSGSCCTALPAAPPRVRGQLGRLFQEETRERSTSASFTASFGPATDEDGGLDGAAPGSYCVWRPGPSASASPSPPPPRKSGSTGSMARWRRISDLVVGRSHSDGRDKFLFLAAAPRRGPKDKEPAATAPPAVAAHQMAAYLARGVPPRRTFLPYREELVGFFANVNGISRSHHRPPF

SEQ ID NO: 9093 - protein, 284 aa, Zea mays subsp. mays
  peptide (1)..(284): Ceres Seq. ID no. 12360013
MEENIPHPREAQGPTVAQPAPAVVTPRDDALAPVAQLLSSSGDDESSDDEGELELEVEFEFPFVCRDSPAGTAAPADELFADGRIRAFYPVFGRGTAGCVPRGGGGGGSGSCCTALPAAPPRVRGQLGRLFQEETRERSTSASFTASFGPATDEDGGLDGAAPGSYCVWRPGPSASASPSPPPPRKSGSTGSMARWRRISDLVVGRSHSDGRDKFLFLAAAPRRGPKDKEPAATAPPAVAAHQMAAYLARGVPPRRTFLPYREELVGFFANVNGISRSHHRPPF

SEQ ID NO: 9094 - DNA, 444 bp, Zea mays subsp. mays
  misc_feature (1)..(444): Ceres Seq. ID no. 12545648
  misc_feature (1)..(444): Ortholog of  Ceres SEQ ID NO 13656161 as cited in SEQ ID NO 64908
  misc_feature (1)..(444): Ortholog of  Ceres SEQ ID NO 13597600 as cited in SEQ ID NO 65142
aaaaccactcggtccgctcccagcgtcccttcgcccacagccagcggcgaactcgatcgagcaggatggggtttatcggcgcgcacggcgtggagacgctgaagcggtataggtacagcggagaggaccgctcggtggtggccaagtacgtgctgcagcccttctggagccgatgcgtcactctcttcccgctctggatgccaccaaacatgatcacacttacaggattttcgtttctagtactatcagcgctgcttggctatatatgttcgcctcaccttgacactgctccccctaggtgggtccatcttgcccatggattacttctcttcttgtaccagacttttgatgctgttgatggtaaacaagcaaggcgtactagctcatcgagtcctcttggagaactttttgatcatggatgtgatgcacttgcgtgtgcttttg

SEQ ID NO: 9095 - protein, 147 aa, Zea mays subsp. mays
  peptide (1)..(147): Ceres Seq. ID no. 13565141
NHSVRSQRPFAHSQRRTRSSRMGFIGAHGVETLKRYRYSGEDRSVVAKYVLQPFWSRCVTLFPLWMPPNMITLTGFSFLVLSALLGYICSPHLDTAPPRWVHLAHGLLLFLYQTFDAVDGKQARRTSSSSPLGELFDHGCDALACAF

SEQ ID NO: 9096 - protein, 126 aa, Zea mays subsp. mays
  peptide (1)..(126): Ceres Seq. ID no. 13565142
MGFIGAHGVETLKRYRYSGEDRSVVAKYVLQPFWSRCVTLFPLWMPPNMITLTGFSFLVLSALLGYICSPHLDTAPPRWVHLAHGLLLFLYQTFDAVDGKQARRTSSSSPLGELFDHGCDALACAF

SEQ ID NO: 9097 - protein, 82 aa, Zea mays subsp. mays
  peptide (1)..(82): Ceres Seq. ID no. 13565143
MPPNMITLTGFSFLVLSALLGYICSPHLDTAPPRWVHLAHGLLLFLYQTFDAVDGKQARRTSSSSPLGELFDHGCDALACAF

SEQ ID NO: 9098 - DNA, 1850 bp, Zea mays subsp. mays
  misc_feature (1)..(1850): Ceres Seq. ID no. 12386893
  misc_feature (1)..(1850): Ortholog of  Ceres SEQ ID NO 14313897 as cited in SEQ ID NO 59695
  misc_feature (1)..(1850): Ortholog of  Ceres SEQ ID NO 13660049 as cited in SEQ ID NO 67010
aaggagcagctgggaaacggagcgccacaagcccacaactctcgcgcaggcttctctcccatctccgcccttcccgaagcagcacggtgcaggccgcggacccgcggtttctccacagaatcccgctccacgcacgtcgcccccgtcgccggcgaggcggctgtgctgctgcgtactcccctggttccaactctgaaccggccaccctctcctgctccgcgacctcgagtaactttttgagtaccagtgatgcaaagggacacaagctctagcgatgtttctgcttctcatgtaggacgtgtaagacgtcgcaaacatccaactgaggctaccacagatgggaatagagctaatggacagccattgcttgtcaatgatcagaacaaatataaatcaatgcttacccgtacgtattctacagtatggatgattggaggctttgcctttattatttatatgggtcatctatatatctgggctatggtggttgtgattcaaatatacatggcaagagaacttttcaatttactcagaaaatccagtgaagagaaacaactgccagggttcagggtcctgaattggcacttctttttcacggcaatgctgtacacttatgggcgctttcttagtcgtcagctggtgaatacagtgacttcagatcacttgctttataaggtcgtcagtggcctaattaagtatcagatgtttatctgctatttcctttatattgcagggtttgtatggtttattttgactctcaagaaaaagacatacaagtatcagttcaaacagtatgcctggacacacatgatacttttaacagtttttgcacagtctgctttcactgtggcaaacatatttgaagggatattctggtttcttttgcctgcttcacttattgtgatcaacgatatttttgcttatttatttgggttctttcttgggagaacaccattaatcaagttgtctccaaagaaaacttgggaaggttttattggtgcatcagtgacaactatcatctctgcgtttctgttagcaaatgtaatgggccattcgcaatggttgacatgcccaagaaaggatctgttgactgggtggctttattgtgatcctggtccaatgtttaagccagagcattactcattgggagagtgggtgccgcattggttcccatggaaagaactagctattatgcctgtgcagtggcatgctttagccctaggtttatttgcatcaataatagcaccatttggaggattttttgcgagtggcttcaagagggcttttaaaattaaggattttggtgacagcatacctgggcatggtggaattactgacagaatggattgtcaaatggttatggcagtgtttgcatacatataccaccaatcattcattgcacctcagaacttctctgttgagataatcttggatcagattataagaaacctaacctatgaggagcaaaaatatgtatatgaacaacttggggaaatgttccgtgagaggcaattggctcattggctgaaagctgagagttagcgtgcttatgaaatgcatgatatgttgtgcatttagttcatgtatggcagcatgccagcatgttatgaatgtatacggagcccttgcccaaaccattgtatagaatggtagaatggagagaatgaatgggttgtaggtgctttattcactctctagtctccactgacgctgcctataattcactccccctgtcatcgtttctgcagtctgtgtaaaagggaacctggaaagttttattctttccacttcgtggtgctgggctcagatcaaatattcgaggattcacaatatatccccgatgttttacc

SEQ ID NO: 9099 - protein, 430 aa, Zea mays subsp. mays
  peptide (1)..(430): Ceres Seq. ID no. 12386894
MQRDTSSSDVSASHVGRVRRRKHPTEATTDGNRANGQPLLVNDQNKYKSMLTRTYSTVWMIGGFAFIIYMGHLYIWAMVVVIQIYMARELFNLLRKSSEEKQLPGFRVLNWHFFFTAMLYTYGRFLSRQLVNTVTSDHLLYKVVSGLIKYQMFICYFLYIAGFVWFILTLKKKTYKYQFKQYAWTHMILLTVFAQSAFTVANIFEGIFWFLLPASLIVINDIFAYLFGFFLGRTPLIKLSPKKTWEGFIGASVTTIISAFLLANVMGHSQWLTCPRKDLLTGWLYCDPGPMFKPEHYSLGEWVPHWFPWKELAIMPVQWHALALGLFASIIAPFGGFFASGFKRAFKIKDFGDSIPGHGGITDRMDCQMVMAVFAYIYHQSFIAPQNFSVEIILDQIIRNLTYEEQKYVYEQLGEMFRERQLAHWLKAES

SEQ ID NO: 9100 - protein, 381 aa, Zea mays subsp. mays
  peptide (1)..(381): Ceres Seq. ID no. 12386895
MLTRTYSTVWMIGGFAFIIYMGHLYIWAMVVVIQIYMARELFNLLRKSSEEKQLPGFRVLNWHFFFTAMLYTYGRFLSRQLVNTVTSDHLLYKVVSGLIKYQMFICYFLYIAGFVWFILTLKKKTYKYQFKQYAWTHMILLTVFAQSAFTVANIFEGIFWFLLPASLIVINDIFAYLFGFFLGRTPLIKLSPKKTWEGFIGASVTTIISAFLLANVMGHSQWLTCPRKDLLTGWLYCDPGPMFKPEHYSLGEWVPHWFPWKELAIMPVQWHALALGLFASIIAPFGGFFASGFKRAFKIKDFGDSIPGHGGITDRMDCQMVMAVFAYIYHQSFIAPQNFSVEIILDQIIRNLTYEEQKYVYEQLGEMFRERQLAHWLKAES

SEQ ID NO: 9101 - protein, 371 aa, Zea mays subsp. mays
  peptide (1)..(371): Ceres Seq. ID no. 12386896
MIGGFAFIIYMGHLYIWAMVVVIQIYMARELFNLLRKSSEEKQLPGFRVLNWHFFFTAMLYTYGRFLSRQLVNTVTSDHLLYKVVSGLIKYQMFICYFLYIAGFVWFILTLKKKTYKYQFKQYAWTHMILLTVFAQSAFTVANIFEGIFWFLLPASLIVINDIFAYLFGFFLGRTPLIKLSPKKTWEGFIGASVTTIISAFLLANVMGHSQWLTCPRKDLLTGWLYCDPGPMFKPEHYSLGEWVPHWFPWKELAIMPVQWHALALGLFASIIAPFGGFFASGFKRAFKIKDFGDSIPGHGGITDRMDCQMVMAVFAYIYHQSFIAPQNFSVEIILDQIIRNLTYEEQKYVYEQLGEMFRERQLAHWLKAES

SEQ ID NO: 9102 - DNA, 943 bp, Zea mays subsp. mays
  misc_feature (1)..(943): Ceres Seq. ID no. 12348152
  misc_feature (1)..(943): Ortholog of  Ceres SEQ ID NO 13662746 as cited in SEQ ID NO 66324
agctcgcctctcctctcattctctcgtgctctccacccgtttcccgcaaaaccctagctctgcgacatgcaccgcggcggcgatcgctccggcggcccctcgagcggcggagaccgctctggagcccggttccagcggggtccctcccgctggtctggcagcagcggcggcggattagggggtagcccgcccaatcgctactcctcccgcggcgcggcagatggaggtggtggagggggcggtggcgggaggttccacccttaccgtggttcttccgactattctagcggcggtggagggtacagaggcggtagtggcgttggtaacgacttcggcgaccagaggcaacgttacggcggcggcactagaggcggaggccgtggggatttccaagatcatgatagtagaagtaactatgtcaaactttttgtcggatctgttccgaggacagcgactgaagaagacgttcgtcctttatttgaggaacatggagatgttcttgaagttgctctaattaaggataggaagaccggtgaacaacaaggtatgctatgtctttgtttttcttgtattatcacaattgagtatctcttttgttttcaggtttctgagaggttataggagcaacaaggttgcatcttctctcagttagattggcggttgttgattttcatttcctgcgcttccattctgtccgtctcctgtggattcagtagaagactagaatggacgcgactaactgcccgccgattactggaacctaactagccacaacttcactgctacacaaggcagcaaatttggtaccaacagctgtgtttagatgatattgaccttctggatgtcctgtagttctagagcaatgagcttgtagtttcacctttgcatctgtgtgccttgattttgttgcaagaacttatataatcttataatgaattaatac

SEQ ID NO: 9103 - protein, 184 aa, Zea mays subsp. mays
  peptide (1)..(184): Ceres Seq. ID no. 12348153
MHRGGDRSGGPSSGGDRSGARFQRGPSRWSGSSGGGLGGSPPNRYSSRGAADGGGGGGGGGRFHPYRGSSDYSSGGGGYRGGSGVGNDFGDQRQRYGGGTRGGGRGDFQDHDSRSNYVKLFVGSVPRTATEEDVRPLFEEHGDVLEVALIKDRKTGEQQGMLCLCFSCIITIEYLFCFQVSERL

SEQ ID NO: 9104 - protein, 97 aa, Zea mays subsp. mays
  peptide (1)..(97): Ceres Seq. ID no. 12348154
MEVVEGAVAGGSTLTVVLPTILAAVEGTEAVVALVTTSATRGNVTAAALEAEAVGISKIMIVEVTMSNFLSDLFRGQRLKKTFVLYLRNMEMFLKLL

SEQ ID NO: 9105 - DNA, 1286 bp, Zea mays subsp. mays
  misc_feature (1)..(1286): Ceres Seq. ID no. 12413176
  misc_feature (1)..(1286): Ortholog of  Ceres SEQ ID NO 14311044 as cited in SEQ ID NO 53643
gcacgagaccattacctagaacatcctaatcgaaaaccaccgttccacgcgtccacggtccacccacacgcaaggtcgcaggtcgcaacccgcgggcggaggggcaggcacaggaccgttgcgttgctgccgccgccggcacgagatcgaggagggatcccccgctctcacgccgctccaggtcgagggccgagcgagatggtgaacaccttcttcctcttctgcgggtgcgtggaccaggccagcgtggcggtggtggagaagtggggccgcttcctccgcctcgccgacccgggcctccacttcttcaaccccctcgccggggagtgcgtcgcgggctccctcaccacacgcgtccagtccctcgacgtccgcgtcgagaccaagaccaaggataatgtcttcgtccaactgatctgcacaatccagtaccgtgttgtcaaggaaaatgcagatgatgctttctatgagttgcagaatccccagcagcaaatccaggcctacgtctttgatgttgttcgggccatagtgccgagaatgaatctggacgatctctttgagcagaagaacgatgtggccaaagctgtattggaggagcttgaaaaggtgatggcagattatggttacagcattgagcacattctcatggttgatatcatccctgacgctgctgttcgtaaggcaatgaacgacataaatgcagcccaaaggcttcaactggcaagtgtttacaagggagaagcagagaagatccttatggtgaagaaagcggaggcagaagcagaggcgaaatatctttctggtgtcggtatcgctaaacagcggcaggcgataaccgacggccttagagagaacatcctgaacttctcacactcggtgtcgggcaccagcgcgaaggaggtcatggacctgatcatggtcacgcagtacttcgacaccatcaaggagctcggggacggctccaagaacaccacgatcttcataccccacggaccaggccacgtgaaggacatcagcgagcagatccgcgacggcatgatgcaggcctcaagcagcaacgtgtaaatcaccgactctctgcacgattggagacggctcggctcaggatgaggcctggagtaccatgttcatagtgttaggttgttgttagtggtaaataatgagtgctggggcttttggcgagtcttgagttacatgcggttgtacaactagtgtggtttgttttatatataaaaatgtatatttacatggttctgctcctggaattttgactttttatggtttgg

SEQ ID NO: 9106 - protein, 354 aa, Zea mays subsp. mays
  peptide (1)..(354): Ceres Seq. ID no. 12413177
ARDHYLEHPNRKPPFHASTVHPHARSQVATRGRRGRHRTVALLPPPARDRGGIPRSHAAPGRGPSEMVNTFFLFCGCVDQASVAVVEKWGRFLRLADPGLHFFNPLAGECVAGSLTTRVQSLDVRVETKTKDNVFVQLICTIQYRVVKENADDAFYELQNPQQQIQAYVFDVVRAIVPRMNLDDLFEQKNDVAKAVLEELEKVMADYGYSIEHILMVDIIPDAAVRKAMNDINAAQRLQLASVYKGEAEKILMVKKAEAEAEAKYLSGVGIAKQRQAITDGLRENILNFSHSVSGTSAKEVMDLIMVTQYFDTIKELGDGSKNTTIFIPHGPGHVKDISEQIRDGMMQASSSNV

SEQ ID NO: 9107 - protein, 288 aa, Zea mays subsp. mays
  peptide (1)..(288): Ceres Seq. ID no. 12413178
MVNTFFLFCGCVDQASVAVVEKWGRFLRLADPGLHFFNPLAGECVAGSLTTRVQSLDVRVETKTKDNVFVQLICTIQYRVVKENADDAFYELQNPQQQIQAYVFDVVRAIVPRMNLDDLFEQKNDVAKAVLEELEKVMADYGYSIEHILMVDIIPDAAVRKAMNDINAAQRLQLASVYKGEAEKILMVKKAEAEAEAKYLSGVGIAKQRQAITDGLRENILNFSHSVSGTSAKEVMDLIMVTQYFDTIKELGDGSKNTTIFIPHGPGHVKDISEQIRDGMMQASSSNV

SEQ ID NO: 9108 - DNA, 852 bp, Zea mays subsp. mays
  misc_feature (1)..(852): Ceres Seq. ID no. 12383140
  misc_feature (1)..(852): Ortholog of  Ceres SEQ ID NO 13599311 as cited in SEQ ID NO 0
agactccagactccagagagatagagcctagagcacagctagccccgccagccatggccgccgcggcgcgcgcgatcatctgcgagctggcgccgcagaaggtgtcgtcgacagcgccgaagaaacgtgacgccgggacgaaggtggtgctccagccccggctctgcacgctgcggtcgtacggcgccggcagcggcgttgtgacgcggaggattctggccggggaggaggacgggagcggggccgccgactcgggcggctcctcggcgtcaccgttcttcgcctcgctcgccaactacatcgagagctcccgcaagagccaggacttcgagaccatctccggccgcctcgccatggtggcgttcgcggcggcagtggccgtggagacgacgacgggcagctcgctgttcaagaagctggacacggtggagatcgaggaggccgcgggggtgtgtgtggcggtggtcgcctgcgccgcggcgttcgcgtgggcgtccagagcgcgcaacaggatcggccagatgttcacgctggggtgcaacgccttcgtcgactccctcatcgacaacatcgtcgaggcgctcttctccgagggcgagctgcaggactggtccgatgacatataaacaaatatgcacatatgtatacgcatatagagaataatagtatttgtagatagagagcacgtatatacagtgtatatatagtaagtagatgaaactgtcaagtgaggtccaagctgtcaagtatatatagcaagtagatgaagctgtcaagtatttatagtaactagttgaagataaagagaaggaatctcatagaatcaatactagaaattacaagtaacccttt

SEQ ID NO: 9109 - protein, 207 aa, Zea mays subsp. mays
  peptide (1)..(207): Ceres Seq. ID no. 12383141
TPDSREIEPRAQLAPPAMAAAARAIICELAPQKVSSTAPKKRDAGTKVVLQPRLCTLRSYGAGSGVVTRRILAGEEDGSGAADSGGSSASPFFASLANYIESSRKSQDFETISGRLAMVAFAAAVAVETTTGSSLFKKLDTVEIEEAAGVCVAVVACAAAFAWASRARNRIGQMFTLGCNAFVDSLIDNIVEALFSEGELQDWSDDI

SEQ ID NO: 9110 - protein, 190 aa, Zea mays subsp. mays
  peptide (1)..(190): Ceres Seq. ID no. 12383142
MAAAARAIICELAPQKVSSTAPKKRDAGTKVVLQPRLCTLRSYGAGSGVVTRRILAGEEDGSGAADSGGSSASPFFASLANYIESSRKSQDFETISGRLAMVAFAAAVAVETTTGSSLFKKLDTVEIEEAAGVCVAVVACAAAFAWASRARNRIGQMFTLGCNAFVDSLIDNIVEALFSEGELQDWSDDI

SEQ ID NO: 9111 - DNA, 984 bp, Zea mays subsp. mays
  misc_feature (1)..(984): Ceres Seq. ID no. 12368845
  misc_feature (1)..(984): Ortholog of  Ceres SEQ ID NO 13597538 as cited in SEQ ID NO 64966
gcacgagaccattacctagaacatcctaatcgaaaaatgatcggtgcaaggcgagacgttggcgacataggaacaggaggcgaagaggcgacggtgcatagctccaatggtgaccctccccgtcgccttctcactatacttctggttgccccttcggtgagggttgccattttatccattactttcttagtggctaccaggccgtttaaaaatgaccaacctcctggaagtatgatgatggatgggtcacctacacccgtcgtgaagactcgcttgtgcaacaagtacaacactgcaaagggatgcaaatgggggacaaatgctactttgcacatggtgaaagggagcttggcaagtctatgatggacaactatatgccaccccaatcgaaccaagacccactggttattttgcgcctccacctatggcctaccctggcttggccactctaactagatttggcgcttctgccacaaccaagatcggtgttgatacgtcctttgcaggtagcatcattgggagggggtggagctaacacaaagcaaatatctttcgtcataggagccaagctggccatctgagaccatgaatcatacaccagcttgaaaacattgaacttgagggcacctttgatcagatcaggaacgctagcgctatggtcagtgagttgattgtcagtgttagtggcattgctcccccacaggtcaagaacccaactgatagaactcatcatggtggaggcataggaagcaacttcaagaccaaaatgtgtgagaacttgtcggtaaatgccactttgcacacagtgagagtgagctgcgcatgcctactgctgcttgagatccatgccttgtttcatacctcgtagtcattagtcaatgtaactctaaacttggccaccgatgatggatttgctggcttctttaggcctacgctactgaattggtgtcttcagtcctactattgaatttactgacttctttc

SEQ ID NO: 9112 - protein, 120 aa, Zea mays subsp. mays
  peptide (1)..(120): Ceres Seq. ID no. 12368846
ARDHYLEHPNRKMIGARRDVGDIGTGGEEATVHSSNGDPPRRLLTILLVAPSVRVAILSITFLVATRPFKNDQPPGSMMMDGSPTPVVKTRLCNKYNTAKGCKWGTNATLHMVKGSLASL

SEQ ID NO: 9113 - protein, 108 aa, Zea mays subsp. mays
  peptide (1)..(108): Ceres Seq. ID no. 12368847
MIGARRDVGDIGTGGEEATVHSSNGDPPRRLLTILLVAPSVRVAILSITFLVATRPFKNDQPPGSMMMDGSPTPVVKTRLCNKYNTAKGCKWGTNATLHMVKGSLASL

SEQ ID NO: 9114 - protein, 70 aa, Zea mays subsp. mays
  peptide (1)..(70): Ceres Seq. ID no. 12368848
MVSELIVSVSGIAPPQVKNPTDRTHHGGGIGSNFKTKMCENLSVNATLHTVRVSCACLLLLEIHALFHTS

SEQ ID NO: 9115 - DNA, 1317 bp, Zea mays subsp. mays
  misc_feature (1)..(1317): Ceres Seq. ID no. 12462269
  misc_feature (1)..(1317): Ortholog of  Ceres SEQ ID NO 15179641 as cited in SEQ ID NO 56414
  misc_feature (1)..(1317): Ortholog of  Ceres SEQ ID NO 15176851 as cited in SEQ ID NO 61348
  misc_feature (1)..(1317): Ortholog of  Ceres SEQ ID NO 14316049 as cited in SEQ ID NO 67036
  misc_feature (1)..(1317): Ortholog of  Ceres SEQ ID NO 14313252 as cited in SEQ ID NO 67134
  misc_feature (1)..(1317): Ortholog of  Ceres SEQ ID NO 14302220 as cited in SEQ ID NO 69121
atatatggccccttcgatccattggccgcatcacactcgccaaccccgtcatcgatctcgtttcaaatccatccatcctcgtttcctccgtcccgcagcatctcaaccccatggccaagatcaagatcgggatcaatgggttcggcaggatcggaaggctggtggccagggtggccctgcagagtgacgatgtcgagctcgtcgccgtgaacgaccccttcatcagcaccgactacatgacctacatgttcaagtacgacactgtgcacggacagtggaagcaccatgaagtcaaggtgaaggactccaaaacccttctctttggtgagaaggaggttgctgtgtttggctgcaggaaccctgaggagatcccgtggggttcggttggtgctgaatatgttgttgagtctactggtgttttcactgaccaagagaaggctgcagctcacttgaagggtggtgccaagaaggttgtcatttctgctcctagcaaggatgcccccatgttcgttgttggtgtcaacgagaaggagtacaagtctgacatcaacattgtctctaatgctagctgcacaaccaactgccttgctccgcttgctaaggtcatcaatgacaagttcggtattgttgagggtctgatgaccactgttcatgccatcactgctacccagaagactgttgatgggccctcatctaaggactggaggggtggaagggctgctagtttcaacatcattcccagcagcactggagctgctaaggctgttggcaaagtgcttcctgtcctcaatggaaagttgactggaatgtctttccgtgtcccaactgtcgatgtttctgttgttgatctaactgttaggcttgagaagtctgccacctatgatgagatcaaggctgcggtcaaggccgaggcagagggtagcctcaagggcattctgggttatgtcgaggaggaccttgtttccaccgatttccagggtgacagcaggtctagcatctttgatgcgaaggctggcattgccttgaacggcaactttgtgaagcttgtgtcctggtacgacaacgagtggggatacagcacccgagtggtcgacctgatccgccacatgaacagcaccaagtaaatgaacaaactgatgaaagcatgcaaagagtgatgaaagcatgcaaagagagttgtgtttcttccccggaagtgcttccgagaataaatttttcttatctgattgtctaaaacctataacgggtgtatcgtagtggttgttatcgttaaacttttaacggtcattctatttcaaaagttttgcattttgactc

SEQ ID NO: 9116 - protein, 373 aa, Zea mays subsp. mays
  peptide (1)..(373): Ceres Seq. ID no. 12462270
IWPLRSIGRITLANPVIDLVSNPSILVSSVPQHLNPMAKIKIGINGFGRIGRLVARVALQSDDVELVAVNDPFISTDYMTYMFKYDTVHGQWKHHEVKVKDSKTLLFGEKEVAVFGCRNPEEIPWGSVGAEYVVESTGVFTDQEKAAAHLKGGAKKVVISAPSKDAPMFVVGVNEKEYKSDINIVSNASCTTNCLAPLAKVINDKFGIVEGLMTTVHAITATQKTVDGPSSKDWRGGRAASFNIIPSSTGAAKAVGKVLPVLNGKLTGMSFRVPTVDVSVVDLTVRLEKSATYDEIKAAVKAEAEGSLKGILGYVEEDLVSTDFQGDSRSSIFDAKAGIALNGNFVKLVSWYDNEWGYSTRVVDLIRHMNSTK

SEQ ID NO: 9117 - protein, 337 aa, Zea mays subsp. mays
  peptide (1)..(337): Ceres Seq. ID no. 12462271
MAKIKIGINGFGRIGRLVARVALQSDDVELVAVNDPFISTDYMTYMFKYDTVHGQWKHHEVKVKDSKTLLFGEKEVAVFGCRNPEEIPWGSVGAEYVVESTGVFTDQEKAAAHLKGGAKKVVISAPSKDAPMFVVGVNEKEYKSDINIVSNASCTTNCLAPLAKVINDKFGIVEGLMTTVHAITATQKTVDGPSSKDWRGGRAASFNIIPSSTGAAKAVGKVLPVLNGKLTGMSFRVPTVDVSVVDLTVRLEKSATYDEIKAAVKAEAEGSLKGILGYVEEDLVSTDFQGDSRSSIFDAKAGIALNGNFVKLVSWYDNEWGYSTRVVDLIRHMNSTK

SEQ ID NO: 9118 - protein, 295 aa, Zea mays subsp. mays
  peptide (1)..(295): Ceres Seq. ID no. 12462272
MTYMFKYDTVHGQWKHHEVKVKDSKTLLFGEKEVAVFGCRNPEEIPWGSVGAEYVVESTGVFTDQEKAAAHLKGGAKKVVISAPSKDAPMFVVGVNEKEYKSDINIVSNASCTTNCLAPLAKVINDKFGIVEGLMTTVHAITATQKTVDGPSSKDWRGGRAASFNIIPSSTGAAKAVGKVLPVLNGKLTGMSFRVPTVDVSVVDLTVRLEKSATYDEIKAAVKAEAEGSLKGILGYVEEDLVSTDFQGDSRSSIFDAKAGIALNGNFVKLVSWYDNEWGYSTRVVDLIRHMNSTK

SEQ ID NO: 9119 - DNA, 1600 bp, Zea mays subsp. mays
  misc_feature (1)..(1600): Ceres Seq. ID no. 12352722
  misc_feature (1)..(1600): Ortholog of  Ceres SEQ ID NO 15171430 as cited in SEQ ID NO 51500
  misc_feature (1)..(1600): Ortholog of  Ceres SEQ ID NO 14304944 as cited in SEQ ID NO 53041
  misc_feature (1)..(1600): Ortholog of  Ceres SEQ ID NO 15170354 as cited in SEQ ID NO 54190
  misc_feature (1)..(1600): Ortholog of  Ceres SEQ ID NO 14307164 as cited in SEQ ID NO 54775
  misc_feature (1)..(1600): Ortholog of  Ceres SEQ ID NO 14307253 as cited in SEQ ID NO 54783
  misc_feature (1)..(1600): Ortholog of  Ceres SEQ ID NO 15172476 as cited in SEQ ID NO 54945
  misc_feature (1)..(1600): Ortholog of  Ceres SEQ ID NO 13594213 as cited in SEQ ID NO 57038
  misc_feature (1)..(1600): Ortholog of  Ceres SEQ ID NO 14312300 as cited in SEQ ID NO 58632
  misc_feature (1)..(1600): Ortholog of  Ceres SEQ ID NO 15225226 as cited in SEQ ID NO 58693
  misc_feature (1)..(1600): Ortholog of  Ceres SEQ ID NO 15176106 as cited in SEQ ID NO 60324
  misc_feature (1)..(1600): Ortholog of  Ceres SEQ ID NO 13654989 as cited in SEQ ID NO 63117
  misc_feature (1)..(1600): Ortholog of  Ceres SEQ ID NO 13584744 as cited in SEQ ID NO 69137
atcctcaacctcatccgcccccgcccgcaccccgcaggcaccatcaccaaaaaggtccccgccttcttcttcttcttcttcttctcctctgcccctgcttgtcgtttgctcgtgctcccccaccccctttctgattcagcaagggttccttccgcggcgcggcgcgtcgccatgggcaactgctggggcgccaagatcagctccgacagcccgtcccgcggcgcctcatccccgtcagggacggcgtccaagttggcgagcaggaacggggcggcggcagccctgagcgggtgcagcagccacgcgtcgtccgcgtccatgctgccgacgccccgcagcgaggacgagatcctggagtcggccaacgtcagggccttcagcttcaacgagctgaggaccgccaccaggaacttcaggccggacagcgtgctgggcgagggcgggttcggatccgtcttcaagggctgggtcgacgagaagacgctcgccccggctaggcccggcacggggatggtcattgccgtcaagaagctcaaccaggatggataccagggccacaaggagtggctgactgaagtgaactaccttggaacgctgtcgcacccctaccttgtgaagctcgttggctactgcctcgaggacgaacagcgcctcctcgtctacgagttcatgccacgcgggagtctggagaaccatctgttcaggaggagctcctatttccagcctctgtcctggaacctacggatgaagattgcgctcggagcagctaaaggcctcgcgtatctccacagcgacgaggctaaagtcatctaccgtgacttcaagacatctaatgtccttctagatgcgaacttcaatgcaaagctctctgatttcgggctggcgaaggatggtccgaccggcgacaagagccatgtctccactagggtgatggggactcacgggtatgcagctccagaataccttgcgacaggtcatctgaccaccaagagcgacgtgtacagctttggggtggtgctcctagagatgctgtcagggcggcgggcgctggacaagaaccgcccgaacggggagcacaacctggtggagtgggctaggccatacctgagaagcaagcggcgcatatttcgcatcctggacccacggctgggcgggcagtactcccttgccagggcgcagaaggctgcggcgctcgccctgcaatgcctctcggtggagtccaggcacaggcccagcatggacgaggtggtcacagcgttagagcagctccaggacaccaaagaaggaggtaaccatcacctacagaagaggccaggcagccggagcttggataacaatggcggcaaagcggcagggaaggggaagcctgctcctcatgtaaaaccagtttgagtgattggattttatatgccagagtatctctctttttttttcccatccatttgtaggtgtaggtaatatagtagggttcttagagggatttgtaaagaggcaggcagagttctggatgttttctgtctattatgtagttttttttacatcttcaagtctctgtaaagtacgctatgtaaatacataatgacatccagttcggagtgcg

SEQ ID NO: 9120 - protein, 463 aa, Zea mays subsp. mays
  peptide (1)..(463): Ceres Seq. ID no. 12352723
ILNLIRPRPHPAGTITKKVPAFFFFFFFSSAPACRLLVLPHPLSDSARVPSAARRVAMGNCWGAKISSDSPSRGASSPSGTASKLASRNGAAAALSGCSSHASSASMLPTPRSEDEILESANVRAFSFNELRTATRNFRPDSVLGEGGFGSVFKGWVDEKTLAPARPGTGMVIAVKKLNQDGYQGHKEWLTEVNYLGTLSHPYLVKLVGYCLEDEQRLLVYEFMPRGSLENHLFRRSSYFQPLSWNLRMKIALGAAKGLAYLHSDEAKVIYRDFKTSNVLLDANFNAKLSDFGLAKDGPTGDKSHVSTRVMGTHGYAAPEYLATGHLTTKSDVYSFGVVLLEMLSGRRALDKNRPNGEHNLVEWARPYLRSKRRIFRILDPRLGGQYSLARAQKAAALALQCLSVESRHRPSMDEVVTALEQLQDTKEGGNHHLQKRPGSRSLDNNGGKAAGKGKPAPHVKPV

SEQ ID NO: 9121 - protein, 406 aa, Zea mays subsp. mays
  peptide (1)..(406): Ceres Seq. ID no. 12352724
MGNCWGAKISSDSPSRGASSPSGTASKLASRNGAAAALSGCSSHASSASMLPTPRSEDEILESANVRAFSFNELRTATRNFRPDSVLGEGGFGSVFKGWVDEKTLAPARPGTGMVIAVKKLNQDGYQGHKEWLTEVNYLGTLSHPYLVKLVGYCLEDEQRLLVYEFMPRGSLENHLFRRSSYFQPLSWNLRMKIALGAAKGLAYLHSDEAKVIYRDFKTSNVLLDANFNAKLSDFGLAKDGPTGDKSHVSTRVMGTHGYAAPEYLATGHLTTKSDVYSFGVVLLEMLSGRRALDKNRPNGEHNLVEWARPYLRSKRRIFRILDPRLGGQYSLARAQKAAALALQCLSVESRHRPSMDEVVTALEQLQDTKEGGNHHLQKRPGSRSLDNNGGKAAGKGKPAPHVKPV

SEQ ID NO: 9122 - protein, 357 aa, Zea mays subsp. mays
  peptide (1)..(357): Ceres Seq. ID no. 12352725
MLPTPRSEDEILESANVRAFSFNELRTATRNFRPDSVLGEGGFGSVFKGWVDEKTLAPARPGTGMVIAVKKLNQDGYQGHKEWLTEVNYLGTLSHPYLVKLVGYCLEDEQRLLVYEFMPRGSLENHLFRRSSYFQPLSWNLRMKIALGAAKGLAYLHSDEAKVIYRDFKTSNVLLDANFNAKLSDFGLAKDGPTGDKSHVSTRVMGTHGYAAPEYLATGHLTTKSDVYSFGVVLLEMLSGRRALDKNRPNGEHNLVEWARPYLRSKRRIFRILDPRLGGQYSLARAQKAAALALQCLSVESRHRPSMDEVVTALEQLQDTKEGGNHHLQKRPGSRSLDNNGGKAAGKGKPAPHVKPV

SEQ ID NO: 9123 - DNA, 1580 bp, Zea mays subsp. mays
  misc_feature (1)..(1580): Ceres Seq. ID no. 12379450
  misc_feature (1)..(1580): Ortholog of  Ceres SEQ ID NO 14313038 as cited in SEQ ID NO 59520
  misc_feature (1)..(1580): Ortholog of  Ceres SEQ ID NO 13595464 as cited in SEQ ID NO 59792
  misc_feature (1)..(1580): Ortholog of  Ceres SEQ ID NO 14316416 as cited in SEQ ID NO 60078
agttgtatcctctcctcctccttggacctcccatcttccttcctcttcgttcgtttctccaaccgaagcttaccggcattcgctcctggttttccggccaagaaccgatttttttccggttccggcgtagcagcaggcagctagcttgccaccagctgattcattgcctctactagtgtttttcctgagctcggtggggtgatcggtcgatcggccgccgctcgagacacgtacgtacgtacgtacccgatcgagggtcgctccaagatgatgatgagcgggaaccggaagcagagggtggcattgtcgccggtgaaggaggccgccgcggtgcccaaggaggaggtgtgggaggtccggcccggcgggatgctggtgcagaagcggagccccgacgcggacccgccgcctgtgcccaccatccgcgtcaaggtcaagttcaacggcgtctaccacgagatctacatcaattcccaggcatccttcggcgagctgaagaagctggtgtcggagaagacgggcctgcacccggacgaccagaaggtggtgtacaaggacaaggagagggactccaaggcgttcctggacatggccggcgtcaaggaccggtccaagatggtgatgctggaggaccccgccgccaaggccaagcgcctcctggaggagcgccggaccagcaaggccgagcgcgccgccaaggccatcgcccgcgtcgccctcgacgtcgacaagctcgccaccaaggtgtcggcgctggagacggtcgcgagcaagggcggcgaggtcgtggacgcggacgtggcgacgctgacggaggcgctgatgcgcgagctggtggagctggactccatcgccgccgacggggacgccaaggcgcagcggcgggcgcaggagaggcgtgtgcagaggcacgtggagacgctggacgccatccgcgccaagaacaaggcggcggcgcccagcagcaacaggacacggcggccagcgcacctcccgccgcgcccgcagaaccagcagcggcggcagttccagccgccggcgcccaccacggcgacggcgccggcgccgcagacccagacggcggcgagctgggactcgttcgacctcctgtcgtcggtgccgccgtcgacgtcggcggcggccccagtgacgagcaccaccacgccgtccccgcggttggagtgggagctcttctagagggctccaggcgccagcctgcctgtctgggccgtgggcccctggccccctctcctcccgccacatgtgtgcttgtccatcggctcggctcggctgggccggtaccttggccatggtgtgcatgtttgtcaatcgccattctttgctttcccgtcccttttgttctttcgttctttcttttttttcctcatgtcctttttattaagtatattgtgcatgatctccatgcatccactaaaaaaggggcaacaactgcagtagctagctagtagtagtgaacacaacagaagcgtgcgtccatggtgtctgtcgtcgtctgcaaataagtggtgtggccttgttgcaaccgtaccgatgatgatgaaggatttttttttttggcc

SEQ ID NO: 9124 - protein, 309 aa, Zea mays subsp. mays
  peptide (1)..(309): Ceres Seq. ID no. 12379451
MMMSGNRKQRVALSPVKEAAAVPKEEVWEVRPGGMLVQKRSPDADPPPVPTIRVKVKFNGVYHEIYINSQASFGELKKLVSEKTGLHPDDQKVVYKDKERDSKAFLDMAGVKDRSKMVMLEDPAAKAKRLLEERRTSKAERAAKAIARVALDVDKLATKVSALETVASKGGEVVDADVATLTEALMRELVELDSIAADGDAKAQRRAQERRVQRHVETLDAIRAKNKAAAPSSNRTRRPAHLPPRPQNQQRRQFQPPAPTTATAPAPQTQTAASWDSFDLLSSVPPSTSAAAPVTSTTTPSPRLEWELF

SEQ ID NO: 9125 - protein, 308 aa, Zea mays subsp. mays
  peptide (1)..(308): Ceres Seq. ID no. 12379452
MMSGNRKQRVALSPVKEAAAVPKEEVWEVRPGGMLVQKRSPDADPPPVPTIRVKVKFNGVYHEIYINSQASFGELKKLVSEKTGLHPDDQKVVYKDKERDSKAFLDMAGVKDRSKMVMLEDPAAKAKRLLEERRTSKAERAAKAIARVALDVDKLATKVSALETVASKGGEVVDADVATLTEALMRELVELDSIAADGDAKAQRRAQERRVQRHVETLDAIRAKNKAAAPSSNRTRRPAHLPPRPQNQQRRQFQPPAPTTATAPAPQTQTAASWDSFDLLSSVPPSTSAAAPVTSTTTPSPRLEWELF

SEQ ID NO: 9126 - protein, 307 aa, Zea mays subsp. mays
  peptide (1)..(307): Ceres Seq. ID no. 12379453
MSGNRKQRVALSPVKEAAAVPKEEVWEVRPGGMLVQKRSPDADPPPVPTIRVKVKFNGVYHEIYINSQASFGELKKLVSEKTGLHPDDQKVVYKDKERDSKAFLDMAGVKDRSKMVMLEDPAAKAKRLLEERRTSKAERAAKAIARVALDVDKLATKVSALETVASKGGEVVDADVATLTEALMRELVELDSIAADGDAKAQRRAQERRVQRHVETLDAIRAKNKAAAPSSNRTRRPAHLPPRPQNQQRRQFQPPAPTTATAPAPQTQTAASWDSFDLLSSVPPSTSAAAPVTSTTTPSPRLEWELF

SEQ ID NO: 9127 - DNA, 756 bp, Zea mays subsp. mays
  misc_feature (1)..(756): Ceres Seq. ID no. 12406829
  misc_feature (1)..(756): Ortholog of  Ceres SEQ ID NO 14302493 as cited in SEQ ID NO 67957
cgccgaggccgcggcgcgcgcctacgacgccgccgcgctccacttccgcgggcccaaggccaagaccaacttccccgtcgcgttcgccgcgcttccgccgccgccgccgcccaagaagccggccgccgtgaccgtgagccccagcagcagcagcaccgtggagtcctcctcctcctcctcctcccgggactcgcccgccacgccgcccagggccgcgtctccgtgccagcaggccccgtcgctcgacctcagcctaggcggcacaccggccatggtggccgcccagccgttcctcttcctggacccgaggctcgcggtgaccgtggccgtgccggcgcccgtgccctaccggccgaccgcggtcgccgccggtgccaacaagcgtgacgcggcatcctgccgtgaagaggagcagagcgacaccgggtcgtcgtcatccgtggtggacgcctccccagcggtcggcgtggggttcgacctcaacatgccgccgccggccgaggtggcgtaggtggaccgaccggtgacacgagacgagacggctccgagaggtcgcgtagatgattagaaaaaagctgtattagtatgaggttgggtacttgatcgttcaatttgccgcgatgggttactgctagccaggtgtacatagacctttttgcatcggcacctaatagctatttgccgatgttacaaaaaaaaagaacgaatcgttttgtagttcgttgtaatatgtaacatattaaccgctaattaaat

SEQ ID NO: 9128 - protein, 169 aa, Zea mays subsp. mays
  peptide (1)..(169): Ceres Seq. ID no. 12406830
AEAAARAYDAAALHFRGPKAKTNFPVAFAALPPPPPPKKPAAVTVSPSSSSTVESSSSSSSRDSPATPPRAASPCQQAPSLDLSLGGTPAMVAAQPFLFLDPRLAVTVAVPAPVPYRPTAVAAGANKRDAASCREEEQSDTGSSSSVVDASPAVGVGFDLNMPPPAEVA

SEQ ID NO: 9129 - protein, 128 aa, Zea mays subsp. mays
  peptide (1)..(128): Ceres Seq. ID no. 12406831
RRGRGARLRRRRAPLPRAQGQDQLPRRVRRASAAAAAQEAGRRDREPQQQQHRGVLLLLLLPGLARHAAQGRVSVPAGPVARPQPRRHTGHGGRPAVPLPGPEARGDRGRAGARALPADRGRRRCQQA

SEQ ID NO: 9130 - DNA, 657 bp, Zea mays subsp. mays
  misc_feature (1)..(657): Ceres Seq. ID no. 12356849
  misc_feature (1)..(657): Ortholog of  Ceres SEQ ID NO 12581709 as cited in SEQ ID NO 54052
  misc_feature (1)..(657): Ortholog of  Ceres SEQ ID NO 13662854 as cited in SEQ ID NO 64786
acaatatcgttgaatacatcgagatcatatcaaaagttctcaaggatggtggggtctggattaatttgggtccccttctgtatcactttgctgattcatatgggccagatgatgatatgtctattgaattaagtttggaagatgtgaaaaaggttgcttaccattatggatttacaatggaggtgagggtttctgcattaaatctattttttttaaagagttgttgtgatagcatacttcgatatgtgatttgcaggtggagaaaatgatcgagactacttacactgcaaacatgaaagcaatgatgcagaatcggtaccgtgcagcattctggacaatgaggaaagatgcatctcggtcaaaagcttgtaagcctctttgaagtgaagatcatccatggcggacgatcaatttgtgccatcattattcactgttgtattcaaactccacacaggccgtgccagactaagttagatagatatatcagatgagctgcctgattcacagaatataattggcttaacataggaaaggaggtactgagccacgctagctagctcatccttttctcctatattacagatattcaaactgtactatggactctgtaagaatgagcaataaactaagcagacagaagttaaaaatagaagtaac

SEQ ID NO: 9131 - protein, 88 aa, Zea mays subsp. mays
  peptide (1)..(88): Ceres Seq. ID no. 12356850
NIVEYIEIISKVLKDGGVWINLGPLLYHFADSYGPDDDMSIELSLEDVKKVAYHYGFTMEVRVSALNLFFLKSCCDSILRYVICRWRK

SEQ ID NO: 9132 - protein, 50 aa, Zea mays subsp. mays
  peptide (1)..(50): Ceres Seq. ID no. 12356851
MSIELSLEDVKKVAYHYGFTMEVRVSALNLFFLKSCCDSILRYVICRWRK

SEQ ID NO: 9133 - protein, 47 aa, Zea mays subsp. mays
  peptide (1)..(47): Ceres Seq. ID no. 12356852
MHLGQKLVSLFEVKIIHGGRSICAIIIHCCIQTPHRPCQTKLDRYIR

SEQ ID NO: 9134 - DNA, 1848 bp, Zea mays subsp. mays
  misc_feature (1)..(1848): Ceres Seq. ID no. 12566326
  misc_feature (1)..(1848): Ortholog of  Ceres SEQ ID NO 13597407 as cited in SEQ ID NO 64106
  misc_feature (1)..(1848): Ortholog of  Ceres SEQ ID NO 14303309 as cited in SEQ ID NO 67739
  misc_feature (1)..(1848): Ortholog of  Ceres SEQ ID NO 15180690 as cited in SEQ ID NO 0
gcacgagaccattacctagaacatcctaatcgaaaaacaatctttcttgtatcactaagctagtggccacaactcgttggcaacgaggaagcagcaataagccgagaagctatgccgccgccatatatggcacaggctgccggcaccgccgatgccactgatgaggctccactgctgctggcctcgtcggcggcggggtcgacgccgtcgccgccagctgcagcaccgcgccggaacaggttcgccttcgtctgcgccacgctcgcctccgtcaccaccatgctacatggctacaacctgacgctgatgagcggcgcggagctgttcatgcgggaggacgtggggctcaccgacggcgaggtcgaggtgctggcggggtccatgaacgtgttcatgctcgcgtccatcctcgccgccggctgagtggccgaccacctgggacgccgccgcaccctcgtgctcgccaacgccttcctcatggccggcgcgctcgccatgtcgctcggcaccagcttcgccgcgctcatggcggcgcgcttcgtcaccagcgtcggctccgggttcgcgcgcgtcgtcgcccccgtctacaacgccgagatatcgcaggcggctacgcgtggcgtcctctcatccatgctcgatatattcatcaacgtcggcatcctgctcagctacgtgtccaactacgcgttcgcgggcctcccggtgcacatcgggtggcgtctcatgtacgccgtcggcgtcatcccgcccgtgctcatcgccgccggggtgctcgtcatcatgccagagtcaccgcggtggctcgcgatgcagggccgccacgccgacgcgcgcgcggtgctgctgcgcacgtcggacagcccggcagacgccgacttccggctcggggagatcaagcgagccgccgacgcgccgtcgcccgctgctgcggcgcgccacggtggcggcggtgtctggagggagctcttcgtccggccatccaccacaaccacgagcgtgcggcgcatcctcggctgcgtcctcggcctgcagttcttcgtgcaggcgtccggcgtcgacgccatcctcctctacagcccgctggtcttcaaggcggtcggcgtggcgtccacctccgccgtgctcggcgccaccgtgtccatcggagccgtcaagacgtgcttcatcctcgtcgccatgctcttcaccgaccgcctcggccggcgcccgctcctcctcgccagcaccgccggcgtcgccgtgaccgtgaccgccctcgccgtgacgctgtgcgtgggcacggcgtcgccggcgacggccgcggcgtgcctggcgtccgtgctggccttcgtggccgcgtactccatcggctacgggtccgtggtgtcgacgtacagcgcggaggtcttgccgctacggctgcgcgcgcagggctccagcctgggcgtggccgtgaacaggctcacgtgcggggtggtcagcatgacgttcatctcgctcgccgacgccatcaccatgcccgggtgcttcttcctctacgctgcggtgacggcggctgcgtttgtgttcgtgtacacgcggctgccggagaccaagggccggagcctagaagacatggaagtgctcttccgcaagtgagggtggccggtggccacgtatagttgccattagcacaaggtcgcgtttggcagagttagtagaaattatccacaattaccagcagatttggaactccggtaccgcgcgctcgtcggtcgcaccgtcgcagtcgcagctacccccacggtcccacctagagatctcaacatcagatttaaacaccatatactacccatacctatgaagttatatctatctctatctccg

SEQ ID NO: 9135 - protein, 380 aa, Zea mays subsp. mays
  peptide (1)..(380): Ceres Seq. ID no. 12566327
MAGALAMSLGTSFAALMAARFVTSVGSGFARVVAPVYNAEISQAATRGVLSSMLDIFINVGILLSYVSNYAFAGLPVHIGWRLMYAVGVIPPVLIAAGVLVIMPESPRWLAMQGRHADARAVLLRTSDSPADADFRLGEIKRAADAPSPAAAARHGGGGVWRELFVRPSTTTTSVRRILGCVLGLQFFVQASGVDAILLYSPLVFKAVGVASTSAVLGATVSIGAVKTCFILVAMLFTDRLGRRPLLLASTAGVAVTVTALAVTLCVGTASPATAAACLASVLAFVAAYSIGYGSVVSTYSAEVLPLRLRAQGSSLGVAVNRLTCGVVSMTFISLADAITMPGCFFLYAAVTAAAFVFVYTRLPETKGRSLEDMEVLFRK

SEQ ID NO: 9136 - protein, 374 aa, Zea mays subsp. mays
  peptide (1)..(374): Ceres Seq. ID no. 12566328
MSLGTSFAALMAARFVTSVGSGFARVVAPVYNAEISQAATRGVLSSMLDIFINVGILLSYVSNYAFAGLPVHIGWRLMYAVGVIPPVLIAAGVLVIMPESPRWLAMQGRHADARAVLLRTSDSPADADFRLGEIKRAADAPSPAAAARHGGGGVWRELFVRPSTTTTSVRRILGCVLGLQFFVQASGVDAILLYSPLVFKAVGVASTSAVLGATVSIGAVKTCFILVAMLFTDRLGRRPLLLASTAGVAVTVTALAVTLCVGTASPATAAACLASVLAFVAAYSIGYGSVVSTYSAEVLPLRLRAQGSSLGVAVNRLTCGVVSMTFISLADAITMPGCFFLYAAVTAAAFVFVYTRLPETKGRSLEDMEVLFRK

SEQ ID NO: 9137 - protein, 364 aa, Zea mays subsp. mays
  peptide (1)..(364): Ceres Seq. ID no. 12566329
MAARFVTSVGSGFARVVAPVYNAEISQAATRGVLSSMLDIFINVGILLSYVSNYAFAGLPVHIGWRLMYAVGVIPPVLIAAGVLVIMPESPRWLAMQGRHADARAVLLRTSDSPADADFRLGEIKRAADAPSPAAAARHGGGGVWRELFVRPSTTTTSVRRILGCVLGLQFFVQASGVDAILLYSPLVFKAVGVASTSAVLGATVSIGAVKTCFILVAMLFTDRLGRRPLLLASTAGVAVTVTALAVTLCVGTASPATAAACLASVLAFVAAYSIGYGSVVSTYSAEVLPLRLRAQGSSLGVAVNRLTCGVVSMTFISLADAITMPGCFFLYAAVTAAAFVFVYTRLPETKGRSLEDMEVLFRK

SEQ ID NO: 9138 - DNA, 1315 bp, Zea mays subsp. mays
  misc_feature (1)..(1315): Ceres Seq. ID no. 12412494
  misc_feature (1)..(1315): Ortholog of  Ceres SEQ ID NO 15224330 as cited in SEQ ID NO 58808
actttataccgcccgcccaccactcccctccccgtttctctctgcttcatccttcgctttcccctgcgccaggcccgccccgcccttccagaacgacatcctccttccccgccccctccgatggggaacccgccggagctgtaccacaagatcctcaacatccccaaggacacctcgccgcacgaaatccgcgccgcgtacaagaacctcgtcaagaagtggcaccccgacaagcacccgccgtcgtccaggccggaggccgaggcgcgcttcaaggccatcagcgaggcctacgaggcgctcctggatcagcaggagaacaggggtgtgttcgagctgtgcaacgacggccgggcgggtgagaggacgcgcggcgccttcggcgacggcggcggtggcggcggcggcggaggaggaggcctcggcgccggcgtcggggcccgcatggaggacgcgcagcgacgggttctgcacgaggagcgcgcccggcacgccggcgagggagttcaagaaggtgtacagctccggcgaccccggcgggcgccgcgccttcgccgagttctccagctccatcgtgcgcaaggcgccaccgctggagcgcaagctcgagtgcaccctcgaggagctctgccgcggctgcaagaaggaggtcagcttcacccgcgacgtcgtcaccaagaacgggtcaaccgtgaagaaggaggtgacacagacggtggtggtgaagccagggtggaggaaagggaagcaggtggtgctggaaggcatgggggacgagcgggcggggtgcctgcccggcgacgccatcctcacggtgtccgagaagaggcacccggcgttcaagcgggtgggcgacgacctggtgctcaaggcggaggtgccgctggtgggcgcgctcacgggctggtccttctcgttccgcctcctcggcggcaggaaggtgagctgctcgttccaggacgaggtcgtccgccccggctacgagaaggtgatcgccggcgagggcatgccggtccccgggcagaagggcgcgcgcggcgacctgagggtcaagttggacgtcgtcttccccaaggagctcaccgcagagcagcgcgccggcctcgccgagatcctcagagggtcctgctgatccatcggccccagttccaagcgtatcaggttttcttggccgtgtccgtgtgttaagttttaatatgtatactcatagcgcgtgtgatgagtatataagtacataaagagagagggggcgtcgttgtacatacaggtcgtttatattatatatatataaggataaaaagaaatatgaaacgtg

SEQ ID NO: 9139 - protein, 395 aa, Zea mays subsp. mays
  peptide (1)..(395): Ceres Seq. ID no. 12412495
TLYRPPTTPLPVSLCFILRFPLRQARPALPERHPPSPPPPMGNPPELYHKILNIPKDTSPHEIRAAYKNLVKKWHPDKHPPSSRPEAEARFKAISEAYEALLDQQENRGVFELCNDGRAGERTRGAFGDGGGGGGGGGGGLGAGVGARMEDAQRRVLHEERARHAGEGVQEGVQLRRPRRAPRLRRVLQLHRAQGATAGAQARVHPRGALPRLQEGGQLHPRRRHQERVNREEGGDTDGGGEARVEEREAGGAGRHGGRAGGVPARRRHPHGVREEAPGVQAGGRRPGAQGGGAAGGRAHGLVLLVPPPRRQEGELLVPGRGRPPRLREGDRRRGHAGPRAEGRARRPEGQVGRRLPQGAHRRAARRPRRDPQRVLLIHRPQFQAYQVFLAVSVC

SEQ ID NO: 9140 - protein, 376 aa, Zea mays subsp. mays
  peptide (1)..(376): Ceres Seq. ID no. 12412496
LYTARPPLPSPFLSASSFAFPCARPAPPFQNDILLPRPLRWGTRRSCTTRSSTSPRTPRRTKSAPRTRTSSRSGTPTSTRRRPGRRPRRASRPSARPTRRSWISRRTGVCSSCATTAGRVRGRAAPSATAAVAAAAEEEASAPASGPAWRTRSDGFCTRSAPGTPAREFKKVYSSGDPGGRRAFAEFSSSIVRKAPPLERKLECTLEELCRGCKKEVSFTRDVVTKNGSTVKKEVTQTVVVKPGWRKGKQVVLEGMGDERAGCLPGDAILTVSEKRHPAFKRVGDDLVLKAEVPLVGALTGWSFSFRLLGGRKVSCSFQDEVVRPGYEKVIAGEGMPVPGQKGARGDLRVKLDVVFPKELTAEQRAGLAEILRGSC

SEQ ID NO: 9141 - protein, 355 aa, Zea mays subsp. mays
  peptide (1)..(355): Ceres Seq. ID no. 12412497
MGNPPELYHKILNIPKDTSPHEIRAAYKNLVKKWHPDKHPPSSRPEAEARFKAISEAYEALLDQQENRGVFELCNDGRAGERTRGAFGDGGGGGGGGGGGLGAGVGARMEDAQRRVLHEERARHAGEGVQEGVQLRRPRRAPRLRRVLQLHRAQGATAGAQARVHPRGALPRLQEGGQLHPRRRHQERVNREEGGDTDGGGEARVEEREAGGAGRHGGRAGGVPARRRHPHGVREEAPGVQAGGRRPGAQGGGAAGGRAHGLVLLVPPPRRQEGELLVPGRGRPPRLREGDRRRGHAGPRAEGRARRPEGQVGRRLPQGAHRRAARRPRRDPQRVLLIHRPQFQAYQVFLAVSVC

SEQ ID NO: 9142 - DNA, 1097 bp, Zea mays subsp. mays
  misc_feature (1)..(1097): Ceres Seq. ID no. 12355286
  misc_feature (1)..(1097): Ortholog of  Ceres SEQ ID NO 13597162 as cited in SEQ ID NO 63955
  misc_feature (1)..(1097): Ortholog of  Ceres SEQ ID NO 14313567 as cited in SEQ ID NO 68074
tcttgaagtgtggaggtgtggtgttaggaacagctatccaccacgccgccacagacgtttcaagcgcgttccacttttttcagacatggtcggcgttctgcaagcatggtgacagtgctgccgtggagctcccgtgccacgaccgcaccctactccgcgcacggtccccgcccacagtccaccccgacgcgctctccacattgcagcctcggctcgtcctcactgaacccgaggggcctcttgccatcgaaatctttaccatttccagggatcatgtcgcctccctgaagcagctctgcggtggcacgagcaccttttgcgccgtcagcgctctcatctggcagtgcgcgtgcgttgcacgacggatcccaccggactctcaggtgcgcgtgatgttcccggccgacgtccgccgccggatgaggccgcccctcccgacccactacttcggcaacgcagtgatcaggctatacgccgctggcccggcaggggacattggcacggcggcgttggcatccgtcgctgcccgcatcaagggcgccgtcgagcggatggatgacgagctggtgcggtccgcgattgactactacgagatggccgagacgaacaagagacggactgggacaggcatcttaccaccgacggacctgaatattaccagctggttgggtaggccacagcacgacgcagattttggctggggaaagccgcaatccatgtcgcgggcggagtctgtccgcggcggctctatgcacttgatgaacgacgacggtggtaccggcaacgtccgcgtgctcgtgtgcttggaggctgaaaatataaaggagctaggacggctgctttatgcaaagctctagcaagctgctagtgctatgcactaaaaataatattaataataataaggtttgttactttgcttaaggggaaccatactttttccctcgcgatttattattattaattatggcagtttgaataatgaaaaccatttgtaattcctgtgacaattagtttatgcgtccacactagaaataaaaacttgtttgtaataaactacagtttttttttgttatggcagtttcaataatgaaatccgt

SEQ ID NO: 9143 - protein, 284 aa, Zea mays subsp. mays
  peptide (1)..(284): Ceres Seq. ID no. 12355287
LKCGGVVLGTAIHHAATDVSSAFHFFQTWSAFCKHGDSAAVELPCHDRTLLRARSPPTVHPDALSTLQPRLVLTEPEGPLAIEIFTISRDHVASLKQLCGGTSTFCAVSALIWQCACVARRIPPDSQVRVMFPADVRRRMRPPLPTHYFGNAVIRLYAAGPAGDIGTAALASVAARIKGAVERMDDELVRSAIDYYEMAETNKRRTGTGILPPTDLNITSWLGRPQHDADFGWGKPQSMSRAESVRGGSMHLMNDDGGTGNVRVLVCLEAENIKELGRLLYAKL

SEQ ID NO: 9144 - protein, 154 aa, Zea mays subsp. mays
  peptide (1)..(154): Ceres Seq. ID no. 12355288
MFPADVRRRMRPPLPTHYFGNAVIRLYAAGPAGDIGTAALASVAARIKGAVERMDDELVRSAIDYYEMAETNKRRTGTGILPPTDLNITSWLGRPQHDADFGWGKPQSMSRAESVRGGSMHLMNDDGGTGNVRVLVCLEAENIKELGRLLYAKL

SEQ ID NO: 9145 - protein, 145 aa, Zea mays subsp. mays
  peptide (1)..(145): Ceres Seq. ID no. 12355289
MRPPLPTHYFGNAVIRLYAAGPAGDIGTAALASVAARIKGAVERMDDELVRSAIDYYEMAETNKRRTGTGILPPTDLNITSWLGRPQHDADFGWGKPQSMSRAESVRGGSMHLMNDDGGTGNVRVLVCLEAENIKELGRLLYAKL

SEQ ID NO: 9146 - DNA, 847 bp, Zea mays subsp. mays
  misc_feature (1)..(847): Ceres Seq. ID no. 12346394
  misc_feature (1)..(847): Ortholog of  Ceres SEQ ID NO 12608262 as cited in SEQ ID NO 57800
agtctggggataataatccacactccacaagcagccatggcgccacccatcacgtccctgtcgtctctcatggcgtcggcgggcaggagggggctgctggcgctgggcgccgggttcctggcctcggccgcgctgctgtccccggcgggcgacgccggcgccacgcgcatcgagtactacgcgacggtcggggacaagatgtgcgacctgagcctcgtcaagtccggcctcgcgtactgcgacgtcgaggtcggcaccggcgtccagcccctcgcgcggcgagctcatcaatgtgcactacaccgcgagatttcccgacggtacgctgttcgacagcagctacaagcgcgggaggccactgacgatgcgcataggcgcaggcaagatcctccgagggcttgaacaggggatcagtggcggcggccggtgtgccgcccatgcttgttggtggaaagcgcaagctgatgatacctgcgtcactggcgtacgggcctgaaccggcaggctgcttctcaggagactgcaacatccccggaaactccacacttctatatgaccttttcctcgtcgggatctacaagtgagccctcgatgacagggaatgttcagaacctaagtgtgtcacacatggagggtttcaggaggaattcttggcggtgaaagcacctgcagaggcagagccacttgcagaagcttctgtactccagagagctacctggattgaataaaatgatgatatataaaccatccttgttacataataacgccattgtggaactttgtaaagaccaatcatattgttgacttatatagcagtttgatacagccaaagcgagcaagttatcgc

SEQ ID NO: 9147 - protein, 133 aa, Zea mays subsp. mays
  peptide (1)..(133): Ceres Seq. ID no. 12346395
SLGIIIHTPQAAMAPPITSLSSLMASAGRRGLLALGAGFLASAALLSPAGDAGATRIEYYATVGDKMCDLSLVKSGLAYCDVEVGTGVQPLARRAHQCALHREISRRYAVRQQLQAREATDDAHRRRQDPPRA

SEQ ID NO: 9148 - protein, 121 aa, Zea mays subsp. mays
  peptide (1)..(121): Ceres Seq. ID no. 12346396
MAPPITSLSSLMASAGRRGLLALGAGFLASAALLSPAGDAGATRIEYYATVGDKMCDLSLVKSGLAYCDVEVGTGVQPLARRAHQCALHREISRRYAVRQQLQAREATDDAHRRRQDPPRA

SEQ ID NO: 9149 - protein, 119 aa, Zea mays subsp. mays
  peptide (1)..(119): Ceres Seq. ID no. 12346397
SGDNNPHSTSSHGATHHVPVVSHGVGGQEGAAGAGRRVPGLGRAAVPGGRRRRHAHRVLRDGRGQDVRPEPRQVRPRVLRRRGRHRRPAPRAASSSMCTTPRDFPTVRCSTAATSAGGH

SEQ ID NO: 9150 - DNA, 1443 bp, Zea mays subsp. mays
  misc_feature (1)..(1443): Ceres Seq. ID no. 12351752
  misc_feature (1)..(1443): Ortholog of  Ceres SEQ ID NO 12583469 as cited in SEQ ID NO 51031
  misc_feature (1)..(1443): Ortholog of  Ceres SEQ ID NO 13597389 as cited in SEQ ID NO 63426
  misc_feature (1)..(1443): Ortholog of  Ceres SEQ ID NO 13595998 as cited in SEQ ID NO 68161
  misc_feature (1)..(1443): Ortholog of  Ceres SEQ ID NO 15180463 as cited in SEQ ID NO 0
atctctagttctctacacaccgacacgcatgcagatcggttgccggggcacgatgaggaccgcgtggccgctgctcctcgtggcgacggcgctgctttcgacttcggcagcaagggccaggaggacctgcaggttccctgccgtcttcaacttcggcgactccaactccgacaccggcggcttctgggcggccttcccggcgcagcagggcccgttcggcatgacgtacttcggcaggccggccggccgcgcctccgacggccgcctcgtcatcgacttcatagcgcaagcgatggggctgccgctgctgagcccctacctgcagtccatagggtcggactaccggcacggcgccaacttcgcgacgctggcgtcgacggcgctgctgcccaacacgtcggtgttcgtcaccgggaccagccccttctccctcggcatccagctcaaccagatgaaggagttcaggaacagagtgctcgcctccaaaggaaacaacggccaactccctggcccggaaatcttgggcgacgctctgtacacaatcgacatcgggcagaacgacttcacctcgaaccttggatccctcggggtcgaaagcgtcaagcgaagcctaccttcagtcgtcagccagatctcctggacgatacagcatcggagctcgcaacttcatggtgttcaacatggcgcccgtaggatgctacccggcattcctcgcggggcttcctcgtgacagcaaggacctggacgagttcgggtgcgtgaaaagctacaacggcggggtcacgtactacaaccagctgctgaacgacagcctagccgagatgaggaagacgctgcaggacgcgtcggtcgtgtacgtcgacaagcatgctgtgacgctcgaactgttccagcacccaaccgctcacgggctgaagcacggggctagagcttgctgcgggtacggcggtggaacctacaatttcgatcgagatgtttattgtggtgacagcaaggtagtgaatggagaagctgcgacggcgggggcttgtgcagacccgcaaaactatgtcagctgggacgggatacatgccactgaagctgcaaatagtaggatagcgtatgctgtgatcagcggctcctattcgtacccacctttcgatctttcaaagctatgtagcccttaggcatcatcagtcgtgaaagggagtacagcatcaccatacaccgcatttctntgaaacaagcagccacatttctttcattgacagcatcaacacacaggacaaaagctacgaactcaagaacgacgcacgcctacaacgagtcacgacgagaacagaggctaaagacctactccctctgccctagaaatgaagtcgtttgacttttttaagacaagtttgactggtttgttttattcaaaatatttatgaaaatatagaaaaaaaacatttgatagtc

SEQ ID NO: 9151 - protein, 242 aa, Zea mays subsp. mays
  peptide (1)..(242): Ceres Seq. ID no. 12351753
SLVLYTPTRMQIGCRGTMRTAWPLLLVATALLSTSAARARRTCRFPAVFNFGDSNSDTGGFWAAFPAQQGPFGMTYFGRPAGRASDGRLVIDFIAQAMGLPLLSPYLQSIGSDYRHGANFATLASTALLPNTSVFVTGTSPFSLGIQLNQMKEFRNRVLASKGNNGQLPGPEILGDALYTIDIGQNDFTSNLGSLGVESVKRSLPSVVSQISWTIQHRSSQLHGVQHGARRMLPGIPRGASS

SEQ ID NO: 9152 - protein, 233 aa, Zea mays subsp. mays
  peptide (1)..(233): Ceres Seq. ID no. 12351754
MQIGCRGTMRTAWPLLLVATALLSTSAARARRTCRFPAVFNFGDSNSDTGGFWAAFPAQQGPFGMTYFGRPAGRASDGRLVIDFIAQAMGLPLLSPYLQSIGSDYRHGANFATLASTALLPNTSVFVTGTSPFSLGIQLNQMKEFRNRVLASKGNNGQLPGPEILGDALYTIDIGQNDFTSNLGSLGVESVKRSLPSVVSQISWTIQHRSSQLHGVQHGARRMLPGIPRGASS

SEQ ID NO: 9153 - protein, 230 aa, Zea mays subsp. mays
  peptide (1)..(230): Ceres Seq. ID no. 12351755
ISSSLHTDTHADRLPGHDEDRVAAAPRGDGAAFDFGSKGQEDLQVPCRLQLRRLQLRHRRLLGGLPGAAGPVRHDVLRQAGRPRLRRPPRHRLHSASDGAAAAEPLPAVHRVGLPARRQLRDAGVDGAAAQHVGVRHRDQPLLPRHPAQPDEGVQEQSARLQRKQRPTPWPGNLGRRSVHNRHRAERLHLEPWIPRGRKRQAKPTFSRQPDLLDDTASELATSWCSTWRP

SEQ ID NO: 9154 - DNA, 1958 bp, Zea mays subsp. mays
  misc_feature (1)..(1958): Ceres Seq. ID no. 12360014
  misc_feature (1)..(1958): Ortholog of  Ceres SEQ ID NO 13584292 as cited in SEQ ID NO 63687
accccttcgccccgtatcgttcccttcctcctctcttttccccaccgccccctttcttggcgtctacccggcgcgaccaggaccgaatcctaaggccgccggccgccgccgccgccgcctgctcccgttggacacggtaaaacctcctccctcctcgtccgtgtcgccggggtccggggtccaagcggctgcgcgcgcggtctcgccgccggcgccgatctgggcgccgccggcgttgaccctgtccgattcgccccgggctgcgagacctctgcctccctgaccggttactcggaacttctactcgcctgtgggatcctccagcggatcagatgagcacatcgacttgagcaccacgctttttggttggaaggcgaatcgtagagctttcctgggtttctctgagggctcttctcagatgtggcgtcctccagagtctaccacatactgtttgaggagtcctggttcttttcggaatccggactaaccaagggctcctactgtgcacgactgcttgacaggatatttcggattattattatgtgcgtgcgagcgcgcgtgtgcgccttctagagagtttggagtaaagaaaccaaccctgcatctgtattctgtctgtctgtgctgcttcgaataagccttgcatctcgctgacttgggatataactatgccgaaggacaggagctcccgcgtttcctcttatgagagccgccgggctggtgcctccccatacttctcatcgtctcatggacagagcagttcttgtcgccggtccgaggagtcttgtggggcagcagcggcggcagcagcaaagcaagctgcagagtgggaggatgttcggtgcccggtgtgcatggaccacccgcacaacgccgtcctgctggtctgctcctcacacgagaagggctgccgccccttcatgtgcgacaccagctcgcggcactcgaactgctatgaccagtaccggaaggcctccaaggattcaaggacagagtgcagcgagtgccagcagcaggttcagctctcgtgcccactgtgccgtgggccggtcagcgattgcatcaaggactacagcgcgcggaggttcatgaacaccaaggtccggtcgtgcaccacggagtcgtgcgagttcaggggcgcctaccaggagctgaggaagcatgctagggtggagcatccaacaggaaggccaatggaggtagaccctgagcggcagcgggactggcgccggatggagcagcaacgggaccttggagacttgatgagcatgctgcgttcagggttcaacagcaatattgaggacgacagtggcgggcttggagacaccgaagaagggggagaggaagctgaaatgactccggcctccataaccatggtcttcatcatgccatctagaggctcaatcatgcagtacctatcggaacgcagcagaacgatcattctggtcagtcggaggcgagcaagcagcagcagcggtggcgacgctgaagccactgctccagacagcgaggaaggtgatgaccctatgccatcggcagaggcatctgctggttcacagcattcttccgaacaagaggaggctgacggtgaccctgcccaatgacgtaagtcagctggcaagaggtgtgccatggcatcttcttagcctgaagatcccgaccaacatggcaacatggtatgtggcgaagaaaaacatggatgcaggtgccaccaaggcgtagccaggacaatctgtctacgcaggaaaatcgaggggaatcagcatcgcgcgaaggcttcagaaacgtggtggcctctagtaccaattctaatgtttccgcggggttctgtggcaatggagagagagaaacaattgggtggtagctatcttgtctgaatggatttcattttccttgcattgtaattctctaatatatattatcatatgaaatagattcggccgtatttgcactgcgtg

SEQ ID NO: 9155 - protein, 311 aa, Zea mays subsp. mays
  peptide (1)..(311): Ceres Seq. ID no. 12360015
MPKDRSSRVSSYESRRAGASPYFSSSHGQSSSCRRSEESCGAAAAAAAKQAAEWEDVRCPVCMDHPHNAVLLVCSSHEKGCRPFMCDTSSRHSNCYDQYRKASKDSRTECSECQQQVQLSCPLCRGPVSDCIKDYSARRFMNTKVRSCTTESCEFRGAYQELRKHARVEHPTGRPMEVDPERQRDWRRMEQQRDLGDLMSMLRSGFNSNIEDDSGGLGDTEEGGEEAEMTPASITMVFIMPSRGSIMQYLSERSRTIILVSRRRASSSSGGDAEATAPDSEEGDDPMPSAEASAGSQHSSEQEEADGDPAQ

SEQ ID NO: 9156 - protein, 249 aa, Zea mays subsp. mays
  peptide (1)..(249): Ceres Seq. ID no. 12360016
MDHPHNAVLLVCSSHEKGCRPFMCDTSSRHSNCYDQYRKASKDSRTECSECQQQVQLSCPLCRGPVSDCIKDYSARRFMNTKVRSCTTESCEFRGAYQELRKHARVEHPTGRPMEVDPERQRDWRRMEQQRDLGDLMSMLRSGFNSNIEDDSGGLGDTEEGGEEAEMTPASITMVFIMPSRGSIMQYLSERSRTIILVSRRRASSSSGGDAEATAPDSEEGDDPMPSAEASAGSQHSSEQEEADGDPAQ

SEQ ID NO: 9157 - protein, 227 aa, Zea mays subsp. mays
  peptide (1)..(227): Ceres Seq. ID no. 12360017
MCDTSSRHSNCYDQYRKASKDSRTECSECQQQVQLSCPLCRGPVSDCIKDYSARRFMNTKVRSCTTESCEFRGAYQELRKHARVEHPTGRPMEVDPERQRDWRRMEQQRDLGDLMSMLRSGFNSNIEDDSGGLGDTEEGGEEAEMTPASITMVFIMPSRGSIMQYLSERSRTIILVSRRRASSSSGGDAEATAPDSEEGDDPMPSAEASAGSQHSSEQEEADGDPAQ

SEQ ID NO: 9158 - DNA, 500 bp, Zea mays subsp. mays
  misc_feature (1)..(500): Ceres Seq. ID no. 1548123
  misc_feature (1)..(500): Ortholog of  Ceres SEQ ID NO 13542155 as cited in SEQ ID NO 64236
gagtcaggcccaggcctaacctcagttcatccgagcagccgaacacgcccgccgccattctacgccctgctgcccaggtcggacggaccctttgccggagacgagcacacgccacagcagagcagcgcgaagcgagagatccaatggcggcggcggaggggcagtgggtgctcatggcaacggggcggacgccgactaacattgcggtgatcaagtactgggggaagcgggacgaggcgctcatcctccccatcaacgacagcatcagcgtaacgctcgaccctgaccatctctccgccaccaccactgtcgccgtcagcccctcattcccttccgaccgcatgtggctcaatggcaaggagatctcgctattaggaggaaggtttcagagctgcctcagagaaatcagaaagcgtgctcgtgactttgaggacaaggagaagggcgtcaagatcaagaaagaggactgggacaagttgcatgttcacatagcctcgtac

SEQ ID NO: 9159 - protein, 166 aa, Zea mays subsp. mays
  peptide (1)..(166): Ceres Seq. ID no. 1548124
VRPRPNLSSSEQPNTPAAILRPAAQVGRTLCRRRAHATAEQREARDPMAAAEGQWVLMATGRTPTNIAVIKYWGKRDEALILPINDSISVTLDPDHLSATTTVAVSPSFPSDRMWLNGKEISLLGGRFQSCLREIRKRARDFEDKEKGVKIKKEDWDKLHVHIASY

SEQ ID NO: 9160 - protein, 119 aa, Zea mays subsp. mays
  peptide (1)..(119): Ceres Seq. ID no. 1548125
MAAAEGQWVLMATGRTPTNIAVIKYWGKRDEALILPINDSISVTLDPDHLSATTTVAVSPSFPSDRMWLNGKEISLLGGRFQSCLREIRKRARDFEDKEKGVKIKKEDWDKLHVHIASY

SEQ ID NO: 9161 - protein, 109 aa, Zea mays subsp. mays
  peptide (1)..(109): Ceres Seq. ID no. 1548126
MATGRTPTNIAVIKYWGKRDEALILPINDSISVTLDPDHLSATTTVAVSPSFPSDRMWLNGKEISLLGGRFQSCLREIRKRARDFEDKEKGVKIKKEDWDKLHVHIASY

SEQ ID NO: 9162 - DNA, 1149 bp, Zea mays subsp. mays; identical to SEQ ID NO: 2130
  misc_feature (1)..(1149): Ceres Seq. ID no. 12406482
  misc_feature (1)..(1149): Ortholog of  Ceres SEQ ID NO 13622393 as cited in SEQ ID NO 1256

SEQ ID NO: 9163 - protein, 226 aa, Zea mays subsp. mays; identical to SEQ ID NO: 2131
  peptide (1)..(226): Ceres Seq. ID no. 12406483

SEQ ID NO: 9164 - protein, 166 aa, Zea mays subsp. mays; identical to SEQ ID NO: 2132
  peptide (1)..(166): Ceres Seq. ID no. 12406484

SEQ ID NO: 9165 - protein, 152 aa, Zea mays subsp. mays; identical to SEQ ID NO: 2133
  peptide (1)..(152): Ceres Seq. ID no. 12406485

SEQ ID NO: 9166 - DNA, 1706 bp, Zea mays subsp. mays
  misc_feature (1)..(1706): Ceres Seq. ID no. 12372627
  misc_feature (1)..(1706): Ortholog of  Ceres SEQ ID NO 13662416 as cited in SEQ ID NO 68746
gcacgagaccattacctagaacatcctaatcgaaaatcgactaacgtctacttctgtgatttcccccggcggcgttgggcgctggtttaggagacgaaaaggcggcgcgcggcggaaaaccctagcttagctcctctccggcgtcaagtgctctccggtttgagggcgcgatgagggtgaaggtgatttcgcgttccaccgacgactacacgcgcgagcgcagccaggacctgcagaaagtattccgcaactatgatccagcgcttcgtagtcaagagaaagctgttgagtatactcgggcactcaatgctgccaagttagagaagatatttgctaagccatttatcggagctatggatgggcatattgacgcggtatcgtgcatggccaaaaaccccaatcatttgaaagcaatattttctggttcaatggatggagatgttcgcctttgggatattgctgcgaggaagacagtttgtcagttccccgggcaccagggtgctgtaagaggtttaacaacatccacagatggtgatcttcttgtatcatgtggcgttgactgcactgttcgactccggaaagttccgatgcttaaaatggtggatactagtgagcgtgctggagataattcccagccatcagcagtttacacctggaagcatgcattctggggtgctgatcaccagtgggacggcaatcttttcgcaactgttggtgctcaagttgatatatgggatcctgacaggtcagagccaataaatagcttcgaatggggtaaagatacggttctttctgtgcgatttgatcctggagactctaatattttgattacgtcgggcagtgatcggagtctgacactctatgacttgcgtatgtcatctccagctagaaagctgataatgaagacaaggtgcaattcagtatgctggaaccctagagagcctatgaacttcactgctgcaaatgaagacacaaactgttactcctttgatgctagaaaattagatgaagcaaaaattgttcacaaaggccatgtttcagcagtgatggatattgactactcaccaacagggcgtgaatttgtcactggttcatatgatagaacagtaaggatttttaattatcttggagaccacagcagagagatttaccacaccaagaggatgcaaagggtgttttgtgtgaagtacaccctatgatgggacctatttagtctctggcagtgatgatacaaatcttcgtctgtggaagtccaaagcttcagaacaacttggagttcttcttccacgggagcgcaaaaagcaagagtaccaggatgctttgaaggagcggtacaagcatctcccagaagtcaagcggattgtaaggcatagacatctaccgaagccaatctacaaggcagccaacctacggcgtacgatgatcgaagctgaaagccgtaaagaggaaaggaggcgaaagcacagtgctcccgggagcatgcctgtgcagcccttcaggaagcggagaatcatcagagaagttgagtagacatgcggtttgcattgcatggtcgtggtacacgtttgtgtttctgaggcgatggagttgagagaatacatgatgtttcctttgggagttgagctccagttttgcctttcgtactacatatatgtgttccatcaatcagtttgtttgactagttattattgtgtatttgaaatacc

SEQ ID NO: 9167 - protein, 342 aa, Zea mays subsp. mays
  peptide (1)..(342): Ceres Seq. ID no. 12372628
MRVKVISRSTDDYTRERSQDLQKVFRNYDPALRSQEKAVEYTRALNAAKLEKIFAKPFIGAMDGHIDAVSCMAKNPNHLKAIFSGSMDGDVRLWDIAARKTVCQFPGHQGAVRGLTTSTDGDLLVSCGVDCTVRLRKVPMLKMVDTSERAGDNSQPSAVYTWKHAFWGADHQWDGNLFATVGAQVDIWDPDRSEPINSFEWGKDTVLSVRFDPGDSNILITSGSDRSLTLYDLRMSSPARKLIMKTRCNSVCWNPREPMNFTAANEDTNCYSFDARKLDEAKIVHKGHVSAVMDIDYSPTGREFVTGSYDRTVRIFNYLGDHSREIYHTKRMQRVFCVKYTL

SEQ ID NO: 9168 - protein, 281 aa, Zea mays subsp. mays
  peptide (1)..(281): Ceres Seq. ID no. 12372629
MDGHIDAVSCMAKNPNHLKAIFSGSMDGDVRLWDIAARKTVCQFPGHQGAVRGLTTSTDGDLLVSCGVDCTVRLRKVPMLKMVDTSERAGDNSQPSAVYTWKHAFWGADHQWDGNLFATVGAQVDIWDPDRSEPINSFEWGKDTVLSVRFDPGDSNILITSGSDRSLTLYDLRMSSPARKLIMKTRCNSVCWNPREPMNFTAANEDTNCYSFDARKLDEAKIVHKGHVSAVMDIDYSPTGREFVTGSYDRTVRIFNYLGDHSREIYHTKRMQRVFCVKYTL

SEQ ID NO: 9169 - protein, 271 aa, Zea mays subsp. mays
  peptide (1)..(271): Ceres Seq. ID no. 12372630
MAKNPNHLKAIFSGSMDGDVRLWDIAARKTVCQFPGHQGAVRGLTTSTDGDLLVSCGVDCTVRLRKVPMLKMVDTSERAGDNSQPSAVYTWKHAFWGADHQWDGNLFATVGAQVDIWDPDRSEPINSFEWGKDTVLSVRFDPGDSNILITSGSDRSLTLYDLRMSSPARKLIMKTRCNSVCWNPREPMNFTAANEDTNCYSFDARKLDEAKIVHKGHVSAVMDIDYSPTGREFVTGSYDRTVRIFNYLGDHSREIYHTKRMQRVFCVKYTL

SEQ ID NO: 9170 - DNA, 849 bp, Zea mays subsp. mays
  misc_feature (1)..(849): Ceres Seq. ID no. 12346977
  misc_feature (1)..(849): Ortholog of  Ceres SEQ ID NO 14302035 as cited in SEQ ID NO 51855
  misc_feature (1)..(849): Ortholog of  Ceres SEQ ID NO 14301432 as cited in SEQ ID NO 56425
aagcccactttccccagtactctactcacccacccactcacggactcatctactgagcagcgcggtgggcatccgagcgagagggcgagcgcggaaggatcggaattccgaaggttgggcatggaggcgagcggcgagaaggctgcggtggtgcgacggctgatggaggcgaaggaggtgtccgggaagaccttctcgggaatcgccgccgagacgggtctcaccaacgtctacgtggcgcagctgctgcggcgccaggcgcagctcaaggccgacacggtgcccgcgctgagggcggccctgcccacgctcacggacgacctcatcgaactcatgatgcagccgcccttccggtcctaccaccccaacatcgtccacgagcccgccatttacagattgaatgaaggctgttatgcattttggagagagcatcaaggaaatcatcaatgaggagtttggtgatggaatcatgtcagccatagacttctattgttcagttgacaaggttgaaggggccgacggaaaagatcgtgtggtggtcacatttgatgggaagtatctaccttacactgaacagaaatctgaacatatgatgtctaggccaacccgcaagacatcttgatgtggctggtgaggaggagaaacatgatcgtagtggttggtatcgggctcagcaaggatcgagcatgccattttctttgtgtagtccaaatcatcaacacaataaacagacctatattgatgataactgtcaaaaggaacattaaagtcaatgttctacctggcatgattgctggactgtattggatgatgctgagataaaaagagagaaaaagtgaaacaaactgg

SEQ ID NO: 9171 - protein, 149 aa, Zea mays subsp. mays
  peptide (1)..(149): Ceres Seq. ID no. 12346978
KPTFPSTLLTHPLTDSSTEQRGGHPSERASAEGSEFRRLGMEASGEKAAVVRRLMEAKEVSGKTFSGIAAETGLTNVYVAQLLRRQAQLKADTVPALRAALPTLTDDLIELMMQPPFRSYHPNIVHEPAIYRLNEGCYAFWREHQGNHQ

SEQ ID NO: 9172 - protein, 109 aa, Zea mays subsp. mays
  peptide (1)..(109): Ceres Seq. ID no. 12346979
MEASGEKAAVVRRLMEAKEVSGKTFSGIAAETGLTNVYVAQLLRRQAQLKADTVPALRAALPTLTDDLIELMMQPPFRSYHPNIVHEPAIYRLNEGCYAFWREHQGNHQ

SEQ ID NO: 9173 - protein, 95 aa, Zea mays subsp. mays
  peptide (1)..(95): Ceres Seq. ID no. 12346980
MEAKEVSGKTFSGIAAETGLTNVYVAQLLRRQAQLKADTVPALRAALPTLTDDLIELMMQPPFRSYHPNIVHEPAIYRLNEGCYAFWREHQGNHQ

SEQ ID NO: 9174 - DNA, 1583 bp, Zea mays subsp. mays
  misc_feature (1)..(1583): Ceres Seq. ID no. 12369718
  misc_feature (1)..(1583): Ortholog of  Ceres SEQ ID NO 15176057 as cited in SEQ ID NO 56363
  misc_feature (1)..(1583): Ortholog of  Ceres SEQ ID NO 14316269 as cited in SEQ ID NO 60082
aaatcggcattcacgactcacgagcttcaatcagttaccagtctctagctctcctcgtgctgcttgcttctggaccatcgatggaggcctacgcggcaacggcatcgccacccacgacgacagccatgtgtgtggacaagctcagccaccagctcttctccctgctcgagagcaggctcctcggcgggtggtgcccgtccgtccccgggacgccggcgcgggcgctcctcgacggcggccgcgtgcgggtgctcgccatcgacggctgcggcgcgggcgcagaggacgcgctcctggccgccgcggcgctcgcgaggctcgaggccaagctgcgcgaccgcacgggggaccccgacgcgcgcgtcgcggacttcttcgacgtggccgccggcgccggcgcgggaggcgtcctcgccgcgatgctgctcctgaggggcgccgacggccggccgcggtactccggcgcaggaggcgctggcgttcttcgccgggagcgtcgggaccaaaggttggtgcggccggcgcgggcggtgggcgaagctcttccgccgcggttcccgaggcggcgaccgcacgctccgccgcgtgttcggggacgccacgctcagggacaccgtcgcgccgctgctcgtgccgtgctacgacctcgccacggccgcgcccttcgtgttctcgcgcgccgacgccgtcgagagcgacaccttcgacttccgcctgcgcgacgtctgcgccgccgcctgcgccgcgggcggcgcggtcgcgccagtcaggtcggtggacggcctcacggccgtcgccgcggcgtccgggggcgtggcggccatgtgcaacccggccggggccgccatcacgcacgcgctccacaacaagcaggagttccccctcgccaccggcgtcgacgacctcctcgtgctctccatcggcgccggcgcctccgtcgccaacggttcgagcacgccgatgcccgcacgctctccgtcgccgcgggagctggcgcgcgtaaccgccgagggcgtcgcggacatggtggacgaatcattgggcatggcgttcgggcgcgcgcgcggaagcaactacgtgcgcatccaggccggtaaggcgctggtcccgatccgcgccgacgaagcggccgtggccgccgaagcgatgctagcgcagcggaacgtggagtcggtgctgttccgcgagcggaggctgtcggagtggacgaacgccgagaaggtggacgcgctggccgcggagctggtcaaggagcaggagcggcggaggcgcagcccgcttccgaacgtggctatcaaacaggtcggcacaccgccgcggctgtcgtccgcgaccactgcttcgtcgggcactgggacggccaggacggcgtcgacgatgccgtcgccggcgtcatgggagtcacgcaggtagtagttgtgttgattttaggcggtaattgacgtgtgtacatgcatatatgaaatgcaaagctaggagtggggtgtgttgtttttcttctttgaacggacgctcaatcctgcgtgcaactcttcacgtttctagcaaaacgcataaaaaagcgctggctgtcatcctacctt

SEQ ID NO: 9175 - protein, 364 aa, Zea mays subsp. mays
  peptide (1)..(364): Ceres Seq. ID no. 12369719
IGIHDSRASISYQSLALLVLLASGPSMEAYAATASPPTTTAMCVDKLSHQLFSLLESRLLGGWCPSVPGTPARALLDGGRVRVLAIDGCGAGAEDALLAAAALARLEAKLRDRTGDPDARVADFFDVAAGAGAGGVLAAMLLLRGADGRPRYSGAGGAGVLRRERRDQRLVRPARAVGEALPPRFPRRRPHAPPRVRGRHAQGHRRAAARAVLRPRHGRALRVLARRRRRERHLRLPPARRLRRRLRRGRRGRASQVGGRPHGRRRGVRGRGGHVQPGRGRHHARAPQQAGVPPRHRRRRPPRALHRRRRLRRQRFEHADARTLSVAAGAGARNRRGRRGHGGRIIGHGVRARARKQLRAHPGR

SEQ ID NO: 9176 - protein, 338 aa, Zea mays subsp. mays
  peptide (1)..(338): Ceres Seq. ID no. 12369720
MEAYAATASPPTTTAMCVDKLSHQLFSLLESRLLGGWCPSVPGTPARALLDGGRVRVLAIDGCGAGAEDALLAAAALARLEAKLRDRTGDPDARVADFFDVAAGAGAGGVLAAMLLLRGADGRPRYSGAGGAGVLRRERRDQRLVRPARAVGEALPPRFPRRRPHAPPRVRGRHAQGHRRAAARAVLRPRHGRALRVLARRRRRERHLRLPPARRLRRRLRRGRRGRASQVGGRPHGRRRGVRGRGGHVQPGRGRHHARAPQQAGVPPRHRRRRPPRALHRRRRLRRQRFEHADARTLSVAAGAGARNRRGRRGHGGRIIGHGVRARARKQLRAHPGR

SEQ ID NO: 9177 - protein, 333 aa, Zea mays subsp. mays
  peptide (1)..(333): Ceres Seq. ID no. 12369721
NRHSRLTSFNQLPVSSSPRAACFWTIDGGLRGNGIATHDDSHVCGQAQPPALLPAREQAPRRVVPVRPRDAGAGAPRRRPRAGARHRRLRRGRRGRAPGRRGAREARGQAARPHGGPRRARRGLLRRGRRRRRGRRPRRDAAPEGRRRPAAVLRRRRRWRSSPGASGPKVGAAGAGGGRSSSAAVPEAATARSAACSGTPRSGTPSRRCSCRATTSPRPRPSCSRAPTPSRATPSTSACATSAPPPAPRAARSRQSGRWTASRPSPRRPGAWRPCATRPGPPSRTRSTTSRSSPSPPASTTSSCSPSAPAPPSPTVRARRCPHALRRRGSWRA

SEQ ID NO: 9178 - DNA, 1115 bp, Zea mays subsp. mays
  misc_feature (1)..(1115): Ceres Seq. ID no. 12353071
  misc_feature (1)..(1115): Ortholog of  Ceres SEQ ID NO 15173035 as cited in SEQ ID NO 56029
  misc_feature (1)..(1115): Ortholog of  Ceres SEQ ID NO 12608745 as cited in SEQ ID NO 58289
acacacgcgcaccaaagccaagcgcccaagcccagcactcgacaccaccacagcgcgcagccacgctcacgcacaccgagctgcgggagtggagtagtggaccgatggggagcagcgggggcagcagcgagcacttcctgcggcagctgagttcgagcgacggcggcagcgcgccgcaccatctgctgcagcgagagtgggagtgcggcggcgtcaccggcagcggcagcaggcgcgggtcgcggaagaagaccggggcgcggggacaccgccgccgcggcggcgggttctgcagggcggaggaggctgcgccggggcggaagcgggtaatggtggtggtggaccagagctccggcgccaagcacgccatgttgtgggcgctcacccacgtggccaacaagggcgacttcctcaccctgctccacgtcctgccgccggagagcggccacagcagccgcggtgctgcggaggacgcctccgcgctcgccaactccctcggcgcgctttgcaaggcctgcaagcctgaggtcgaggtggaggcgcctgtgatccaggggcccaagctgccgaccatcctcagccaggtgaagaagctggaggcgtccgtgctggtgctgagccaacgcagcccctcgcctttctgctgcttcccgcggagcagcagcgaggagctcgtggaggagtgcatcgaccgggcggagtgcctgacgctggcagtgcggcgggcaaagcaagggcgtcggcggctacctcgtcagcacccggtggcagaagaacttctggctcctcgcgtgatccacaaccatattcccccccttctttggaaggcgtttggtttgagtctgaaagcatgggatggaacggaacgggctgggaaatggcgtttggttcagggacaagagggttgggaattgggatcgcctacaggtcggagggacgggatagtcctctatatatgaaagtcgtttcttccgtcatcagtcttcttcctcgcgtccgtgtgtcctgttcttcttcctcgccagttgtctctcatcctgtttctctcaacgttgcctgatgcccctaatatgctctccagaacgctggaagcaaacgaacttgatttgatgtcg

SEQ ID NO: 9179 - protein, 318 aa, Zea mays subsp. mays
  peptide (1)..(318): Ceres Seq. ID no. 12353072
TRAPKPSAQAQHSTPPQRAATLTHTELREWSSGPMGSSGGSSEHFLRQLSSSDGGSAPHHLLQREWECGGVTGSGSRRGSRKKTGARGHRRRGGGFCRAEEAAPGRKRVMVVVDQSSGAKHAMLWALTHVANKGDFLTLLHVLPPESGHSSRGAAEDASALANSLGALCKACKPEVEVEAPVIQGPKLPTILSQVKKLEASVLVLSQRSPSPFCCFPRSSSEELVEECIDRAECLTLAVRRAKQGRRRLPRQHPVAEELLAPRVIHNHIPPLLWKAFGLSLKAWDGTERAGKWRLVQGQEGWELGSPTGRRDGIVLYI

SEQ ID NO: 9180 - protein, 284 aa, Zea mays subsp. mays
  peptide (1)..(284): Ceres Seq. ID no. 12353073
MGSSGGSSEHFLRQLSSSDGGSAPHHLLQREWECGGVTGSGSRRGSRKKTGARGHRRRGGGFCRAEEAAPGRKRVMVVVDQSSGAKHAMLWALTHVANKGDFLTLLHVLPPESGHSSRGAAEDASALANSLGALCKACKPEVEVEAPVIQGPKLPTILSQVKKLEASVLVLSQRSPSPFCCFPRSSSEELVEECIDRAECLTLAVRRAKQGRRRLPRQHPVAEELLAPRVIHNHIPPLLWKAFGLSLKAWDGTERAGKWRLVQGQEGWELGSPTGRRDGIVLYI

SEQ ID NO: 9181 - protein, 209 aa, Zea mays subsp. mays
  peptide (1)..(209): Ceres Seq. ID no. 12353074
MVVVDQSSGAKHAMLWALTHVANKGDFLTLLHVLPPESGHSSRGAAEDASALANSLGALCKACKPEVEVEAPVIQGPKLPTILSQVKKLEASVLVLSQRSPSPFCCFPRSSSEELVEECIDRAECLTLAVRRAKQGRRRLPRQHPVAEELLAPRVIHNHIPPLLWKAFGLSLKAWDGTERAGKWRLVQGQEGWELGSPTGRRDGIVLYI

SEQ ID NO: 9182 - DNA, 1876 bp, Zea mays subsp. mays
  misc_feature (1)..(1876): Ceres Seq. ID no. 12407639
  misc_feature (1)..(1876): Ortholog of  Ceres SEQ ID NO 13599900 as cited in SEQ ID NO 531
  misc_feature (1)..(1876): Ortholog of  Ceres SEQ ID NO 14310498 as cited in SEQ ID NO 55066
  misc_feature (1)..(1876): Ortholog of  Ceres SEQ ID NO 15176759 as cited in SEQ ID NO 59678
  misc_feature (1)..(1876): Ortholog of  Ceres SEQ ID NO 15172875 as cited in SEQ ID NO 60423
  misc_feature (1)..(1876): Ortholog of  Ceres SEQ ID NO 13596509 as cited in SEQ ID NO 62004
  misc_feature (1)..(1876): Ortholog of  Ceres SEQ ID NO 13659971 as cited in SEQ ID NO 67565
  misc_feature (1)..(1876): Ortholog of  Ceres SEQ ID NO 13500385 as cited in SEQ ID NO 67583
agcaaatcccgtgtgccgcactggccgagcccacattcgaaccaaagtccccccgggcccccccaaggaaaaccatgtgccgcgcccgccacgttcccacgcgccactaaatcagcagcgcccggccgcccggagctgccagtagcggcaacagcaaaacaagaagcagccagctaccggagcactagtaaacagtaagcagcagagagcatggcgagatcagggcgggaagcggagcccggagaggaggaacggaagctggtgctgggcaagtacgagctgggccgcctgctggggcagggcaccttcgccaaggtttactacgcgagggacctgagcgccggcgccggcacgggccacagctgcagcgtagccatcaaggtgatcgacaaggcgcggctgcggcgcacggaggggatggtggagcagctgcgccgggagatctccatcatgcggatggtgcggcaccccaacgtggtgggcatccgggaggtgctcgccagccgctcccgcgtcttcgtcgtcatggagtacgcgcgcggcggggagctcttcgccaaggtggcccggggccgcctcgacgaggaccacgcgcgccgctacttccagcagctggtcgccgccgtcggcttctgccaccgccgcggcgtcgcgcaccgggacctcaagcccgagaacctgctgctggacgaggcggggcggctcaaggtcaccgacttcgggctggccgcgctgcccgagcagctgcgccacgacggcctgctccacacgcagtgcggcacccccgcgtacgtcgcgcccgaggtgctcaggaagcgcggctacgacggcgcccgcgccgacctctggtcctgcggcgtcgtgctctacgtcctcctctgcggcttcctcccgttccagcacgacaactacgtcaagttgtaccagaagatcttcaaggccgactaccaggtgccgccctgggtctccggcgacgcgcgccgcctcatcgcgcgcctgctcgtcgtcgaccccgccaagcgcgcctccatcgccgagatcatgtgcacgccgtggttcaggaagggcttcgtgccgcccgtcctttcgcccccggtgacgcccaagaaacagcagctggacgaaggcgctgccctcttcgacaacgacgacgacgacaacagcaacagcaaccactctggcgccacctcccctcggtcgtgcaacgcgttccagctcatctcgtccatgtcctccgggttcgacctgtcggggctgttcgagagcgagcagaagaccgcgaccgtgttcacggcccgcgcgccggcggccaccgtggtggagaagctggagtccgtggcgcgcgccctaggattcgaggtcaccagggggaaaggctggaaggtgaggatggaggccaaggccgagggcacgaacggacggctcgcggccaccgccgaggtgctcgaggtggccgtggacgtgaccgtggtcgagttcgtgcacgacgccggggacgcgctggactttaacaagttctgcgccgtcgacgtccgcccggggctcacggagatcgtctgggcgtggcagggcgacagccccgccgccgccgtcggcaccgcgtgaacaagcgtccccgtctgtcacgtggaagttgtagcaactttgcgtaggagttaaacacggctgcactggcaccagctttttatagcatgtaaagtttcaagttctcgtcgttgcttcgagactgccatggtggctagttcgttgtgtgccatatgctgtacaggaaggaaagagtcgaatcgagccggggagttttcgatcgacttgccaatttttgtacgatcataacctgtattttctggagatgtgtgcatacaaaattttgcccgtg

SEQ ID NO: 9183 - protein, 464 aa, Zea mays subsp. mays
  peptide (1)..(464): Ceres Seq. ID no. 12407640
MARSGREAEPGEEERKLVLGKYELGRLLGQGTFAKVYYARDLSAGAGTGHSCSVAIKVIDKARLRRTEGMVEQLRREISIMRMVRHPNVVGIREVLASRSRVFVVMEYARGGELFAKVARGRLDEDHARRYFQQLVAAVGFCHRRGVAHRDLKPENLLLDEAGRLKVTDFGLAALPEQLRHDGLLHTQCGTPAYVAPEVLRKRGYDGARADLWSCGVVLYVLLCGFLPFQHDNYVKLYQKIFKADYQVPPWVSGDARRLIARLLVVDPAKRASIAEIMCTPWFRKGFVPPVLSPPVTPKKQQLDEGAALFDNDDDDNSNSNHSGATSPRSCNAFQLISSMSSGFDLSGLFESEQKTATVFTARAPAATVVEKLESVARALGFEVTRGKGWKVRMEAKAEGTNGRLAATAEVLEVAVDVTVVEFVHDAGDALDFNKFCAVDVRPGLTEIVWAWQGDSPAAAVGTA

SEQ ID NO: 9184 - protein, 395 aa, Zea mays subsp. mays
  peptide (1)..(395): Ceres Seq. ID no. 12407641
MVEQLRREISIMRMVRHPNVVGIREVLASRSRVFVVMEYARGGELFAKVARGRLDEDHARRYFQQLVAAVGFCHRRGVAHRDLKPENLLLDEAGRLKVTDFGLAALPEQLRHDGLLHTQCGTPAYVAPEVLRKRGYDGARADLWSCGVVLYVLLCGFLPFQHDNYVKLYQKIFKADYQVPPWVSGDARRLIARLLVVDPAKRASIAEIMCTPWFRKGFVPPVLSPPVTPKKQQLDEGAALFDNDDDDNSNSNHSGATSPRSCNAFQLISSMSSGFDLSGLFESEQKTATVFTARAPAATVVEKLESVARALGFEVTRGKGWKVRMEAKAEGTNGRLAATAEVLEVAVDVTVVEFVHDAGDALDFNKFCAVDVRPGLTEIVWAWQGDSPAAAVGTA

SEQ ID NO: 9185 - protein, 384 aa, Zea mays subsp. mays
  peptide (1)..(384): Ceres Seq. ID no. 12407642
MRMVRHPNVVGIREVLASRSRVFVVMEYARGGELFAKVARGRLDEDHARRYFQQLVAAVGFCHRRGVAHRDLKPENLLLDEAGRLKVTDFGLAALPEQLRHDGLLHTQCGTPAYVAPEVLRKRGYDGARADLWSCGVVLYVLLCGFLPFQHDNYVKLYQKIFKADYQVPPWVSGDARRLIARLLVVDPAKRASIAEIMCTPWFRKGFVPPVLSPPVTPKKQQLDEGAALFDNDDDDNSNSNHSGATSPRSCNAFQLISSMSSGFDLSGLFESEQKTATVFTARAPAATVVEKLESVARALGFEVTRGKGWKVRMEAKAEGTNGRLAATAEVLEVAVDVTVVEFVHDAGDALDFNKFCAVDVRPGLTEIVWAWQGDSPAAAVGTA

SEQ ID NO: 9186 - DNA, 1234 bp, Zea mays subsp. mays
  misc_feature (1)..(1234): Ceres Seq. ID no. 12356857
  misc_feature (1)..(1234): Ortholog of  Ceres SEQ ID NO 13599568 as cited in SEQ ID NO 509
  misc_feature (1)..(1234): Ortholog of  Ceres SEQ ID NO 15172903 as cited in SEQ ID NO 51839
  misc_feature (1)..(1234): Ortholog of  Ceres SEQ ID NO 15177108 as cited in SEQ ID NO 52015
  misc_feature (1)..(1234): Ortholog of  Ceres SEQ ID NO 13638595 as cited in SEQ ID NO 52050
  misc_feature (1)..(1234): Ortholog of  Ceres SEQ ID NO 13594748 as cited in SEQ ID NO 52114
  misc_feature (1)..(1234): Ortholog of  Ceres SEQ ID NO 15170313 as cited in SEQ ID NO 59293
  misc_feature (1)..(1234): Ortholog of  Ceres SEQ ID NO 14301870 as cited in SEQ ID NO 61501
  misc_feature (1)..(1234): Ortholog of  Ceres SEQ ID NO 15173596 as cited in SEQ ID NO 63267
  misc_feature (1)..(1234): Ortholog of  Ceres SEQ ID NO 12583993 as cited in SEQ ID NO 68098
  misc_feature (1)..(1234): Ortholog of  Ceres SEQ ID NO 13654535 as cited in SEQ ID NO 68227
aaagtgttgtagagcagacgaagctagctaacaattaagcagctcgatcgagcacacacacacttgatcactactagacagtaaacacattgcgcaaaggccgccatggcttaccgcgcctttgctacgctgcttgcagtgctagcatttgtgggcttcgcttcagttccccgtggtctggcaactgacccgacccagctccaggacttctgcgttgctgataacaagaaccctgtgctggtgaacggggtggtgtgcaagaacccgaacatggtgaaggcaaccgacttcttctccacgatagtgccggtggcgccaaacgggcagggctccgctgtgacgccggtggcggtgaacgagatcccggggctgaacacgctgggcatctcgctggcgcgcatcgacttcgtccccggcgggcagaacccgccgcacacgcacccgcgcgggtccgagatcctgacggtcatccagggcacgctcctcgtcggcttcgtcacctccaaccagctgctcaacaacactctcttcaccatgcagctgaacatgggcgacgtcttcgtgttcccgcaggggctcatccacttccagctcaacaacggcaagacccccgccgtggccatcgccgcgctcagcagccagaaccccggcaccgtcaccatcgccaacgccgtgttcggggccaagccgcccatcctggacgacatcctcgccagggcgttcatgctcgagaaggccaccgtcgactgggtccagcaggcgttcggcgcggcaccagtggccggcggcggcggtggcctgcccggaggaggtggctatcccggcagcggtggtggcctgcccggaggaggtggctatcccggcagcggctttccgggctaccccggccgtagctgatcggtacggtggtggctccacggcggcgccgcctagctagcatgctgcacaagtgcagccgcgcgcgcggatcaggccgtcatacacaaagtatacttatatatagtacctcaaagtcctcaagcattaagccacgtgaagtgaaggctatacgtattaagttcggttgtaatggtcaggtgtaccaaacacccaccaacacctagctagtgagcaggcgcaatgcggcgtctgtgttgatcgagccgtagctctagctctagctcgatcgggttgaataatttgcggcaaaacttatagatatatatggaataaaatcgaaaagtttcatcgtttc

SEQ ID NO: 9187 - protein, 263 aa, Zea mays subsp. mays
  peptide (1)..(263): Ceres Seq. ID no. 12356858
MAYRAFATLLAVLAFVGFASVPRGLATDPTQLQDFCVADNKNPVLVNGVVCKNPNMVKATDFFSTIVPVAPNGQGSAVTPVAVNEIPGLNTLGISLARIDFVPGGQNPPHTHPRGSEILTVIQGTLLVGFVTSNQLLNNTLFTMQLNMGDVFVFPQGLIHFQLNNGKTPAVAIAALSSQNPGTVTIANAVFGAKPPILDDILARAFMLEKATVDWVQQAFGAAPVAGGGGGLPGGGGYPGSGGGLPGGGGYPGSGFPGYPGRS

SEQ ID NO: 9188 - protein, 208 aa, Zea mays subsp. mays
  peptide (1)..(208): Ceres Seq. ID no. 12356859
MVKATDFFSTIVPVAPNGQGSAVTPVAVNEIPGLNTLGISLARIDFVPGGQNPPHTHPRGSEILTVIQGTLLVGFVTSNQLLNNTLFTMQLNMGDVFVFPQGLIHFQLNNGKTPAVAIAALSSQNPGTVTIANAVFGAKPPILDDILARAFMLEKATVDWVQQAFGAAPVAGGGGGLPGGGGYPGSGGGLPGGGGYPGSGFPGYPGRS

SEQ ID NO: 9189 - DNA, 1793 bp, Zea mays subsp. mays
  misc_feature (1)..(1793): Ceres Seq. ID no. 13492648
  misc_feature (1)..(1793): Ortholog of  Ceres SEQ ID NO 14303137 as cited in SEQ ID NO 53594
  misc_feature (1)..(1793): Ortholog of  Ceres SEQ ID NO 13585454 as cited in SEQ ID NO 65280
  misc_feature (1)..(1793): Ortholog of  Ceres SEQ ID NO 14307889 as cited in SEQ ID NO 67245
tttccttcgacagatcgaatcgtgcttaccgagctttataccatcgtcatctcccgccagctgccgtgccgtctgctcgtccgattgttcgtgttcctcgcgtgcgcggatcggatcggttcctctggattggcgcgcacgctcagcaagtagtagcaggtctttcgccgtcgcatgttactgcagcaggccaccggaagagcgcgccgtcatcagctagctgcctcctcctcctcgtcgtctcgaccaccggcggtggatgggcggcgtgctcggcgcgctgctgcaccggcggtccgggggcaggccgccaccggcgcgggccacgaggcgccgggcgctcacccgccagccgtcggcctatgacgccggcggcgggcaccggagggcgatgctgtccaagaagtactcgtacataccggacacctacacgtcgcttgacgaggtggcggcggcgctgcgcgagcaggggctggagtcgtcgaacctcatcctgggcatagacttcaccaagagcaacgagtggacagggaggcagtcgttcggcgggcagagcctgcacagggtcggcgacacgcccaacccctacgagcaggccatcagcatcatcggcaagacgctggctcccttcgacgaggacaacctcatcccctgcttcggcttcggagacggtgactgacgactgacgacggccttcctccgatcctgctgttgatgcatccatccatcttctcgcgtgtcgatcgcttgtccttctccttaatctatctaacctctcttcttgcattatattggttgcgtcgggactcgcgcctgcactgngcagccaccacccatgactacaacgtgtttcagcttccacccggacaactcgccgtgccacggcttcgaggaggtcctcgcctgctaccgcaagatcgtgccgcacctcaagctttccgggcngacgtcgttcgcgcccatcgtggaggcggccgtngacatcgtggaccggagcggggggcagtaccacgtgctcgtcgtggtcgcggacgggcaggtgaccaggagcgtcgacaccggtgacggcgacctcagcccgcaggagaagagaacggtagagtccattgtcacggcaagctcctacccgctgtccatcgttctggttggggtcggggacggcccctgggacgacatgcgcagattcgacgacaagctccccgcgcgcgacttcgacaacttccagttcgtcaacttcaccgccatcatggcccgcgccgcgacggcacagcagaaggagtcggcgttcgcgctcgccgcgctcatggaggtccccatccagtacaaggccaccatggagctcggcatcctgggacggtccacggggaacgccaagcgagtcgcccccgcgccgccgccactgccgcacgcgcagcggcaggcgtcgtcgctgaggaggggcgccagcaacgtcggcggcgccgccgcggcgccgagagatgaccaggtgtgcccgatctgcctgaccaatgccaaggatctggcgttcggctgtgggcatatgtgctgcagggagtgcggggaaagcctcaccagatgcccgatatgccggcagccgatacggtcgaagctgaggctatattcaggatgaagtggctatgctacaacagaggccacgaagaggaaaaaggatatatagcttactcgccgttaaaatgtacatgtgaatctgtcaaaacgtgtaagaaggaaccaccggtcgaggtcagtcctgttcgtctccaaatttggatgaaccgatgttccattttgtc

SEQ ID NO: 9190 - protein, 264 aa, Zea mays subsp. mays
  peptide (1)..(264): Ceres Seq. ID no. 13492649
  misc_feature (37)..(37): Xaa is any aa, unknown or other
  misc_feature (48)..(48): Xaa is any aa, unknown or other
MTTTCFSFHPDNSPCHGFEEVLACYRKIVPHLKLSGXTSFAPIVEAAXDIVDRSGGQYHVLVVVADGQVTRSVDTGDGDLSPQEKRTVESIVTASSYPLSIVLVGVGDGPWDDMRRFDDKLPARDFDNFQFVNFTAIMARAATAQQKESAFALAALMEVPIQYKATMELGILGRSTGNAKRVAPAPPPLPHAQRQASSLRRGASNVGGAAAAPRDDQVCPICLTNAKDLAFGCGHMCCRECGESLTRCPICRQPIRSKLRLYSG

SEQ ID NO: 9191 - protein, 166 aa, Zea mays subsp. mays
  peptide (1)..(166): Ceres Seq. ID no. 13492650
SFDRSNRAYRALYHRHLPPAAVPSARPIVRVPRVRGSDRFLWIGAHAQQVVAGLSPSHVTAAGHRKSAPSSASCLLLLVVSTTGGGWAACSARCCTGGPGAGRHRRGPRGAGRSPASRRPMTPAAGTGGRCCPRSTRTYRTPTRRLTRWRRRCASRGWSRRTSSWA

SEQ ID NO: 9192 - protein, 151 aa, Zea mays subsp. mays
  peptide (1)..(151): Ceres Seq. ID no. 13492651
MRRFDDKLPARDFDNFQFVNFTAIMARAATAQQKESAFALAALMEVPIQYKATMELGILGRSTGNAKRVAPAPPPLPHAQRQASSLRRGASNVGGAAAAPRDDQVCPICLTNAKDLAFGCGHMCCRECGESLTRCPICRQPIRSKLRLYSG

SEQ ID NO: 9193 - DNA, 1235 bp, Zea mays subsp. mays
  misc_feature (1)..(1235): Ceres Seq. ID no. 12407635
  misc_feature (1)..(1235): Ortholog of  Ceres SEQ ID NO 14304969 as cited in SEQ ID NO 53193
  misc_feature (1)..(1235): Ortholog of  Ceres SEQ ID NO 14314851 as cited in SEQ ID NO 54014
  misc_feature (1)..(1235): Ortholog of  Ceres SEQ ID NO 14307442 as cited in SEQ ID NO 54239
  misc_feature (1)..(1235): Ortholog of  Ceres SEQ ID NO 15227214 as cited in SEQ ID NO 55368
  misc_feature (1)..(1235): Ortholog of  Ceres SEQ ID NO 13638897 as cited in SEQ ID NO 55839
  misc_feature (1)..(1235): Ortholog of  Ceres SEQ ID NO 14302561 as cited in SEQ ID NO 56543
  misc_feature (1)..(1235): Ortholog of  Ceres SEQ ID NO 15177710 as cited in SEQ ID NO 59217
  misc_feature (1)..(1235): Ortholog of  Ceres SEQ ID NO 15173484 as cited in SEQ ID NO 61804
  misc_feature (1)..(1235): Ortholog of  Ceres SEQ ID NO 13596958 as cited in SEQ ID NO 63319
  misc_feature (1)..(1235): Ortholog of  Ceres SEQ ID NO 12614573 as cited in SEQ ID NO 68344
  misc_feature (1)..(1235): Ortholog of  Ceres SEQ ID NO 12614814 as cited in SEQ ID NO 68816
  misc_feature (1)..(1235): Ortholog of  Ceres SEQ ID NO 13624040 as cited in SEQ ID NO 0
gctcccaccccacctcaccatctccactccaaacaaggggaaggcgagcgacagacaaacccaccccatcgcccctcctctgtctcctctcttgcccacgcccgccccaatgtcgccgcccctcgagccccacgactacatcggcctctccgccgcggccgcggccgcgccgccgaccccgacctcctcctcctcttcctcctcctcgccggccccccgcctcacccttcgcctcggcctgccgggctccgagtcccccgaccgcgaccgggactgctgcgaggacttcgccgccacgctctccctcggcccgctgccggcggcagccgccgtctccgccaagcgcgccttcccggaccccgcccagcgccccggcgcttccaaggctagcgacgccaagcagcaggcttcccccgccgcgccgccggccgccaaagcgcaggtggttggatggccgcccgtgcgcaactaccggaagaataccctcgccgccgcgaccgcctccaggagcaaggcgccggcggaggaggccgcgtccggagctgggcccatgtacgtaaaggtgagcatggatggcgcgccctacctcaggaaggtggacatcaagatgtactccagctacgaggacctctccctggcgctcgagaagatgttcagctgcttcatcgctggtcaaagtggtctgcataaatcatcgagcaaagacaggctgaccaatggctcaaaggtggatgccctcaaagatcaggagtatgtccttacatatgaggataaggatgcagactggatgcttgtcggtgatcttccctgggattattttacctctatctgccggaagctcaaaatcatgaggggctctgatgctgttggaatagctccacgaaccgtcgagcagacaggtcagaacaaataagctttggcctttgcctgcatccaaggaagacatctgagctagctgggagactatgttgaaggctgaagcctgaaatagttgccgggaatcgtcaaaacccgtcaaatgtttagtgtagttttcacgtgtccttgagacatgtgcatttgtatgtctgtgacgtgatccgttagatcgtgcaatcgtaggttgctgttcttgtgccctttaaaggccagacagatcagggagctctctgcttccttagtgcacttgctttgcagcattccttgttattctactctgaaatcatacatcatgccacaagaaccgatggttcgcg

SEQ ID NO: 9194 - protein, 303 aa, Zea mays subsp. mays
  peptide (1)..(303): Ceres Seq. ID no. 12407636
LPPHLTISTPNKGKASDRQTHPIAPPLSPLLPTPAPMSPPLEPHDYIGLSAAAAAAPPTPTSSSSSSSSPAPRLTLRLGLPGSESPDRDRDCCEDFAATLSLGPLPAAAAVSAKRAFPDPAQRPGASKASDAKQQASPAAPPAAKAQVVGWPPVRNYRKNTLAAATASRSKAPAEEAASGAGPMYVKVSMDGAPYLRKVDIKMYSSYEDLSLALEKMFSCFIAGQSGLHKSSSKDRLTNGSKVDALKDQEYVLTYEDKDADWMLVGDLPWDYFTSICRKLKIMRGSDAVGIAPRTVEQTGQNK

SEQ ID NO: 9195 - protein, 267 aa, Zea mays subsp. mays
  peptide (1)..(267): Ceres Seq. ID no. 12407637
MSPPLEPHDYIGLSAAAAAAPPTPTSSSSSSSSPAPRLTLRLGLPGSESPDRDRDCCEDFAATLSLGPLPAAAAVSAKRAFPDPAQRPGASKASDAKQQASPAAPPAAKAQVVGWPPVRNYRKNTLAAATASRSKAPAEEAASGAGPMYVKVSMDGAPYLRKVDIKMYSSYEDLSLALEKMFSCFIAGQSGLHKSSSKDRLTNGSKVDALKDQEYVLTYEDKDADWMLVGDLPWDYFTSICRKLKIMRGSDAVGIAPRTVEQTGQNK

SEQ ID NO: 9196 - protein, 185 aa, Zea mays subsp. mays
  peptide (1)..(185): Ceres Seq. ID no. 12407638
SHPTSPSPLQTRGRRATDKPTPSPLLCLLSCPRPPQCRRPSSPTTTSASPPRPRPRRRPRPPPPLPPPRRPPASPFASACRAPSPPTATGTAARTSPPRSPSARCRRQPPSPPSAPSRTPPSAPALPRLATPSSRLPPPRRRPPKRRWLDGRPCATTGRIPSPPRPPPGARRRRRRPRPELGPCT

SEQ ID NO: 9197 - DNA, 1648 bp, Zea mays subsp. mays
  misc_feature (1)..(1648): Ceres Seq. ID no. 12362215
  misc_feature (1)..(1648): Ortholog of  Ceres SEQ ID NO 13657915 as cited in SEQ ID NO 66051
aagaagcgaagcaaccaacccccgaaatcttcaacggcgccatcgccactgcgtcatgcccgtcccgcacctcctctcgccactccccctgccctcgccgccgccgcccctccaccgcaatggagcgccatggcggcgcccgacgcaactacgtgccgcactacgggtcccgcctccgcttcacctggggctcgccgcggcccgtggcgatggcgtgaggcggttcgtcgggacgctgggctcgaagagagcgcgagcggtcggtgcaattagggtttctgcgatctctggagacggcggtggcggtgctggtggtacgggaattgcggcggcagcggccgccactgtggtctttgctgtgatgaaccgggtgctctacaagctggcgctcgtgccaatgaagaattaccctttcttcctcgcccagttcgccacatttgggtatgtcctagtgtatttctcaattctcttcataagatttcgcgctgggattgtcactagagaaatgttagcgcttccgaagccacagttcatgctaattggtttactggaagcgctaggtgctgcttcaggcatggctgctgctgctatgttgcccgggccatctattccagtgttgtcacagtcctttctggtttggcaacttatcttatctgccctcatcttgggaaggaaatatagagcaaatcagatccttggctgcttgcttgttacagctggagtaattctagcagtggccggtggagccagtaatggtccgattctctttgaagtcaaattcttttggccagcagtaatgatgatttcagctgcatttcaagctgctgcttccattatcaaggagtttgttttcattgatggtgcaaaacgccttgagggaaagaagcctgatatatttgtagtcaactcttttggttctggtttccaggcactttttattttcctactccttccatttctctctaacttgaaagggattccttttgctgaactccctgcatacctaacccgtggtgctgcatgctttctgaatgtgggagggaatctgaaggattgccatggagctcctttgctaccacttctctacataactctgaacatggccttcaacatttctgtccttaatcttgtgaagatgtctacagcagtggttgcttcgctgacatcaactttagcagtacctctttccatctatatactgtcactgcctctaccatatctacccgaaggaacaaatttgagcgcatcttttttgattggtgttgctaccttagtgctcggattgcttctatacaatcttcctcaagaatcaaccaatcaagtaaaggaagattaatctaaacccatatcagatataaggttaacaggaagctattggtgctccactaagaaaatagccgcattttgttgacagtggcttcacagtttggtacataactcatgaagagcagtgttcttctgccacaaacatttgcggtgcaaacatttgaggcaccagctgacttcaaagtttagaaacagcaagttcttgtttcatctgttaacaaaatcctaatggattatgcagctatatataagctctacctgagcggatgtaactactaactactttcagatgagtaagggctttacaaattcattggttgtg

SEQ ID NO: 9198 - protein, 444 aa, Zea mays subsp. mays
  peptide (1)..(444): Ceres Seq. ID no. 12362216
RSEATNPRNLQRRHRHCVMPVPHLLSPLPLPSPPPPLHRNGAPWRRPTQLRAALRVPPPLHLGLAAARGDGVRRFVGTLGSKRARAVGAIRVSAISGDGGGGAGGTGIAAAAAATVVFAVMNRVLYKLALVPMKNYPFFLAQFATFGYVLVYFSILFIRFRAGIVTREMLALPKPQFMLIGLLEALGAASGMAAAAMLPGPSIPVLSQSFLVWQLILSALILGRKYRANQILGCLLVTAGVILAVAGGASNGPILFEVKFFWPAVMMISAAFQAAASIIKEFVFIDGAKRLEGKKPDIFVVNSFGSGFQALFIFLLLPFLSNLKGIPFAELPAYLTRGAACFLNVGGNLKDCHGAPLLPLLYITLNMAFNISVLNLVKMSTAVVASLTSTLAVPLSIYILSLPLPYLPEGTNLSASFLIGVATLVLGLLLYNLPQESTNQVKED

SEQ ID NO: 9199 - protein, 426 aa, Zea mays subsp. mays
  peptide (1)..(426): Ceres Seq. ID no. 12362217
MPVPHLLSPLPLPSPPPPLHRNGAPWRRPTQLRAALRVPPPLHLGLAAARGDGVRRFVGTLGSKRARAVGAIRVSAISGDGGGGAGGTGIAAAAAATVVFAVMNRVLYKLALVPMKNYPFFLAQFATFGYVLVYFSILFIRFRAGIVTREMLALPKPQFMLIGLLEALGAASGMAAAAMLPGPSIPVLSQSFLVWQLILSALILGRKYRANQILGCLLVTAGVILAVAGGASNGPILFEVKFFWPAVMMISAAFQAAASIIKEFVFIDGAKRLEGKKPDIFVVNSFGSGFQALFIFLLLPFLSNLKGIPFAELPAYLTRGAACFLNVGGNLKDCHGAPLLPLLYITLNMAFNISVLNLVKMSTAVVASLTSTLAVPLSIYILSLPLPYLPEGTNLSASFLIGVATLVLGLLLYNLPQESTNQVKED

SEQ ID NO: 9200 - protein, 324 aa, Zea mays subsp. mays
  peptide (1)..(324): Ceres Seq. ID no. 12362218
MNRVLYKLALVPMKNYPFFLAQFATFGYVLVYFSILFIRFRAGIVTREMLALPKPQFMLIGLLEALGAASGMAAAAMLPGPSIPVLSQSFLVWQLILSALILGRKYRANQILGCLLVTAGVILAVAGGASNGPILFEVKFFWPAVMMISAAFQAAASIIKEFVFIDGAKRLEGKKPDIFVVNSFGSGFQALFIFLLLPFLSNLKGIPFAELPAYLTRGAACFLNVGGNLKDCHGAPLLPLLYITLNMAFNISVLNLVKMSTAVVASLTSTLAVPLSIYILSLPLPYLPEGTNLSASFLIGVATLVLGLLLYNLPQESTNQVKED

SEQ ID NO: 9201 - DNA, 1319 bp, Zea mays subsp. mays
  misc_feature (1)..(1319): Ceres Seq. ID no. 12366624
  misc_feature (1)..(1319): Ortholog of  Ceres SEQ ID NO 13584646 as cited in SEQ ID NO 60715
ctcaaagctagctcagaccaataatcagctcttctcctcctagcttgatctctccaatcaagctctctctctctctctctctctcaacacataccaaacttccactcctcctagatagctagctactagctagacagaaatcccccatgtaattggagagagaacttatgtgttctatgatagattagatatgatgcttctctagctcatcagatcaaattagtactcgaccgataccaagttaattaagaagaagttctctcagcgaagaggcgcgtcaagctggcgaaccggtggtggagcgtgcccggtcacttgggcctgccggagcagccgtccggcggccccaaccccaagacggagcccccggccatgaaggatccggagcccagcagcccggcagtcggcgcgccgggcgaccacggagccgatgagaccaacgagtccggtggcgccgtggtggcggcgcccagccggcggcctcgcggacgcccgccggggtccaagaacaagcccaagccgcccatcttcgtcacgcgcgacagccccaacgcgctgcgcagccacgtcatggaggtggcgggcggcgccgatgtggcggacgccatcgcgcagttctcgcgccgccgccagcgcggtgtctgcgtgctcagcggcgccgggaccgtcgccaacgtggcgctgcggcaaccgtccgcgcccacggccgtggtcgcgctccgcggccgcttcgagatcctctcgcttaccggcaccttcctgcccggccccgcgccgccggggtccacggggctcaccgtgtacctggccgggggccaggggcaggtggttggcggcagcgttgtaggcaccctcatcgccgccggcccggtcatggtgatcgcgtccacgttcgccaacgcaacctacgagcgccttccgctcgaagaggaggatgaagggccagctccaccgatggcgtccggcggcggcgccgatccgctcatgggtggaggcctcggcatcgccgacccgtcagcgctgcccatgttcaacttgccgccgagcaacgggcagcttggaggcggcgacggcttcccgtcatgggcgcacccgcggccaccgtactgatgatcctgatgcgcccaaggtcgagcacagttgctagaatgcaatggcgaatgctgtgcgtgcactgcatggtcgttactgttccattggagacgacgacggccggatcggagtggcgcgccattagtaggttagtacatatgatgaagtgtggccgtcgtccctagtgctactttgttgccgtgcaataatcagatgtcgttggtctc

SEQ ID NO: 9202 - protein, 245 aa, Zea mays subsp. mays
  peptide (1)..(245): Ceres Seq. ID no. 12366625
MKDPEPSSPAVGAPGDHGADETNESGGAVVAAPSRRPRGRPPGSKNKPKPPIFVTRDSPNALRSHVMEVAGGADVADAIAQFSRRRQRGVCVLSGAGTVANVALRQPSAPTAVVALRGRFEILSLTGTFLPGPAPPGSTGLTVYLAGGQGQVVGGSVVGTLIAAGPVMVIASTFANATYERLPLEEEDEGPAPPMASGGGADPLMGGGLGIADPSALPMFNLPPSNGQLGGGDGFPSWAHPRPPY

SEQ ID NO: 9203 - protein, 179 aa, Zea mays subsp. mays
  peptide (1)..(179): Ceres Seq. ID no. 12366626
MEVAGGADVADAIAQFSRRRQRGVCVLSGAGTVANVALRQPSAPTAVVALRGRFEILSLTGTFLPGPAPPGSTGLTVYLAGGQGQVVGGSVVGTLIAAGPVMVIASTFANATYERLPLEEEDEGPAPPMASGGGADPLMGGGLGIADPSALPMFNLPPSNGQLGGGDGFPSWAHPRPPY

SEQ ID NO: 9204 - protein, 138 aa, Zea mays subsp. mays
  peptide (1)..(138): Ceres Seq. ID no. 12366627
MRPTSPVAPWWRRPAGGLADARRGPRTSPSRPSSSRATAPTRCAATSWRWRAAPMWRTPSRSSRAAASAVSACSAAPGPSPTWRCGNRPRPRPWSRSAAASRSSRLPAPSCPAPRRRGPRGSPCTWPGARGRWLAAAL

SEQ ID NO: 9205 - DNA, 949 bp, Zea mays subsp. mays
  misc_feature (1)..(949): Ceres Seq. ID no. 13589371
  misc_feature (1)..(949): Ortholog of  Ceres SEQ ID NO 13599858 as cited in SEQ ID NO 553
  misc_feature (1)..(949): Ortholog of  Ceres SEQ ID NO 13597416 as cited in SEQ ID NO 60674
  misc_feature (1)..(949): Ortholog of  Ceres SEQ ID NO 13654155 as cited in SEQ ID NO 68352
aacatcctaatcaaaaaagaaacggaagaagaacggcaggcgaagcatcgccagattggtatatcgatcgattgatcggtggcggagggaggggaggagggcggcagatggcggcgtgccggggcttcttcgagtgcctgctcaggctgctcaacttcatcctcaccgtcgccggcctcgccatggtcggctacgggatctacctgctcgtcgagtggatgaagatatctgaggacggcagcagcggggggttgacggcggaggtgctggtctccggccggccgttgttgggggctgtcgctctcggtgacagcttcctcgacatgctacccaaagcatggtttatttatttgttcattggtgttggtgctactgttttcctcgtgtctctgtttggctgcattggagcagggacaagaaacacctgctgtttgtgtttctatgccttcttggtcatattgttgatccttgctgaagctggagctgctgcattcattttctttgaccatagctggaaagatgtaattccagtggacaagacacataactttgatgttatgtatggctttctgaagaaaaactgggagattgcaagatgggttgctcttggcgttgttgtttttgaggcagtgctctttctattagctctggttgtcagggcaatgaacaaacctgcggagtatgacagtgatgatgaaattattgcaattggccgaagccctaccatgcggcagccattgatccatgcccaaaatgtgccggccaccggtgttcctgtcccaacactcgatcagcgttcaagtagaaatgatgcctggagccaaaggatgcgagagaagtatggtctggacacgagccagttcacgtacaacccctcagacccaagcaggtaccagcagaatggcgctccacaggctgaagaaaggagtcaatgcactataatgtgaag

SEQ ID NO: 9206 - protein, 314 aa, Zea mays subsp. mays
  peptide (1)..(314): Ceres Seq. ID no. 13589372
HPNQKRNGRRTAGEASPDWYIDRLIGGGGRGGGRQMAACRGFFECLLRLLNFILTVAGLAMVGYGIYLLVEWMKISEDGSSGGLTAEVLVSGRPLLGAVALGDSFLDMLPKAWFIYLFIGVGATVFLVSLFGCIGAGTRNTCCLCFYAFLVILLILAEAGAAAFIFFDHSWKDVIPVDKTHNFDVMYGFLKKNWEIARWVALGVVVFEAVLFLLALVVRAMNKPAEYDSDDEIIAIGRSPTMRQPLIHAQNVPATGVPVPTLDQRSSRNDAWSQRMREKYGLDTSQFTYNPSDPSRYQQNGAPQAEERSQCTIM

SEQ ID NO: 9207 - protein, 279 aa, Zea mays subsp. mays
  peptide (1)..(279): Ceres Seq. ID no. 13589373
MAACRGFFECLLRLLNFILTVAGLAMVGYGIYLLVEWMKISEDGSSGGLTAEVLVSGRPLLGAVALGDSFLDMLPKAWFIYLFIGVGATVFLVSLFGCIGAGTRNTCCLCFYAFLVILLILAEAGAAAFIFFDHSWKDVIPVDKTHNFDVMYGFLKKNWEIARWVALGVVVFEAVLFLLALVVRAMNKPAEYDSDDEIIAIGRSPTMRQPLIHAQNVPATGVPVPTLDQRSSRNDAWSQRMREKYGLDTSQFTYNPSDPSRYQQNGAPQAEERSQCTIM

SEQ ID NO: 9208 - protein, 254 aa, Zea mays subsp. mays
  peptide (1)..(254): Ceres Seq. ID no. 13589374
MVGYGIYLLVEWMKISEDGSSGGLTAEVLVSGRPLLGAVALGDSFLDMLPKAWFIYLFIGVGATVFLVSLFGCIGAGTRNTCCLCFYAFLVILLILAEAGAAAFIFFDHSWKDVIPVDKTHNFDVMYGFLKKNWEIARWVALGVVVFEAVLFLLALVVRAMNKPAEYDSDDEIIAIGRSPTMRQPLIHAQNVPATGVPVPTLDQRSSRNDAWSQRMREKYGLDTSQFTYNPSDPSRYQQNGAPQAEERSQCTIM

SEQ ID NO: 9209 - DNA, 401 bp, Zea mays subsp. mays
  misc_feature (1)..(401): Ceres Seq. ID no. 3238333
  misc_feature (1)..(401): Ortholog of  Ceres SEQ ID NO 13662367 as cited in SEQ ID NO 67774
acagcatgtgctcactcttctcgaattcatcctcccgcaggacttcctgaacatgttcttcagggatcagtacaggccgatccccaacgtgtacaacctcgtgctggccatgctctggaggcaccccgagaacgtgcagctggagaaggtgaaggtcgtgcactactgcgcggcggggtccaagccgtggaggttcacgggcaaggaggcgaacatggacagggaggacatcaacgccctggtgaagaagtggtgggacatctacaacgacgagacgctggacttgaagggcctgccctcgctctcgcccgacgacgacgacnaggtggaggcggtggccaagaagccgcttcgcgcggcctggcggaggcggcacggtcaagtacgtcaccgcgccctcg

SEQ ID NO: 9210 - protein, 133 aa, Zea mays subsp. mays
  peptide (1)..(133): Ceres Seq. ID no. 3238334
  misc_feature (108)..(108): Xaa is any aa, unknown or other
QHVLTLLEFILPQDFLNMFFRDQYRPIPNVYNLVLAMLWRHPENVQLEKVKVVHYCAAGSKPWRFTGKEANMDREDINALVKKWWDIYNDETLDLKGLPSLSPDDDDXVEAVAKKPLRAAWRRRHGQVRHRAL

SEQ ID NO: 9211 - protein, 133 aa, Zea mays subsp. mays
  peptide (1)..(133): Ceres Seq. ID no. 3238335
  misc_feature (108)..(108): Xaa is any aa, unknown or other
TACAHSSRIHPPAGLPEHVLQGSVQADPQRVQPRAGHALEAPRERAAGEGEGRALLRGGVQAVEVHGQGGEHGQGGHQRPGEEVVGHLQRRDAGLEGPALALARRRRXGGGGGQEAASRGLAEAARSSTSPRP

SEQ ID NO: 9212 - protein, 116 aa, Zea mays subsp. mays
  peptide (1)..(116): Ceres Seq. ID no. 3238336
  misc_feature (91)..(91): Xaa is any aa, unknown or other
MFFRDQYRPIPNVYNLVLAMLWRHPENVQLEKVKVVHYCAAGSKPWRFTGKEANMDREDINALVKKWWDIYNDETLDLKGLPSLSPDDDDXVEAVAKKPLRAAWRRRHGQVRHRAL

SEQ ID NO: 9213 - DNA, 700 bp, Zea mays subsp. mays
  misc_feature (1)..(700): Ceres Seq. ID no. 12406208
  misc_feature (1)..(700): Ortholog of  Ceres SEQ ID NO 13600689 as cited in SEQ ID NO 0
  misc_feature (1)..(700): Ortholog of  Ceres SEQ ID NO 15178120 as cited in SEQ ID NO 0
atccatccatccatctcgtgagcgccggccaccgtcaatcgattcgatttgatcgttccccttccccgcgcctcctcgttcccctgaccagtcgccccgattttttttctgttccaggtcgcttctctctgttccgcgtgcgatcgagtagatcaaaaggaggaggaggatggcgaggagttcgttcaagttggagcaccccttcgaaaggaggcaagctgaggctaaccgcatcagggagaaataccctgacagaatccctgtcattattgagaaggccgagaggagtgacatcccagacattgacaagaaaaagtaccttgttcctgccgacctcacagtcggacagtttgtgtatgtggtacggaagcggatcaagctcagcgctgagaaggcaatcttcatcttcgtaaagaacaccctcccaccaacagctgctctgatgtccgccatctacgaggagaacaaggacgaggacggcttcctctacatgacgtacagcggcgagaacaccttcgggctgttctgagtgggagccgctatggatccacattgggcaatgcctcctgtaaatactaaacatgcatcacaagaatctgtgtccatagcataatctggtctgtctgtcattacgcaacttgacgtgcaatgctaaacacatttaagtaataatatatactactctgctttgggatgcttc

SEQ ID NO: 9214 - protein, 136 aa, Zea mays subsp. mays
  peptide (1)..(136): Ceres Seq. ID no. 12406209
PSIHLVSAGHRQSIRFDRSPSPRLLVPLTSRPDFFSVPGRFSLFRVRSSRSKGGGGWRGVRSSWSTPSKGGKLRLTASGRNTLTESLSLLRRPRGVTSQTLTRKSTLFLPTSQSDSLCMWYGSGSSSALRRQSSSS

SEQ ID NO: 9215 - protein, 119 aa, Zea mays subsp. mays
  peptide (1)..(119): Ceres Seq. ID no. 12406210
MARSSFKLEHPFERRQAEANRIREKYPDRIPVIIEKAERSDIPDIDKKKYLVPADLTVGQFVYVVRKRIKLSAEKAIFIFVKNTLPPTAALMSAIYEENKDEDGFLYMTYSGENTFGLF

SEQ ID NO: 9216 - DNA, 2048 bp, Zea mays subsp. mays
  misc_feature (1)..(2048): Ceres Seq. ID no. 12358846
  misc_feature (1)..(2048): Ortholog of  Ceres SEQ ID NO 15224539 as cited in SEQ ID NO 0
tttcaagcaaaagagaagaggagttccattgcaactacagttgcaaatgtagcatctccttcagttacatgttcttcaggacagtctaatgattctgaaactggtatcggaatgatggaatctgctttatttgaaacacggtcaaaattctttcaagcaaaagagaagaggagttccattgcaactacagttgcaaatgtagcatctccttcagttacatgttattcaggacagtctaatgattctgatactggggagaattgtaacatggatgctgaaaaggcaagtcgagttgtccaatctctttttggagcattgtcttcacgatatgaaaatagtaaaggtggcaagctgatgagtaacgcagcaccagaaaaaatgcctactgagaatgagcaaatagtcaatgagatactacatgatatacatggttcttttgctgacatctctgatggtgctggtaccgttgaaggtgacttcaaggtaaaagtcaaggaaacaatggagaaggctttctgggatgtggttgctgattcaatgagaggagacatgccagactactgttatctggtcagcctggtaaaggaaatcagggaagcactggaagagttatctcctacagggtggaaagaagaaatcagtgacaatattaaccttgaaatattgacccagttacttgaatcaggttcccaggacagacaataccttggacaaattttgcagtactctctggataagctgcgaaaactgtcttctcctgtgaaggaacacgagatgaagaagagtcatgatacattgttgggagaattggtcgaagactctaaatccaattataaagatccaaattcatttgttctttgcgttatcaagggtttgcgcttcactatggaggaattacaggctctaaaaacagaagttactagagcacgcatccaactattggaaccattgattaagggatcaggtggagtggagtacctgcagaagtcttttgctggtcgctgtggttccccttctgatgcgttagcttctctcccttcaactgcccggtggattttctctttgaaagatgtcgtggaagaacaatggaatgaacatgtcagctcgttatcaattctgccagaagcagaccatgttcagacacttgttgccaccctccgaactggccatgcagttgcaggtgtacaatctgtgatacctgcagcagacaatacaggattaccagagtgtaggggagaaatacttggcaagctaataaggattgggctattacagctcatcagcagcatggagggtgtagaaagggaatcggttcctgagacctttatgttgaattggttgaggctgcggtctgttcagagtaagtttcaacaagtgattgtgatagcgacaagcatgcttgttttgcatcaggtgttagcgagtgagaacccaaagatcacttcttctgagctggagaatgccacttcggaactgttcaacgtcctcacaaggctgctagacaactttccagatgttggcactgagaaaatcattgaggccatgatgtactcgtcaacctcaaggagcttgtcagatcatgaaaggatgaacgccagaaaagagatattgactagggtcttccttagaagcctccagaccgatgacaccgtcttcaagaaggtctctcagtccgtatactgtgcattccgtgcagtcaccctgggcggcagtggggagaagggccggatgctcgccgatgcatccctgaggcgcgtcggggcaacaaaactcactgcgcggctggtgaaggcagctgaagtgcttatcaaagcagcaatggtgtcagagcaggtccatggcccatggtacacgcagttattgtgaatggctctgctaccgcgatatatatatatatatagctctgctcatgccccgttgttacaactgaatgaatggtttgtgggagtgccgtgatgtctgaattccaataagcataggcgacctgaatgcatgtatatgtaaatatacacgaaacgtaatacgactccgaaatgctcctttctcct

SEQ ID NO: 9217 - protein, 621 aa, Zea mays subsp. mays
  peptide (1)..(621): Ceres Seq. ID no. 12358847
FQAKEKRSSIATTVANVASPSVTCSSGQSNDSETGIGMMESALFETRSKFFQAKEKRSSIATTVANVASPSVTCYSGQSNDSDTGENCNMDAEKASRVVQSLFGALSSRYENSKGGKLMSNAAPEKMPTENEQIVNEILHDIHGSFADISDGAGTVEGDFKVKVKETMEKAFWDVVADSMRGDMPDYCYLVSLVKEIREALEELSPTGWKEEISDNINLEILTQLLESGSQDRQYLGQILQYSLDKLRKLSSPVKEHEMKKSHDTLLGELVEDSKSNYKDPNSFVLCVIKGLRFTMEELQALKTEVTRARIQLLEPLIKGSGGVEYLQKSFAGRCGSPSDALASLPSTARWIFSLKDVVEEQWNEHVSSLSILPEADHVQTLVATLRTGHAVAGVQSVIPAADNTGLPECRGEILGKLIRIGLLQLISSMEGVERESVPETFMLNWLRLRSVQSKFQQVIVIATSMLVLHQVLASENPKITSSELENATSELFNVLTRLLDNFPDVGTEKIIEAMMYSSTSRSLSDHERMNARKEILTRVFLRSLQTDDTVFKKVSQSVYCAFRAVTLGGSGEKGRMLADASLRRVGATKLTARLVKAAEVLIKAAMVSEQVHGPWYTQLL

SEQ ID NO: 9218 - protein, 584 aa, Zea mays subsp. mays
  peptide (1)..(584): Ceres Seq. ID no. 12358848
MMESALFETRSKFFQAKEKRSSIATTVANVASPSVTCYSGQSNDSDTGENCNMDAEKASRVVQSLFGALSSRYENSKGGKLMSNAAPEKMPTENEQIVNEILHDIHGSFADISDGAGTVEGDFKVKVKETMEKAFWDVVADSMRGDMPDYCYLVSLVKEIREALEELSPTGWKEEISDNINLEILTQLLESGSQDRQYLGQILQYSLDKLRKLSSPVKEHEMKKSHDTLLGELVEDSKSNYKDPNSFVLCVIKGLRFTMEELQALKTEVTRARIQLLEPLIKGSGGVEYLQKSFAGRCGSPSDALASLPSTARWIFSLKDVVEEQWNEHVSSLSILPEADHVQTLVATLRTGHAVAGVQSVIPAADNTGLPECRGEILGKLIRIGLLQLISSMEGVERESVPETFMLNWLRLRSVQSKFQQVIVIATSMLVLHQVLASENPKITSSELENATSELFNVLTRLLDNFPDVGTEKIIEAMMYSSTSRSLSDHERMNARKEILTRVFLRSLQTDDTVFKKVSQSVYCAFRAVTLGGSGEKGRMLADASLRRVGATKLTARLVKAAEVLIKAAMVSEQVHGPWYTQLL

SEQ ID NO: 9219 - protein, 583 aa, Zea mays subsp. mays
  peptide (1)..(583): Ceres Seq. ID no. 12358849
MESALFETRSKFFQAKEKRSSIATTVANVASPSVTCYSGQSNDSDTGENCNMDAEKASRVVQSLFGALSSRYENSKGGKLMSNAAPEKMPTENEQIVNEILHDIHGSFADISDGAGTVEGDFKVKVKETMEKAFWDVVADSMRGDMPDYCYLVSLVKEIREALEELSPTGWKEEISDNINLEILTQLLESGSQDRQYLGQILQYSLDKLRKLSSPVKEHEMKKSHDTLLGELVEDSKSNYKDPNSFVLCVIKGLRFTMEELQALKTEVTRARIQLLEPLIKGSGGVEYLQKSFAGRCGSPSDALASLPSTARWIFSLKDVVEEQWNEHVSSLSILPEADHVQTLVATLRTGHAVAGVQSVIPAADNTGLPECRGEILGKLIRIGLLQLISSMEGVERESVPETFMLNWLRLRSVQSKFQQVIVIATSMLVLHQVLASENPKITSSELENATSELFNVLTRLLDNFPDVGTEKIIEAMMYSSTSRSLSDHERMNARKEILTRVFLRSLQTDDTVFKKVSQSVYCAFRAVTLGGSGEKGRMLADASLRRVGATKLTARLVKAAEVLIKAAMVSEQVHGPWYTQLL

SEQ ID NO: 9220 - DNA, 2084 bp, Zea mays subsp. mays
  misc_feature (1)..(2084): Ceres Seq. ID no. 12372847
  misc_feature (1)..(2084): Ortholog of  Ceres SEQ ID NO 13654166 as cited in SEQ ID NO 68381
  misc_feature (1)..(2084): Ortholog of  Ceres SEQ ID NO 13599720 as cited in SEQ ID NO 0
actcgcacggacgagcgaggcagccccgcaggtcgcagccacaacccaagcgcagcgatctgcctccgctccggctcagctcccgccctgcctccgccttccattccgccgcgcggcgctgccgagtgccgacgtcgtccccgccggagtttctggtttctgggttggatctctcggagtcggagcgagcgaggatgggcggcggcaacggtgaaaccacccagctgggggagccactgctggcgaagaaggcgaaggcgtaccgccctaggtgccccggctgccgggtggaccgcctcaacgcggagcgggagggggtcttccctctcaaggacctcttcctcatctggctcgtcaccatcacctgcaccctgccgatccagtctctgttccccttcttgtatttcatgataagggatctgcatattgctaaacaaacacaagacattggattttatgctggttttgttggcgcttcatatatgtgtgggagggcagtctcctcaacagtatggggaatcgtggctgataagtatggaaggaaaccagttatcgtactgacccttattgcaatagttatcttcaatactatgtttggactaagctcaaactattggatggcattaatcacacgatgcctgcttggaatcatgtgtggttatctcgggccaattaaggcttatgctacagaagtgtgccgaaaagaatacaatcatctggctttggcagttgtttcttcctcacgaggcattggtctcattattggtccagctcttggtggttatcttgcgcagcctgcagataaatatccaagtatattctctcagacgtccatatttgggaggtttccatactttcttccgtgcctgtgtatatcaatccttgcagttattgctctaattgcctgcatctggtttccggaaactttgcataaacacaatggggatgccgttgataattccgttgaaacagtagaagaatctcttgctggcaccgacactgaagaaaatggaggtggcggatgtctaaaattatttacaaactggccgttgatgtcagctattactttatattgtatcttctctcttcaggatgtggcttatgcagagacattctctctttgggctgtcagtgacagatcgtttggtggattaagctttactaccacagatgtgggcaatgtccttgcgatgtcaggtctcttcctttttctatatcaaatgttgatctatccgttccttgccaaaacggtagaccacatcacattagtccgtgcagtggcgttattgactctaccggttcttgctagctacccattctttccttcgttgtccgggttcgggctcatggtggtagtaaattgtgcatcttttctgaagaatacattctcggtaactaccattaccgtgttcaacattttgatgaatgaagctgtgactcaggatgtaagagccgcagccaatgggatagctgtaacactaatgtccatctctaaagcggttgctccagctgttgcaggaatcatattttcgtgggcccagaggcgtcaaacagctgcatttcttccaggcgaccacttggtgttcttcatactgaacatcttcacgttcatcggtttcgtcttcaccttcagaccgtttttcgttcgaggcagtgccaagcactgaaacatggatgaagcggacgacgacccatgggtatcctatccaggggcaatcgaatatagattttcttgtggcgtggccaagggcggtgccgagcctgtaccagtacgacgactcaggccagaacacacggcgtatggtatggtacacagcaaggccgtgttgttgctgtaagttttgtaatttctgtttccttcttctcggcttcgcagcatgcagttgctgtatatgatggaagaacactctgttactgggcatgttgcgcggtttccacgcgtgtaagtaatgtagaagtcgctatggtaggtatttccataccgtcattagtggatcattgaatttttttgtaagaaggttattgcaatgccctttttccgggcatgaataagaaaaaggaaatatgcttatatgcatggtatt

SEQ ID NO: 9221 - protein, 554 aa, Zea mays subsp. mays
  peptide (1)..(554): Ceres Seq. ID no. 12372848
SHGRARQPRRSQPQPKRSDLPPLRLSSRPASAFHSAARRCRVPTSSPPEFLVSGLDLSESERARMGGGNGETTQLGEPLLAKKAKAYRPRCPGCRVDRLNAEREGVFPLKDLFLIWLVTITCTLPIQSLFPFLYFMIRDLHIAKQTQDIGFYAGFVGASYMCGRAVSSTVWGIVADKYGRKPVIVLTLIAIVIFNTMFGLSSNYWMALITRCLLGIMCGYLGPIKAYATEVCRKEYNHLALAVVSSSRGIGLIIGPALGGYLAQPADKYPSIFSQTSIFGRFPYFLPCLCISILAVIALIACIWFPETLHKHNGDAVDNSVETVEESLAGTDTEENGGGGCLKLFTNWPLMSAITLYCIFSLQDVAYAETFSLWAVSDRSFGGLSFTTTDVGNVLAMSGLFLFLYQMLIYPFLAKTVDHITLVRAVALLTLPVLASYPFFPSLSGFGLMVVVNCASFLKNTFSVTTITVFNILMNEAVTQDVRAAANGIAVTLMSISKAVAPAVAGIIFSWAQRRQTAAFLPGDHLVFFILNIFTFIGFVFTFRPFFVRGSAKH

SEQ ID NO: 9222 - protein, 490 aa, Zea mays subsp. mays
  peptide (1)..(490): Ceres Seq. ID no. 12372849
MGGGNGETTQLGEPLLAKKAKAYRPRCPGCRVDRLNAEREGVFPLKDLFLIWLVTITCTLPIQSLFPFLYFMIRDLHIAKQTQDIGFYAGFVGASYMCGRAVSSTVWGIVADKYGRKPVIVLTLIAIVIFNTMFGLSSNYWMALITRCLLGIMCGYLGPIKAYATEVCRKEYNHLALAVVSSSRGIGLIIGPALGGYLAQPADKYPSIFSQTSIFGRFPYFLPCLCISILAVIALIACIWFPETLHKHNGDAVDNSVETVEESLAGTDTEENGGGGCLKLFTNWPLMSAITLYCIFSLQDVAYAETFSLWAVSDRSFGGLSFTTTDVGNVLAMSGLFLFLYQMLIYPFLAKTVDHITLVRAVALLTLPVLASYPFFPSLSGFGLMVVVNCASFLKNTFSVTTITVFNILMNEAVTQDVRAAANGIAVTLMSISKAVAPAVAGIIFSWAQRRQTAAFLPGDHLVFFILNIFTFIGFVFTFRPFFVRGSAKH

SEQ ID NO: 9223 - protein, 419 aa, Zea mays subsp. mays
  peptide (1)..(419): Ceres Seq. ID no. 12372850
MIRDLHIAKQTQDIGFYAGFVGASYMCGRAVSSTVWGIVADKYGRKPVIVLTLIAIVIFNTMFGLSSNYWMALITRCLLGIMCGYLGPIKAYATEVCRKEYNHLALAVVSSSRGIGLIIGPALGGYLAQPADKYPSIFSQTSIFGRFPYFLPCLCISILAVIALIACIWFPETLHKHNGDAVDNSVETVEESLAGTDTEENGGGGCLKLFTNWPLMSAITLYCIFSLQDVAYAETFSLWAVSDRSFGGLSFTTTDVGNVLAMSGLFLFLYQMLIYPFLAKTVDHITLVRAVALLTLPVLASYPFFPSLSGFGLMVVVNCASFLKNTFSVTTITVFNILMNEAVTQDVRAAANGIAVTLMSISKAVAPAVAGIIFSWAQRRQTAAFLPGDHLVFFILNIFTFIGFVFTFRPFFVRGSAKH

SEQ ID NO: 9224 - DNA, 1684 bp, Zea mays subsp. mays
  misc_feature (1)..(1684): Ceres Seq. ID no. 12358384
  misc_feature (1)..(1684): Ortholog of  Ceres SEQ ID NO 14313049 as cited in SEQ ID NO 54099
  misc_feature (1)..(1684): Ortholog of  Ceres SEQ ID NO 14314054 as cited in SEQ ID NO 56939
  misc_feature (1)..(1684): Ortholog of  Ceres SEQ ID NO 13503468 as cited in SEQ ID NO 63271
  misc_feature (1)..(1684): Ortholog of  Ceres SEQ ID NO 14303592 as cited in SEQ ID NO 68603
tcccgtatcctgtgccagctgactcgccttctcaagttctgaaacgcagcggagcgcgccggaggagagcaaagcggacagcggaggatagagagagcagaacaccagatcagatcagatggcgcctccgtctccccagccgccgctagtgcgcgtgctcgaccgcatccgcgtctcgcccgccgccggctgattctgagcaagagcccgcgctccctctcactttcttcgacgttgcctggctcttcaccggccccgtcgagcgcctcttcttcttccgccacccggagccggcctccactctcccgctcctgcgctcctcgctctccctcgcgctccgccgcttctacccactcgccggcaccatcaggccccacgcgcctttcctctgctcctacacccatggtaccgatgccctcaccatggtcgtcgccgagtcgaacagccccgacgatttcgacagcctcgtagccaggtcgcccagcgacctggacgggatccgccccctcgttccgcagttgccgccgccgggggaagacggagcgttcgcgctcgccgccgtgcaggccactgtcttcccaggccgtggcctctgcctcggcgtctccgtccaccacgctgcctgcgacgatgcctccaccatgcatttcgtccgcacctgggccgctacctgccgcctaggactcgagaacgacgacggatccgaggacgccgtgctatcgccacgtccggtgctggaccgctccgtcgtcgccgaccccgacgacctgcgcgggaagacgctcgccgggatggcgcgcctcgcccctcctccttctccgccgccgcagcagcaggaggagaagacgccgatggtgatggcgtcgttcctgctggggcgcgagcagatcgaccggatcaaggagggcgcggcagcaaaggcatcgtctttcgtggcggcgtcggccttggcgtgggtgtgcctcctcaagtgcggttccgttggcgtcgcgggcgcccggcgcagccacatgctcttctccgccgagtgccggtccaggctgacgccaccgctgccggccgaatacttcggcaactgcctgcgcccctgcttcgtggaagccgccacggcggaccttctctctggggaaactgaggacggcgtggctgcggcggcgtcggcgatcgggagcgcgatccaggagatggagcagggcgtgctggaaggcgcggaggggtggttgggcagggtgctgtcggtgcttcccgagcggcccatgtccgtgggcgggtcccccaggcacggcgtgtacgaaaccacggacttcgggtggggccggccggcgagggtggagatggtgtcggtggagaagacgcccgggacggtagcgctggcagacagcccggagggagacggaggcatcgagctcggggtggtgttgccgccggacgccatggatgcatttgcttcgtgctttgcgcatgccgtcggcgccaacgtctgattggcattccgatccgaggtgcagctgctgccttcaacaacacaggaccaaaagattcgattgaagcagcgtattatttgtgcttgattaattggtttactttactgtcttgagagtgagctcgttcttgctgctgatgtgcgaagtcaaggaataaacaaccggattgttccgaaatcaatcaagcgtcactatgattt

SEQ ID NO: 9225 - protein, 353 aa, Zea mays subsp. mays
  peptide (1)..(353): Ceres Seq. ID no. 12358385
MVVAESNSPDDFDSLVARSPSDLDGIRPLVPQLPPPGEDGAFALAAVQATVFPGRGLCLGVSVHHAACDDASTMHFVRTWAATCRLGLENDDGSEDAVLSPRPVLDRSVVADPDDLRGKTLAGMARLAPPPSPPPQQQEEKTPMVMASFLLGREQIDRIKEGAAAKASSFVAASALAWVCLLKCGSVGVAGARRSHMLFSAECRSRLTPPLPAEYFGNCLRPCFVEAATADLLSGETEDGVAAAASAIGSAIQEMEQGVLEGAEGWLGRVLSVLPERPMSVGGSPRHGVYETTDFGWGRPARVEMVSVEKTPGTVALADSPEGDGGIELGVVLPPDAMDAFASCFAHAVGANV

SEQ ID NO: 9226 - protein, 280 aa, Zea mays subsp. mays
  peptide (1)..(280): Ceres Seq. ID no. 12358386
MHFVRTWAATCRLGLENDDGSEDAVLSPRPVLDRSVVADPDDLRGKTLAGMARLAPPPSPPPQQQEEKTPMVMASFLLGREQIDRIKEGAAAKASSFVAASALAWVCLLKCGSVGVAGARRSHMLFSAECRSRLTPPLPAEYFGNCLRPCFVEAATADLLSGETEDGVAAAASAIGSAIQEMEQGVLEGAEGWLGRVLSVLPERPMSVGGSPRHGVYETTDFGWGRPARVEMVSVEKTPGTVALADSPEGDGGIELGVVLPPDAMDAFASCFAHAVGANV

SEQ ID NO: 9227 - protein, 230 aa, Zea mays subsp. mays
  peptide (1)..(230): Ceres Seq. ID no. 12358387
MARLAPPPSPPPQQQEEKTPMVMASFLLGREQIDRIKEGAAAKASSFVAASALAWVCLLKCGSVGVAGARRSHMLFSAECRSRLTPPLPAEYFGNCLRPCFVEAATADLLSGETEDGVAAAASAIGSAIQEMEQGVLEGAEGWLGRVLSVLPERPMSVGGSPRHGVYETTDFGWGRPARVEMVSVEKTPGTVALADSPEGDGGIELGVVLPPDAMDAFASCFAHAVGANV

SEQ ID NO: 9228 - DNA, 1641 bp, Zea mays subsp. mays
  misc_feature (1)..(1641): Ceres Seq. ID no. 12349347
  misc_feature (1)..(1641): Ortholog of  Ceres SEQ ID NO 15224517 as cited in SEQ ID NO 64862
aaaaacccttgagccgtcaccaatggcggacctcgaaaccctagccacgcccgcccctgcctctgcctccaccaagaagaagaagaaacactccaagaagcacaaggccgccagtgacgcccccaccaatgtcaccgtcgacgcatcccttatgggcggttcctcctacgtcgcggccgcccccgtggtcggctacttcccctccgggtacgacccactcactaccgctgccggggcggagtctgcccccggcacccagctcttccggcacgagaagcatcccacctgggtggacctcgtggtccggagccccggcggcggacacgacttcgttggccggagctatgccggtgaggccgccgtgccgcaggtctgcgactacgcgcttggcgtccttgacaaggcctccggcactctcaggatcgtgcccatcgctggcaaaaagattctgaggctagagccacatcttgaagtgcagcatccagcgcattcgcagcactctgaggtggcatcagaagcggcttcagctgcaggaaatgatgaattgaaggttcaggatctgacaatgatgtatggagccaagacggacagggacaaggacaataagtggagatcgttaaaggaacaaaggaatgatccttccgcttatgaggacattgatcttggaatatcagagaccaatgtcaacgccaatgataggcaggaacctgtacttgttcggaacattccaccttatgatcctaccgcagatacatcagaaaatgcatatcttttggacgagattattccaaagagtatgcgggagcattttttggaaattgtccgtcattttgaatcaggagaaatctcctcaaaaggctatgggagttttgtctcaaaacgtgtgcacaagttaaaggagcttcagggtgaagataaaaagaggtttgcttggatactttcctacatccaacatctcctatctctattggcgcgtaatggctccatgtccaatcgcaaatggaaaggcagaaatgaaaaccagataagccatggaccagcaaccccgcaggctgtatatcgcaggctgctgttcatgtttacagaaccggggtccagtgtcatgccaacagagaaaaaagagcttctgaccaactacatattggtcctaacactttttgccgatgacttcagatccaaccccagcgacatatgtgaggaccttaaaatgacccgccaaaatcttaaaccatactatgaccagttgggatgcaaatctgtgacagaaggtgcttttaagtctactttcatgacgctcccagcccctctcaagttcccaaaggaagttacgagaaagcggcgacggcagtagggcttttatccaaaggagacaaggagagaaaccaatggctatttatctcagaaatggcttgcattacttgaatggatggctggattggaaatactccctatcgaaggcaagaagtaaaggcatcgatgctaggggcccgattttaatagtgtactggaaatgaaaagttgtcctgtgtttcatctcgttttgtttttagttgctcatcgacattttcttgttaaggaaacatgtcatctatgtattgataaatgtttgtctatctgtatgagtgaatgtattgaaatgtt

SEQ ID NO: 9229 - protein, 449 aa, Zea mays subsp. mays
  peptide (1)..(449): Ceres Seq. ID no. 12349348
KTLEPSPMADLETLATPAPASASTKKKKKHSKKHKAASDAPTNVTVDASLMGGSSYVAAAPVVGYFPSGYDPLTTAAGAESAPGTQLFRHEKHPTWVDLVVRSPGGGHDFVGRSYAGEAAVPQVCDYALGVLDKASGTLRIVPIAGKKILRLEPHLEVQHPAHSQHSEVASEAASAAGNDELKVQDLTMMYGAKTDRDKDNKWRSLKEQRNDPSAYEDIDLGISETNVNANDRQEPVLVRNIPPYDPTADTSENAYLLDEIIPKSMREHFLEIVRHFESGEISSKGYGSFVSKRVHKLKELQGEDKKRFAWILSYIQHLLSLLARNGSMSNRKWKGRNENQISHGPATPQAVYRRLLFMFTEPGSSVMPTEKKELLTNYILVLTLFADDFRSNPSDICEDLKMTRQNLKPYYDQLGCKSVTEGAFKSTFMTLPAPLKFPKEVTRKRRRQ

SEQ ID NO: 9230 - protein, 442 aa, Zea mays subsp. mays
  peptide (1)..(442): Ceres Seq. ID no. 12349349
MADLETLATPAPASASTKKKKKHSKKHKAASDAPTNVTVDASLMGGSSYVAAAPVVGYFPSGYDPLTTAAGAESAPGTQLFRHEKHPTWVDLVVRSPGGGHDFVGRSYAGEAAVPQVCDYALGVLDKASGTLRIVPIAGKKILRLEPHLEVQHPAHSQHSEVASEAASAAGNDELKVQDLTMMYGAKTDRDKDNKWRSLKEQRNDPSAYEDIDLGISETNVNANDRQEPVLVRNIPPYDPTADTSENAYLLDEIIPKSMREHFLEIVRHFESGEISSKGYGSFVSKRVHKLKELQGEDKKRFAWILSYIQHLLSLLARNGSMSNRKWKGRNENQISHGPATPQAVYRRLLFMFTEPGSSVMPTEKKELLTNYILVLTLFADDFRSNPSDICEDLKMTRQNLKPYYDQLGCKSVTEGAFKSTFMTLPAPLKFPKEVTRKRRRQ

SEQ ID NO: 9231 - protein, 399 aa, Zea mays subsp. mays
  peptide (1)..(399): Ceres Seq. ID no. 12349350
MGGSSYVAAAPVVGYFPSGYDPLTTAAGAESAPGTQLFRHEKHPTWVDLVVRSPGGGHDFVGRSYAGEAAVPQVCDYALGVLDKASGTLRIVPIAGKKILRLEPHLEVQHPAHSQHSEVASEAASAAGNDELKVQDLTMMYGAKTDRDKDNKWRSLKEQRNDPSAYEDIDLGISETNVNANDRQEPVLVRNIPPYDPTADTSENAYLLDEIIPKSMREHFLEIVRHFESGEISSKGYGSFVSKRVHKLKELQGEDKKRFAWILSYIQHLLSLLARNGSMSNRKWKGRNENQISHGPATPQAVYRRLLFMFTEPGSSVMPTEKKELLTNYILVLTLFADDFRSNPSDICEDLKMTRQNLKPYYDQLGCKSVTEGAFKSTFMTLPAPLKFPKEVTRKRRRQ

SEQ ID NO: 9232 - DNA, 1315 bp, Zea mays subsp. mays
  misc_feature (1)..(1315): Ceres Seq. ID no. 15180636
  misc_feature (1)..(1315): Ortholog of  Ceres SEQ ID NO 15169603 as cited in SEQ ID NO 65772
  misc_feature (1)..(1315): Ortholog of  Ceres SEQ ID NO 14308003 as cited in SEQ ID NO 65919
  misc_feature (1)..(1315): Ortholog of  Ceres SEQ ID NO 14303087 as cited in SEQ ID NO 66569
catcctcgccgacttcctcggccgcgggatcttcaacgtggacggggacgcctggctgttccagcgcaagctcgcggcggccgagctggtgtcgccggcgctgcgcgccttcgcggtgcgcgtggtggcgtccgagctgcggggccggctcatccccctgctccgctctgctgcctgtgcctccggccgcgagggtggaggaggaggaggaggaggaggcagggtcctggacctgcaggacgtgttccgccgcttcgccttcgactgcatctgcaagatctccttcggcctcgaccctggctgcctgcagctgtcgatgccggtgtcgtcgttcgaggacgccttcgacacggcctccacgctctccgccaggcgcgccaccgcgcccatgcacgtcgtctggaagctgaagcgcctgctcaacttgggggacgagaggaggctccgggacgcggtgcacctcgtggacgcgctcgccgcggaggtgatccggcagcggcgcaagctcgggggcgccgccagctcgggcagcgacctcctgtcgcgcttcatggggtccatcgacgacgactagtacctccgcgacatcggggtcagcttcatgctggacggccgcgacaccgtggcctcggcgctgaccgccttcttcctgctcctctccgaccacccggaggtcgcggccgccatccgggacgaggccgcccgcgtcgccggcgacgacgacgacgacgacgggcggctcacggcctccgccttcggcaagctcaagggcatgcagtacgtgcacgcggcgctgtacgagagcatgcggctgttcccgccggtgcagttcgactccaagttcgcggcgggcgacgacacgctcccggacggcacggcggtggcgaagggcacgcgggtgacctaccacgcctacgccatggggcggatggagtccgtgtggggccccgactgcggcgagttccggcccgagcggtggctccgggacgggcgcttcgtgcccgagagcccgtacaggtaccccgtgttccaggccggcgcgcgcgtgtgcgtgggcaaggagctggccctgatggagatgaaggccgtgatcgtggccgtggtccggggcttcgacatcgaggcggtcggacggagctcccgccggcccaggttcgcgccggggctgaccgccacgttcgcgggcggcctgccggtgcgggtgcgccggcgagcacgtgcgagcgggcacaagcgcacaacccgccaatgtgatgaaacggaataaaaagaagaaaaaaaatactgctgctggtgtcatccaggattcgtcctc

SEQ ID NO: 9233 - protein, 417 aa, Zea mays subsp. mays
  peptide (1)..(417): Ceres Seq. ID no. 15180637
HPRRLPRPRDLQRGRGRLAVPAQARGGRAGVAGAARLRGARGGVRAAGPAHPPAPLCCLCLRPRGWRRRRRRRQGPGPAGRVPPLRLRLHLQDLLRPRPWLPAAVDAGVVVRGRLRHGLHALRQARHRAHARRLEAEAPAQLGGREEAPGRGAPRGRARRGGDPAAAQARGRRQLGQRPPVALHGVHRRRLVPPRHRGQLHAGRPRHRGLGADRLLPAPLRPPGGRGRHPGRGRPRRRRRRRRRRAAHGLRLRQAQGHAVRARGAVREHAAVPAGAVRLQVRGGRRHAPGRHGGGEGHAGDLPRLRHGADGVRVGPRLRRVPARAVAPGRALRAREPVQVPRVPGRRARVRGQGAGPDGDEGRDRGRGPGLRHRGGRTELPPAQVRAGADRHVRGRPAGAGAPASTCERAQAHNPPM

SEQ ID NO: 9234 - protein, 221 aa, Zea mays subsp. mays
  peptide (1)..(221): Ceres Seq. ID no. 15180638
MLDGRDTVASALTAFFLLLSDHPEVAAAIRDEAARVAGDDDDDDGRLTASAFGKLKGMQYVHAALYESMRLFPPVQFDSKFAAGDDTLPDGTAVAKGTRVTYHAYAMGRMESVWGPDCGEFRPERWLRDGRFVPESPYRYPVFQAGARVCVGKELALMEMKAVIVAVVRGFDIEAVGRSSRRPRFAPGLTATFAGGLPVRVRRRARASGHKRTTRQCDETE

SEQ ID NO: 9235 - DNA, 1627 bp, Zea mays subsp. mays
  misc_feature (1)..(1627): Ceres Seq. ID no. 12386885
  misc_feature (1)..(1627): Ortholog of  Ceres SEQ ID NO 13595556 as cited in SEQ ID NO 56727
aatcctccgaccgagacgaggcagaaaccttcctcgatctccccttccccttccctcgctgtaattccatctccgtctccatctcgttcccaccacgccgctccctgtcgcggtgtcgccattgccccggcttccaagcaaaatcccgcttgcctcgccccaagcattcctgctttcacccggccgccactcttccccagtccccgccactcaaggaaggcggaggattttatctagtcttgcagcgcggccgtctccgtcccgccttctgcgcctcctgtggcgtttggagcatcttccaattttaagctgacactacttgaacttaatgcggctctacgcacctgcgctctgtctgctgcgatcaagcacacatccccaccctaatcagttccgtgcaggattcacgcagagcatggcctcctggaagtgctcgcactcgccgtcaagcccgtaccttgcgaagtcgggtttagtcgattcttctcttaacaggaatgtaaagtcttctcagccacaaagtataaaatactttgtcagcttaatgggccagcagttccgttgcggattgtcaaccagggagggtagcctaagtgtaaagcttgacattccttcacacgaaaaatcaaggataggctggaactggaaaaacatgcatcaaaagataggaggtgtagctggtggactctgctttggtttctcggttactggagtagcaagtgccgaggttcctatcattagagtcaaagacaatgccgagacttcgtcatcatctaccagttcaactcatggaaaggaagtgtacacagattattctgtcacaggtattcctggagatggaaggtgtttattccgctccgtggtgcatggtgcatgcattagatcagggagaccaatacctaatgaagatcttcagagaaaactagctgatgaattgagagcaacggtcgcagatgaatttgtcaagaggcggaaagagaccgaatggttcgttgagggggattttgatacatatgtatcccatattagggagccacatgtgtggggaggcgagccagaattgttcatggcgtcccatgttcttcagatgccaataacggtttacatgcgcgacgaggatgctggcggtctgatagcaatcgcagagtatggccagcagtatggtaaagaagacccaatccaagtcctgtatcatggttttggccattacgacgctctacagatcccagcaaaggttggatcgaagaggaaactgtagacgctgcgcgccgcgagcttgagagaaaattcggaaacaataagctgcatgcatgcatgcattgagatgtgtacctgtacaaaatgtcaatccaagcttcggatgctgaatctgtacaccatgccctgaaaaccgcacttgtgtagtttgtgtgactggtacagtagaagatagaaggggcgccggggacccatttaccatactctgatgactgcaagtacgttcatttagagtgaagtaagctacacagctcaccagttggtccagacgtccagtgagcgtacatgttttgaatgaggggcatgtggagagcacatagacagttgagtccggcactctcctggatcggaattgaattttatttgcagc

SEQ ID NO: 9236 - protein, 309 aa, Zea mays subsp. mays
  peptide (1)..(309): Ceres Seq. ID no. 12386886
MRLYAPALCLLRSSTHPHPNQFRAGFTQSMASWKCSHSPSSPYLAKSGLVDSSLNRNVKSSQPQSIKYFVSLMGQQFRCGLSTREGSLSVKLDIPSHEKSRIGWNWKNMHQKIGGVAGGLCFGFSVTGVASAEVPIIRVKDNAETSSSSTSSTHGKEVYTDYSVTGIPGDGRCLFRSVVHGACIRSGRPIPNEDLQRKLADELRATVADEFVKRRKETEWFVEGDFDTYVSHIREPHVWGGEPELFMASHVLQMPITVYMRDEDAGGLIAIAEYGQQYGKEDPIQVLYHGFGHYDALQIPAKVGSKRKL

SEQ ID NO: 9237 - protein, 280 aa, Zea mays subsp. mays
  peptide (1)..(280): Ceres Seq. ID no. 12386887
MASWKCSHSPSSPYLAKSGLVDSSLNRNVKSSQPQSIKYFVSLMGQQFRCGLSTREGSLSVKLDIPSHEKSRIGWNWKNMHQKIGGVAGGLCFGFSVTGVASAEVPIIRVKDNAETSSSSTSSTHGKEVYTDYSVTGIPGDGRCLFRSVVHGACIRSGRPIPNEDLQRKLADELRATVADEFVKRRKETEWFVEGDFDTYVSHIREPHVWGGEPELFMASHVLQMPITVYMRDEDAGGLIAIAEYGQQYGKEDPIQVLYHGFGHYDALQIPAKVGSKRKL

SEQ ID NO: 9238 - protein, 237 aa, Zea mays subsp. mays
  peptide (1)..(237): Ceres Seq. ID no. 12386888
MGQQFRCGLSTREGSLSVKLDIPSHEKSRIGWNWKNMHQKIGGVAGGLCFGFSVTGVASAEVPIIRVKDNAETSSSSTSSTHGKEVYTDYSVTGIPGDGRCLFRSVVHGACIRSGRPIPNEDLQRKLADELRATVADEFVKRRKETEWFVEGDFDTYVSHIREPHVWGGEPELFMASHVLQMPITVYMRDEDAGGLIAIAEYGQQYGKEDPIQVLYHGFGHYDALQIPAKVGSKRKL

SEQ ID NO: 9239 - DNA, 768 bp, Zea mays subsp. mays
  misc_feature (1)..(768): Ceres Seq. ID no. 12412369
  misc_feature (1)..(768): Ortholog of  Ceres SEQ ID NO 12624483 as cited in SEQ ID NO 61226
agtaccaccaacaaacttctttctcgccttgcatcggccgccggccctccatccaccgcaccagctagcaacgacgacacgctagccaggtagcgtagccgaccagcctccgcgcgcgcgggcactcagttcgccatggcgcgcctgctccgcgccgccgccggcctcgcgctcctcctggccgtccttgccccggcggcgtcggcgggcggcgacctggcccagctgggcgccgccgtcgtgacgcggcgcggcggcgagcggacgacgtgccgcggaggcacggtgggcgagtgcatggagtacctggacgtggacgcggagggcgaggccgacgtggcgggcatggccaccggcggcggcaagcgccgggtgctgcagggcggctccggctacatcggctacgacgcgctgcgcagggacaacgtgccgtgctcgcagcgcggcgcgtcctactacaactgccagcccggcgccgaggccaacccctactcgcgcggctgcagcgccatcacccagtgcaggggctgatgcctgcctgatgatttccgttccgtttcgtccccagctattagtcgggtcttcaatttaaagaagaagacatgcatggagcgatgtcgtcgtctttgctgtgcgcgctatagcctttctcgtccgcctgaggcacgcatgactcgtccgtcgattattgtgctgcagtggacatgtgtatgtgctcctgtttctagcatatccccttgctttcaggaagaaagtgaaagtaattat

SEQ ID NO: 9240 - protein, 131 aa, Zea mays subsp. mays
  peptide (1)..(131): Ceres Seq. ID no. 12412370
MARLLRAAAGLALLLAVLAPAASAGGDLAQLGAAVVTRRGGERTTCRGGTVGECMEYLDVDAEGEADVAGMATGGGKRRVLQGGSGYIGYDALRRDNVPCSQRGASYYNCQPGAEANPYSRGCSAITQCRG

SEQ ID NO: 9241 - protein, 77 aa, Zea mays subsp. mays
  peptide (1)..(77): Ceres Seq. ID no. 12412371
MEYLDVDAEGEADVAGMATGGGKRRVLQGGSGYIGYDALRRDNVPCSQRGASYYNCQPGAEANPYSRGCSAITQCRG

SEQ ID NO: 9242 - DNA, 1769 bp, Zea mays subsp. mays
  misc_feature (1)..(1769): Ceres Seq. ID no. 12484003
  misc_feature (1)..(1769): Ortholog of  Ceres SEQ ID NO 13655992 as cited in SEQ ID NO 65504
  misc_feature (1)..(1769): Ortholog of  Ceres SEQ ID NO 13587581 as cited in SEQ ID NO 0
aggataactcccataagaaaaatcgccaaatacgccattcatcttctccgcccgggtttcagaacgtgcggcagtttagccaggatggtggcgatcgagaaccagaaccagagccaggccgcggtggcggtggcggcggaggcggtgccggcgccggcgtcgcggatccccagggaggcgcggcgcctgctgcacgagctggcggcggcgtgggcggacgtggccgactgccgcgcgctggaggtcgtgccgctcaagggggccatgaccaacgaggtctaccaggcgcgctggctcactgcaggccctgccggccagaaggaggagcccagggcggagagggaggtgaggaaggtgctcgtgcggatttacggcgacggcgtcgacctcttcttcgaccgcgaggacgaggtgcgcaccttcgagtgcatgtcacgccatggccagggtccccgcctcctcggccgcttcccgaacggccgcgtcgaggagttcatccacgcaaggacattgtcagctgccgaccttcgcgatcctgaaatttcagctctggtggcttccaagctgagggagttccacaaccttgacatgcctggtcccaaatctgtgctcatttgggacagacttaggaactggctcagaactgccaagagcttgtgtccacctgaagaagccaaggaatttcggttggacagtctggagaaccagattactgcattggagaacgagtgttcaggtgattaccagtggattggtttctgtcacaatgatcttcagtatggcaatatcatgattgatgaagagaccaacgtgctgaccatcattgattatgagtatgcaagcttcaacccagttgcatatgacattgctaaccatttctgtgagatggcagcagactatcattcatcaaagcctcatatactggactacagcagatatccagatgttgatgagcagaagcgttttgttaagacctacctgaacatttctggtgaggaacctgatgcggaagttgtggagaacctgctccaaagcattgagaagcacacgctcgccagccatctagtatggggcctctggggaataatttcggaccatgttaacgacattgacttcgactacaaggagtatgcgaggcagagattcgagcagtactggcacaagtctgcgatcttaacatcttgaacatgtgtataaacacccgtacgtggtctcaggaactccctgagggcctgtggctgcacacacgaaattgtgcagtgccactgacacatagataagctgtgaaagaagaaatactgacgacgacgacgaataatcccgttttgggctcgggaggttatttctccgcaactcgatgagcttcaggcttcagcttcaggaaggaaggaaggagctatggggatttggctgcccgcttatgctgtaccaatgcaattaaaagataaagatccggtccggtgttgcgtgtgctatgtttagttttggctagcaccgccgagagccgtggtcctgttgtggtgtttctagtttctgtatgcttgatgttgttagtgtgctggataatttggttttgtgcttggggagtccttagctttgggacaacgcatacattgtatactgggtagatgtataaacataaaacagctatgggaatttggttctctacctttatttctctctcgaacaggctgtatttcgttaagaaggttaaatttgggtttgtatttgttattatcagcttgttatacatgtgtcagatcaaatcc

SEQ ID NO: 9243 - protein, 394 aa, Zea mays subsp. mays
  peptide (1)..(394): Ceres Seq. ID no. 12484004
RITPIRKIAKYAIHLLRPGFRTCGSLARMVAIENQNQSQAAVAVAAEAVPAPASRIPREARRLLHELAAAWADVADCRALEVVPLKGAMTNEVYQARWLTAGPAGQKEEPRAEREVRKVLVRIYGDGVDLFFDREDEVRTFECMSRHGQGPRLLGRFPNGRVEEFIHARTLSAADLRDPEISALVASKLREFHNLDMPGPKSVLIWDRLRNWLRTAKSLCPPEEAKEFRLDSLENQITALENECSGDYQWIGFCHNDLQYGNIMIDEETNVLTIIDYEYASFNPVAYDIANHFCEMAADYHSSKPHILDYSRYPDVDEQKRFVKTYLNISGEEPDAEVVENLLQSIEKHTLASHLVWGLWGIISDHVNDIDFDYKEYARQRFEQYWHKSAILTS

SEQ ID NO: 9244 - protein, 366 aa, Zea mays subsp. mays
  peptide (1)..(366): Ceres Seq. ID no. 12484005
MVAIENQNQSQAAVAVAAEAVPAPASRIPREARRLLHELAAAWADVADCRALEVVPLKGAMTNEVYQARWLTAGPAGQKEEPRAEREVRKVLVRIYGDGVDLFFDREDEVRTFECMSRHGQGPRLLGRFPNGRVEEFIHARTLSAADLRDPEISALVASKLREFHNLDMPGPKSVLIWDRLRNWLRTAKSLCPPEEAKEFRLDSLENQITALENECSGDYQWIGFCHNDLQYGNIMIDEETNVLTIIDYEYASFNPVAYDIANHFCEMAADYHSSKPHILDYSRYPDVDEQKRFVKTYLNISGEEPDAEVVENLLQSIEKHTLASHLVWGLWGIISDHVNDIDFDYKEYARQRFEQYWHKSAILTS

SEQ ID NO: 9245 - protein, 306 aa, Zea mays subsp. mays
  peptide (1)..(306): Ceres Seq. ID no. 12484006
MTNEVYQARWLTAGPAGQKEEPRAEREVRKVLVRIYGDGVDLFFDREDEVRTFECMSRHGQGPRLLGRFPNGRVEEFIHARTLSAADLRDPEISALVASKLREFHNLDMPGPKSVLIWDRLRNWLRTAKSLCPPEEAKEFRLDSLENQITALENECSGDYQWIGFCHNDLQYGNIMIDEETNVLTIIDYEYASFNPVAYDIANHFCEMAADYHSSKPHILDYSRYPDVDEQKRFVKTYLNISGEEPDAEVVENLLQSIEKHTLASHLVWGLWGIISDHVNDIDFDYKEYARQRFEQYWHKSAILTS

SEQ ID NO: 9246 - DNA, 1349 bp, Zea mays subsp. mays
  misc_feature (1)..(1349): Ceres Seq. ID no. 12356860
  misc_feature (1)..(1349): Ortholog of  Ceres SEQ ID NO 14315915 as cited in SEQ ID NO 57583
accagcgaaaccccagaatgttcgtcctccgcaaaaccctcctccatgcgccgccggccgccgccgcggcggtcccctctcggatctcttccctcctccgcctcatcccctctgcatctttttctgaggtaagcggaggtggggaagaatggggcgcctcctcacccggaggcggcggcggcaggggtgggggtgggaacgaatggagctccacctggtctaccggcctcaccaaggaccatttcgacggatcctcgccctccgtcggccgttctgtcccttccgagtcagcgcccgtctctcgtgagcgggcggccattcgcgctatggatgagtgggacgagagggtccgggaactggagcgtaacaatgtcgaggcgaaggcgtatgtggattcatgggacgaccggatgcgggagacctgtgcgctgctgaagcaggtgcgggagccgggcgctccggggctcgtatctcaaggactcggagaagcaggagatgtaccggctgcacaaggaggaccccgcgacttacaccgtggagcggctcgccaaggacttccgtgtcatgcgacagcgcgtgcacgccatcctctggctcaaggagatggaagaggaagaggagaggaagaggggccagccgctcgacgactccatcgaaatcctgctcgacagctgcccagagttcttcaattctcatgacagggaatttcatgtagcatctcttccatataaacctgacttcaaagtaatgcctgaggactgggatggcacaacacgagatcctgatgaggttctatatgaaatttcaattaaggaagataaaatgttgtatgaggaattcgttcaacgcttggaattcaacaagaagaaggtggcaggagaagttaagtgccacaagtacagccggcgcaagccagacaatggatggagctacatggtcgaaaagcttggttctcagggaaagcgtggtgtaggagggggctggaagttcatcagcttgcctgatggatcaagccgtgcactaaatgatatggagaagatgtatgttaagcgggagactccaaaacggcggcggaggataattgcaccatacaagtgacatggacaacttcagtttgctgaaatgcaaattttctcaactgtcttttgacattgtccagcgaggctgaagcaagaaactgtgaagtagtttggaaccgccagaacagctcctgtttttttcacagcacagtagatggtttgatgtgttttgtaacaaggattatttccccacattttggcagccgaataattatcttttaaacttttcggtgttcctcccgtctctatgcactgccgagcaacaattcc

SEQ ID NO: 9247 - protein, 231 aa, Zea mays subsp. mays
  peptide (1)..(231): Ceres Seq. ID no. 12356861
QRNPRMFVLRKTLLHAPPAAAAAVPSRISSLLRLIPSASFSEVSGGGEEWGASSPGGGGGRGGGGNEWSSTWSTGLTKDHFDGSSPSVGRSVPSESAPVSRERAAIRAMDEWDERVRELERNNVEAKAYVDSWDDRMRETCALLKQVREPGAPGLVSQGLGEAGDVPAAQGGPRDLHRGAARQGLPCHATARARHPLAQGDGRGRGEEEGPAARRLHRNPARQLPRVLQFS

SEQ ID NO: 9248 - protein, 226 aa, Zea mays subsp. mays
  peptide (1)..(226): Ceres Seq. ID no. 12356862
MFVLRKTLLHAPPAAAAAVPSRISSLLRLIPSASFSEVSGGGEEWGASSPGGGGGRGGGGNEWSSTWSTGLTKDHFDGSSPSVGRSVPSESAPVSRERAAIRAMDEWDERVRELERNNVEAKAYVDSWDDRMRETCALLKQVREPGAPGLVSQGLGEAGDVPAAQGGPRDLHRGAARQGLPCHATARARHPLAQGDGRGRGEEEGPAARRLHRNPARQLPRVLQFS

SEQ ID NO: 9249 - protein, 200 aa, Zea mays subsp. mays
  peptide (1)..(200): Ceres Seq. ID no. 12356863
MYRLHKEDPATYTVERLAKDFRVMRQRVHAILWLKEMEEEEERKRGQPLDDSIEILLDSCPEFFNSHDREFHVASLPYKPDFKVMPEDWDGTTRDPDEVLYEISIKEDKMLYEEFVQRLEFNKKKVAGEVKCHKYSRRKPDNGWSYMVEKLGSQGKRGVGGGWKFISLPDGSSRALNDMEKMYVKRETPKRRRRIIAPYK

SEQ ID NO: 9250 - DNA, 1466 bp, Zea mays subsp. mays
  misc_feature (1)..(1466): Ceres Seq. ID no. 12423837
  misc_feature (1)..(1466): Ortholog of  Ceres SEQ ID NO 15177270 as cited in SEQ ID NO 51703
ataacagatacaggcaccccctcctctcctctcctctcctctctctccctctcatcaccaaagaactgcaactaggaacggttcgccacaaaaaaagaacgtacggctatgaagacgaggcgcggtgcctgccacgcggcggcggcggccacggcgccgggcgaggggccggaggcgcaacgccggaagcggcgcaggacggcggcggccgaggggtcgccagcggcggccggcactccaggtgtccgcccggtgggcagagacatgttcgagagagctgcctgacgatctcgtcgtctccatactacgggacgtcgccgcgtccgccagttcgccggccgatctcgccggcgccatgctcacgtgcaagaggttcagggagctcgggcagagcaaggtggtgctggcgcgggcgtcnccgcagtgcctggcggtgcgcgccaaggcctggtcggaggaggcgcaccggttcctgcagcgctgcgccgacgcgggcagcctggaagcgtgctacctccttggcatgattcggttctactgcctggggatccgcggctcgggcgcggcgctgatggcggcggcggcggtgggcgggcaccgcgaggcgctctactcgctggccgtggtccagttcaacggcagcggcgggggcaaggacgaccgcgacctccgcgccggagccgcgctgtgcgcgcgcgcggcgtcgctgggccacgtgggcgcgctccgcgagctggggcactgcctccaggacggctacggcgtgcggcggtccgtgctggacgggcggcgcctcctgatccaggcgaacgcgcgcgagctcgccgccgccgccgcctcgccgccgcaagccgcagccgctcggcaaggcggcgccccacccgactcggcgtcactcgtgcctcctgagcgacttcgggtgccgcgccgcggccggggagccgcacgcggccaaccggttcctggcggactggttcgngtcncggccgctcggtacggcggcggcggcggcagcggncggcgggancggctcctcgcccnaggaggacggcgccggcgcgnngcggntgtgctngcaggcgctgtgcgggcggcccnagacgcggcggcacgagttcaggcggtgctccgtgtggcggcctggtgaannactgctaccgcgcgtgccaggcgctgcantggaagatggcgcacaaggcggagtgcacgcccatggaccggtggctnnnacgtggtcggcgtcggcggcggcgcggcgccgcagccccacgctaatgccgacggcgccgcggcggccccggcgccgtgacgcgctggcggtcgtccgtttcttgtcacttgtcagttagcgtccgcaacgtcagtttttactccttttttttttctgtccgtttctcgccctccatttgtcctctgtactacggcacctgtggttatagttggcaattggcatggcatgctgaggt

SEQ ID NO: 9251 - protein, 263 aa, Zea mays subsp. mays
  peptide (1)..(263): Ceres Seq. ID no. 12423838
  misc_feature (21)..(21): Xaa is any aa, unknown or other
  misc_feature (208)..(208): Xaa is any aa, unknown or other
  misc_feature (210)..(210): Xaa is any aa, unknown or other
  misc_feature (221)..(221): Xaa is any aa, unknown or other
  misc_feature (224)..(224): Xaa is any aa, unknown or other
  misc_feature (229)..(229): Xaa is any aa, unknown or other
  misc_feature (236)..(236): Xaa is any aa, unknown or other
  misc_feature (238)..(238): Xaa is any aa, unknown or other
  misc_feature (240)..(240): Xaa is any aa, unknown or other
  misc_feature (248)..(248): Xaa is any aa, unknown or other
MLTCKRFRELGQSKVVLARAXPQCLAVRAKAWSEEAHRFLQRCADAGSLEACYLLGMIRFYCLGIRGSGAALMAAAAVGGHREALYSLAVVQFNGSGGGKDDRDLRAGAALCARAASLGHVGALRELGHCLQDGYGVRRSVLDGRRLLIQANARELAAAAASPPQAAAARQGGAPPDSASLVPPERLRVPRRGRGAARGQPVPGGLVXVXAARYGGGGGSXRRXRLLAXGGRRRRXAXVXAGAVRAAXDAAARVQAVLRVAAW

SEQ ID NO: 9252 - protein, 207 aa, Zea mays subsp. mays
  peptide (1)..(207): Ceres Seq. ID no. 12423839
  misc_feature (152)..(152): Xaa is any aa, unknown or other
  misc_feature (154)..(154): Xaa is any aa, unknown or other
  misc_feature (165)..(165): Xaa is any aa, unknown or other
  misc_feature (168)..(168): Xaa is any aa, unknown or other
  misc_feature (173)..(173): Xaa is any aa, unknown or other
  misc_feature (180)..(180): Xaa is any aa, unknown or other
  misc_feature (182)..(182): Xaa is any aa, unknown or other
  misc_feature (184)..(184): Xaa is any aa, unknown or other
  misc_feature (192)..(192): Xaa is any aa, unknown or other
MIRFYCLGIRGSGAALMAAAAVGGHREALYSLAVVQFNGSGGGKDDRDLRAGAALCARAASLGHVGALRELGHCLQDGYGVRRSVLDGRRLLIQANARELAAAAASPPQAAAARQGGAPPDSASLVPPERLRVPRRGRGAARGQPVPGGLVXVXAARYGGGGGSXRRXRLLAXGGRRRRXAXVXAGAVRAAXDAAARVQAVLRVAAW

SEQ ID NO: 9253 - protein, 191 aa, Zea mays subsp. mays
  peptide (1)..(191): Ceres Seq. ID no. 12423840
  misc_feature (136)..(136): Xaa is any aa, unknown or other
  misc_feature (138)..(138): Xaa is any aa, unknown or other
  misc_feature (149)..(149): Xaa is any aa, unknown or other
  misc_feature (152)..(152): Xaa is any aa, unknown or other
  misc_feature (157)..(157): Xaa is any aa, unknown or other
  misc_feature (164)..(164): Xaa is any aa, unknown or other
  misc_feature (166)..(166): Xaa is any aa, unknown or other
  misc_feature (168)..(168): Xaa is any aa, unknown or other
  misc_feature (176)..(176): Xaa is any aa, unknown or other
MAAAAVGGHREALYSLAVVQFNGSGGGKDDRDLRAGAALCARAASLGHVGALRELGHCLQDGYGVRRSVLDGRRLLIQANARELAAAAASPPQAAAARQGGAPPDSASLVPPERLRVPRRGRGAARGQPVPGGLVXVXAARYGGGGGSXRRXRLLAXGGRRRRXAXVXAGAVRAAXDAAARVQAVLRVAAW

SEQ ID NO: 9254 - DNA, 1234 bp, Zea mays subsp. mays
  misc_feature (1)..(1234): Ceres Seq. ID no. 12354115
  misc_feature (1)..(1234): Ortholog of  Ceres SEQ ID NO 14310369 as cited in SEQ ID NO 54765
  misc_feature (1)..(1234): Ortholog of  Ceres SEQ ID NO 13638746 as cited in SEQ ID NO 59296
  misc_feature (1)..(1234): Ortholog of  Ceres SEQ ID NO 13596474 as cited in SEQ ID NO 62169
  misc_feature (1)..(1234): Ortholog of  Ceres SEQ ID NO 13598714 as cited in SEQ ID NO 62656
  misc_feature (1)..(1234): Ortholog of  Ceres SEQ ID NO 14302434 as cited in SEQ ID NO 63410
  misc_feature (1)..(1234): Ortholog of  Ceres SEQ ID NO 13597519 as cited in SEQ ID NO 64759
  misc_feature (1)..(1234): Ortholog of  Ceres SEQ ID NO 13587054 as cited in SEQ ID NO 0
acccaaaaccagaattaattatctgacggtgcatgccatgcccatgacacccctcgagtgcgacatggcccctgcagcttctcgccagtcgtggcctcttcctcgctgcggcctgctggtcttggcccttgcactggcgacgaccgccgcggtgggcagcgcgcagctgtcgtcggagagctactacgacgcgtcctgccccgccgcccttctcaccatcaggaccgccgtctcgacggccgtgctgctggagccccgcatgggggcctcccttctccgcctccacttccacgactgtttcgtgcagggttgcgacgcgtcggtgctgctagacgacacggcgagcttcaccggcgagaagggggcggggccgaacgcggggtcgctccggggcttcgacgtgatcgacaacatcaagatgctgctggagctgctgtgccccgcagaccgtctcctgcgccgacatcctcgccgtcgccgcccgcgactcggttgcacaactgggaggaccatcgtgggcggttccgctgggcaggagggacgcgaccacggcgagcgcgtccctggccaacagtgacctccctgggcctaccagcagcctcaacggcctgctcaacgctttctccaacaagggtttgagcagcaccgacatggttgccctctcaggtgcccacaccgtcggccgggcgcagtgcaagaactgccgggcccggatctacaacgacaccgacatcgacgcctccttcgcggcgtcgctgcgggccagctgtcccgcgcaggccggcgccggcgacggcgcgctcgagccgctcgacggctccacgccggacgccttcgacaacgcctacttcggcaacctgctctcccagcgcggcctgctccactccgaccaggcgctcttcggcggcggcggcggcggcgcgactgacggcctggtcagcgcctacgcgtccaacgccggccagtggggggccgacttcgcggcggccatggtcaagatgggcagcatcagcccgctcaccggcacggacggcgagatcagggtcaactgccggagagtgaattaattatttattacagccacgttgattgcatttgctcttggggtagtggactagcgtgcatattttgcaaagaggcagagaagaattgaaatggagcctaagctcatatgtatacaaatgttgtttattattccatattatttcttgcatatataatatatatagcatac

SEQ ID NO: 9255 - protein, 191 aa, Zea mays subsp. mays
  peptide (1)..(191): Ceres Seq. ID no. 12354116
PKTRINYLTVHAMPMTPLECDMAPAASRQSWPLPRCGLLVLALALATTAAVGSAQLSSESYYDASCPAALLTIRTAVSTAVLLEPRMGASLLRLHFHDCFVQGCDASVLLDDTASFTGEKGAGPNAGSLRGFDVIDNIKMLLELLCPADRLLRRHPRRRRPRLGCTTGRTIVGGSAGQEGRDHGERVPGQQ

SEQ ID NO: 9256 - protein, 179 aa, Zea mays subsp. mays
  peptide (1)..(179): Ceres Seq. ID no. 12354117
MPMTPLECDMAPAASRQSWPLPRCGLLVLALALATTAAVGSAQLSSESYYDASCPAALLTIRTAVSTAVLLEPRMGASLLRLHFHDCFVQGCDASVLLDDTASFTGEKGAGPNAGSLRGFDVIDNIKMLLELLCPADRLLRRHPRRRRPRLGCTTGRTIVGGSAGQEGRDHGERVPGQQ

SEQ ID NO: 9257 - protein, 177 aa, Zea mays subsp. mays
  peptide (1)..(177): Ceres Seq. ID no. 12354118
MTPLECDMAPAASRQSWPLPRCGLLVLALALATTAAVGSAQLSSESYYDASCPAALLTIRTAVSTAVLLEPRMGASLLRLHFHDCFVQGCDASVLLDDTASFTGEKGAGPNAGSLRGFDVIDNIKMLLELLCPADRLLRRHPRRRRPRLGCTTGRTIVGGSAGQEGRDHGERVPGQQ

SEQ ID NO: 9258 - DNA, 1256 bp, Zea mays subsp. mays
  misc_feature (1)..(1256): Ceres Seq. ID no. 12362320
  misc_feature (1)..(1256): Ortholog of  Ceres SEQ ID NO 13586839 as cited in SEQ ID NO 690
  misc_feature (1)..(1256): Ortholog of  Ceres SEQ ID NO 14306671 as cited in SEQ ID NO 53809
  misc_feature (1)..(1256): Ortholog of  Ceres SEQ ID NO 13596735 as cited in SEQ ID NO 62904
gcacgagaccattacctagaacatcctaatcgaaaaactcggcctcggccacggccaccctctcaaaccaaacagaacccacacgcgtgcacggacacggagcacgcgtgcgcgccccacgagcgatgtctccccttcgccgcgcgcgctctaccctgctcctcctccactacgtggccgcctcccacttcctgctgtgcgcgccgatccagcgcaccgccgcggccacattgccggaccccgcgccactcgacccggcactgatcctcccctcggcgacctcggtgcagcccaccgccactaccattcccgggggcacgatcccggcgttccccgagcagtcggactcgctagcggggtcctcgtccgcgtgcccgctcgccccttccccggtgctcctcccggccgtgcggtcctcctgcgccaccgacgacggcgcgctgccgccgaggctgcgctgctgccccgcgctggccgcgtggctgttcgccgcctacgcgcccaccgcgctagcggagcggcccccggccgcggccgcggctaccgtggacatgccgctgccgcccgacgactccgagacgtgcgcgggcgccgtggaccgcgcgctgcgtgcggcgggagcggcgctgccccgcccccctggcgctggcggcaacgggacgtgcgacgtggcgttctgctactgcggggtgaggctgaggcggctggcctgcgggtccccgccggctgagggcgggatgtggtcgccagctgacgccgcggcgagggagctggagaaggactgcgcgcagccgggcgtccctggctgttccaaatgcctccttgctcttaccacgataaaggccacgaatcccgggtgtggtgctggcgtggaggcagcaggcaagaagaagcagcagatctaccgatggaccgcgagtgaccgtgactgcgagctcatggggctcatgtggctgctgcagcgcaatgccacacggtacggagcggcggccacggccgtgatccgggccctaatggccgtggacgaggcgttcaccgcaggggtcgcggtggcggcagatacgggggcagccgtggcgtgctcgctgcccgtggacgacgacatgcccctcccggccgagtacgcgcaggtcagcagggccagcgacgcgcctcgtctctgctgcttcctgctcgtgctgctctccattctaagcttctgttttgtgtactcgttgtaatactttgcgatttaattgaagttcgttgtatggtcc

SEQ ID NO: 9259 - protein, 364 aa, Zea mays subsp. mays
  peptide (1)..(364): Ceres Seq. ID no. 12362321
MSPLRRARSTLLLLHYVAASHFLLCAPIQRTAAATLPDPAPLDPALILPSATSVQPTATTIPGGTIPAFPEQSDSLAGSSSACPLAPSPVLLPAVRSSCATDDGALPPRLRCCPALAAWLFAAYAPTALAERPPAAAAATVDMPLPPDDSETCAGAVDRALRAAGAALPRPPGAGGNGTCDVAFCYCGVRLRRLACGSPPAEGGMWSPADAAARELEKDCAQPGVPGCSKCLLALTTIKATNPGCGAGVEAAGKKKQQIYRWTASDRDCELMGLMWLLQRNATRYGAAATAVIRALMAVDEAFTAGVAVAADTGAAVACSLPVDDDMPLPAEYAQVSRASDAPRLCCFLLVLLSILSFCFVYSL

SEQ ID NO: 9260 - protein, 222 aa, Zea mays subsp. mays
  peptide (1)..(222): Ceres Seq. ID no. 12362322
MPLPPDDSETCAGAVDRALRAAGAALPRPPGAGGNGTCDVAFCYCGVRLRRLACGSPPAEGGMWSPADAAARELEKDCAQPGVPGCSKCLLALTTIKATNPGCGAGVEAAGKKKQQIYRWTASDRDCELMGLMWLLQRNATRYGAAATAVIRALMAVDEAFTAGVAVAADTGAAVACSLPVDDDMPLPAEYAQVSRASDAPRLCCFLLVLLSILSFCFVYSL

SEQ ID NO: 9261 - DNA, 1772 bp, Zea mays subsp. mays
  misc_feature (1)..(1772): Ceres Seq. ID no. 12406393
  misc_feature (1)..(1772): Ortholog of  Ceres SEQ ID NO 15179924 as cited in SEQ ID NO 57437
  misc_feature (1)..(1772): Ortholog of  Ceres SEQ ID NO 15171286 as cited in SEQ ID NO 58206
  misc_feature (1)..(1772): Ortholog of  Ceres SEQ ID NO 14302451 as cited in SEQ ID NO 66180
gcacgagaccattacctagaacatcctaatcaaaaaccccaccagtctctggcaggttctcccccccacccctctccgtctccgatcccgtccgcattgcttcgcgccggaccaaggaggaagggtcggcgtcgcaggcattgcggtctgctagccacgagggccatggacccgtgcccgttcgtgcgggtgctggtcggcaacctggcgctgaagatgccggcatcggcgccccccgccgccgccgcggcgtccggctccggcgtgcacccggccacgccgccctgctactactgccgcatccgcctcaacaagctgccctaccagacggcgcccgcgccgctgctgccggccaccgaggagggctcggcgccggcgccggcgccggcgtcgtgcgcggccgccttccacgcctccaaggccgacctggaccgggccgccgccaggcccgcgctcttcctcggcggccgcctccgcaccgcgcgcctcaaggtggccgtgtacgccggccgcgggggcggtgaaggcggcgggaggctgctcggcaagctcgtcttccggttcgacctcaggcgcgccgtggccgagcccttcgtcttcctcagcggctggttcgacatcggcaagcgcggcgccgggaagccggcggcggccaacgccgcgcgcgcgcagctcaacctcaccgtcctcggcgagcctgacccgaggttcgtcttcgagttcgacggcgagcccgagtgcagcccgcaggtgctccaggttaaggggagcatgaagcagcccatgttcacgtgcaagttctcctgccgcagcaacagcgacctgcgctcgcggtccgtgcagtccgactcgggcgccgtcggcccgcgcaactggctggcgaagctgtggtccgagcgcgagcgcgagcgcgcggggaaggagcgcaaggggtggtcggtgacggtgcacgacctgtcggggtcgccggtggcgctggcgtcgatggtgacgccgttcgtggcgtccccggggacggaccgcgtgggccgctccaacccgggcggctggctcatcctgcgccgccgcgtggacgggacctggacgccgtggggccgcctcgagtgctggcgcgatcgcggcggcagcgccggggacgcccagctgggctaccgcttcgagctggtgcccgaccacaacagcaacgtcacgggcacgggcgtgtgcgtggccgagtccggcgtcccggcggcccgcggcgggcggttcgccatcgacctgaccacggccggatcccccgggcggggcagcggcgagttgagccgccacgcgctctggcccccgggcggcttcgtgatgtcggccgccgtgcagggggagggccggcgcggcaggccctccgtggagatcggcgtggcgcacgtcgggtgcgccgaggacgccgccgcgttcgtcgctctggcggccgccgtcgacctcagcatggacgcgtgccggctcttctcctgcaagctgcgccgggagctgtcggcgtgaacggcgaggggggagggagattggatggtgatcggacgaacttgttttcgttgtttgtctgtaatcccgctgagttctggtgtgatgttcgtcttctaggtgccttttgtagcttagaagaagccataaaactgggctctggggtgagcgaggcgaggtgtgtgttgttggatgtttttttttggattcccagcctctccgcatcgtgctgctaccgaagtggtagagatcaaattttcaaagctgtttgtgctgtc

SEQ ID NO: 9262 - protein, 504 aa, Zea mays subsp. mays
  peptide (1)..(504): Ceres Seq. ID no. 12406394
ARDHYLEHPNQKPHQSLAGSPPHPSPSPIPSALLRAGPRRKGRRRRHCGLLATRAMDPCPFVRVLVGNLALKMPASAPPAAAAASGSGVHPATPPCYYCRIRLNKLPYQTAPAPLLPATEEGSAPAPAPASCAAAFHASKADLDRAAARPALFLGGRLRTARLKVAVYAGRGGGEGGGRLLGKLVFRFDLRRAVAEPFVFLSGWFDIGKRGAGKPAAANAARAQLNLTVLGEPDPRFVFEFDGEPECSPQVLQVKGSMKQPMFTCKFSCRSNSDLRSRSVQSDSGAVGPRNWLAKLWSERERERAGKERKGWSVTVHDLSGSPVALASMVTPFVASPGTDRVGRSNPGGWLILRRRVDGTWTPWGRLECWRDRGGSAGDAQLGYRFELVPDHNSNVTGTGVCVAESGVPAARGGRFAIDLTTAGSPGRGSGELSRHALWPPGGFVMSAAVQGEGRRGRPSVEIGVAHVGCAEDAAAFVALAAAVDLSMDACRLFSCKLRRELSA

SEQ ID NO: 9263 - protein, 449 aa, Zea mays subsp. mays
  peptide (1)..(449): Ceres Seq. ID no. 12406395
MDPCPFVRVLVGNLALKMPASAPPAAAAASGSGVHPATPPCYYCRIRLNKLPYQTAPAPLLPATEEGSAPAPAPASCAAAFHASKADLDRAAARPALFLGGRLRTARLKVAVYAGRGGGEGGGRLLGKLVFRFDLRRAVAEPFVFLSGWFDIGKRGAGKPAAANAARAQLNLTVLGEPDPRFVFEFDGEPECSPQVLQVKGSMKQPMFTCKFSCRSNSDLRSRSVQSDSGAVGPRNWLAKLWSERERERAGKERKGWSVTVHDLSGSPVALASMVTPFVASPGTDRVGRSNPGGWLILRRRVDGTWTPWGRLECWRDRGGSAGDAQLGYRFELVPDHNSNVTGTGVCVAESGVPAARGGRFAIDLTTAGSPGRGSGELSRHALWPPGGFVMSAAVQGEGRRGRPSVEIGVAHVGCAEDAAAFVALAAAVDLSMDACRLFSCKLRRELSA

SEQ ID NO: 9264 - protein, 432 aa, Zea mays subsp. mays
  peptide (1)..(432): Ceres Seq. ID no. 12406396
MPASAPPAAAAASGSGVHPATPPCYYCRIRLNKLPYQTAPAPLLPATEEGSAPAPAPASCAAAFHASKADLDRAAARPALFLGGRLRTARLKVAVYAGRGGGEGGGRLLGKLVFRFDLRRAVAEPFVFLSGWFDIGKRGAGKPAAANAARAQLNLTVLGEPDPRFVFEFDGEPECSPQVLQVKGSMKQPMFTCKFSCRSNSDLRSRSVQSDSGAVGPRNWLAKLWSERERERAGKERKGWSVTVHDLSGSPVALASMVTPFVASPGTDRVGRSNPGGWLILRRRVDGTWTPWGRLECWRDRGGSAGDAQLGYRFELVPDHNSNVTGTGVCVAESGVPAARGGRFAIDLTTAGSPGRGSGELSRHALWPPGGFVMSAAVQGEGRRGRPSVEIGVAHVGCAEDAAAFVALAAAVDLSMDACRLFSCKLRRELSA

SEQ ID NO: 9265 - DNA, 1506 bp, Zea mays subsp. mays
  misc_feature (1)..(1506): Ceres Seq. ID no. 12349452
  misc_feature (1)..(1506): Ortholog of  Ceres SEQ ID NO 12613725 as cited in SEQ ID NO 68196
atgggcgctgctggggacacggatgccgcgctccacgctcttcttcccgctctacctcatgtccatcgggcaaggcgggtaccagccttcgctgcaagcgttcggcgccgaccagctgagcatcggggacgatgacgacgacgacggtgacaccgagcccggcgcgtcgtcgacgccggaggagaagtccaaggtgaagagcatgttcttccggtggtggtacttcggcatgtgcagcggcagcctgctggggaactccaccatgtcgtacgtccaagacaacctcggctggggcctcggtttcgccatcccctgcgccgtcatggccttgtccgtcgcggccttcttctgctgcacccctctgtacaagcgcaaggtgcaggtacagcagccgaagggcgccggtattaggccgtctccgagtagcgtcttcaagtcggtgctcggcgctagccgaaagatcagtctgccgccgtcgaggtcatcagacgacaatggcgacgccatttctgagcttgagttgcaagagaagccactgaaaactgatgaagcatcagagtcctcctctgacgaggctgccgctgctcccggcgtggccaaggtcatactcggcctcctgccgatctgggcgatcctgctcgtcttcgcggtgatcttccagcagccgatgaccttcttcaccaagcaaggcatgctgatgaaccacacgatcggcgtcggcgtcggctccggctccctggtgatcccgccggcgatgctgcagagctccatcaccgtctccatcatcctgctcgtgcccatgtacgaccggatgatcgtcccgctgaccaacgccgtcacggggggcagcgacggcatcacggtgctccagcggatcggcgtcggcatggtcctctccgtggtggccatggtcgccgcggcgctcgtcgagtcgcggcggctccgcgcggagcccgccctgctgagcatcttctggctcctgccgcagtacgtcctgctgggggtctccgacgtgttcaccgtggtggggatgcaggagttcttctactcgcaggtgccggcctccatgaggaccaccggcatcgggctctacctcagcgtcttcggcgtcggcggattcctcggcgcgtccctcatcaccctgctcgagatggccacggcgaggcccggcaacgcccgcggatggttctctgacgacccgcgggaggcgcggatagataacttctactggttcttggctctcctctgcttcgtcagctttgtcgtcttcacgcacttgtgcaagtactacaacgacagatctgcgtcagggaggtaggatcgacccgagtaattaagctgggggtggacgagaggatcttcgatcttgattttgcttgacagcttgagtgagaatttattacttgtattttcagggcgattctattctagctagagatagttcggctgtgtaatgttttcagaaagacatgtaattcaggactccagacgtaatggttctgttcc

SEQ ID NO: 9266 - protein, 438 aa, Zea mays subsp. mays
  peptide (1)..(438): Ceres Seq. ID no. 12349453
WALLGTRMPRSTLFFPLYLMSIGQGGYQPSLQAFGADQLSIGDDDDDDGDTEPGASSTPEEKSKVKSMFFRWWYFGMCSGSLLGNSTMSYVQDNLGWGLGFAIPCAVMALSVAAFFCCTPLYKRKVQVQQPKGAGIRPSPSSVFKSVLGASRKISLPPSRSSDDNGDAISELELQEKPLKTDEASESSSDEAAAAPGVAKVILGLLPIWAILLVFAVIFQQPMTFFTKQGMLMNHTIGVGVGSGSLVIPPAMLQSSITVSIILLVPMYDRMIVPLTNAVTGGSDGITVLQRIGVGMVLSVVAMVAAALVESRRLRAEPALLSIFWLLPQYVLLGVSDVFTVVGMQEFFYSQVPASMRTTGIGLYLSVFGVGGFLGASLITLLEMATARPGNARGWFSDDPREARIDNFYWFLALLCFVSFVVFTHLCKYYNDRSASGR

SEQ ID NO: 9267 - protein, 431 aa, Zea mays subsp. mays
  peptide (1)..(431): Ceres Seq. ID no. 12349454
MPRSTLFFPLYLMSIGQGGYQPSLQAFGADQLSIGDDDDDDGDTEPGASSTPEEKSKVKSMFFRWWYFGMCSGSLLGNSTMSYVQDNLGWGLGFAIPCAVMALSVAAFFCCTPLYKRKVQVQQPKGAGIRPSPSSVFKSVLGASRKISLPPSRSSDDNGDAISELELQEKPLKTDEASESSSDEAAAAPGVAKVILGLLPIWAILLVFAVIFQQPMTFFTKQGMLMNHTIGVGVGSGSLVIPPAMLQSSITVSIILLVPMYDRMIVPLTNAVTGGSDGITVLQRIGVGMVLSVVAMVAAALVESRRLRAEPALLSIFWLLPQYVLLGVSDVFTVVGMQEFFYSQVPASMRTTGIGLYLSVFGVGGFLGASLITLLEMATARPGNARGWFSDDPREARIDNFYWFLALLCFVSFVVFTHLCKYYNDRSASGR

SEQ ID NO: 9268 - protein, 419 aa, Zea mays subsp. mays
  peptide (1)..(419): Ceres Seq. ID no. 12349455
MSIGQGGYQPSLQAFGADQLSIGDDDDDDGDTEPGASSTPEEKSKVKSMFFRWWYFGMCSGSLLGNSTMSYVQDNLGWGLGFAIPCAVMALSVAAFFCCTPLYKRKVQVQQPKGAGIRPSPSSVFKSVLGASRKISLPPSRSSDDNGDAISELELQEKPLKTDEASESSSDEAAAAPGVAKVILGLLPIWAILLVFAVIFQQPMTFFTKQGMLMNHTIGVGVGSGSLVIPPAMLQSSITVSIILLVPMYDRMIVPLTNAVTGGSDGITVLQRIGVGMVLSVVAMVAAALVESRRLRAEPALLSIFWLLPQYVLLGVSDVFTVVGMQEFFYSQVPASMRTTGIGLYLSVFGVGGFLGASLITLLEMATARPGNARGWFSDDPREARIDNFYWFLALLCFVSFVVFTHLCKYYNDRSASGR

SEQ ID NO: 9269 - DNA, 834 bp, Zea mays subsp. mays
  misc_feature (1)..(834): Ceres Seq. ID no. 12404684
  misc_feature (1)..(834): Ortholog of  Ceres SEQ ID NO 15173015 as cited in SEQ ID NO 51216
gaaccaagaaagaatcacacaacagcagctcaaaaacctaacacacctcaacaagcagagcaaagacccgggattcgccggcgcggtagcgagagcgagagatggacgggaggatgttcggtctcgagacccccctgatggtggcgctgcagcaccttctggacgtgcccgacggcgacgccggcgcgggcggcgacaaggcgagtggtgccgcggcgggcggcgggcccacgcgcacctacgtccgcgacgcgcgcgccatggcggccaccccggccgacgtcaaggagctcccgggcgcgtacgcgttcgtggtggacatgccggggctgggcacgggcgacatcaaggtgcaggtggaggacgagcgggtgctggtgatcagcggcgagcggcgccgggcaggagcgcgaggacgccaagtacctgcgcatggagcggcggatgggcaagttcatgcgcaagttcgtgctgccggacaacgccgacatggacaagatctcggcggtgtgcagggacggcgtgctcaccgtgaccgtcgagaagctgcccccgcccgagcccaagaaacccaagaccatcgaggtcaaggtcgcctgaggtgggactaggtcgaccgatcgtggctctgaagatgtgggagcagtgccagcgagttgtgaggacctctacctgtgtggaatgtggcgaggaataatcgtagtctgtagtgggggtgcttctggtgtgcgtgtttgcgttccttcggtctcggtgtctgtctaccaattcctatctgatgtatcggcttcggtttcgtatgaaccatgccggatgctttcagtatgttcatcg

SEQ ID NO: 9270 - protein, 177 aa, Zea mays subsp. mays
  peptide (1)..(177): Ceres Seq. ID no. 12404685
NQERITQQQLKNLTHLNKQSKDPGFAGAVARARDGREDVRSRDPPDGGAAAPSGRARRRRRRGRRQGEWCRGGRRAHAHLRPRRARHGGHPGRRQGAPGRVRVRGGHAGAGHGRHQGAGGGRAGAGDQRRAAPGRSARTPSTCAWSGGWASSCASSCCRTTPTWTRSRRCAGTACSP

SEQ ID NO: 9271 - protein, 169 aa, Zea mays subsp. mays
  peptide (1)..(169): Ceres Seq. ID no. 12404686
MDGRMFGLETPLMVALQHLLDVPDGDAGAGGDKASGAAAGGGPTRTYVRDARAMAATPADVKELPGAYAFVVDMPGLGTGDIKVQVEDERVLVISGERRRAGARGRQVPAHGAADGQVHAQVRAAGQRRHGQDLGGVQGRRAHRDRREAAPARAQETQDHRGQGRLRWD

SEQ ID NO: 9272 - protein, 165 aa, Zea mays subsp. mays
  peptide (1)..(165): Ceres Seq. ID no. 12404687
MFGLETPLMVALQHLLDVPDGDAGAGGDKASGAAAGGGPTRTYVRDARAMAATPADVKELPGAYAFVVDMPGLGTGDIKVQVEDERVLVISGERRRAGARGRQVPAHGAADGQVHAQVRAAGQRRHGQDLGGVQGRRAHRDRREAAPARAQETQDHRGQGRLRWD

SEQ ID NO: 9273 - DNA, 1421 bp, Zea mays subsp. mays
  misc_feature (1)..(1421): Ceres Seq. ID no. 12407029
  misc_feature (1)..(1421): Ortholog of  Ceres SEQ ID NO 14313491 as cited in SEQ ID NO 0
accaccaccctccctctctgcctcaccacctactccgcctgcgcctgcgagctgtgctgtgctgcgcaacggggagatccaatccacagaacaggatgcagtccaagcaccgggtcttcgcggaggacctgctcctggcggcggcggcggagggcgaggaccacttcgaccgggtgcccgactccctggtgctcctcatcttcaacaagctggccgacgcgcggtcgctggggcgctgctccgcggtgtcgcgccgcttcagcgcgctggtcccgctcgtggacgacgcctgcctgcgcatcgaccgcgtcatccccgccgacgccgccgacgcgggggcgccgcgcccgcgcgccgcgctctcgcacctcctcaagtccgtgctgctcgccgtgctcaagcccttcgcgcactgcgacgccaagtccgcgtcgccgcaaaagcacgcgcaccagcagcagcagcaccactcgcccgcccaggtgctcaggaacttcagcagcatccgcagcctccggatggagctcccggtctccgacgtgggcaccgacgacggcgtcgtgctcaggtggaaggccgtcttcggcagcacgctgcagagctgcgtcatcctcggcggcaccagggtggaccgcgcgggaccgccgcacgccccctcctccggctccgctccccccgcggtcgacgacgacggcggcagcatcccggagtccctgtacaccaacggcggcctcaagctgcgcgtcgtctggaccatcagctccctcatcgccgcggccancaggcactacctcctccgngagatcgtcaaggagcaccccaccctcgagcgggtggcgctgacggacgccggcgggcagggcacgctcagcatgggggcgcgaccagcctcagggagttcagggacaggccgctcgccgccgcgcccgccgccgccgccaaccgcacgcaggtgcccgcctgcaacatgaagctgcgctacgcgccgctgctggagctctcggacggcaccaggatccacggcgccacgctcgtggtcattcaagcccgtcggcgacgccggcgggaaggacctcgacgagctcggcgccggcgccttcgacgggcccctgagggaggccgtggccgcgctcggcaagcgccgcgcatacctgctcgagatgaacggcttctagtctgcgcgcctctctgctccattgcaatgggcattgttaattggccaatgggcaacggcaactagctagctagattgctcctccgctcgcttcacctcagctgtcagtcagctcctgtcctgacgatatccttgtgaaaaaaaaacagtagtatagaatggagtgggcagcgccagccagccggccagcttcacagtgcattctgatgctatcatgaacggaaatgaagcagtcagtcacatttcg

SEQ ID NO: 9274 - protein, 412 aa, Zea mays subsp. mays
  peptide (1)..(412): Ceres Seq. ID no. 12407030
  misc_feature (260)..(260): Xaa is any aa, unknown or other
  misc_feature (267)..(267): Xaa is any aa, unknown or other
PPPSLSASPPTPPAPASCAVLRNGEIQSTEQDAVQAPGLRGGPAPGGGGGGRGPLRPGARLPGAPHLQQAGRRAVAGALLRGVAPLQRAGPARGRRLPAHRPRHPRRRRRRGGAAPARRALAPPQVRAARRAQALRALRRQVRVAAKARAPAAAAPLARPGAQELQQHPQPPDGAPGLRRGHRRRRRAQVEGRLRQHAAELRHPRRHQGGPRGTAARPLLRLRSPRGRRRRRQHPGVPVHQRRPQAARRLDHQLPHRRGXQALPPPXDRQGAPHPRAGGADGRRRAGHAQHGGATSLREFRDRPLAAAPAAAANRTQVPACNMKLRYAPLLELSDGTRIHGATLVVIQARRRRRREGPRRARRRRLRRAPEGGRGRARQAPRIPARDERLLVCAPLCSIAMGIVNWPMGNGN

SEQ ID NO: 9275 - protein, 322 aa, Zea mays subsp. mays
  peptide (1)..(322): Ceres Seq. ID no. 12407031
  misc_feature (260)..(260): Xaa is any aa, unknown or other
  misc_feature (266)..(266): Xaa is any aa, unknown or other
HHPPSLPHHLLRLRLRAVLCCATGRSNPQNRMQSKHRVFAEDLLLAAAAEGEDHFDRVPDSLVLLIFNKLADARSLGRCSAVSRRFSALVPLVDDACLRIDRVIPADAADAGAPRPRAALSHLLKSVLLAVLKPFAHCDAKSASPQKHAHQQQQHHSPAQVLRNFSSIRSLRMELPVSDVGTDDGVVLRWKAVFGSTLQSCVILGGTRVDRAGPPHAPSSGSAPPAVDDDGGSIPESLYTNGGLKLRVVWTISSLIAAAXRHYLLXEIVKEHPTLERVALTDAGGQGTLSMGARPASGSSGTGRSPPRPPPPPTARRCPPAT

SEQ ID NO: 9276 - protein, 291 aa, Zea mays subsp. mays
  peptide (1)..(291): Ceres Seq. ID no. 12407032
  misc_feature (229)..(229): Xaa is any aa, unknown or other
  misc_feature (235)..(235): Xaa is any aa, unknown or other
MQSKHRVFAEDLLLAAAAEGEDHFDRVPDSLVLLIFNKLADARSLGRCSAVSRRFSALVPLVDDACLRIDRVIPADAADAGAPRPRAALSHLLKSVLLAVLKPFAHCDAKSASPQKHAHQQQQHHSPAQVLRNFSSIRSLRMELPVSDVGTDDGVVLRWKAVFGSTLQSCVILGGTRVDRAGPPHAPSSGSAPPAVDDDGGSIPESLYTNGGLKLRVVWTISSLIAAAXRHYLLXEIVKEHPTLERVALTDAGGQGTLSMGARPASGSSGTGRSPPRPPPPPTARRCPPAT

SEQ ID NO: 9277 - DNA, 1575 bp, Zea mays subsp. mays
  misc_feature (1)..(1575): Ceres Seq. ID no. 13493270
  misc_feature (1)..(1575): Ortholog of  Ceres SEQ ID NO 13597805 as cited in SEQ ID NO 64186
gcacgagaccattacctagaacatcctaatcgaaaacagtcaccaccacggccaccctcctcttgtatagtcaaaccggccctctccttgtaaccttgggcaagaggagcagaaaggtcccagctttccgtgttcttctgcttctttccccgcctcgccttcgttccccccgtcaccagatctcgaggcagcggagtccggggacgccgttctttccgttgtgcttcctttgcctcttgctgccggcggccggtgattttcccgaggtctgtttgggcggcaggtagaggctattttcttggcggctggtgggatggatagccacgccgccgggtcgagctccggcgggtccggggatggcggcgcgcagcccaggaggagctccaggaagcccaagtattccaagtttactcagcaggagcttccagcttgcaagccgattcttactccaaaatgggttatttcagtattcgttcttgttggcgtgatttttgtcccgattggtattgtttcgctgcaagcttcacgacaggttgtcgagatcgttgatcggtatgatgatgcatgtgtccctgctggtgtgactgacaagcttgcttacatccggaatgatagtataccaaaaagctgcacaaggaatctgacgattacaaaggatatgaagcagccgatttttgtgtattatcagctggatgacttttaccagaatcataggaggtatgtcaagagtcgtaatgatgcacagctaagagataaaagtaaagcgactgactttaccaattgtgatcctgaggccaaaacggtagatggaaaaccaattgtgccttgtggtcttattgcatggagcctgttcaatgatacatataaactcattcacaacaatgtaaccttgagagtggagaagaaggacatctcttggaagagtgacagagaccacaaatttgggagtgatgtcttcccaacgaactttcagaaaggacctcttaaaggtggaaaaacacttgatccaagtatcccgttgagtaagcaagaggacctcattgtttggatgcggactgcagcacttccgacattcagaaagctgtatggaaggatatatgttgatctcaaggaaaacgatacaatcacagtccagttggacaacaactacaacacctatagctttggtggcaagaagaagctggtgctttctaccgcaacctggctcgggggaaagaacgattttctgggccttgcgtacctcaccgtcggcggactctgcttcttcttggcattcgcgttcaccttgctatacttgataaagccaaggaaaatgggagataacagctacctgtcatggaacagacccccttcaggtcgctgatgatgtgctttggaagttaaatgcgatacacaggcagcaccaaacagattcagattatggtcggaatgtatcttgtaccacagagaaattttatccgtgctcgtcggtgtagaatatatacggcacccttgcacatattgtacattacatcgaaacacatagctttgttttctacaaaattgtatactcaaaattgtatactcaaaagtttc

SEQ ID NO: 9278 - protein, 349 aa, Zea mays subsp. mays
  peptide (1)..(349): Ceres Seq. ID no. 13493271
MDSHAAGSSSGGSGDGGAQPRRSSRKPKYSKFTQQELPACKPILTPKWVISVFVLVGVIFVPIGIVSLQASRQVVEIVDRYDDACVPAGVTDKLAYIRNDSIPKSCTRNLTITKDMKQPIFVYYQLDDFYQNHRRYVKSRNDAQLRDKSKATDFTNCDPEAKTVDGKPIVPCGLIAWSLFNDTYKLIHNNVTLRVEKKDISWKSDRDHKFGSDVFPTNFQKGPLKGGKTLDPSIPLSKQEDLIVWMRTAALPTFRKLYGRIYVDLKENDTITVQLDNNYNTYSFGGKKKLVLSTATWLGGKNDFLGLAYLTVGGLCFFLAFAFTLLYLIKPRKMGDNSYLSWNRPPSGR

SEQ ID NO: 9279 - protein, 234 aa, Zea mays subsp. mays
  peptide (1)..(234): Ceres Seq. ID no. 13493272
MKQPIFVYYQLDDFYQNHRRYVKSRNDAQLRDKSKATDFTNCDPEAKTVDGKPIVPCGLIAWSLFNDTYKLIHNNVTLRVEKKDISWKSDRDHKFGSDVFPTNFQKGPLKGGKTLDPSIPLSKQEDLIVWMRTAALPTFRKLYGRIYVDLKENDTITVQLDNNYNTYSFGGKKKLVLSTATWLGGKNDFLGLAYLTVGGLCFFLAFAFTLLYLIKPRKMGDNSYLSWNRPPSGR

SEQ ID NO: 9280 - DNA, 1578 bp, Zea mays subsp. mays; identical to SEQ ID NO: 4661
  misc_feature (1)..(1578): Ceres Seq. ID no. 13492685
  misc_feature (1)..(1578): Ortholog of  Ceres SEQ ID NO 14303770 as cited in SEQ ID NO 53890

SEQ ID NO: 9281 - protein, 436 aa, Zea mays subsp. mays; identical to SEQ ID NO: 4662
  peptide (1)..(436): Ceres Seq. ID no. 13492686

SEQ ID NO: 9282 - protein, 402 aa, Zea mays subsp. mays; identical to SEQ ID NO: 4663
  peptide (1)..(402): Ceres Seq. ID no. 13492687

SEQ ID NO: 9283 - protein, 309 aa, Zea mays subsp. mays; identical to SEQ ID NO: 4664
  peptide (1)..(309): Ceres Seq. ID no. 13492688

SEQ ID NO: 9284 - DNA, 1504 bp, Zea mays subsp. mays
  misc_feature (1)..(1504): Ceres Seq. ID no. 12365889
  misc_feature (1)..(1504): Ortholog of  Ceres SEQ ID NO 14302875 as cited in SEQ ID NO 66242
gatgagctagctagcaagcctccgatggcgccgcctcgttggccttggccggcaccggctcaacattgccggcagaggccgcccctgcccgggtccgcgccttctctgcctcggccgcccagtccatgcgcacgatgaccgtcaccagcaccgccaagctgacggcggcgcccaccaggaagccggccaggaggccctccagcccgaggccggccttgaagccgagcgcgacgcccaccggcagcgccaccacgtagaagccgcccacgacggcgtacatgcccagcagcggccgcgccgtgcccccgcacgatgccgccgcacacgttgagcgggaagttgaccacctccagcagcgccatcaccttcatggcccgccccacgccgtcccgcacctccgggctgcgcgtgtatatgcgcgcccacggccggcgcgccgccagcatgagcaggcctccggcgaggcccgccaccgcgccgcccgccaccgacaccctggcggcgcggcgcgccgtggcggcgtccccggcgcccagctcgttggacacgcgcaccgacgcgctgacggacagcgacagcatggccgcgaacagcaggtagtcgaagttgagcgtgacggcgaccacgcccaccgtgcggcgcgcgtcggggaggcgccccgtgaggagcaccaggatctcgtaggaccaccactcgaggcaggtgttgaggcagcaggggacggccaggcggaggagcagcagccacgccccggacgcccatcctggcggagagcgagacggtgagcgggatgtggagcgccagcgccagggcagcggcgaacagagtgggcagcgtggcctcctgcgcgctgaggtacgccttgagcgggttgagcacggaggtgacggcgaggtccgggaggaggcagagcacgtaggtcctggccgtggccgcgatgtcgggctgctggccgaagcgcagcagcacggcgtcgacgcgcgtccagaggagcgcgatggggacggaggcggccaggagcatgagggtggccctgagcagcgtcccgcgcaggagggcgacgtttccggcgccgtgcgcctggccgcagatgggctccatggcgccgcagaggccgctgaggacggcgaagccggtgacgttggcgaagctgtagccgagcgtgccggcggccagctccaggtcgccgaggcggccgaggaaggccgtggtcacggcctgcttggcgaaccaggtgaggttcatgccgatgagagggagcgcgatgccgcgctgcgcgcgcacctcggacgcaacagcggccaggccatgctgctgccttggcggtggtgtcgtcatggtcatggctgctgcgtgagcgagcgagcagatggagatggagtttggtttgctttggtttgttggggttacaggcagcacatatccacatactagtatacatactttacttaggctgcctgctttatttctgctttcttccatgaatggatcgtaacggttctgc

SEQ ID NO: 9285 - protein, 168 aa, Zea mays subsp. mays
  peptide (1)..(168): Ceres Seq. ID no. 12365890
MPSSGRAVPPHDAAAHVEREVDHLQQRHHLHGPPHAVPHLRAARVYARPRPARRQHEQASGEARHRAARHRHPGGAARRGGVPGAQLVGHAHRRADGQRQHGREQQVVEVERDGDHAHRAARVGEAPREEHQDLVGPPLEAGVEAAGDGQAEEQQPRPGRPSWRRARR

SEQ ID NO: 9286 - protein, 95 aa, Zea mays subsp. mays
  peptide (1)..(95): Ceres Seq. ID no. 12365891
MPPHTLSGKLTTSSSAITFMARPTPSRTSGLRVYMRAHGRRAASMSRPPARPATAPPATDTLAARRAVAASPAPSSLDTRTDALTDSDSMAANSR

SEQ ID NO: 9287 - DNA, 1529 bp, Zea mays subsp. mays
  misc_feature (1)..(1529): Ceres Seq. ID no. 12373122
  misc_feature (1)..(1529): Ortholog of  Ceres SEQ ID NO 15176423 as cited in SEQ ID NO 53228
agtaagccacacacagacagtcagacacaggcacacagcgagggagtcctctcctcccccagaaaaggaaaagacgcattccgcacacgcgcggctgggtgtcgaggccgggagacgcggtgaagctagctgctagcgtagccgcgcgcggcgggcgggctcgagctgcgctgtcgctccatgtcggccaccgccgagagcggtggggatctgtcggcggcgcgccgccggtgggatctcaccaacaagggggccgagagcaccccaattttgaaagatgctgtggaaatatctacagatgaagaatcagatggtgttgttacatgccatccgaatggtaacactgatggatgcgaagaaactattagtggcagtcacgatgatgatagcccagaaggccaggaaactagttccattaaggaacctgatgtagaaggtgacacacaggaagacaaacgtgtaaatcaagattcactcaagttgattgatgaagagtctgctcctcccaagtccccagcaaaatccgcgactgcaagttctagatcggagaggcctaaacgtgttgttccccgaccattttctctttctaatcaaagaagtttgtttggagtaaatggtggtgtggccaatccattggccaataaggataaatctggtgataaaagtagcatctctccagcaagcatgacaaagaagagtacgcagatggcacttaggaagactttgcagcctgagaaggtatttcatcctctggaagaggactcttgttctgtgacatcctctacaacatcaacaagagctggcagaactaagatgactgttcccgtcgctccttcatttgtgtgtgctaaccgtgctgacaagaggaaggagttctacacaaaattagaggagaaacataaagctttggaagcagagaaggacgaggctgaggccaggaaaaaggatgagcaagacgttgctttaaaacaactaaggaagtcattggtgattagagcgaaacccatgccgagcttctatcaagaagggcccccaccaaaggctgaactgaagaaggtgcctcctacccgtgccaaatcgccaaagtttacaagttcaaggagaaggagctgcagtgatacaccattgacacctggcggggaaaataccaacgcaacatctacccggccacatcgtcacagcatcgggagtcctagagacgctaacagagtacaacaatgctcgccaaagagcggtgtggcaaccaaaacaagatctgtcaaggctgagctgaaggccctctgaagagcatggagcagccgagtgatgtgtttctctgtacaaaccgaattgtctaaccgtttccatttccatgcatttttgcttctattttatacccaacatctccagcaaaagaaggctgtagggccaatgacgttgttcagcgccgctggaccttatccattttcttacattcgccttgtactcgtaagaactcttggtggcaccatgtgacattccatgtaaattacttgaggatccttgtaggt

SEQ ID NO: 9288 - protein, 367 aa, Zea mays subsp. mays
  peptide (1)..(367): Ceres Seq. ID no. 12373123
MSATAESGGDLSAARRRWDLTNKGAESTPILKDAVEISTDEESDGVVTCHPNGNTDGCEETISGSHDDDSPEGQETSSIKEPDVEGDTQEDKRVNQDSLKLIDEESAPPKSPAKSATASSRSERPKRVVPRPFSLSNQRSLFGVNGGVANPLANKDKSGDKSSISPASMTKKSTQMALRKTLQPEKVFHPLEEDSCSVTSSTTSTRAGRTKMTVPVAPSFVCANRADKRKEFYTKLEEKHKALEAEKDEAEARKKDEQDVALKQLRKSLVIRAKPMPSFYQEGPPPKAELKKVPPTRAKSPKFTSSRRRSCSDTPLTPGGENTNATSTRPHRHSIGSPRDANRVQQCSPKSGVATKTRSVKAELKAL

SEQ ID NO: 9289 - protein, 199 aa, Zea mays subsp. mays
  peptide (1)..(199): Ceres Seq. ID no. 12373124
MTKKSTQMALRKTLQPEKVFHPLEEDSCSVTSSTTSTRAGRTKMTVPVAPSFVCANRADKRKEFYTKLEEKHKALEAEKDEAEARKKDEQDVALKQLRKSLVIRAKPMPSFYQEGPPPKAELKKVPPTRAKSPKFTSSRRRSCSDTPLTPGGENTNATSTRPHRHSIGSPRDANRVQQCSPKSGVATKTRSVKAELKAL

SEQ ID NO: 9290 - protein, 192 aa, Zea mays subsp. mays
  peptide (1)..(192): Ceres Seq. ID no. 12373125
MALRKTLQPEKVFHPLEEDSCSVTSSTTSTRAGRTKMTVPVAPSFVCANRADKRKEFYTKLEEKHKALEAEKDEAEARKKDEQDVALKQLRKSLVIRAKPMPSFYQEGPPPKAELKKVPPTRAKSPKFTSSRRRSCSDTPLTPGGENTNATSTRPHRHSIGSPRDANRVQQCSPKSGVATKTRSVKAELKAL

SEQ ID NO: 9291 - DNA, 1400 bp, Zea mays subsp. mays
  misc_feature (1)..(1400): Ceres Seq. ID no. 12359514
  misc_feature (1)..(1400): Ortholog of  Ceres SEQ ID NO 14312293 as cited in SEQ ID NO 58744
  misc_feature (1)..(1400): Ortholog of  Ceres SEQ ID NO 15177596 as cited in SEQ ID NO 59731
gtagccttccaaccaaaccaacccacgccatcatcttccgtcaatccatccatccgcttgtccctaccacctccaccaaccaaaacccccaaccgccgaggtcaccggcgactccgtcctcgccgcgccgcgccgcgccgtgaggatgtcgttccactaccacgaccacgggctgtccatggacgccgcggcgncggcggccgccgccgccgcgtcgtcgccgaaccctagcggcttctcccccggcatcggcggggagagggagaaggcggccatcgcggcgcacccgctgtacgagcgcctcctggaggcgcacgtcgcctgcctacgcgtcgccacccccgtcgaccagctcccccgcatcgacgcgcagatcgccgcgcgccccccgccgctcgccgcggccnnnnggnncgcggcngccggggccgcggccgcgggaggcccgtccggcggggaggagctcgacctcttcatgacgcactatgtattgctcctttgctcattcaaggaacagctgcagcagcatgtacgtgttcatgcaatggaagcagtgatgggttgctgggagcttgaacaatccttacaaagcctaacaggggcatctccgggtgaaggcactggaggaaccatgtctgacgatgaagataaccaggtggatagtgaagccaacatgttcgatggaaatgatggatcagacggtatgggctttggccccctgatactaacagagggtgaacggtccttagttgagcgtgtacggaaggagctgaagaacgagcttaagcagggttacaaggaaaagcttgtcgatatcagggaagagatcatgcgcaaacgcagggctgggaagcttcctggagataccgcatctgtactgaaagcttggtggcaagctcattccaagtggccgtacccaactgaagacgacaaggccagactggtgcaggaaacggggttgcagctaaagcaaatcaacaactggttcattaaccaacgcaagcggaactggcacagcaacccaacatcctcggctgaaaagaccaagaagaaaaggtgatgatggcccagagcaatcttggcaaaaagctagagatgtccactatactttattatggcgaagtacattctccctcacttcgtaggcaagagggaaaggtatcttgggtgacttgagtggccacctaatgcgcaagtttgacgacgtggtggggctggagttggtagtgacctcagcagtatagcattcgctaacgtgatgtgggtgaatcacgtgttgcagtagaaccggcgagcgggaggggggtaatttatgttgtattgtaattgtgttttttattaccttgtaatgatattttagggagaatcccaagattcatattcgcatgttttgtcgtccg

SEQ ID NO: 9292 - protein, 304 aa, Zea mays subsp. mays
  peptide (1)..(304): Ceres Seq. ID no. 12359515
  misc_feature (17)..(17): Xaa is any aa, unknown or other
  misc_feature (88)..(88): Xaa is any aa, unknown or other
  misc_feature (89)..(89): Xaa is any aa, unknown or other
  misc_feature (90)..(90): Xaa is any aa, unknown or other
  misc_feature (92)..(92): Xaa is any aa, unknown or other
MSFHYHDHGLSMDAAAXAAAAAASSPNPSGFSPGIGGEREKAAIAAHPLYERLLEAHVACLRVATPVDQLPRIDAQIAARPPPLAAAXXXAXAGAAAAGGPSGGEELDLFMTHYVLLLCSFKEQLQQHVRVHAMEAVMGCWELEQSLQSLTGASPGEGTGGTMSDDEDNQVDSEANMFDGNDGSDGMGFGPLILTEGERSLVERVRKELKNELKQGYKEKLVDIREEIMRKRRAGKLPGDTASVLKAWWQAHSKWPYPTEDDKARLVQETGLQLKQINNWFINQRKRNWHSNPTSSAEKTKKKR

SEQ ID NO: 9293 - protein, 293 aa, Zea mays subsp. mays
  peptide (1)..(293): Ceres Seq. ID no. 12359516
  misc_feature (6)..(6): Xaa is any aa, unknown or other
  misc_feature (77)..(77): Xaa is any aa, unknown or other
  misc_feature (78)..(78): Xaa is any aa, unknown or other
  misc_feature (79)..(79): Xaa is any aa, unknown or other
  misc_feature (81)..(81): Xaa is any aa, unknown or other
MDAAAXAAAAAASSPNPSGFSPGIGGEREKAAIAAHPLYERLLEAHVACLRVATPVDQLPRIDAQIAARPPPLAAAXXXAXAGAAAAGGPSGGEELDLFMTHYVLLLCSFKEQLQQHVRVHAMEAVMGCWELEQSLQSLTGASPGEGTGGTMSDDEDNQVDSEANMFDGNDGSDGMGFGPLILTEGERSLVERVRKELKNELKQGYKEKLVDIREEIMRKRRAGKLPGDTASVLKAWWQAHSKWPYPTEDDKARLVQETGLQLKQINNWFINQRKRNWHSNPTSSAEKTKKKR

SEQ ID NO: 9294 - protein, 194 aa, Zea mays subsp. mays
  peptide (1)..(194): Ceres Seq. ID no. 12359517
MTHYVLLLCSFKEQLQQHVRVHAMEAVMGCWELEQSLQSLTGASPGEGTGGTMSDDEDNQVDSEANMFDGNDGSDGMGFGPLILTEGERSLVERVRKELKNELKQGYKEKLVDIREEIMRKRRAGKLPGDTASVLKAWWQAHSKWPYPTEDDKARLVQETGLQLKQINNWFINQRKRNWHSNPTSSAEKTKKKR

SEQ ID NO: 9295 - DNA, 1611 bp, Zea mays subsp. mays
  misc_feature (1)..(1611): Ceres Seq. ID no. 12372832
  misc_feature (1)..(1611): Ortholog of  Ceres SEQ ID NO 12593464 as cited in SEQ ID NO 69039
agcgtccgtttcctcgaggctcgaccagtcgagcttgagaaaaatcaaagctcccacctacctcgagacccaggacgcgtggagagcggtgccaaaccaccatggcgatcctgctcctcttgctcttcgttttgtcctcagcttcagctgatgagtacggggaagagctgctgcagcgcgcgtggggggagcgggagtggatggtgagcgtgcggcggcgcatccacgcgcatccggagctcgcgttccgggagcaccgcaccgcagccctcgtccgcgaggagctcgagcacctcggccttcccgcccgcgccgtcgccggaacgggcgtcgtcgctgatgtaggttccggggcgccccccttcgtggcgctccgcgccgacatggacgcgctcccgctccaggaattagtggagtgggagcataagagcaaggtggacggagtgatgcacgcctgcgggcacgatgtccacacagcgatgcttctgggagcagcaaagttactcagccagcgtaaggatcagctcaagggaacagtgagactcctttttcaacctgccgaggaaagtggtgcaggtgcatctcatatgataagagaaggggttctggacggtgttgaagccatatttgcaatgcatgttgactatcgtataccaactggtgtaatagcagctcacccaggacctacacaagcggctgtatgtttcttcgaagcaaaaattgaaggtaaaactgggatggctgaaaccccacacttaaatgtggaccctgttgtcgtcacatcattggccatcctgtccctgcagcagcttatttccagagaagatgatcctcttcacagccaagtggtctcggttacctatgtgaaagctggaaaagcccttgatgctacccctaaccttgttgaatttggaggtactttgaggagcctcaccactgaaggcctttactgtctgcaaagaagggttaaagaggtggtagaagggcaggcggctgtgcataggtgcaagggagctgtcgaaataaaggttgaggactacccggtgtaccctgccgttgtgaacgacgagaagctgcatcgacatgtagaggatgtcggcagaggcttgcttggcccgggcaaggtgagaccaggggaaaagatcatggccggcgaagacttcgctttctaccagcagcttgttcccggcgttatgtttggcatcggcattagaaacgaggaagctggttctgttcactcggctcacaacccctatttcttcgtcgatgaggacgtcattcctgttggggctgctttgcatgctgccattgcagaactgtacttcactgacggccccctctttcgacaaagaagactagtggtttctcgttcgtgcgtattttgtctggatcagtccgaacagatggcttcagctggccaatcagatctgaacatctggtccaccatgctgatcagccgcgctccgcggccagtatcaacctccaactatttttccctctgtaaccagaaacactacacatgtttctcaaccctacagtggtctagctattttattctctctttaaacagaaacactgcaaggttcctaaccttatagtgggatttagaac

SEQ ID NO: 9296 - protein, 498 aa, Zea mays subsp. mays
  peptide (1)..(498): Ceres Seq. ID no. 12372833
MAILLLLLFVLSSASADEYGEELLQRAWGEREWMVSVRRRIHAHPELAFREHRTAALVREELEHLGLPARAVAGTGVVADVGSGAPPFVALRADMDALPLQELVEWEHKSKVDGVMHACGHDVHTAMLLGAAKLLSQRKDQLKGTVRLLFQPAEESGAGASHMIREGVLDGVEAIFAMHVDYRIPTGVIAAHPGPTQAAVCFFEAKIEGKTGMAETPHLNVDPVVVTSLAILSLQQLISREDDPLHSQVVSVTYVKAGKALDATPNLVEFGGTLRSLTTEGLYCLQRRVKEVVEGQAAVHRCKGAVEIKVEDYPVYPAVVNDEKLHRHVEDVGRGLLGPGKVRPGEKIMAGEDFAFYQQLVPGVMFGIGIRNEEAGSVHSAHNPYFFVDEDVIPVGAALHAAIAELYFTDGPLFRQRRLVVSRSCVFCLDQSEQMASAGQSDLNIWSTMLISRAPRPVSTSNYFSLCNQKHYTCFSTLQWSSYFILSLNRNTARFLTL

SEQ ID NO: 9297 - protein, 465 aa, Zea mays subsp. mays
  peptide (1)..(465): Ceres Seq. ID no. 12372834
MVSVRRRIHAHPELAFREHRTAALVREELEHLGLPARAVAGTGVVADVGSGAPPFVALRADMDALPLQELVEWEHKSKVDGVMHACGHDVHTAMLLGAAKLLSQRKDQLKGTVRLLFQPAEESGAGASHMIREGVLDGVEAIFAMHVDYRIPTGVIAAHPGPTQAAVCFFEAKIEGKTGMAETPHLNVDPVVVTSLAILSLQQLISREDDPLHSQVVSVTYVKAGKALDATPNLVEFGGTLRSLTTEGLYCLQRRVKEVVEGQAAVHRCKGAVEIKVEDYPVYPAVVNDEKLHRHVEDVGRGLLGPGKVRPGEKIMAGEDFAFYQQLVPGVMFGIGIRNEEAGSVHSAHNPYFFVDEDVIPVGAALHAAIAELYFTDGPLFRQRRLVVSRSCVFCLDQSEQMASAGQSDLNIWSTMLISRAPRPVSTSNYFSLCNQKHYTCFSTLQWSSYFILSLNRNTARFLTL

SEQ ID NO: 9298 - protein, 404 aa, Zea mays subsp. mays
  peptide (1)..(404): Ceres Seq. ID no. 12372835
MDALPLQELVEWEHKSKVDGVMHACGHDVHTAMLLGAAKLLSQRKDQLKGTVRLLFQPAEESGAGASHMIREGVLDGVEAIFAMHVDYRIPTGVIAAHPGPTQAAVCFFEAKIEGKTGMAETPHLNVDPVVVTSLAILSLQQLISREDDPLHSQVVSVTYVKAGKALDATPNLVEFGGTLRSLTTEGLYCLQRRVKEVVEGQAAVHRCKGAVEIKVEDYPVYPAVVNDEKLHRHVEDVGRGLLGPGKVRPGEKIMAGEDFAFYQQLVPGVMFGIGIRNEEAGSVHSAHNPYFFVDEDVIPVGAALHAAIAELYFTDGPLFRQRRLVVSRSCVFCLDQSEQMASAGQSDLNIWSTMLISRAPRPVSTSNYFSLCNQKHYTCFSTLQWSSYFILSLNRNTARFLTL

SEQ ID NO: 9299 - DNA, 1283 bp, Zea mays subsp. mays
  misc_feature (1)..(1283): Ceres Seq. ID no. 12407025
  misc_feature (1)..(1283): Ortholog of  Ceres SEQ ID NO 13654431 as cited in SEQ ID NO 67761
acaggaggcgcggagcaggaggagacacatggcagatgaaggcgaggaggcggtgccgccggccgcgatggtgggggaggcgccaacagaggactttgggctgcccgctgagctgatggccgtgctaccatcggacccgttcgctcagctggacgtggcgcgcaagatcacctccatcgcgctctcgcaccgcctcggccgcctcgaggccgaggcggcgcgcctgcgctcgcagctcgccgagcgtgacgccgaggccgaggagctccgcgagcgcgtcgagcagctcgactccgcgctcgccgtcgccaccgggccgcctccgccgcgctgaggaggaaaaggagacactgctgcgggacaactctgcgctgtccaacaccgttaggaagctgaacagagatgtcgccaagttggaagttttcaaaaagacacttgtgcagtcgctccaggaagatgacagcagtgataatactgctcccagggcaagcgttgcagcaacttcaaacttctctgcgccatcagatgaagattctgcatttccaacttccaaatcatcacagatttcagaaactgcgagttcagtctcagaggaaaatagccaagttgaaccagatgcacctaggccaccaccccgtccacatgtatttttgccgtcatacaacagcacaccaaggagaactcccccagactcacctccaaggcgttatgcatcggtatcaccgccgaggcgacattcaatctccgttacgtcgatgaatatgtttaatgacaggtcctcaggcttttctagtcagcatagctctccatttgaccctccaagtcaaacaggacgaacaagagttgatggaaaggagttctttcgtcatgtcagaaatcggttgtcgtatgagcagtttggtgcattcctggctaatgtgaaggagctgaacgcacacaggcagaccagagaggataccttaagaaaggctgatgagatctttggtcctgaaaacaaggacctgtacaccgtttttgagagcctaataactcgcaacattcgctaatctcctcaagggttgaagcattaccaatgattactagtgattcatgttttaccggtatattttggttacaatgttcaacactttttttgtatttgaagtctgtagtctgttgtggattcttggtatatagtctatagttctttcttttttttttcatgctaatgtccatgtagagtcctctgtttctatgtaagctacaacttatattctaatacaaatgttgtctgatatttcttg

SEQ ID NO: 9300 - protein, 118 aa, Zea mays subsp. mays
  peptide (1)..(118): Ceres Seq. ID no. 12407026
MSPSWKFSKRHLCSRSRKMTAVIILLPGQALQQLQTSLRHQMKILHFQLPNHHRFQKLRVQSQRKIAKLNQMHLGHHPVHMYFCRHTTAHQGELPQTHLQGVMHRYHRRGDIQSPLRR

SEQ ID NO: 9301 - protein, 110 aa, Zea mays subsp. mays
  peptide (1)..(110): Ceres Seq. ID no. 12407027
QEARSRRRHMADEGEEAVPPAAMVGEAPTEDFGLPAELMAVLPSDPFAQLDVARKITSIALSHRLGRLEAEAARLRSQLAERDAEAEELRERVEQLDSALAVATGPPPPR

SEQ ID NO: 9302 - protein, 101 aa, Zea mays subsp. mays
  peptide (1)..(101): Ceres Seq. ID no. 12407028
MADEGEEAVPPAAMVGEAPTEDFGLPAELMAVLPSDPFAQLDVARKITSIALSHRLGRLEAEAARLRSQLAERDAEAEELRERVEQLDSALAVATGPPPPR

SEQ ID NO: 9303 - DNA, 1355 bp, Zea mays subsp. mays
  misc_feature (1)..(1355): Ceres Seq. ID no. 13500460
  misc_feature (1)..(1355): Ortholog of  Ceres SEQ ID NO 14303263 as cited in SEQ ID NO 1224
  misc_feature (1)..(1355): Ortholog of  Ceres SEQ ID NO 13593955 as cited in SEQ ID NO 54278
  misc_feature (1)..(1355): Ortholog of  Ceres SEQ ID NO 14314092 as cited in SEQ ID NO 62788
  misc_feature (1)..(1355): Ortholog of  Ceres SEQ ID NO 13655302 as cited in SEQ ID NO 63307
  misc_feature (1)..(1355): Ortholog of  Ceres SEQ ID NO 13597380 as cited in SEQ ID NO 64054
  misc_feature (1)..(1355): Ortholog of  Ceres SEQ ID NO 12625474 as cited in SEQ ID NO 64169
  misc_feature (1)..(1355): Ortholog of  Ceres SEQ ID NO 13597502 as cited in SEQ ID NO 64681
aaaatcaggcagatcgcagtcgcagcaccgaagatggtgagcaggcgcactctcctcgtcatgatggcgacggtagtggttctgcatcggagtcggactctctgcgctgctgcctcggcggctgcagcgccgccggcgacgacgaagcaggcgcggaccccggccctgttcgtgttcggggactccatcgtggacccgggcaacaacaacgccctcaccaccacggtgcgctgcaacttcccgccctacggccaggacttccccggccacaacgccaccggcaggttcagcaacggcagggtgcccagcgacatcgtcgccagccggctgggcatcaaggagcacctgccggcgtacctcggcacggagctcagcgacttcgacctcctcaccggcgtcagcttcgcgtccggcggctgcggcttcgaccccctcaccgccgagctcgtgtccgtgctcaccatggacaaccagctggacctgttcaaggagtacaaggagaagctggagcgcgtcgccagcggcgcccaccgggccgccgacatcgtgtccaggagcctgtacatggtggtcacgggcaccgacgacctcgccaacacctacttcaccacgccgttccgccgcgactacgacctcgagtcctacatcgagttcgtcgtgcagtgcgcctccgacttcatcaagaagctgtacggtctgggcgcgcggcgcatcaacatcgccggcgcgccgcccatcgggtgcgtgccgtcgcagcggaccaacgccggcgggctggagcgggagtgcgtgccgctgtacaaccaggcggccgtcgtgttcaacgcggcgctggagaaggagatcaagcggctcaacggcagcgacgcgctcccggcctccgtgctccagtacatcgacctctacacgccgctgctcgacatgattcagcgccctgacgcctacggattcaacgtcacgaaccgggggtgctgcggcacgggggtgttcgaggtgacgctgacgtgcaaccggtacacggcggaaccctgcagggaccccagcaagttcctcttntgggacacctaccacctcacggagaggggctacgacctcctcatggcgcagatcataaaccgatacggggtctgagatggatgccatgacagcgcagcgctggagatctcggcgctatgacagcgcggtccatgctttcagaggcttttgctgaacttgatcttgtagctgaactacagctccagaaatcaccggtccaatatcatatcccagtttgtgatgggtacatgtcagcggggcacaattgcttgcttgtattgcataaatgaaaactgaatcaggacaggcagtgacagttg

SEQ ID NO: 9304 - protein, 376 aa, Zea mays subsp. mays
  peptide (1)..(376): Ceres Seq. ID no. 13500461
  misc_feature (352)..(352): Xaa is any aa, unknown or other
KIRQIAVAAPKMVSRRTLLVMMATVVVLHRSRTLCAAASAAAAPPATTKQARTPALFVFGDSIVDPGNNNALTTTVRCNFPPYGQDFPGHNATGRFSNGRVPSDIVASRLGIKEHLPAYLGTELSDFDLLTGVSFASGGCGFDPLTAELVSVLTMDNQLDLFKEYKEKLERVASGAHRAADIVSRSLYMVVTGTDDLANTYFTTPFRRDYDLESYIEFVVQCASDFIKKLYGLGARRINIAGAPPIGCVPSQRTNAGGLERECVPLYNQAAVVFNAALEKEIKRLNGSDALPASVLQYIDLYTPLLDMIQRPDAYGFNVTNRGCCGTGVFEVTLTCNRYTAEPCRDPSKFLXWDTYHLTERGYDLLMAQIINRYGV

SEQ ID NO: 9305 - protein, 365 aa, Zea mays subsp. mays
  peptide (1)..(365): Ceres Seq. ID no. 13500462
  misc_feature (341)..(341): Xaa is any aa, unknown or other
MVSRRTLLVMMATVVVLHRSRTLCAAASAAAAPPATTKQARTPALFVFGDSIVDPGNNNALTTTVRCNFPPYGQDFPGHNATGRFSNGRVPSDIVASRLGIKEHLPAYLGTELSDFDLLTGVSFASGGCGFDPLTAELVSVLTMDNQLDLFKEYKEKLERVASGAHRAADIVSRSLYMVVTGTDDLANTYFTTPFRRDYDLESYIEFVVQCASDFIKKLYGLGARRINIAGAPPIGCVPSQRTNAGGLERECVPLYNQAAVVFNAALEKEIKRLNGSDALPASVLQYIDLYTPLLDMIQRPDAYGFNVTNRGCCGTGVFEVTLTCNRYTAEPCRDPSKFLXWDTYHLTERGYDLLMAQIINRYGV

SEQ ID NO: 9306 - protein, 356 aa, Zea mays subsp. mays
  peptide (1)..(356): Ceres Seq. ID no. 13500463
  misc_feature (332)..(332): Xaa is any aa, unknown or other
MMATVVVLHRSRTLCAAASAAAAPPATTKQARTPALFVFGDSIVDPGNNNALTTTVRCNFPPYGQDFPGHNATGRFSNGRVPSDIVASRLGIKEHLPAYLGTELSDFDLLTGVSFASGGCGFDPLTAELVSVLTMDNQLDLFKEYKEKLERVASGAHRAADIVSRSLYMVVTGTDDLANTYFTTPFRRDYDLESYIEFVVQCASDFIKKLYGLGARRINIAGAPPIGCVPSQRTNAGGLERECVPLYNQAAVVFNAALEKEIKRLNGSDALPASVLQYIDLYTPLLDMIQRPDAYGFNVTNRGCCGTGVFEVTLTCNRYTAEPCRDPSKFLXWDTYHLTERGYDLLMAQIINRYGV

SEQ ID NO: 9307 - DNA, 1261 bp, Zea mays subsp. mays
  misc_feature (1)..(1261): Ceres Seq. ID no. 12355390
  misc_feature (1)..(1261): Ortholog of  Ceres SEQ ID NO 12784064 as cited in SEQ ID NO 66982
gacgccactcccacctctcttcttctctttcccttcgcattaatggccgctctctccctatcccctttcgtctcgctctcggagtaggacactcgcccgcttccggcttaaccttcaagattctccctcctcctcctacttcttcccgcttgggcgggcgcggcaccttccggttctgggcctcctatatatatacgcgcgcgaccgtcccccttccatactccctagcatgctcggctcgcaccccggattgatcgagctcgcccgtcgccgcgatggattcggtgccttccccctcctcttctacccgggccaccgctgctcccggtccctgctgccgctttgacgcgctgcggagggcgtgcgccaggcacgccgccgccgccgcgcgggccgccgggtgggcgctcggcgcgctgctcacctgcgtcttcgccgtcgtgggctcactcgtcggaatcttcattggtgccttcatggggatgtctacagaaagcggcatgttccgcggggctggtgtcggagcagtctcgggagcagtcttctccattgaggctgttgagtcctgcatcgagatttggaggtccagccattcgggaaaatacagcattctctatgtgctggacatcatctctagcctcttcagcggaagaattgtgtgggagaaagtcagtccagcgctacagcgtgcagtgcaaagccagatgagtctaatgagcacaccgttcatcgacaacaatgaccttttcgaaactggcagtacaggaggcatgtcaagggctctgattgataggatcccaaagatgaggttcagtgctgcaagcaattgtgacaaggaaactgatagcagctgctgctcagtctgcctgcaggattttggagcacagcaatttgtgagggccctgcctcagtgccaacacatattccatgtgcggtgcatcgacaactggctccttcggcacgcatcctgcccactatgccgggccggcgttcatattgaccatatacatatgtaaataaactcgcagggtggcacctggtgtattttcatagtgaatacccgtgctcctgttggatatcacaagtatagctggctgtatacataggttttctcctttttttttttgttacttctccggtcttatgtggggctatgctttcagctgcacgtttttgtcgaagtaatacctggattggctggatatgtacatcttgagaacggattgactaacaagctccctgaattatggtcctgtgtgct

SEQ ID NO: 9308 - protein, 246 aa, Zea mays subsp. mays
  peptide (1)..(246): Ceres Seq. ID no. 12355391
MDSVPSPSSSTRATAAPGPCCRFDALRRACARHAAAAARAAGWALGALLTCVFAVVGSLVGIFIGAFMGMSTESGMFRGAGVGAVSGAVFSIEAVESCIEIWRSSHSGKYSILYVLDIISSLFSGRIVWEKVSPALQRAVQSQMSLMSTPFIDNNDLFETGSTGGMSRALIDRIPKMRFSAASNCDKETDSSCCSVCLQDFGAQQFVRALPQCQHIFHVRCIDNWLLRHASCPLCRAGVHIDHIHM

SEQ ID NO: 9309 - protein, 179 aa, Zea mays subsp. mays
  peptide (1)..(179): Ceres Seq. ID no. 12355392
MGMSTESGMFRGAGVGAVSGAVFSIEAVESCIEIWRSSHSGKYSILYVLDIISSLFSGRIVWEKVSPALQRAVQSQMSLMSTPFIDNNDLFETGSTGGMSRALIDRIPKMRFSAASNCDKETDSSCCSVCLQDFGAQQFVRALPQCQHIFHVRCIDNWLLRHASCPLCRAGVHIDHIHM

SEQ ID NO: 9310 - protein, 177 aa, Zea mays subsp. mays
  peptide (1)..(177): Ceres Seq. ID no. 12355393
MSTESGMFRGAGVGAVSGAVFSIEAVESCIEIWRSSHSGKYSILYVLDIISSLFSGRIVWEKVSPALQRAVQSQMSLMSTPFIDNNDLFETGSTGGMSRALIDRIPKMRFSAASNCDKETDSSCCSVCLQDFGAQQFVRALPQCQHIFHVRCIDNWLLRHASCPLCRAGVHIDHIHM

SEQ ID NO: 9311 - DNA, 1085 bp, Zea mays subsp. mays
  misc_feature (1)..(1085): Ceres Seq. ID no. 12346342
  misc_feature (1)..(1085): Ortholog of  Ceres SEQ ID NO 12617991 as cited in SEQ ID NO 64763
acacatcctcctccccccttcgtctctctctccctctctctctctgcctgcgcgcctgagagctgccaccgccaaggcgaaacggccgtcgccgcatgctgcggctgagctagagacgagaggcgagatggcggccgaggcgctggggttcatggcgcggggagccaccggcgggagggcggcggagctcgtcaccagggacttcctcggcgggtgcgccgccgccgaagacgacgccagggacgcgtccgccaggaatgacgccgtgcccgcgagggtgcaccagcagaagcacgcgtgcccggcggcgccgagggacctgaacctgttcccggtagccgccaccacgaagccctgcgccgcgacggcggcagcggcagcggcaccagcggtcgcgggcggcgccacggctacgtaccacagcgtgtgcacgatcgagaaggtgaagacggccctggagcggttcgagcgcggcaggcagcaccagtccccgcacccgcaccagcagcagcagcacagcggcgcgggcgcgtccccgtcgtcgtcttccgtgaccacgtcctccgtgaagcgccgcggcggcggcggcggcggcggcggcggcgtggagcagggcgacggctgcgactcgccctccggcggcgggatggtggccgcggcgtgccccaggtgcttcctgtacgtgctaatctcccggagcgacccgcggtgcccgcgctgcgagtcccacgtcccggccccgcngcgccagcgccggccgcgagcaagaagccgcggatcgacctcaacgtcggctacctgggcacatagcttgtggtttaggcatatggggcgatggcgtagcctcctagatggagcggctgccgtctcctaccgtaccgtacgtgacgccataaattttgcttaggctcgtgtaatgtgatgacccacggaccgagtcgggtacgtaggagtacgtagacaggggaggggggcgccgttttttgaactgaaacagaaatgcatgccctcccctgtcaggaaatttatggccgatcagacaccgcatacaagaacatgaatgaatggtgacactgctttctgtt

SEQ ID NO: 9312 - protein, 301 aa, Zea mays subsp. mays
  peptide (1)..(301): Ceres Seq. ID no. 12346343
  misc_feature (248)..(248): Xaa is any aa, unknown or other
HILLPPSSLSPSLSLPARLRAATAKAKRPSPHAAAELETRGEMAAEALGFMARGATGGRAAELVTRDFLGGCAAAEDDARDASARNDAVPARVHQQKHACPAAPRDLNLFPVAATTKPCAATAAAAAAPAVAGGATATYHSVCTIEKVKTALERFERGRQHQSPHPHQQQQHSGAGASPSSSSVTTSSVKRRGGGGGGGGGVEQGDGCDSPSGGGMVAAACPRCFLYVLISRSDPRCPRCESHVPAPXRQRRPRARSRGSTSTSATWAHSLWFRHMGRWRSLLDGAAAVSYRTVRDAINFA

SEQ ID NO: 9313 - protein, 259 aa, Zea mays subsp. mays
  peptide (1)..(259): Ceres Seq. ID no. 12346344
  misc_feature (206)..(206): Xaa is any aa, unknown or other
MAAEALGFMARGATGGRAAELVTRDFLGGCAAAEDDARDASARNDAVPARVHQQKHACPAAPRDLNLFPVAATTKPCAATAAAAAAPAVAGGATATYHSVCTIEKVKTALERFERGRQHQSPHPHQQQQHSGAGASPSSSSVTTSSVKRRGGGGGGGGGVEQGDGCDSPSGGGMVAAACPRCFLYVLISRSDPRCPRCESHVPAPXRQRRPRARSRGSTSTSATWAHSLWFRHMGRWRSLLDGAAAVSYRTVRDAINFA

SEQ ID NO: 9314 - protein, 251 aa, Zea mays subsp. mays
  peptide (1)..(251): Ceres Seq. ID no. 12346345
  misc_feature (198)..(198): Xaa is any aa, unknown or other
MARGATGGRAAELVTRDFLGGCAAAEDDARDASARNDAVPARVHQQKHACPAAPRDLNLFPVAATTKPCAATAAAAAAPAVAGGATATYHSVCTIEKVKTALERFERGRQHQSPHPHQQQQHSGAGASPSSSSVTTSSVKRRGGGGGGGGGVEQGDGCDSPSGGGMVAAACPRCFLYVLISRSDPRCPRCESHVPAPXRQRRPRARSRGSTSTSATWAHSLWFRHMGRWRSLLDGAAAVSYRTVRDAINFA

SEQ ID NO: 9315 - DNA, 1174 bp, Zea mays subsp. mays
  misc_feature (1)..(1174): Ceres Seq. ID no. 12355225
  misc_feature (1)..(1174): Ortholog of  Ceres SEQ ID NO 12609045 as cited in SEQ ID NO 51314
  misc_feature (1)..(1174): Ortholog of  Ceres SEQ ID NO 12608276 as cited in SEQ ID NO 57871
  misc_feature (1)..(1174): Ortholog of  Ceres SEQ ID NO 13598492 as cited in SEQ ID NO 63882
  misc_feature (1)..(1174): Ortholog of  Ceres SEQ ID NO 13657914 as cited in SEQ ID NO 66230
  misc_feature (1)..(1174): Ortholog of  Ceres SEQ ID NO 13595877 as cited in SEQ ID NO 67702
  misc_feature (1)..(1174): Ortholog of  Ceres SEQ ID NO 13622667 as cited in SEQ ID NO 0
aaaggatagcctttcttcctgtgcagccactccagtgcacgccgccgcagcttgctacacgtgccgggcaagggcaatggattccagcagcagagtgatcgccttcgattgcagctccttcaaactctacatggacggccaagtcgagcgtgcggcccaacgcatgggaaaccgtgcccgccggcttcgacgcggacacgggcgtggcatccaaagacgtcgtcatcgacgtcgccaccggcgccaccgtgcggctctacctaccaccagtccagggagccacgacgaagctcccagtcgtcgtcttcttccatggcggctacttcatcgtcggctcagcccgcgagcctatgtaccatcgctatgtcaactcgctggtcgccagagcacgcgtcgtcgctgtctccgccgactaccgcctcgcgccagagcacccgctcccggcagcctacgacgactcctgggccgcgctcaagtgggcggtctccggcgcggaccagtggctgtccgaccacggcgacctcggccgcgtcttcctggtcggcatcagcgccggcggtaacattgcccacaacatggccatctctgtgggcgtgagcggcttgccggccgctgaaccaccgcgcatagaaggcgtgatcctgctccacccttccttttccggcgaacagaagatggatgtagaagaagaggagttctggcgatctaacaatagcaggtgggcggtcatcttcccgggcgcgaccggcggggcggacgatccaaggattaacccgatggcggacggcgcgccgagcctggagaagctagtgggtgaaaggctgctcgtctgcacggcgtctttggacccgagggcgccgagggggcccggatactgcgaggccgtacgggccagcgggtggcgcgggaaggtggagtggttcgagacggaaggtgaggaccacggtttcttcgtcctcaaccccggcagccacaaggcggttgaggtcatggatcgagtggttgctttccttgcggaccagtgatgacctcctcagggcacagcaaggtctagcagctcgccgcaaaaccggacgtcctagctacggcgcagccgttctcaggcgattgtttactgtctgtactcccaagagtgtcctagatgagttattggaataaacactacagtcaattc

SEQ ID NO: 9316 - protein, 224 aa, Zea mays subsp. mays
  peptide (1)..(224): Ceres Seq. ID no. 12355226
MYHRYVNSLVARARVVAVSADYRLAPEHPLPAAYDDSWAALKWAVSGADQWLSDHGDLGRVFLVGISAGGNIAHNMAISVGVSGLPAAEPPRIEGVILLHPSFSGEQKMDVEEEEFWRSNNSRWAVIFPGATGGADDPRINPMADGAPSLEKLVGERLLVCTASLDPRAPRGPGYCEAVRASGWRGKVEWFETEGEDHGFFVLNPGSHKAVEVMDRVVAFLADQ

SEQ ID NO: 9317 - protein, 186 aa, Zea mays subsp. mays
  peptide (1)..(186): Ceres Seq. ID no. 12355227
KDSLSSCAATPVHAAAACYTCRARAMDSSSRVIAFDCSSFKLYMDGQVERAAQRMGNRARRLRRGHGRGIQRRRHRRRHRRHRAALPTTSPGSHDEAPSRRLLPWRLLHRRLSPRAYVPSLCQLAGRQSTRRRCLRRLPPRARAPAPGSLRRLLGRAQVGGLRRGPVAVRPRRPRPRLPGRHQRRR

SEQ ID NO: 9318 - protein, 161 aa, Zea mays subsp. mays
  peptide (1)..(161): Ceres Seq. ID no. 12355228
MDSSSRVIAFDCSSFKLYMDGQVERAAQRMGNRARRLRRGHGRGIQRRRHRRRHRRHRAALPTTSPGSHDEAPSRRLLPWRLLHRRLSPRAYVPSLCQLAGRQSTRRRCLRRLPPRARAPAPGSLRRLLGRAQVGGLRRGPVAVRPRRPRPRLPGRHQRRR

SEQ ID NO: 9319 - DNA, 1663 bp, Zea mays subsp. mays
  misc_feature (1)..(1663): Ceres Seq. ID no. 12361889
  misc_feature (1)..(1663): Ortholog of  Ceres SEQ ID NO 13596816 as cited in SEQ ID NO 62287
attagaataaagaagcacccagccccgcctgtgactgtgagaggccggcgcggagggagtttcatcagatcgtgccgtgcgtgccctctgtgtgtctgattacgcgtgcgtgcgagggtcagagaggagggagggaggggctctggagatgacggggagaagggagcttctgctgcttgcgctcttgggagtccttcagctagctcttcgtctaccttccgcagcgtcgcagtccttcatcggcatcaactacggcgaagtggccgacaacctcccgccgccgtcgtccaccgcgcgcctcgtccagtccacgaccatcaccaaggtgcgcctctacgggaccgacccggccatcatctccgccttctccggcacgggcgtctccctcctcctgggcgccaccaacggcgacatcgccaacctcgcgtcctcgcccgcggccgcggcggcctgggtcgccgcgcacctcccggcctcgtcgccggccgtctccaccgtctccgtcggcaacgaggtcctctttgccgacgcctcgctcgcgtcgcagctcgtcccggccatgcagaacctgcacgacgcgctgccgcccaactccagcgtcaaggtgtccaccgtgaacgccatggacgtgctggcgagctccgacccgccctcctccggcgcgttcaagccggagctcgcggcggcgctcgacccgctgctggcgttcctgagcaagaccggctcgccgttcctcgtcaacccgtacccctacttcgcgtacctcagcgacccgcggcccgagacgctggccttctgcctgttccagcccaacgccggccgcccggacgccgggtccggcctcacgtacaccaacatgttcgacgcgcaggtcgacgccgtgcgcgccgcgctggacgccaaggggtacaaggacgtggacatcgtggtggccgagaccggctggccgcacaagggtgaccccgacgaggccggcgccacggtggagaacgcgcgcgccttcgtgtcgggcctcgtgtcccacctccgctccctgtccggcacgccgcgcgcgcccggcaagtcggtggagacgtacatcttcgccatgtacgacgaggacctcaagcccggcaaggcgtcggagcggtacttcgggctgttccagaccagcctcgccgagacgtacccgacggggttgctcaggaacggcacggccggacggataccagccacggcgccggctccggcgccaaccacgtccgccgcgacgctgaagccaacgccagggcagcagacacaggtgactccagcgcagcagggctcgacggcggcagctgggccttccggcatctgcaggccggggccagggacggctacgtcgagagggaccactaccgcttgcgcccaacctagtgctgctgaatcgtctcgcgcttcctcgatgctccctatcattgccggttttccggtcatagctttgctgatgtttacatgacctttttttttctttatgcttttttctgcctaatgtattgcgccacctctcgtattctagtacgtgtttcacgatccaagcacagcgtcgagatttaaagtacgataacagcatttgccattgtcactttgttaaaggaatctgaaaagagactcgaaaaaagcaagcgtccaaatgaatacaaat

SEQ ID NO: 9320 - protein, 442 aa, Zea mays subsp. mays
  peptide (1)..(442): Ceres Seq. ID no. 12361890
MTGRRELLLLALLGVLQLALRLPSAASQSFIGINYGEVADNLPPPSSTARLVQSTTITKVRLYGTDPAIISAFSGTGVSLLLGATNGDIANLASSPAAAAAWVAAHLPASSPAVSTVSVGNEVLFADASLASQLVPAMQNLHDALPPNSSVKVSTVNAMDVLASSDPPSSGAFKPELAAALDPLLAFLSKTGSPFLVNPYPYFAYLSDPRPETLAFCLFQPNAGRPDAGSGLTYTNMFDAQVDAVRAALDAKGYKDVDIVVAETGWPHKGDPDEAGATVENARAFVSGLVSHLRSLSGTPRAPGKSVETYIFAMYDEDLKPGKASERYFGLFQTSLAETYPTGLLRNGTAGRIPATAPAPAPTTSAATLKPTPGQQTQVTPAQQGSTAAAGPSGICRPGPGTATSRGTTTACAQPSAAESSRASSMLPIIAGFPVIALLMFT

SEQ ID NO: 9321 - protein, 305 aa, Zea mays subsp. mays
  peptide (1)..(305): Ceres Seq. ID no. 12361891
MQNLHDALPPNSSVKVSTVNAMDVLASSDPPSSGAFKPELAAALDPLLAFLSKTGSPFLVNPYPYFAYLSDPRPETLAFCLFQPNAGRPDAGSGLTYTNMFDAQVDAVRAALDAKGYKDVDIVVAETGWPHKGDPDEAGATVENARAFVSGLVSHLRSLSGTPRAPGKSVETYIFAMYDEDLKPGKASERYFGLFQTSLAETYPTGLLRNGTAGRIPATAPAPAPTTSAATLKPTPGQQTQVTPAQQGSTAAAGPSGICRPGPGTATSRGTTTACAQPSAAESSRASSMLPIIAGFPVIALLMFT

SEQ ID NO: 9322 - protein, 284 aa, Zea mays subsp. mays
  peptide (1)..(284): Ceres Seq. ID no. 12361892
MDVLASSDPPSSGAFKPELAAALDPLLAFLSKTGSPFLVNPYPYFAYLSDPRPETLAFCLFQPNAGRPDAGSGLTYTNMFDAQVDAVRAALDAKGYKDVDIVVAETGWPHKGDPDEAGATVENARAFVSGLVSHLRSLSGTPRAPGKSVETYIFAMYDEDLKPGKASERYFGLFQTSLAETYPTGLLRNGTAGRIPATAPAPAPTTSAATLKPTPGQQTQVTPAQQGSTAAAGPSGICRPGPGTATSRGTTTACAQPSAAESSRASSMLPIIAGFPVIALLMFT

SEQ ID NO: 9323 - DNA, 1726 bp, Zea mays subsp. mays
  misc_feature (1)..(1726): Ceres Seq. ID no. 12406596
  misc_feature (1)..(1726): Ortholog of  Ceres SEQ ID NO 14309727 as cited in SEQ ID NO 1030
  misc_feature (1)..(1726): Ortholog of  Ceres SEQ ID NO 15224315 as cited in SEQ ID NO 66131
atggtatggcagatcatcgcgacggcgatcgcgctgggcatctgcctgcacgcggggaaccacctggcgtgcgacttcccgcggctgatcgcgtcggcgcccgaggagtaccgtctggtggcgcgcttcttcgggcgggacaggcccagctaccgcgggctcctggcgggcgcggagggcgtgacggggatcgtcatggtcacgctcatggccgtctccttcaccctggccacgcggccgttccggaagcgggaggaggccagcagggacaagaagaaggcggcggcctgcaggggcgtcccgctcgccggcttcaacgccttctggtactcgcaccacctgctcatcgtcgtctacctcctgctcctcgtccacggctggttcatgttcctcgtcgacaagtggtaccagaggacgacgtggatgtacatttctgtgccgctggcgctttacgtcggggaacggacgctacgggccttccgatccaaggcctacgcagtcaagattctcaaggtgtgcctcctgccggggaacgtcctgaccgtaaccatgtcgaagccctacgggttccgctacaggagcgggcagtacatattcctgcagtgtccaacaatctccccgttcgagtggcaccctttctccatcacctcagctcccggagacgactgcgtcagcgtccacgtccagaccaggggcgactggacacaggagctcaagcgcatcttcgtcgacaactacttcacgccgtgcgtgcccagacgggctgccttcggggacctaggcgcggtggaccacaagaccaagagcccgccgaggttgctggtcgacggcccctacggcgcccccgcgcaggacttcaggaactacgacgtgctgctcctcgtcggcctcgggatcggcgccacgcccttcatcagcatcctcagagacctcctcaacaacatcaagctggccgacgaactgatggacctggcaatggagaccggccgggccgaggacagcgccagcaacctgagcgcgtcgacggcgagcggcggcaacaagaggagggcgtaccgaacgacctgcgcccacttctactgggtcacgagggagcctgggtcgttcgagtggttcaagggggtcatgaacgaggtcgccgagatggacaagaagggtgtcattgagctgcacaactacctgacaagcgtgtacgaggagcgagacgcgaggacgactctgctgtccatggtgcaggccctcaaccacgccaagcatggcgtcgacattgtgtcagggacaagggtcaggacacattttgcaaggcctaactggaaagaagtatttacgaggatagcgtccaagcacccaaattctacagtcggggtattttactgtgggagacctacacttgccaaagaactgaagaaactgtcacttgacatgagccacagaacgggaacccgatttgatttccacaaggagtacttctgatggaaaatacaagtgcccctgatttcttttagtactagaagatacagataaaaaaaattcacaaatttttgcgtagaagcgaactgatcctctttcacagtatgtaaatgtacatggtataaagcagagagtagttagaaacgttttttctttctttcttaaccaaatgggagggtgaaaatatgtcctgcgctttcagacagccattggtaactgcagatataaatgtaatagatcatatcattgtatgctg

SEQ ID NO: 9324 - protein, 490 aa, Zea mays subsp. mays
  peptide (1)..(490): Ceres Seq. ID no. 12406597
MVWQIIATAIALGICLHAGNHLACDFPRLIASAPEEYRLVARFFGRDRPSYRGLLAGAEGVTGIVMVTLMAVSFTLATRPFRKREEASRDKKKAAACRGVPLAGFNAFWYSHHLLIVVYLLLLVHGWFMFLVDKWYQRTTWMYISVPLALYVGERTLRAFRSKAYAVKILKVCLLPGNVLTVTMSKPYGFRYRSGQYIFLQCPTISPFEWHPFSITSAPGDDCVSVHVQTRGDWTQELKRIFVDNYFTPCVPRRAAFGDLGAVDHKTKSPPRLLVDGPYGAPAQDFRNYDVLLLVGLGIGATPFISILRDLLNNIKLADELMDLAMETGRAEDSASNLSASTASGGNKRRAYRTTCAHFYWVTREPGSFEWFKGVMNEVAEMDKKGVIELHNYLTSVYEERDARTTLLSMVQALNHAKHGVDIVSGTRVRTHFARPNWKEVFTRIASKHPNSTVGVFYCGRPTLAKELKKLSLDMSHRTGTRFDFHKEYF

SEQ ID NO: 9325 - protein, 425 aa, Zea mays subsp. mays
  peptide (1)..(425): Ceres Seq. ID no. 12406598
MVTLMAVSFTLATRPFRKREEASRDKKKAAACRGVPLAGFNAFWYSHHLLIVVYLLLLVHGWFMFLVDKWYQRTTWMYISVPLALYVGERTLRAFRSKAYAVKILKVCLLPGNVLTVTMSKPYGFRYRSGQYIFLQCPTISPFEWHPFSITSAPGDDCVSVHVQTRGDWTQELKRIFVDNYFTPCVPRRAAFGDLGAVDHKTKSPPRLLVDGPYGAPAQDFRNYDVLLLVGLGIGATPFISILRDLLNNIKLADELMDLAMETGRAEDSASNLSASTASGGNKRRAYRTTCAHFYWVTREPGSFEWFKGVMNEVAEMDKKGVIELHNYLTSVYEERDARTTLLSMVQALNHAKHGVDIVSGTRVRTHFARPNWKEVFTRIASKHPNSTVGVFYCGRPTLAKELKKLSLDMSHRTGTRFDFHKEYF

SEQ ID NO: 9326 - protein, 421 aa, Zea mays subsp. mays
  peptide (1)..(421): Ceres Seq. ID no. 12406599
MAVSFTLATRPFRKREEASRDKKKAAACRGVPLAGFNAFWYSHHLLIVVYLLLLVHGWFMFLVDKWYQRTTWMYISVPLALYVGERTLRAFRSKAYAVKILKVCLLPGNVLTVTMSKPYGFRYRSGQYIFLQCPTISPFEWHPFSITSAPGDDCVSVHVQTRGDWTQELKRIFVDNYFTPCVPRRAAFGDLGAVDHKTKSPPRLLVDGPYGAPAQDFRNYDVLLLVGLGIGATPFISILRDLLNNIKLADELMDLAMETGRAEDSASNLSASTASGGNKRRAYRTTCAHFYWVTREPGSFEWFKGVMNEVAEMDKKGVIELHNYLTSVYEERDARTTLLSMVQALNHAKHGVDIVSGTRVRTHFARPNWKEVFTRIASKHPNSTVGVFYCGRPTLAKELKKLSLDMSHRTGTRFDFHKEYF

SEQ ID NO: 9327 - DNA, 1841 bp, Zea mays subsp. mays
  misc_feature (1)..(1841): Ceres Seq. ID no. 12384170
  misc_feature (1)..(1841): Ortholog of  Ceres SEQ ID NO 13598511 as cited in SEQ ID NO 64088
  misc_feature (1)..(1841): Ortholog of  Ceres SEQ ID NO 14316032 as cited in SEQ ID NO 68725
aagttgcaacggccagaaagccacgttagcctagccgagctcctctgctcctctcgtggccgaacaggcagagcgaccagtctccagagcgctccccatggcgtcaggagctgcggcccctgtcgttcagaccctggtgctgaaggtggccatccactgccatggctgcaagaagaaggtccggaaggtgctcaggagcgtcgaaggcgtgcagaacgtgacggtggacgcctcgcagaacaaggtgactgtggtcggcaccgtggacgccgacacgctcatccagaggttgtacaagtccggcaagaagggagagccctggcagtgccacccgcccatcaagaagagcgagcccgcgccggaggccccgccgactccgcagcctgccggtggcggcggcaaggacgccgctactgctgcggccgcggtggacaagaagccggaggagccggtgaagaagccgcagggcgacagctccgaggagaagaagaagaagccggaggaggcggcgaaggagccgcagagcgagaagaagaagccggaggaggcggcgaaggagccatagcgagaagaagaagccggaggaggtggtgaaggcgccgcagaacgagaaggaggagccgcagagcgagaagaagaagaagccggaggaggcggccgagagctccaaggagaaggagaagaaaccagaggaggcagtgaaggagccaaaggccgagagctccaaggacgagaagaagaagaagccggaggaggccgtgaaggagccgcagggtgagagctccgaggagaagaagaagaagccggagcaggagggcggggccgcagagaagaagcccgaagcagagtcaaagaagaaggacggcggtgacagcaagggagctgagacgaaggccaagggctcagcagagccggcaaaggaagctgccgccgtccccgcccccgcccccgcccccgctgtcaatgacaaggccgaggcaaagaagagcgagaagcccaaggacgccggtaaggcggcggagccagccgccgtgacgacggagaggtcgctgcctgcgccgccggcgccggcgccaatgcccgcgtacgagcaggagttccgccacccctactacgccccgcagccggtggtgagctaccacgcgtcgcagccgagctcgagcgtgtcgtacacgtacttcgcgccgcagacgcagccggcgtactccattcaacagccacagccgcacccacaggcggcggtctcctactccgtgcagccgacaccgccggcgtactactccgcgcaggagctgcagccgcagcagccggcgaagcagtggtcgccgtcgtacctgtacatgccgtacccgcacgcgcaggcggcgccggagccttactaccagcagcaggactactacagcccgcccgggacgcacgcgtcgccgatgcacgacccataccgcatcttcgacgacgagaaccccaactcctgcagcgtcatgtgagaggcgcgagctggtcggcgcggcccggacgccgccggccgccgtgggcagcgagtagtttgggggggagacggcgccgcgcgctaccgcaacatcagagagagagacgtctctgtggctgtataggtagagtagcctgttactgtttaccacccctctaccctcttccttccatcctatttccacctagtatagaggtcaaacctcttctccgtgtagtgacggaaccttttcttaatttccatctttttactgttctgaatcaagtgattagaaagaacatgtaaattgtaacgagatacgttcatgttcaccgcgtctgtatatgccggctactagaactttgaatgagcg

SEQ ID NO: 9328 - protein, 197 aa, Zea mays subsp. mays
  peptide (1)..(197): Ceres Seq. ID no. 12384171
KLQRPESHVSLAELLCSSRGRTGRATSLQSAPHGVRSCGPCRSDPGAEGGHPLPWLQEEGPEGAQERRRRAERDGGRLAEQGDCGRHRGRRHAHPEVVQVRQEGRALAVPPAHQEERARAGGPADSAACRWRRQGRRYCCGRGGQEAGGAGEEAAGRQLRGEEEEAGGGGEGAAEREEEAGGGGEGAIARRRSRRRW

SEQ ID NO: 9329 - protein, 155 aa, Zea mays subsp. mays
  peptide (1)..(155): Ceres Seq. ID no. 12384172
MASGAAAPVVQTLVLKVAIHCHGCKKKVRKVLRSVEGVQNVTVDASQNKVTVVGTVDADTLIQRLYKSGKKGEPWQCHPPIKKSEPAPEAPPTPQPAGGGGKDAATAAAAVDKKPEEPVKKPQGDSSEEKKKKPEEAAKEPQSEKKKPEEAAKEP

SEQ ID NO: 9330 - protein, 136 aa, Zea mays subsp. mays
  peptide (1)..(136): Ceres Seq. ID no. 12384173
MPAYEQEFRHPYYAPQPVVSYHASQPSSSVSYTYFAPQTQPAYSIQQPQPHPQAAVSYSVQPTPPAYYSAQELQPQQPAKQWSPSYLYMPYPHAQAAPEPYYQQQDYYSPPGTHASPMHDPYRIFDDENPNSCSVM

SEQ ID NO: 9331 - DNA, 1306 bp, Zea mays subsp. mays
  misc_feature (1)..(1306): Ceres Seq. ID no. 12412486
  misc_feature (1)..(1306): Ortholog of  Ceres SEQ ID NO 14312711 as cited in SEQ ID NO 1401
  misc_feature (1)..(1306): Ortholog of  Ceres SEQ ID NO 15170220 as cited in SEQ ID NO 55383
  misc_feature (1)..(1306): Ortholog of  Ceres SEQ ID NO 14304198 as cited in SEQ ID NO 56479
  misc_feature (1)..(1306): Ortholog of  Ceres SEQ ID NO 14316543 as cited in SEQ ID NO 57118
  misc_feature (1)..(1306): Ortholog of  Ceres SEQ ID NO 12616285 as cited in SEQ ID NO 63483
gcacgagaccattacctagaacatcctaatcgaaaacttcttttcgtttttgtttgtttttggaagaacagacagacttgaaagttgagatatctcactaatctccaaaatgtccctataaaactgatgatctgctgataagacatcccactcgccggccgtccttgaagagcgagcagcaatggcgcaggagatcgagcacacccacatccccatccgcggcctcaacctccacgtcgcacaagtaggcacaggtgaactgggcacggtggtgttcctgcacggcttcccggagatatggtactcgtggcgccaccagatgcgggccgtggccgcggcggggtaccgcgccatcgcgccggactgccgcgggtacggcctgtcggagcagccgccggagcacgaggaggtgtcccttgacgacctcatcgccgacgtgctcggcatcctcgacgccctcagcgtcccgaaggcgttcttggtgggcaaggacttcggcgccatgccgggcgtacgagttcgcgctgcagcacccgggccgcaccctcggcgtggtgtgcctgggcatccccttcaacccggcccccatgtccttcgacgccatcatgcccgaaggattctacatcctgcgctggcgcgagccgggcagggcggaggccgacttcggccggttcgacgtgaggcgtggtgcgcaccatctacgtgctcttcgccggcgccgagatcccgattgccaaggaagggcaggagatcatggacctggccgacctgtccacgcccctcccggagtggttcaccgaggaggacctggacgcctacgccaagctctacgagaagtccggcttcgggtacccgctcaagatgccgtacagatctatgcacaagctcccgaaccggctggacgccaagttccaggtgccggtgttcatggtgatgggggagaaggactacgcgttcaagttcccggggttcgagaccgccatgcgcggcggggtcatggacaacttcatgccggacctcaagatcacctacatccctgaggggagccacttcgtgcaggagcagctcccagagcaggtcaacgacctgctcctcggcttcctcagggaccatccctccgccgcataagcagtgggtgagaccgtcagaataatggaatgcttcctgagcaacggtttctctactctattgccgttgcctggatccatgaccgtgttaattaattaattagtgcatatacttcctactcaaatcagatgtacgttttttttatctgcaataaaaatcatcgtcgctgcattactcg

SEQ ID NO: 9332 - protein, 250 aa, Zea mays subsp. mays
  peptide (1)..(250): Ceres Seq. ID no. 12412487
MAQEIEHTHIPIRGLNLHVAQVGTGELGTVVFLHGFPEIWYSWRHQMRAVAAAGYRAIAPDCRGYGLSEQPPEHEEVSLDDLIADVLGILDALSVPKAFLVGKDFGAMPGVRVRAAAPGPHPRRGVPGHPLQPGPHVLRRHHARRILHPALARAGQGGGRLRPVRREAWCAPSTCSSPAPRSRLPRKGRRSWTWPTCPRPSRSGSPRRTWTPTPSSTRSPASGTRSRCRTDLCTSSRTGWTPSSRCRCSW

SEQ ID NO: 9333 - protein, 204 aa, Zea mays subsp. mays
  peptide (1)..(204): Ceres Seq. ID no. 12412488
MRAVAAAGYRAIAPDCRGYGLSEQPPEHEEVSLDDLIADVLGILDALSVPKAFLVGKDFGAMPGVRVRAAAPGPHPRRGVPGHPLQPGPHVLRRHHARRILHPALARAGQGGGRLRPVRREAWCAPSTCSSPAPRSRLPRKGRRSWTWPTCPRPSRSGSPRRTWTPTPSSTRSPASGTRSRCRTDLCTSSRTGWTPSSRCRCSW

SEQ ID NO: 9334 - protein, 150 aa, Zea mays subsp. mays
  peptide (1)..(150): Ceres Seq. ID no. 12412489
MSFDAIMPEGFYILRWREPGRAEADFGRFDVRRGAHHLRALRRRRDPDCQGRAGDHGPGRPVHAPPGVVHRGGPGRLRQALREVRLRVPAQDAVQIYAQAPEPAGRQVPGAGVHGDGGEGLRVQVPGVRDRHARRGHGQLHAGPQDHLHP

SEQ ID NO: 9335 - DNA, 1462 bp, Zea mays subsp. mays
  misc_feature (1)..(1462): Ceres Seq. ID no. 12566755
  misc_feature (1)..(1462): Ortholog of  Ceres SEQ ID NO 13654187 as cited in SEQ ID NO 68219
aaaaagttcagcaacaacaacaacacaaatcatcggttccgttccgtcgcagaaatagaaaaaaggctttcttgtcccacagggcagggagaccgagagagcagtctagtgattagttgatcaccagacgtccagacaccatgagctcccgcatggctggagcagcgcttctgcgccacctaggcccgcgcctgttcgcggccgggcctgcggtgtccgggctcaccgcgaggggcggcatgcccgcggccgcgaggcttctccccgcgcggatggccagcaccgccgcggaggctgccagagaggacgccggtgcaaataaacggcacggcggcaccgagaagcatgagggaggaggcagcaggcgggcagagcaagaaggccgtcgtcagctactggggcatcgacacgcccaagctcgtgaaggaagacggcacggagtggaagtggaccagcttccggccgtgggacgcgtacacgtcggacacgtccatcgacatagggaagcaccacgcgccgacgacgctgcccgacaaggcggcgtacctgatcgtcaagtcgctgcacgtgccccatggacctcttcttccagcgccggcacgccagccacgcgctgctgctcgagacggtggcggccgtgccgggcatggtgggcggcatgctcctccacctgcgctcgctccgccgcttcgagcacagcggcggctggatccgcgcgctgctcgaggaggccgagaacgagcgcatgcacctcatgacgttcctcgaggtcacgcagccgcgctggtgggagcgcgcgctcgtgctcaccgcgcagggcgtcttcttcaacgcctacttcgtcggctacctcctctcccccaagttcgcgcaccgcgtcgtcggctacctccgaggaggaggcagtgcactcgtacaccgagtacctcaaggacctcgaggccggcatcatcgacaacaccccggcgccggccatcgccatcgactactggcgcctccccgccgacgccaagctcaaggacgtcgtcaccgtcgtgcgcgccgacgaggcgcaccaccgcgacgtcaaccacttcgcgtcggtacgcactctgcaccttgcaacaggattcattgctgtgagcaatctccagcagttctagctaattcattggtttatgtttgcttaatggagtacattattttgcaggacatccattaccaggggatgaagctcaaggacacgcccgcaccgctcagttatcactgacaagtaggcgttgcctgcctgctgctcaattcagagttcttacacgttagactgtcattggtcttaatatgttgttgtgctagccaaagttgcttagcagatcaagactggtttgctactcggaggtgaactagttgcctatatggtttgtacgtaccagtatattgtagatatttgaaataacaaatataagaatccggtgtgatgttactt

SEQ ID NO: 9336 - protein, 258 aa, Zea mays subsp. mays
  peptide (1)..(258): Ceres Seq. ID no. 12566756
MREEAAGGQSKKAVVSYWGIDTPKLVKEDGTEWKWTSFRPWDAYTSDTSIDIGKHHAPTTLPDKAAYLIVKSLHVPHGPLLPAPARQPRAAARDGGGRAGHGGRHAPPPALAPPLRAQRRLDPRAARGGRERAHAPHDVPRGHAAALVGARARAHRAGRLLQRLLRRLPPLPQVRAPRRRLPPRRRQCTRTPSTSRTSRPASSTTPRRRPSPSTTGASPPTPSSRTSSPSCAPTRRTTATSTTSRRYALCTLQQDSLL

SEQ ID NO: 9337 - protein, 224 aa, Zea mays subsp. mays
  peptide (1)..(224): Ceres Seq. ID no. 12566757
MDLFFQRRHASHALLLETVAAVPGMVGGMLLHLRSLRRFEHSGGWIRALLEEAENERMHLMTFLEVTQPRWWERALVLTAQGVFFNAYFVGYLLSPKFAHRVVGYLRGGGSALVHRVPQGPRGRHHRQHPGAGHRHRLLAPPRRRQAQGRRHRRARRRGAPPRRQPLRVGTHSAPCNRIHCCEQSPAVLANSLVYVCLMEYIILQDIHYQGMKLKDTPAPLSYH

SEQ ID NO: 9338 - protein, 205 aa, Zea mays subsp. mays
  peptide (1)..(205): Ceres Seq. ID no. 12566758
MSSRMAGAALLRHLGPRLFAAGPAVSGLTARGGMPAAARLLPARMASTAAEAAREDAGANKRHGGTEKHEGGGSRRAEQEGRRQLLGHRHAQAREGRRHGVEVDQLPAVGRVHVGHVHRHREAPRADDAARQGGVPDRQVAARAPWTSSSSAGTPATRCCSRRWRPCRAWWAACSSTCARSAASSTAAAGSARCSRRPRTSACTS

SEQ ID NO: 9339 - DNA, 1610 bp, Zea mays subsp. mays
  misc_feature (1)..(1610): Ceres Seq. ID no. 12413404
  misc_feature (1)..(1610): Ortholog of  Ceres SEQ ID NO 14312212 as cited in SEQ ID NO 54399
  misc_feature (1)..(1610): Ortholog of  Ceres SEQ ID NO 15225341 as cited in SEQ ID NO 55222
  misc_feature (1)..(1610): Ortholog of  Ceres SEQ ID NO 14311755 as cited in SEQ ID NO 57271
  misc_feature (1)..(1610): Ortholog of  Ceres SEQ ID NO 15171156 as cited in SEQ ID NO 58259
  misc_feature (1)..(1610): Ortholog of  Ceres SEQ ID NO 14302212 as cited in SEQ ID NO 66507
  misc_feature (1)..(1610): Ortholog of  Ceres SEQ ID NO 13653980 as cited in SEQ ID NO 69253
atcagacaagagacacacacacaccacacgcagtcacgcacagcctcggcctccgcagctgcaggcgcctgctgctcttcgacaagaccccaagaactcgccaacctaacctaggtcagccacccttccttctaccttctgcgacaatgcaggccgccgccgcctccgtcaagtcctccaccaccgcggccgcggccgcggccacctgcaaggcgggcttcaagcccctgcacctccctcccctccccgccgccggctccaggccgctgtccctctccgtctccgcgcgtccgctgtaccgccaagaccatgtcctcgcgacaaccgtggcgatggcggcggcgggccgcagcgaccgcgccgcgtcccccgcgcctccgtccgccacagcggacggcgcccggccggtggtggaggtcgccgcgccggcggagaccgcgcgccgcgccaagatcggggtgtacttcgccacgtggtgggcgctgaacgtgatcttcaacatctacaacaagaaggtgctgaacgcgttcccgtacccgtggctcacgtcgacgctgtccctcgccgccggctccgccatcatgctcgcgtcctgggccaccaggatcgccgaggcgccccagacggacctcgacttctggaaggcgctcactcccgttgcgatcgcgcacacgatcgggcacgtcgcggcgacggtgagcatggccaaggtggccgtgtcgttcacgcacatcatcaagagcggggagccggcattcagcgtgctcgtctccaggttcttcctcggcgagcacttcccggcgccggtctacttctccctcctcccgatcatcggtgggtgcgcgctcgccgccgtcaccgagctcaacttcaacatggttgggttcatgggggcaatgatctcgaacctggcgttcgtcgtccggaccatcttctccaagaaggggatgaagggcaagtccgtgagcgggatgaactactacgcctgcctctccatcatgtcgctggtgatcctcctccccttcgccgtcgccatggagggacccaagctctgggcggcgggctggcagcaagcagtcgccgagatcggccccaacttcgtctggtgggtggctgcgcagagcgtgttctaccacctgtacaaccaggtgtcgtacatgtcgctggacgagatctcgccgctcacgttctccatcggcaacaccatgaagaggatctccgtcatcgtcgcctccatcatcatcttccagacgcccgtccagcccatcaacgcgctcggagccgccatcgccatcctcggaaccttcatctactcccaggcaaagcagtaacgccttgcattaattggcgtctagatggcctgccctcatcagttcaccgcggatcagctcggtgctcgaagatgacagcttatgacctttgagaatgtctactaagaatcgccctttgtataatactactagatcctctcttttttgtattttctttcctaggactagcttccagtgttactgggctcatttcgtggtgtttctattatgactaagattagagagagaatgagagatggatccatctaaataaaggttccagattttttttcccctccc

SEQ ID NO: 9340 - protein, 442 aa, Zea mays subsp. mays
  peptide (1)..(442): Ceres Seq. ID no. 12413405
QTRDTHTPHAVTHSLGLRSCRRLLLFDKTPRTRQPNLGQPPFLLPSATMQAAAASVKSSTTAAAAAATCKAGFKPLHLPPLPAAGSRPLSLSVSARPLYRQDHVLATTVAMAAAGRSDRAASPAPPSATADGARPVVEVAAPAETARRAKIGVYFATWWALNVIFNIYNKKVLNAFPYPWLTSTLSLAAGSAIMLASWATRIAEAPQTDLDFWKALTPVAIAHTIGHVAATVSMAKVAVSFTHIIKSGEPAFSVLVSRFFLGEHFPAPVYFSLLPIIGGCALAAVTELNFNMVGFMGAMISNLAFVVRTIFSKKGMKGKSVSGMNYYACLSIMSLVILLPFAVAMEGPKLWAAGWQQAVAEIGPNFVWWVAAQSVFYHLYNQVSYMSLDEISPLTFSIGNTMKRISVIVASIIIFQTPVQPINALGAAIAILGTFIYSQAKQ

SEQ ID NO: 9341 - protein, 394 aa, Zea mays subsp. mays
  peptide (1)..(394): Ceres Seq. ID no. 12413406
MQAAAASVKSSTTAAAAAATCKAGFKPLHLPPLPAAGSRPLSLSVSARPLYRQDHVLATTVAMAAAGRSDRAASPAPPSATADGARPVVEVAAPAETARRAKIGVYFATWWALNVIFNIYNKKVLNAFPYPWLTSTLSLAAGSAIMLASWATRIAEAPQTDLDFWKALTPVAIAHTIGHVAATVSMAKVAVSFTHIIKSGEPAFSVLVSRFFLGEHFPAPVYFSLLPIIGGCALAAVTELNFNMVGFMGAMISNLAFVVRTIFSKKGMKGKSVSGMNYYACLSIMSLVILLPFAVAMEGPKLWAAGWQQAVAEIGPNFVWWVAAQSVFYHLYNQVSYMSLDEISPLTFSIGNTMKRISVIVASIIIFQTPVQPINALGAAIAILGTFIYSQAKQ

SEQ ID NO: 9342 - protein, 332 aa, Zea mays subsp. mays
  peptide (1)..(332): Ceres Seq. ID no. 12413407
MAAAGRSDRAASPAPPSATADGARPVVEVAAPAETARRAKIGVYFATWWALNVIFNIYNKKVLNAFPYPWLTSTLSLAAGSAIMLASWATRIAEAPQTDLDFWKALTPVAIAHTIGHVAATVSMAKVAVSFTHIIKSGEPAFSVLVSRFFLGEHFPAPVYFSLLPIIGGCALAAVTELNFNMVGFMGAMISNLAFVVRTIFSKKGMKGKSVSGMNYYACLSIMSLVILLPFAVAMEGPKLWAAGWQQAVAEIGPNFVWWVAAQSVFYHLYNQVSYMSLDEISPLTFSIGNTMKRISVIVASIIIFQTPVQPINALGAAIAILGTFIYSQAKQ

SEQ ID NO: 9343 - DNA, 1154 bp, Zea mays subsp. mays
  misc_feature (1)..(1154): Ceres Seq. ID no. 12362323
  misc_feature (1)..(1154): Ortholog of  Ceres SEQ ID NO 14314442 as cited in SEQ ID NO 52358
  misc_feature (1)..(1154): Ortholog of  Ceres SEQ ID NO 12610442 as cited in SEQ ID NO 56281
  misc_feature (1)..(1154): Ortholog of  Ceres SEQ ID NO 12610713 as cited in SEQ ID NO 56591
  misc_feature (1)..(1154): Ortholog of  Ceres SEQ ID NO 12587345 as cited in SEQ ID NO 62844
  misc_feature (1)..(1154): Ortholog of  Ceres SEQ ID NO 13597357 as cited in SEQ ID NO 68961
  misc_feature (1)..(1154): Ortholog of  Ceres SEQ ID NO 13587656 as cited in SEQ ID NO 0
  misc_feature (1)..(1154): Ortholog of  Ceres SEQ ID NO 14309353 as cited in SEQ ID NO 0
  misc_feature (1)..(1154): Ortholog of  Ceres SEQ ID NO 15177686 as cited in SEQ ID NO 0
atcatcccgattcccgacacgcttgtgttgtcgcgattggcaagctcggcggctcgtggcagcgggaacttacgaggcgaaggagagcgagggcgaccgcgcggatcgcatcgcagctctgggcggaggtggggccttgcgcggagatgctagcggtgttcgatcgggctgtggcgccgagcccggaggggctgcggcagccgggcgccgcggggggcggctgcgcggcgggcctcgcggaccggttcagagaggcgcggcccgacgcggtcaccgtcaaccttggcgggtccggcgccctggcgtactcctcgagcaaccagaaccccctcctccccaggttgtttggcgcggtggacggcgtattctgcatgttccagggaacaattgcgaacgttgctgtgctgaagcagcagtatgggttgagcaaaggcgctaatgaggtcagcatcatcatcgaggcttacaggaccttgagggacaggggcccttatcctgcagatcaggttgtgagggacataagtgggaaatttgcatttgtcctgtatgattgctccactaagtcggtcttcatggctgctatgcagctgttcagttattcccgaagacatatatctgatcacaggctactgctacgacgtacaatggtaccactggtattgaccggcaactgataggtagctcagctcgtgttcgtaacctcataacaggacaccgatggaaatgttccgttctactggggcgtggacaccgacgggcgtcttgtggtctctgacgacgccgaactcgtgaagagtgcctgtgggaaatcctgtgccccgttccccaaaggcttcttcttcacgacgtccggagggctgaggagctacgagcaccccatgcacgaggtgaagccggtgccgagggtggacagcaagggcgaggtgtgcggcacgacgtacacggtcgacgcaagcgccaggaaggagaccaccatcccaagggtcggcagcgccgccgactggtcttcgcagtactaaaattcgttatctttctctgtgtgtgttgaacgggttcgagcgcaggtagcagggcgtcgcacgggcgtggcccgtgtttgttcgcatggaaaccctagctgtctggtgtttatctgaatgaatagactgttctct

SEQ ID NO: 9344 - protein, 223 aa, Zea mays subsp. mays
  peptide (1)..(223): Ceres Seq. ID no. 12362324
HPDSRHACVVAIGKLGGSWQRELTRRRRARATARIASQLWAEVGPCAEMLAVFDRAVAPSPEGLRQPGAAGGGCAAGLADRFREARPDAVTVNLGGSGALAYSSSNQNPLLPRLFGAVDGVFCMFQGTIANVAVLKQQYGLSKGANEVSIIIEAYRTLRDRGPYPADQVVRDISGKFAFVLYDCSTKSVFMAAMQLFSYSRRHISDHRLLLRRTMVPLVLTGN

SEQ ID NO: 9345 - protein, 175 aa, Zea mays subsp. mays
  peptide (1)..(175): Ceres Seq. ID no. 12362325
MLAVFDRAVAPSPEGLRQPGAAGGGCAAGLADRFREARPDAVTVNLGGSGALAYSSSNQNPLLPRLFGAVDGVFCMFQGTIANVAVLKQQYGLSKGANEVSIIIEAYRTLRDRGPYPADQVVRDISGKFAFVLYDCSTKSVFMAAMQLFSYSRRHISDHRLLLRRTMVPLVLTGN

SEQ ID NO: 9346 - protein, 145 aa, Zea mays subsp. mays
  peptide (1)..(145): Ceres Seq. ID no. 12362326
SSRFPTRLCCRDWQARRLVAAGTYEAKESEGDRADRIAALGGGGALRGDASGVRSGCGAEPGGAAAAGRRGGRLRGGPRGPVQRGAARRGHRQPWRVRRPGVLLEQPEPPPPQVVWRGGRRILHVPGNNCERCCAEAAVWVEQRR

SEQ ID NO: 9347 - DNA, 779 bp, Zea mays subsp. mays
  misc_feature (1)..(779): Ceres Seq. ID no. 12348111
  misc_feature (1)..(779): Ortholog of  Ceres SEQ ID NO 15170945 as cited in SEQ ID NO 55162
cagagccatctcctttgcttgctgtccacttggttgacattctgtacagttactgcttcacacttcggctctacaacggtgattggcactcagatcctttgggtgcttgcactgtcgccctgtcgatgtcgaaagtcatgggccaggatgctaaacctgagactgtacctgaagcactcgcagcctgcatcgaggagacatgctcaccagcttacaggcatactggtggtttcaggtttgctattggactcgtggacgatatcatcgccattctctccttgggacagaacgcacttatttgtgccttatgcgacttccatcgactcattgaagttggtaagagcatgctcaaggtggagaaagtgggcaagacggagagggcacagaactctccgaagcttcgtagtgcagctaggaagctattcttcatgacttgttgggtccatgagcagccagatgaggcgtggccatctttagctcacatcgtccaggtgcagaaagcatctatggaggagttggagaccgggaattggaaggcggatagaaagagcaaaccacaatccgcggttcttatcgaggagctgtaggcatatggatgtaccactggaaattggatcgcgaggctatgtacccttgtgtatcgctcaggatgaatccaacgagagaccgtccttgtaatgcagttagttgcttctgtgtacacttttttttgaaaaaaattgtatttgtatacgagtttgaaatcctagttgaagcgatcctgctttactttgcttgtc

SEQ ID NO: 9348 - protein, 194 aa, Zea mays subsp. mays
  peptide (1)..(194): Ceres Seq. ID no. 12348112
EPSPLLAVHLVDILYSYCFTLRLYNGDWHSDPLGACTVALSMSKVMGQDAKPETVPEALAACIEETCSPAYRHTGGFRFAIGLVDDIIAILSLGQNALICALCDFHRLIEVGKSMLKVEKVGKTERAQNSPKLRSAARKLFFMTCWVHEQPDEAWPSLAHIVQVQKASMEELETGNWKADRKSKPQSAVLIEEL

SEQ ID NO: 9349 - protein, 153 aa, Zea mays subsp. mays
  peptide (1)..(153): Ceres Seq. ID no. 12348113
MSKVMGQDAKPETVPEALAACIEETCSPAYRHTGGFRFAIGLVDDIIAILSLGQNALICALCDFHRLIEVGKSMLKVEKVGKTERAQNSPKLRSAARKLFFMTCWVHEQPDEAWPSLAHIVQVQKASMEELETGNWKADRKSKPQSAVLIEEL

SEQ ID NO: 9350 - protein, 149 aa, Zea mays subsp. mays
  peptide (1)..(149): Ceres Seq. ID no. 12348114
MGQDAKPETVPEALAACIEETCSPAYRHTGGFRFAIGLVDDIIAILSLGQNALICALCDFHRLIEVGKSMLKVEKVGKTERAQNSPKLRSAARKLFFMTCWVHEQPDEAWPSLAHIVQVQKASMEELETGNWKADRKSKPQSAVLIEEL

SEQ ID NO: 9351 - DNA, 991 bp, Zea mays subsp. mays
  misc_feature (1)..(991): Ceres Seq. ID no. 12407059
  misc_feature (1)..(991): Ortholog of  Ceres SEQ ID NO 14312533 as cited in SEQ ID NO 0
ccccctcctccactcgcctgtgtgtgtctgtctgtccatccatccatcccgctgccagtcctcgcgccgcccaccccgaaataaccggaaattgcaacccggtccacgggtcggatcccccaaaccgaaccctcccgagctcgcccggcgatggggatctcgagcatgccggagccgcgggacagcctgctggggtacctggtgtacaacgcggtggtgtcgatcgcggcgctggcggggctggtgcgggcggcgctggtgttcctggacctgcaggccgcgcagctgcccgggggcgcgggcgcgggtgcggacgacgacggcggggaccgtctcgcggcgtcgggcccgggcctgggcctggcggagcggttcctgagggccttccggccggcgctgtacggggtgctggtgtccacggcgtgcggcgcggcggaggcggccgcgggcgacgacgactgcagcgtgtgcctggccgggttcgaggcggaggccgtggtgaaccggctcccctgcggccacctcttccaccgcgcctgcctcgagacctggctccggtacgagcgcgccacgtgcccgctctgccgcgcccacgtgcccctccccgccgacgagacgccggtgctccgctacccggagctcgagtgatccgggcctcggcggccgtcgcgcgcctcggctgtgtgctgcaagctccgtgtggccttccgtgtgcgcgtagcaaaaggaaaaaaggagtataggagctgtagtagtagagttgctgttgctttccctttctcgttttgtgttttgcggttgccctgcccccatgctcttgttgtttccgcgctgtcgctgtagcgtgtaaatactccggttcgcccttggcagcagagagtagtagagtgctcccgtggctgggccgatggtgtagcaccttttacgagctcagctcgtgtgtgtacatttgcatgctttnnattcagtttcccgagccanaatatcgagg

SEQ ID NO: 9352 - protein, 246 aa, Zea mays subsp. mays
  peptide (1)..(246): Ceres Seq. ID no. 12407060
PSSTRLCVSVCPSIHPAASPRAAHPEITGNCNPVHGSDPPNRTLPSSPGDGDLEHAGAAGQPAGVPGVQRGGVDRGAGGAGAGGAGVPGPAGRAAARGRGRGCGRRRRGPSRGVGPGPGPGGAVPEGLPAGAVRGAGVHGVRRGGGGRGRRRLQRVPGRVRGGGRGEPAPLRPPLPPRLPRDLAPVRARHVPALPRPRAPPRRRDAGAPLPGARVIRASAAVARLGCVLQAPCGLPCARSKRKKGV

SEQ ID NO: 9353 - protein, 165 aa, Zea mays subsp. mays
  peptide (1)..(165): Ceres Seq. ID no. 12407061
MGISSMPEPRDSLLGYLVYNAVVSIAALAGLVRAALVFLDLQAAQLPGGAGAGADDDGGDRLAASGPGLGLAERFLRAFRPALYGVLVSTACGAAEAAAGDDDCSVCLAGFEAEAVVNRLPCGHLFHRACLETWLRYERATCPLCRAHVPLPADETPVLRYPELE

SEQ ID NO: 9354 - protein, 160 aa, Zea mays subsp. mays
  peptide (1)..(160): Ceres Seq. ID no. 12407062
MPEPRDSLLGYLVYNAVVSIAALAGLVRAALVFLDLQAAQLPGGAGAGADDDGGDRLAASGPGLGLAERFLRAFRPALYGVLVSTACGAAEAAAGDDDCSVCLAGFEAEAVVNRLPCGHLFHRACLETWLRYERATCPLCRAHVPLPADETPVLRYPELE

SEQ ID NO: 9355 - DNA, 918 bp, Zea mays subsp. mays
  misc_feature (1)..(918): Ceres Seq. ID no. 12355344
  misc_feature (1)..(918): Ortholog of  Ceres SEQ ID NO 14303437 as cited in SEQ ID NO 54411
  misc_feature (1)..(918): Ortholog of  Ceres SEQ ID NO 12611816 as cited in SEQ ID NO 56754
  misc_feature (1)..(918): Ortholog of  Ceres SEQ ID NO 15170943 as cited in SEQ ID NO 59454
tacatttattctcttcttcttgagcccctggcctccccctcctgccaggctgcgcattctttctccagctctctgataagctagccagcgtcgtcgtcgtgtcttgttagttattagctctatctcgccgccctgcagctgctgatcgagtgagggaattcagcagcagcagcagcaggtagcatagcatagatatgacggcggcggaggtggaggccgccaaggacatcgccgaggagaaggccgtcgtgccgttgccaccgtcgcccgccaagccggccgacgacgactccaaggccatcgtcgctcttgtcgtcaaggacgctgctgctgggaaaccttctacagctattattggaggctcaactgaaagagatgcttacctcgccaagatcgtgtccgagaagaggctgagtctgatcaccgcctgggaggagagccagaaggcgagagccgacaacagggctgccaagaagcttgccttcatcacgtcctgggagaacgccaagaaagcggagatggaggcggagctcagaaagattgaggagcaactggagaagaagaaggcggcgtacgaggagaagctcaagaacaagctggcgatgctgcacaggacggcggaggagaggagggcgcagacggaggccaggcgcggcgaggagaccatcctggcggaggagatggccgccaagtaccgcgccaagggcgagggccccaccaagctctttggcctcttgaaagcgtgacctcttgctatggagaatgccctgtttcgtgcgtgtatttcgtattcccaattgcacttggtgtgtgtgtgtacgtgttgtttgttgttttctcttgtattcgatggcttgcttgacatctgttgtattgtatttgtatagaagtgcagtgcagtgcagtgctattctttct

SEQ ID NO: 9356 - protein, 183 aa, Zea mays subsp. mays
  peptide (1)..(183): Ceres Seq. ID no. 12355345
MTAAEVEAAKDIAEEKAVVPLPPSPAKPADDDSKAIVALVVKDAAAGKPSTAIIGGSTERDAYLAKIVSEKRLSLITAWEESQKARADNRAAKKLAFITSWENAKKAEMEAELRKIEEQLEKKKAAYEEKLKNKLAMLHRTAEERRAQTEARRGEETILAEEMAAKYRAKGEGPTKLFGLLKA

SEQ ID NO: 9357 - DNA, 1877 bp, Zea mays subsp. mays
  misc_feature (1)..(1877): Ceres Seq. ID no. 12349351
  misc_feature (1)..(1877): Ortholog of  Ceres SEQ ID NO 15176169 as cited in SEQ ID NO 0
agcagaatttagttatggcccatggctcattaaccactgggccaccggccaaccgcccaccagcataccggctccagtgatcgacgccgggtcgccggcgaaggaagaacagtcaggacgaggaaagaaaaaacaacagaaacgaggaagaaaaacggaaaaaatagagcggcggggcgagatctacgacgcggccgcgggaaggagaggactgcctctacgcaatcccgctatcctggcgacatccacgactccgatatccggtctctcttctctggataaccacaccaccaatcatgagggaatcaccttcaacacagggggggccatctacatcttctgcggttgatgatagttactcagctgacggtgttgaagattcacaactattcctctccgtgccagctttaaaccaagctgcatcttatcttgcccagacagcttcattcctcactcaatgcctccctgtacctggttttgtgggtctatctgaggagggccaagagttattaacactgccacctgcatcggcttcaggcagactttctgttcagacttcttcagtagagccttccggtaccaattcatcccttggtcagtcagattgtggtggaaacccctctcaagaaaacgctggacagatggtgccttcgcatgtttttcagaatggagcttcactgttccaaggccttgttgaacgtgctcggaaaacggtccgtggttcagcagatgatattggctggctccagcgagatcaaagcttacctacaactgaggatgggacagccagattcttagagattttggattctgtgagaaaaaatgaacacaagctatctgattcattggtttacttgttggttccaggtctgtttagtaaccacggacctctttactttgtcaaaacaaaggcatatttctccaagatgggtctggcttgccatattgccaaaattcatagtgagtcttcagtgagtaaaaatgcacgagagataaaggaatacatagaagaaatatactggggatcaaggaaacgtgtgctcctccttggtcacagcaagggtggtgttgatgcggctgcagccctctccctctactgaccacaactcaaagacaaagtcgcaggtttagcattagcccaaagtccatatggaggaagccccgttgcttcagatatcctgcgagaggggcagcttggtgactatgtcaggctgcgtaagatcatggagatcttggtatccaaggtccttaagggtgatctgcaggctctagaagatctgacttatgaaaggcggaaagaattcctgcgacggcacccgctacctcaggatgttcctatcgtttcgttccacacggaggcaagcatcactcccagcgtgctcacagcgctctctcacgttgcacacctggagctcccgattgctggcgatggcaattccactaggatcccagttgtgatgccactttcagccgcgatggcagcatgctcgcagttgctggtggcgaggtatggcgagaagagtgacggtctcgtgacgaggaaagatgctgaggttcctggttcagtggcggtccggccggagcggaagctagaccacgcgtggatggtgtattcgtcgctgaaagaagagtctggggatcaggcggacacgtcgcaggtatgcgaagccctgctgactctacttgtcgaggttgcacagaagaggaggcatgagatggcaatgaaagacgagtgaaagtagcttttggtgttggctggcgatagtgggatgtatcctcctgtaatcgtagactggcctgttgctggctgtacagagttgtgctgctcaaagtgctttgggacctgtttttgtttggttgacagaaacttgtgttgt

SEQ ID NO: 9358 - protein, 267 aa, Zea mays subsp. mays
  peptide (1)..(267): Ceres Seq. ID no. 12349352
MRESPSTQGGPSTSSAVDDSYSADGVEDSQLFLSVPALNQAASYLAQTASFLTQCLPVPGFVGLSEEGQELLTLPPASASGRLSVQTSSVEPSGTNSSLGQSDCGGNPSQENAGQMVPSHVFQNGASLFQGLVERARKTVRGSADDIGWLQRDQSLPTTEDGTARFLEILDSVRKNEHKLSDSLVYLLVPGLFSNHGPLYFVKTKAYFSKMGLACHIAKIHSESSVSKNAREIKEYIEEIYWGSRKRVLLLGHSKGGVDAAAALSLY

SEQ ID NO: 9359 - protein, 170 aa, Zea mays subsp. mays
  peptide (1)..(170): Ceres Seq. ID no. 12349353
MEILVSKVLKGDLQALEDLTYERRKEFLRRHPLPQDVPIVSFHTEASITPSVLTALSHVAHLELPIAGDGNSTRIPVVMPLSAAMAACSQLLVARYGEKSDGLVTRKDAEVPGSVAVRPERKLDHAWMVYSSLKEESGDQADTSQVCEALLTLLVEVAQKRRHEMAMKDE

SEQ ID NO: 9360 - protein, 152 aa, Zea mays subsp. mays
  peptide (1)..(152): Ceres Seq. ID no. 12349354
MVPSHVFQNGASLFQGLVERARKTVRGSADDIGWLQRDQSLPTTEDGTARFLEILDSVRKNEHKLSDSLVYLLVPGLFSNHGPLYFVKTKAYFSKMGLACHIAKIHSESSVSKNAREIKEYIEEIYWGSRKRVLLLGHSKGGVDAAAALSLY

SEQ ID NO: 9361 - DNA, 1501 bp, Zea mays subsp. mays
  misc_feature (1)..(1501): Ceres Seq. ID no. 12362374
  misc_feature (1)..(1501): Ortholog of  Ceres SEQ ID NO 14313893 as cited in SEQ ID NO 54646
  misc_feature (1)..(1501): Ortholog of  Ceres SEQ ID NO 13656797 as cited in SEQ ID NO 65756
  misc_feature (1)..(1501): Ortholog of  Ceres SEQ ID NO 13658498 as cited in SEQ ID NO 66557
  misc_feature (1)..(1501): Ortholog of  Ceres SEQ ID NO 15227053 as cited in SEQ ID NO 0
gatgatgatgaataggccgcaaccgcagcaagccggcccgctgcagctcctccgttcgctaggactaggcgtaggcggaggcggaggcgcccggcggggggccatgaagtcggccacgtcgctcctgctcggcgctgcgctcgccaccgccttcttccttctctacacctccctctgccgcgacctcggcagcgccgctgccgccgcgcccaggtcgggatcgtcgccgccgccgacgccgcggcgggagcaggagaccggcgacacggccgccgctcggcaggaggccgccacgggagagggcggggaagaacgtgtggctgcgagcagcgacggcggccgcagaggcggcggcgccaccgccgccacagcggaggagaatggtcagagcaaggaggaggagcagcggcggattgtgatgcctgccacgtcaacaacccacgaggccacctcccaccatagaccgcagccgaagcaacagaagaagaagaggagcccaccagcagcgtcccaggatctggcggacctgctccggcgagcggcgacggcggacaagacggtgctgatgacggcgatcaacgaggcgtgggcagcgccagggtcgttcctggacctgttcctggagagcttccgccagggcgaggacaccgcgggcctgccgcggcacctgctggtcgtggccatggacggcagggccctggagcggtgcaacgccgtgcaccccttctgctacctgttccgcgtcgacggcatggacttcgccgccgagcagaagtacatggagggcgactacctggagatgatgtggcgccggaaccggttccagcagagcgtgctggagctgggctacagcttcctcttcacggacgtggacatcctgtggttccggagcccgttcccgcgcctgccccgcgccgcgcaggtcgtcatgtcggccgacttcttcgtcggcgacgccgactcgcccaacaactaccccaacggcggcctcctctacgtccgctcctcgcccgccacggtgggcttctaccgccactggcaggcgtcgcgcgcgaggttcccgggccaccacgagcagtacgtcttcgacaagatcgtcaaggaagggtacggccggcgcccgggtgcagttcctggacacggccgtcttcgggggtttctgccagcacggcgacgacctgggcagggtggccaccatgcacgccaactgctgcgtggggctggacaacaagctcttcgacctcaagaacgtgctgcaggactggaagacctacagagcacgcgccgccgccggcaacgcgcagggtttctcgtggcgggtgcccggaaaatgcatacactgactctagactctggaggggttgagctcatttttcgattgttcgccagatagtacaacttaacagctacatctcatttttccccctaatgtatacatacatatattgtttatatatatatatttgtaaagctttttatggaatgtaaaaaaattattatt

SEQ ID NO: 9362 - protein, 463 aa, Zea mays subsp. mays
  peptide (1)..(463): Ceres Seq. ID no. 12362375
MMMNRPQPQQAGPLQLLRSLGLGVGGGGGARRGAMKSATSLLLGAALATAFFLLYTSLCRDLGSAAAAAPRSGSSPPPTPRREQETGDTAAARQEAATGEGGEERVAASSDGGRRGGGATAATAEENGQSKEEEQRRIVMPATSTTHEATSHHRPQPKQQKKKRSPPAASQDLADLLRRAATADKTVLMTAINEAWAAPGSFLDLFLESFRQGEDTAGLPRHLLVVAMDGRALERCNAVHPFCYLFRVDGMDFAAEQKYMEGDYLEMMWRRNRFQQSVLELGYSFLFTDVDILWFRSPFPRLPRAAQVVMSADFFVGDADSPNNYPNGGLLYVRSSPATVGFYRHWQASRARFPGHHEQYVFDKIVKEGYGRRPGAVPGHGRLRGFLPARRRPGQGGHHARQLLRGAGQQALRPQERAAGLEDLQSTRRRRQRAGFLVAGARKMHTLTLDSGGVELIFRLFAR

SEQ ID NO: 9363 - protein, 462 aa, Zea mays subsp. mays
  peptide (1)..(462): Ceres Seq. ID no. 12362376
MMNRPQPQQAGPLQLLRSLGLGVGGGGGARRGAMKSATSLLLGAALATAFFLLYTSLCRDLGSAAAAAPRSGSSPPPTPRREQETGDTAAARQEAATGEGGEERVAASSDGGRRGGGATAATAEENGQSKEEEQRRIVMPATSTTHEATSHHRPQPKQQKKKRSPPAASQDLADLLRRAATADKTVLMTAINEAWAAPGSFLDLFLESFRQGEDTAGLPRHLLVVAMDGRALERCNAVHPFCYLFRVDGMDFAAEQKYMEGDYLEMMWRRNRFQQSVLELGYSFLFTDVDILWFRSPFPRLPRAAQVVMSADFFVGDADSPNNYPNGGLLYVRSSPATVGFYRHWQASRARFPGHHEQYVFDKIVKEGYGRRPGAVPGHGRLRGFLPARRRPGQGGHHARQLLRGAGQQALRPQERAAGLEDLQSTRRRRQRAGFLVAGARKMHTLTLDSGGVELIFRLFAR

SEQ ID NO: 9364 - protein, 461 aa, Zea mays subsp. mays
  peptide (1)..(461): Ceres Seq. ID no. 12362377
MNRPQPQQAGPLQLLRSLGLGVGGGGGARRGAMKSATSLLLGAALATAFFLLYTSLCRDLGSAAAAAPRSGSSPPPTPRREQETGDTAAARQEAATGEGGEERVAASSDGGRRGGGATAATAEENGQSKEEEQRRIVMPATSTTHEATSHHRPQPKQQKKKRSPPAASQDLADLLRRAATADKTVLMTAINEAWAAPGSFLDLFLESFRQGEDTAGLPRHLLVVAMDGRALERCNAVHPFCYLFRVDGMDFAAEQKYMEGDYLEMMWRRNRFQQSVLELGYSFLFTDVDILWFRSPFPRLPRAAQVVMSADFFVGDADSPNNYPNGGLLYVRSSPATVGFYRHWQASRARFPGHHEQYVFDKIVKEGYGRRPGAVPGHGRLRGFLPARRRPGQGGHHARQLLRGAGQQALRPQERAAGLEDLQSTRRRRQRAGFLVAGARKMHTLTLDSGGVELIFRLFAR

SEQ ID NO: 9365 - DNA, 1523 bp, Zea mays subsp. mays
  misc_feature (1)..(1523): Ceres Seq. ID no. 12367639
  misc_feature (1)..(1523): Ortholog of  Ceres SEQ ID NO 15179007 as cited in SEQ ID NO 1038
  misc_feature (1)..(1523): Ortholog of  Ceres SEQ ID NO 15226449 as cited in SEQ ID NO 58879
  misc_feature (1)..(1523): Ortholog of  Ceres SEQ ID NO 13597146 as cited in SEQ ID NO 63311
gatctgccatggcctcgctccagtcctttctcgccgtcaaaccggccgccggctgggccgctccgtcccgccgcgcgcgcgtcgcggccttcctcgctccgccgcccccgaccaccgcggccgccgtgggggcggcgcggcgggagctgtcggccgcgagcctggccgtcgtggacggcgaggcgcggtacctcgtcggcacctacaagcggtcccgcgtcgtcttcgagcacggccgcgggtgcaagctctacgataccgacggccgcgagtacctcgacatggccgccggcatcgccgtcacggcgctcgggccacgcggacccagacgtgtgcgccaccatcgcggagcaggccggtaaggtcgtccacgtcagcaacgtcttctacaccaaaccccaggtggagctagccaagcggctcgttgaggtgtcgttcgcggaccgcgccttcttcgccagcactggcacggaggccaacgaggcggccatcaaattctcccgcaagttccagcgggccgcacacccggagagcggcgacccgcccacggagttcctggcgttcagcagcagcttccacggccggaccatgggcgccgtcgcgctcaccagcaagtcgcagtaccgggagcccttcgcgcccgtcatgcctggggtgaccttcgtggattacggcgatctggaggcggccaagaagttcgtacggtccggcagggtcgctgctgtcttcgtcgagcccgtgcagggtgagggtggcattcacagtgccaccagggagttcttgcaggggctgcgggacgcctgtgacgaggcgggagccctcttggtctttgatgaggtgcagtgtggtttcgggcgcacaggccacctctgggcgcatgaggcgtacggagtggaaccagacataatgaccttagcgaagccactggccaacggcattcccatcggcgttgtcctggtgaaggagaagatcgccgcagccataaactacggcgaccacggcacgacgtttggcggcgggcctctcgcctgccagaccgcgataacggtgttcgacaagatcacgagacccggtttcctggccgaggtgtcgaggaaaggggagagcttcaagcagctgctccgcgccaagctgagcgggaacccgcacgtgagggaggtccgcggggtcggccttctcgtcggcgtcgagctggacgtgccagctggtcctctggtcgacgcgtgcttggacgccggcgtcgtcgtgctgactgccggtaagggcaatgtggtgaggctggtgccgccgctcatcgtctcggagaaggagctggagcatgccgcggatgtcataagggactgtctaccggcgctcgatgtcgttgctgctgccctatgtatatggtggtgcaataggtccggatatgaaacctgattccaaattttggaatcgaataaatttcatgtcgggccaatgttgttgtgttcattgaaacaaactcttttttttttggaatcgaataattattacatgtcagaccg

SEQ ID NO: 9366 - protein, 471 aa, Zea mays subsp. mays
  peptide (1)..(471): Ceres Seq. ID no. 12367640
DLPWPRSSPFSPSNRPPAGPLRPAARASRPSSLRRPRPPRPPWGRRGGSCRPRAWPSWTARRGTSSAPTSGPASSSSTAAGASSTIPTAASTSTWPPASPSRRSGHADPDVCATIAEQAGKVVHVSNVFYTKPQVELAKRLVEVSFADRAFFASTGTEANEAAIKFSRKFQRAAHPESGDPPTEFLAFSSSFHGRTMGAVALTSKSQYREPFAPVMPGVTFVDYGDLEAAKKFVRSGRVAAVFVEPVQGEGGIHSATREFLQGLRDACDEAGALLVFDEVQCGFGRTGHLWAHEAYGVEPDIMTLAKPLANGIPIGVVLVKEKIAAAINYGDHGTTFGGGPLACQTAITVFDKITRPGFLAEVSRKGESFKQLLRAKLSGNPHVREVRGVGLLVGVELDVPAGPLVDACLDAGVVVLTAGKGNVVRLVPPLIVSEKELEHAADVIRDCLPALDVVAAALCIWWCNRSGYET

SEQ ID NO: 9367 - protein, 275 aa, Zea mays subsp. mays
  peptide (1)..(275): Ceres Seq. ID no. 12367641
MGAVALTSKSQYREPFAPVMPGVTFVDYGDLEAAKKFVRSGRVAAVFVEPVQGEGGIHSATREFLQGLRDACDEAGALLVFDEVQCGFGRTGHLWAHEAYGVEPDIMTLAKPLANGIPIGVVLVKEKIAAAINYGDHGTTFGGGPLACQTAITVFDKITRPGFLAEVSRKGESFKQLLRAKLSGNPHVREVRGVGLLVGVELDVPAGPLVDACLDAGVVVLTAGKGNVVRLVPPLIVSEKELEHAADVIRDCLPALDVVAAALCIWWCNRSGYET

SEQ ID NO: 9368 - protein, 256 aa, Zea mays subsp. mays
  peptide (1)..(256): Ceres Seq. ID no. 12367642
MPGVTFVDYGDLEAAKKFVRSGRVAAVFVEPVQGEGGIHSATREFLQGLRDACDEAGALLVFDEVQCGFGRTGHLWAHEAYGVEPDIMTLAKPLANGIPIGVVLVKEKIAAAINYGDHGTTFGGGPLACQTAITVFDKITRPGFLAEVSRKGESFKQLLRAKLSGNPHVREVRGVGLLVGVELDVPAGPLVDACLDAGVVVLTAGKGNVVRLVPPLIVSEKELEHAADVIRDCLPALDVVAAALCIWWCNRSGYET

SEQ ID NO: 9369 - DNA, 1997 bp, Zea mays subsp. mays
  misc_feature (1)..(1997): Ceres Seq. ID no. 12373118
  misc_feature (1)..(1997): Ortholog of  Ceres SEQ ID NO 15174547 as cited in SEQ ID NO 59586
  misc_feature (1)..(1997): Ortholog of  Ceres SEQ ID NO 15169470 as cited in SEQ ID NO 66036
agaggagagagtcgctctgcactgcacgactcctcccccatctaccactacctgtctacctacccagcccatcgactgcccctcgcaacgcaatggcgctcgccaccaactccgccgctgccgcagcagctgccgtatccggcggcgcggcatcccagccgcaccgcgcggccacgttcctcccgctgaagaggcgcaccatctccgccatccacgccgccgacccgtctaagaacaacgggcccgccgtccccgcggccgccgccgctaagtcatctgcctctgcggtggccacgccggagaagaatccggcggcgccggtaaagtgggcggtcgacagctggaagtcgaagaaggcgctgcagctcccagagtacccaaaccaggaggagctggacacggtgctcaagaccatcgagacgttcccgccggtggtgttcgccggagaggcgcgtcacctcgaggagcgcatggccgaggccgccatgggccgcgccttcatcctccagggcggcgactgcgccgagagcttcaaggagttccacgccaacaacatccgtgacaccttccgtattctgcttcagatgggcgccgtgctcatgttcggtggtcaggtgccggtcgtcaaggtggggaggatggctggccagtttgccaagccaaggtccgaaccgttggaggagagggacggcgtcaagctgccaagctacaggggcgacaacgtcaacggcgacgacttcaccgagaagagccgcgtgccagacccgcagaggatgatccgcgcctactcgcagtcggtggcgacgctcaacctgctccgcgcgttggcgaccggagggtacgctgccatgcagcgcgtcacacagtggaacctcgatttcatggatcacagcgagcaaggtgataggtaccgtgaattggcccatagggtggatgaggctcttgggttcatgactgcagcagggcttacagttgaccacccgataatgacgactactgacttctggacctcgcacgagtgccttctcttaccctacgagcagtctcttacccgtaaagactccaccagtggccttttctacgattgttcggcccacatgttgtgggttggtgagcgcactcgtcaactcgatggagcgcatgttgaattcctccgtggtgttgccaaccctcttggcataaaggtgagcgacaaaatgaaccccagtgacttggtgaagctgattgagattctgaacccttcaaacaaacctggaaggatcaccataattacaaggatgggggcagagaacatgagagtgaagttgcctcatctcatccgtgctgttcgcaatgctggattgattgtcacatggattactgatcctatgcatggaaacaccatcaaggccccttgtggcctgaagactcgtccattcgactcaattctggctgaagtgcgcgcattcttcgacgtgcatgatcaagaaggaagtcacccaggaggcatccaccttgaaatgactgggcagaacgtgaccgagtgcattggtggatcacggactgtgaccttcgatgaccttagcgaccgctaccacacccactgtgacccaaggctgaacgcctcccagtccctggagctcgccttcatcattgcagagaggctcaggaagaggaggatgcggtcggggctcaacaacagcctgcctctgccaccactggctttctaagtagccgaagctgaacagagaaggtagagggatagttgcagcgactcgaaagattacgcctgtttatttgttgatgcttggtgtggaggcctggtgggtgctcttggcacaagttacatgctggggagctataggagggtacctgttgcgttgtggaagacagtagctagtattatgtgttgtaattgtatgccttcgtttcatgttctgggtgcgtgacttgtcgactttgctgcttctggggttctgaccttggtaaggagagaataaagagataatataattgcg

SEQ ID NO: 9370 - protein, 568 aa, Zea mays subsp. mays
  peptide (1)..(568): Ceres Seq. ID no. 12373119
RRESLCTARLLPHLPLPVYLPSPSTAPRNAMALATNSAAAAAAAVSGGAASQPHRAATFLPLKRRTISAIHAADPSKNNGPAVPAAAAAKSSASAVATPEKNPAAPVKWAVDSWKSKKALQLPEYPNQEELDTVLKTIETFPPVVFAGEARHLEERMAEAAMGRAFILQGGDCAESFKEFHANNIRDTFRILLQMGAVLMFGGQVPVVKVGRMAGQFAKPRSEPLEERDGVKLPSYRGDNVNGDDFTEKSRVPDPQRMIRAYSQSVATLNLLRALATGGYAAMQRVTQWNLDFMDHSEQGDRYRELAHRVDEALGFMTAAGLTVDHPIMTTTDFWTSHECLLLPYEQSLTRKDSTSGLFYDCSAHMLWVGERTRQLDGAHVEFLRGVANPLGIKVSDKMNPSDLVKLIEILNPSNKPGRITIITRMGAENMRVKLPHLIRAVRNAGLIVTWITDPMHGNTIKAPCGLKTRPFDSILAEVRAFFDVHDQEGSHPGGIHLEMTGQNVTECIGGSRTVTFDDLSDRYHTHCDPRLNASQSLELAFIIAERLRKRRMRSGLNNSLPLPPLAF

SEQ ID NO: 9371 - protein, 538 aa, Zea mays subsp. mays
  peptide (1)..(538): Ceres Seq. ID no. 12373120
MALATNSAAAAAAAVSGGAASQPHRAATFLPLKRRTISAIHAADPSKNNGPAVPAAAAAKSSASAVATPEKNPAAPVKWAVDSWKSKKALQLPEYPNQEELDTVLKTIETFPPVVFAGEARHLEERMAEAAMGRAFILQGGDCAESFKEFHANNIRDTFRILLQMGAVLMFGGQVPVVKVGRMAGQFAKPRSEPLEERDGVKLPSYRGDNVNGDDFTEKSRVPDPQRMIRAYSQSVATLNLLRALATGGYAAMQRVTQWNLDFMDHSEQGDRYRELAHRVDEALGFMTAAGLTVDHPIMTTTDFWTSHECLLLPYEQSLTRKDSTSGLFYDCSAHMLWVGERTRQLDGAHVEFLRGVANPLGIKVSDKMNPSDLVKLIEILNPSNKPGRITIITRMGAENMRVKLPHLIRAVRNAGLIVTWITDPMHGNTIKAPCGLKTRPFDSILAEVRAFFDVHDQEGSHPGGIHLEMTGQNVTECIGGSRTVTFDDLSDRYHTHCDPRLNASQSLELAFIIAERLRKRRMRSGLNNSLPLPPLAF

SEQ ID NO: 9372 - protein, 412 aa, Zea mays subsp. mays
  peptide (1)..(412): Ceres Seq. ID no. 12373121
MAEAAMGRAFILQGGDCAESFKEFHANNIRDTFRILLQMGAVLMFGGQVPVVKVGRMAGQFAKPRSEPLEERDGVKLPSYRGDNVNGDDFTEKSRVPDPQRMIRAYSQSVATLNLLRALATGGYAAMQRVTQWNLDFMDHSEQGDRYRELAHRVDEALGFMTAAGLTVDHPIMTTTDFWTSHECLLLPYEQSLTRKDSTSGLFYDCSAHMLWVGERTRQLDGAHVEFLRGVANPLGIKVSDKMNPSDLVKLIEILNPSNKPGRITIITRMGAENMRVKLPHLIRAVRNAGLIVTWITDPMHGNTIKAPCGLKTRPFDSILAEVRAFFDVHDQEGSHPGGIHLEMTGQNVTECIGGSRTVTFDDLSDRYHTHCDPRLNASQSLELAFIIAERLRKRRMRSGLNNSLPLPPLAF

SEQ ID NO: 9373 - DNA, 1023 bp, Zea mays subsp. mays
  misc_feature (1)..(1023): Ceres Seq. ID no. 12407620
  misc_feature (1)..(1023): Ortholog of  Ceres SEQ ID NO 15226473 as cited in SEQ ID NO 50919
  misc_feature (1)..(1023): Ortholog of  Ceres SEQ ID NO 13639704 as cited in SEQ ID NO 51325
  misc_feature (1)..(1023): Ortholog of  Ceres SEQ ID NO 13661747 as cited in SEQ ID NO 60578
  misc_feature (1)..(1023): Ortholog of  Ceres SEQ ID NO 13661672 as cited in SEQ ID NO 61462
  misc_feature (1)..(1023): Ortholog of  Ceres SEQ ID NO 13599646 as cited in SEQ ID NO 0
aaaacacgtcgcggcctcgctaacgcgcccgcgctagcgcgagtggtggcacccacgcatactcttctcccccccagtccggaccccggaggagccaagccatggcgtccacctcctgctgcctcctccaccagtcaaccgcccgcctcggcgcgtcgccgcgcctggccgccgccccgccgcgcagcgcccagctgctcgtctgcaaggcccggaagcaggaagccgccgcggaccagagcgacgtctcgcgccgcgccacgctcgcgctcctcgccggcgtcacggccgccgccggcgccaaggtgggtcccgccgccgcggcatacggagaagcagccaacgtgttcggcaagcccaaggcgagcacggagtacatcgcgtacagcggcgacggcttcaagctgctgatcccgtccaagtggaaccccagcaaggagcgggagttccccgggcaggtgctccgctacgaggacaacttcgacgccaacagcaacgtgtccgtcatcatccagcccacgtccaagaagaccatcgccgactacggctctcccgaggagttcctctcccaggtcgactacctgctcggcaggcaggcctacggcggcaagaccgactccgagggcgggttcgagaccggcgccgtggccaccgccaacgtcctggagagctccacccccgtgatcgacggcaagcagtactacgccgtgtccgtgctcaccaggacggcggacggcgacgagggcggcaagcaccagctcatcgcggccaccgtctccgacggcaagctctacatctgcaaggcgcaggccggcgacaagaggtggttcaagggcgccaggaagggagtcgagaaggccgcctcctccttcagcgtcgcatgatgatgtaattttatttcttcgatgggatgggatgcacgcactacgtagagagcttggctaggccaggcctggctgagcacgcttgtgtgttccttcgactgtacatgagaacaaagactaaggagagctccattcccgt

SEQ ID NO: 9374 - protein, 260 aa, Zea mays subsp. mays
  peptide (1)..(260): Ceres Seq. ID no. 12407621
MASTSCCLLHQSTARLGASPRLAAAPPRSAQLLVCKARKQEAAADQSDVSRRATLALLAGVTAAAGAKVGPAAAAYGEAANVFGKPKASTEYIAYSGDGFKLLIPSKWNPSKEREFPGQVLRYEDNFDANSNVSVIIQPTSKKTIADYGSPEEFLSQVDYLLGRQAYGGKTDSEGGFETGAVATANVLESSTPVIDGKQYYAVSVLTRTADGDEGGKHQLIAATVSDGKLYICKAQAGDKRWFKGARKGVEKAASSFSVA

SEQ ID NO: 9375 - protein, 136 aa, Zea mays subsp. mays
  peptide (1)..(136): Ceres Seq. ID no. 12407622
KTRRGLANAPALARVVAPTHTLLPPSPDPGGAKPWRPPPAASSTSQPPASARRRAWPPPRRAAPSCSSARPGSRKPPRTRATSRAAPRSRSSPASRPPPAPRWVPPPRHTEKQPTCSASPRRARSTSRTAATASSC

SEQ ID NO: 9376 - DNA, 1504 bp, Zea mays subsp. mays
  misc_feature (1)..(1504): Ceres Seq. ID no. 13498552
  misc_feature (1)..(1504): Ortholog of  Ceres SEQ ID NO 14312817 as cited in SEQ ID NO 57207
  misc_feature (1)..(1504): Ortholog of  Ceres SEQ ID NO 14309678 as cited in SEQ ID NO 59014
gcccacggagatgaagcgccggcgcctgccgcccgtcctcttcctcctcgcgctcgcgctcttgtccctcgccttccgccgccacctctccctccccctcggcgttccccagttcgccgccggtggcgtcagcggcgacgcgctcctccgcctcctcgcggccaccgacgtcggcggggaccagatcctggcggaggcggccgcgctgctggccaacgcgtcggtgtccaccttccccagcatcggcaaccaccaccgcctcctctacctccgcgtcccctaccgcatcaacgccacctccgcgccgcggcagcggacagtgtcccgtctccgcattcccttccacgacgtccccaacgacgacgccctcctcgccgccttccgcgcatccctccgcggcttcctcctcgcgcgccaccgccaccgccaccgccgaggcggcgacgacgtcgcgggcgccatggccgacctccccgccctcctcctcggccagcgccggcgccggcgcgccccgacntgcgccgtcgtcgggaacagcggcacccttctcggctccggccggggcgcgcagatcgacgcgcacgacctcgtgatccggctcaacaacgcccgcgtcgcggggttcgcggccgacgtcggcgccacgaccggcgtctcgttcgtgaactccaacatcctccaccactgcgccgtccgctccgccatcaccgccccgggctgcgcctgccacccctacgggcgcgcggtcccgctggccatgtacgtctgccagccggcgcacctcctggacgcgctcatctgcaacgccacggcgacgccggagtccccgttcccgctcctcgtcaccgacgcgcgcatcgacgcgctgtgcgcgcgcatcgccaagtactactcgatgcggcggttcgtggcggccacggggcagccggccagcaactggacccggaggcacgacgagaggtacttccactactcgtcgggcctgcaggcggtggtcatggcgctaggggcgtgcgatgaggtgagcgtgttcggtttcgggaaggcgccgggggccaagcaccattaccacaccaaccagaagaaggagctcgacctgcacgactacgaggccgagtaccagttctaccgcgacctccaggaacggccagaggcggtgccattcctcgacgaggcgccgggcttcaaggtgccaccggtgaagctctactggtgaccactgacgtcagtaacgtctggttggtagtaacttgtactgtaatatgtttgttgtacaattttttttatttttacattttcacctaaagaggtgtttaggcagagagagataagcgtgtagagaatgtagcgattgacagggagggaatgtgtttaaggatagggaaaatggagatcaaatttgtgattgatcaaatggatcaaattggttgtagttgttcatgtattctgtctgtgtagggcaactgtacacttcatcgattcttgttcatatatagacactttc

SEQ ID NO: 9377 - protein, 404 aa, Zea mays subsp. mays
  peptide (1)..(404): Ceres Seq. ID no. 13498553
  misc_feature (172)..(172): Xaa is any aa, unknown or other
PTEMKRRRLPPVLFLLALALLSLAFRRHLSLPLGVPQFAAGGVSGDALLRLLAATDVGGDQILAEAAALLANASVSTFPSIGNHHRLLYLRVPYRINATSAPRQRTVSRLRIPFHDVPNDDALLAAFRASLRGFLLARHRHRHRRGGDDVAGAMADLPALLLGQRRRRRAPXCAVVGNSGTLLGSGRGAQIDAHDLVIRLNNARVAGFAADVGATTGVSFVNSNILHHCAVRSAITAPGCACHPYGRAVPLAMYVCQPAHLLDALICNATATPESPFPLLVTDARIDALCARIAKYYSMRRFVAATGQPASNWTRRHDERYFHYSSGLQAVVMALGACDEVSVFGFGKAPGAKHHYHTNQKKELDLHDYEAEYQFYRDLQERPEAVPFLDEAPGFKVPPVKLYW

SEQ ID NO: 9378 - protein, 401 aa, Zea mays subsp. mays
  peptide (1)..(401): Ceres Seq. ID no. 13498554
  misc_feature (169)..(169): Xaa is any aa, unknown or other
MKRRRLPPVLFLLALALLSLAFRRHLSLPLGVPQFAAGGVSGDALLRLLAATDVGGDQILAEAAALLANASVSTFPSIGNHHRLLYLRVPYRINATSAPRQRTVSRLRIPFHDVPNDDALLAAFRASLRGFLLARHRHRHRRGGDDVAGAMADLPALLLGQRRRRRAPXCAVVGNSGTLLGSGRGAQIDAHDLVIRLNNARVAGFAADVGATTGVSFVNSNILHHCAVRSAITAPGCACHPYGRAVPLAMYVCQPAHLLDALICNATATPESPFPLLVTDARIDALCARIAKYYSMRRFVAATGQPASNWTRRHDERYFHYSSGLQAVVMALGACDEVSVFGFGKAPGAKHHYHTNQKKELDLHDYEAEYQFYRDLQERPEAVPFLDEAPGFKVPPVKLYW

SEQ ID NO: 9379 - protein, 339 aa, Zea mays subsp. mays
  peptide (1)..(339): Ceres Seq. ID no. 13498555
  misc_feature (173)..(173): Xaa is any aa, unknown or other
AHGDEAPAPAARPLPPRARALVPRLPPPPLPPPRRSPVRRRWRQRRRAPPPPRGHRRRRGPDPGGGGRAAGQRVGVHLPQHRQPPPPPLPPRPLPHQRHLRAAAADSVPSPHSLPRRPQRRRPPRRLPRIPPRLPPRAPPPPPPPRRRRRRGRHGRPPRPPPRPAPAPARPDXRRRREQRHPSRLRPGRADRRARPRDPAQQRPRRGVRGRRRRHDRRLVRELQHPPPLRRPLRHHRPGLRLPPLRARGPAGHVRLPAGAPPGRAHLQRHGDAGVPVPAPRHRRAHRRAVRAHRQVLLDAAVRGGHGAAGQQLDPEARREVLPLLVGPAGGGHGARGVR

SEQ ID NO: 9380 - DNA, 2108 bp, Zea mays subsp. mays
  misc_feature (1)..(2108): Ceres Seq. ID no. 12358850
  misc_feature (1)..(2108): Ortholog of  Ceres SEQ ID NO 15170501 as cited in SEQ ID NO 52774
gcccgcagaaaagaaggctggtggtcgccgctgcacgcggcccagtccacccacgagtacaaacagcggcagctcgcctccacgcgagccaagcgcccgcaaaaccctagccccgcccgccccaaaccctaggcggctacggtctccgatcccggggtcacgtcctaatggcatcttcgccggacttgttccccaacgttaccttctccgacgtctccgaagccgcagcagggcctgcggccgagggggccaccgccgcgttcggtctcggcgccgccactggagccccgcgcctcagcctcgtgaaggccgaggcggagcccacggtcgagatcgacctcgccgacgcgcaggtatttaagttgggaccgacggagtggctgtgtgtgtgcgacgagtcggaggctaaggatggcgtggaagagaagtcattttcaagagcaattaaggttgttcttaggacagaagctgagagcaaagccttctctttagcttttcaacgatggcaacaccaagttattagtggaaaagctggtgaacggctggagaatggatcaataattgcttcgaaaaacaaattcgatacaaaaattgaggcatcatcagcaaagatgtatttccactactatggccagctattacatcagcaaaacatgttacaagattttgtgcggacaggaacatactatgctgctgtgatggaaaaccgttctgacttcgagggtcgagttgtggttgatgttggggctggaagcggtattctttcgttatttgctgtccaggctggtgccagacatgtatatgcagttgaggcatctgaaatggctgaacatgctcaacgtctaatctctgggaacccatctcttggacaccggatcacggtcatcaagggcaaggttgaggaagtagtgcttccagagaaagctgacatactgatttctgaacctatgggaactcttttggttaatgagaggatgctagagtcttatgtcatagctagagacagattacttgctccagatggtaaaatgtttccaacaaccggaaggattcatatggctccattttctgacgaatacctttatgttgaaatggcaaacaaggctctcttttggcagcagcacaatttttttggtgttgatctcacacctttacatggttctgcattccagggatacttttcacagcctgttgtggatgcatttgacccaagattattaatttctccaccaacatatcatacacttgattttactagcatgaaggaagaggagctttacgagattaatattcctctgagctttgtagcttctgttggcactagagtacatggattagcttgttggtttgatgtattgtttaatgggagcactgtgcaaaggtggcttaccactgctccaggatcccctacaactcactggtaccaactacgatgtgtgctttcacagccattgtatgtcatggccggccaagaaataactggccatcttcgtctcgtagcccatagtgctcaaagctacacaatatacttgacaatgtcagctaaaatgtggggtgtgggtgcggagcaaggcggtatcctacagacatctactgggaaacttgaactgaaggagccatactacaggttgtctcagccacaatcatgcacgttgccacaagatcagcaacagcagcaattgccatctttgcaggcacagggatcggagcagcagatgcaggaagggctcagcccagccttcacgatagaccaagattgcctcaactagacagcctggagtcgcgtatgctaggattccagcaacgagctgaggtctgtacaagcacaagagtttagagtagccgatattgtcaggcgttagctgccaaaggctaatatcacgatcgaggtgtaccgtgtacgagaccattcctgagttgcgcagctggcagctaaactgcggtcgcgccttctccgagggaatcgagaaaaaggaaattataaagtgtatttggtttcaggtaaagtgaagagcgaagggcacccctaacaaggacgggtgtatgttgtttgatatattatattcttgctaggaattaattattttcatgttaagtatgtttaattc

SEQ ID NO: 9381 - protein, 533 aa, Zea mays subsp. mays
  peptide (1)..(533): Ceres Seq. ID no. 12358851
MASSPDLFPNVTFSDVSEAAAGPAAEGATAAFGLGAATGAPRLSLVKAEAEPTVEIDLADAQVFKLGPTEWLCVCDESEAKDGVEEKSFSRAIKVVLRTEAESKAFSLAFQRWQHQVISGKAGERLENGSIIASKNKFDTKIEASSAKMYFHYYGQLLHQQNMLQDFVRTGTYYAAVMENRSDFEGRVVVDVGAGSGILSLFAVQAGARHVYAVEASEMAEHAQRLISGNPSLGHRITVIKGKVEEVVLPEKADILISEPMGTLLVNERMLESYVIARDRLLAPDGKMFPTTGRIHMAPFSDEYLYVEMANKALFWQQHNFFGVDLTPLHGSAFQGYFSQPVVDAFDPRLLISPPTYHTLDFTSMKEEELYEINIPLSFVASVGTRVHGLACWFDVLFNGSTVQRWLTTAPGSPTTHWYQLRCVLSQPLYVMAGQEITGHLRLVAHSAQSYTIYLTMSAKMWGVGAEQGGILQTSTGKLELKEPYYRLSQPQSCTLPQDQQQQQLPSLQAQGSEQQMQEGLSPAFTIDQDCLN

SEQ ID NO: 9382 - protein, 385 aa, Zea mays subsp. mays
  peptide (1)..(385): Ceres Seq. ID no. 12358852
MYFHYYGQLLHQQNMLQDFVRTGTYYAAVMENRSDFEGRVVVDVGAGSGILSLFAVQAGARHVYAVEASEMAEHAQRLISGNPSLGHRITVIKGKVEEVVLPEKADILISEPMGTLLVNERMLESYVIARDRLLAPDGKMFPTTGRIHMAPFSDEYLYVEMANKALFWQQHNFFGVDLTPLHGSAFQGYFSQPVVDAFDPRLLISPPTYHTLDFTSMKEEELYEINIPLSFVASVGTRVHGLACWFDVLFNGSTVQRWLTTAPGSPTTHWYQLRCVLSQPLYVMAGQEITGHLRLVAHSAQSYTIYLTMSAKMWGVGAEQGGILQTSTGKLELKEPYYRLSQPQSCTLPQDQQQQQLPSLQAQGSEQQMQEGLSPAFTIDQDCLN

SEQ ID NO: 9383 - protein, 371 aa, Zea mays subsp. mays
  peptide (1)..(371): Ceres Seq. ID no. 12358853
MLQDFVRTGTYYAAVMENRSDFEGRVVVDVGAGSGILSLFAVQAGARHVYAVEASEMAEHAQRLISGNPSLGHRITVIKGKVEEVVLPEKADILISEPMGTLLVNERMLESYVIARDRLLAPDGKMFPTTGRIHMAPFSDEYLYVEMANKALFWQQHNFFGVDLTPLHGSAFQGYFSQPVVDAFDPRLLISPPTYHTLDFTSMKEEELYEINIPLSFVASVGTRVHGLACWFDVLFNGSTVQRWLTTAPGSPTTHWYQLRCVLSQPLYVMAGQEITGHLRLVAHSAQSYTIYLTMSAKMWGVGAEQGGILQTSTGKLELKEPYYRLSQPQSCTLPQDQQQQQLPSLQAQGSEQQMQEGLSPAFTIDQDCLN

SEQ ID NO: 9384 - DNA, 1980 bp, Zea mays subsp. mays
  misc_feature (1)..(1980): Ceres Seq. ID no. 12390151
  misc_feature (1)..(1980): Ortholog of  Ceres SEQ ID NO 14311131 as cited in SEQ ID NO 53729
  misc_feature (1)..(1980): Ortholog of  Ceres SEQ ID NO 13594037 as cited in SEQ ID NO 55666
  misc_feature (1)..(1980): Ortholog of  Ceres SEQ ID NO 13657610 as cited in SEQ ID NO 66165
  misc_feature (1)..(1980): Ortholog of  Ceres SEQ ID NO 13657707 as cited in SEQ ID NO 66407
gcacgagaccattacctagaacatcctaatcgaaaagaacccttcccgtctccaaccgtcgccatctccatccgcgatttaaccactcggccgccgctgagtcagagtcagtagcgagaagcagagcggctctgctcctctcggtcgcgcgccgcccacacaacgccgtccaaccatcagcaatgcctcctgcagttggactccttcccctcctcctcctcctcctcctcttccatctccccgtctccctctgctcccaccaccaccatcacagcaccccacccgcttctccgtccccgtccccgtccccagcaccctcctccgcgccgctagcggtgctcctggcctgcaacgccacccggttccatccggcctgcgtctccacgctctccggcgccgcgcccgatgcctccaccgccgacctcctcgacgcgacgctctcggcgctccgcgtccgcctcccgcccgccgtctccacggccaaatccgtgctggcgtcctcctccaacgtgaacctctccaacgccgccaccaactgcctcacgttcctcgcgctctcctcccgccgcctctcgccgtccccctcggcgccgccgctgctctccgcctccacggcgctgctccacctctacgactgctggtccgcgtacaagtacgtcaacttctcccgcaccatctccgacgccatggcctacctcgacgacaccatcaccgtgaacagcaactacatctccatgctcgccgcgcggcagcgctacggcgacgagacgtccctctggcggcccccgcagacggagcgcgacgggtactggccgccgcccgccgcgagctcgggggccgacgtcgacgcgctcggcgtgcccaagggcctgccggcgaacgcgacggtgtgcggcgccgggtgcgactacaggacggtgcgggaggcggtggcggccgcgccggactacggcgacggcgcgttcgtggtgcacgtgaaggagggggcgtacagggagacggtgagcgtgccgtgggagaagaccaacgtggtcctcgttggcgacggcatggggaagacggtcatcactggcgatctcaacgctgacacgtccggcgtgtccaccttcaacaccgccaccgtaggcgtgctggcggacgggttcatggcgcgtgacctgacgatcgcgaacacggcgggccccgacgcgcaccaggccgtggcgttccggtccacgggcgaccgcacggtgctggacggcgtggagctgctggggcaccaggacacgctgtacgcgcacgccatgcgccagttctacacccggtgccgcgtggcgggcaccgtcgacttcgtcttcggcaactccgccgcggtgctccacgacaccgccctcgtcgtgctgccgcggcagctgcggccggagaagggcgagaacgacgccgtcacggcgcagggccgcaccgacccggcccagcccacggggatcgtgctcagccgctgctccgtcaacggcagcgaggagtacatggcgctgtaccgcgagaggcccggcgtgcaccacgtgtacctgggccgcccgtggaaggagtactcccgcaccgtgtacgtcgggtgcatgctcgcggagatcgtgcagccgcaggggtggatgccgtggaacggggacttcgcgctccagacgctctactacggcgagtacgacagcgccggccccggcggcgccgcgggccagagggtggcgtggagcagccaggttcccaaggtccacgtcgacgcgtacagcgtcgccagcttcatacaggggcacgagtggatacccagagtgtagtgcagtaccgcgtaataactgtagagagtgtatttaccaacaatcgtgtcccacaattgacacggtgtccctgatgttgagcttgagcattgcagttactcctaataatacggagagagcaagtcaaagacatggaaataataaacctaccgcgataacgatcgcaacgggc

SEQ ID NO: 9385 - protein, 541 aa, Zea mays subsp. mays
  peptide (1)..(541): Ceres Seq. ID no. 12390152
MPPAVGLLPLLLLLLLFHLPVSLCSHHHHHSTPPASPSPSPSPAPSSAPLAVLLACNATRFHPACVSTLSGAAPDASTADLLDATLSALRVRLPPAVSTAKSVLASSSNVNLSNAATNCLTFLALSSRRLSPSPSAPPLLSASTALLHLYDCWSAYKYVNFSRTISDAMAYLDDTITVNSNYISMLAARQRYGDETSLWRPPQTERDGYWPPPAASSGADVDALGVPKGLPANATVCGAGCDYRTVREAVAAAPDYGDGAFVVHVKEGAYRETVSVPWEKTNVVLVGDGMGKTVITGDLNADTSGVSTFNTATVGVLADGFMARDLTIANTAGPDAHQAVAFRSTGDRTVLDGVELLGHQDTLYAHAMRQFYTRCRVAGTVDFVFGNSAAVLHDTALVVLPRQLRPEKGENDAVTAQGRTDPAQPTGIVLSRCSVNGSEEYMALYRERPGVHHVYLGRPWKEYSRTVYVGCMLAEIVQPQGWMPWNGDFALQTLYYGEYDSAGPGGAAGQRVAWSSQVPKVHVDAYSVASFIQGHEWIPRV

SEQ ID NO: 9386 - protein, 373 aa, Zea mays subsp. mays
  peptide (1)..(373): Ceres Seq. ID no. 12390153
MAYLDDTITVNSNYISMLAARQRYGDETSLWRPPQTERDGYWPPPAASSGADVDALGVPKGLPANATVCGAGCDYRTVREAVAAAPDYGDGAFVVHVKEGAYRETVSVPWEKTNVVLVGDGMGKTVITGDLNADTSGVSTFNTATVGVLADGFMARDLTIANTAGPDAHQAVAFRSTGDRTVLDGVELLGHQDTLYAHAMRQFYTRCRVAGTVDFVFGNSAAVLHDTALVVLPRQLRPEKGENDAVTAQGRTDPAQPTGIVLSRCSVNGSEEYMALYRERPGVHHVYLGRPWKEYSRTVYVGCMLAEIVQPQGWMPWNGDFALQTLYYGEYDSAGPGGAAGQRVAWSSQVPKVHVDAYSVASFIQGHEWIPRV

SEQ ID NO: 9387 - protein, 357 aa, Zea mays subsp. mays
  peptide (1)..(357): Ceres Seq. ID no. 12390154
MLAARQRYGDETSLWRPPQTERDGYWPPPAASSGADVDALGVPKGLPANATVCGAGCDYRTVREAVAAAPDYGDGAFVVHVKEGAYRETVSVPWEKTNVVLVGDGMGKTVITGDLNADTSGVSTFNTATVGVLADGFMARDLTIANTAGPDAHQAVAFRSTGDRTVLDGVELLGHQDTLYAHAMRQFYTRCRVAGTVDFVFGNSAAVLHDTALVVLPRQLRPEKGENDAVTAQGRTDPAQPTGIVLSRCSVNGSEEYMALYRERPGVHHVYLGRPWKEYSRTVYVGCMLAEIVQPQGWMPWNGDFALQTLYYGEYDSAGPGGAAGQRVAWSSQVPKVHVDAYSVASFIQGHEWIPRV

SEQ ID NO: 9388 - DNA, 1619 bp, Zea mays subsp. mays
  misc_feature (1)..(1619): Ceres Seq. ID no. 12365892
  misc_feature (1)..(1619): Ortholog of  Ceres SEQ ID NO 14308120 as cited in SEQ ID NO 58423
  misc_feature (1)..(1619): Ortholog of  Ceres SEQ ID NO 15169380 as cited in SEQ ID NO 58483
  misc_feature (1)..(1619): Ortholog of  Ceres SEQ ID NO 15177787 as cited in SEQ ID NO 59431
  misc_feature (1)..(1619): Ortholog of  Ceres SEQ ID NO 12617197 as cited in SEQ ID NO 63406
  misc_feature (1)..(1619): Ortholog of  Ceres SEQ ID NO 14301622 as cited in SEQ ID NO 65156
gcacgagaccattacctagaacatcctaatcgaaaaagtagacacctaaactttgccacatagccaataacggatcggatcgccttcgtacttttcctacttgctatctccagcgctaggctatcagctagcactagcagcgccgtcactgttcgaagagatcagcgcagcgaactcgcagccgagagatcgatcgaggccggccggggccgagatgggcagcgtcggcgtcggttgcggctcgccggacgaggagcagcagaccgagggcagtggccctctgccgccgccggctgtctgcgtcacggggtccaccggctacgtcggctcctggctcgtccgcacgctgctgcggcgaggctaccgcgtccacgccaccgccagggacacaggcaaggccttgcaggtgctcgccgtcgtggaagaagggagggaccggctcagggtgttcagggccgacatgggcgaggaagggagcttcgacgccgccgtcacgggatgcgtggcgctcttccacgtcgcggcctccatggacctccacgtatcacccgcccatcaggacaacctcgaggagcacgtgaggtcaagcatgctggagccggccacgaggggaaccatcaacgtgctgcggtcctgcgtccgcgccgggaccgtgcgccgggtcgtcttcacgtcctccgtcagcacgttgacggcggtggacgcggtggggcggcggaaggccgtgctcgacgagtcttgcctcagagccctcgacgacgtgtggcgcaccaagcccgtcggctgggtctacatcctgtccaagcggctgactgaggaggcggcgttcaggttcgcacgggagaacggcgtccacctcgtgtccctcgttctgccaaccgtcgccgggccgttcctcacgacaagcgtccctacgagcatccagctcctgctgtcacccatcacaggtgacccgaagctctactcggtgctggcctcagtgcacgccaggttcgggtgcgtcccgctggcgcacgtccaggacgtgtgtgacgcgcacgtcttactgatggaggcgccgcgcgccgaggggcggtacctgtgcgccgcgggcgggtacgcggcggcgcagctcgcgcggctcctcgcttcgcgctaccttccggccggtgacaggctgagcaaagatttcgacgacgtctcctgctcgccgccggtggtttcgtccaggaggctgttggatctggggttcaggttccggcacgacgtcgaggacgtggtgaaagacagtgttgcgcagtgtcttgcccatgggttcctggagcatcctgagacctgaatgcggcagagctgcaattcctagttggtttcaggcgttcagcaaatcagcggcgatctgaaggagaaggatgaatgcatggttgggctggggcctgggcccttaggctatccacatgttactctatatttactctacagactataccactattcctagcttaatcaccaaaattccttactctaaattactcaccaaaatttgtagcctcatatacctctatatatcaactactactacatagtctattttattctatttcattctaactacttttttctctatataatacaagattttg

SEQ ID NO: 9389 - protein, 367 aa, Zea mays subsp. mays
  peptide (1)..(367): Ceres Seq. ID no. 12365893
MGSVGVGCGSPDEEQQTEGSGPLPPPAVCVTGSTGYVGSWLVRTLLRRGYRVHATARDTGKALQVLAVVEEGRDRLRVFRADMGEEGSFDAAVTGCVALFHVAASMDLHVSPAHQDNLEEHVRSSMLEPATRGTINVLRSCVRAGTVRRVVFTSSVSTLTAVDAVGRRKAVLDESCLRALDDVWRTKPVGWVYILSKRLTEEAAFRFARENGVHLVSLVLPTVAGPFLTTSVPTSIQLLLSPITGDPKLYSVLASVHARFGCVPLAHVQDVCDAHVLLMEAPRAEGRYLCAAGGYAAAQLARLLASRYLPAGDRLSKDFDDVSCSPPVVSSRRLLDLGFRFRHDVEDVVKDSVAQCLAHGFLEHPET

SEQ ID NO: 9390 - protein, 285 aa, Zea mays subsp. mays
  peptide (1)..(285): Ceres Seq. ID no. 12365894
MGEEGSFDAAVTGCVALFHVAASMDLHVSPAHQDNLEEHVRSSMLEPATRGTINVLRSCVRAGTVRRVVFTSSVSTLTAVDAVGRRKAVLDESCLRALDDVWRTKPVGWVYILSKRLTEEAAFRFARENGVHLVSLVLPTVAGPFLTTSVPTSIQLLLSPITGDPKLYSVLASVHARFGCVPLAHVQDVCDAHVLLMEAPRAEGRYLCAAGGYAAAQLARLLASRYLPAGDRLSKDFDDVSCSPPVVSSRRLLDLGFRFRHDVEDVVKDSVAQCLAHGFLEHPET

SEQ ID NO: 9391 - protein, 262 aa, Zea mays subsp. mays
  peptide (1)..(262): Ceres Seq. ID no. 12365895
MDLHVSPAHQDNLEEHVRSSMLEPATRGTINVLRSCVRAGTVRRVVFTSSVSTLTAVDAVGRRKAVLDESCLRALDDVWRTKPVGWVYILSKRLTEEAAFRFARENGVHLVSLVLPTVAGPFLTTSVPTSIQLLLSPITGDPKLYSVLASVHARFGCVPLAHVQDVCDAHVLLMEAPRAEGRYLCAAGGYAAAQLARLLASRYLPAGDRLSKDFDDVSCSPPVVSSRRLLDLGFRFRHDVEDVVKDSVAQCLAHGFLEHPET

SEQ ID NO: 9392 - DNA, 1408 bp, Zea mays subsp. mays
  misc_feature (1)..(1408): Ceres Seq. ID no. 12555162
  misc_feature (1)..(1408): Ortholog of  Ceres SEQ ID NO 15179609 as cited in SEQ ID NO 0
aaacccaatccatccaaacccatttccctcgctcccatcccgtcccgccccttgtctcttccgcttccgcccgaccccgcgcgccgcggaccagcagccatgtcgtgctcccacctctccaccgcctggtcctcctcggcgctcgccagcagcgcctccaccacccgtcggcgctcccccccgcgctcgggtctcctggtgcggtgttccctccgtgagctccgcacccgcatcgactccgtcaggaacacgcagaagatcacggaggccatgaagctggtggccgccgccaaggtccggcgcgcgcaggaggccgtcgtctcctctcgccctttctcggaggcgctggtggaggtgctctacaacatgaaccaggagatccagacggaggacatcgacctgcccctcacccgcacccgccccgtcaagaaggtggccctcgtggtcctgaccggcgagcgcggcctctgcgggagcttcaacaacaacgtgctcaagaaggcggaaacccgcatcgatgagctcaagcagctgggcctccagtacaccgtcgtcagcgtggggaagaagggcaacgcctacttccagcgccgcccctacatcccgttggagcgcgatctggaggtgagcagcgtgcccaccgtcaaggactcgcaggccatctgcgacctcgtctactcgctcttcgtctccgaggaggtggacaaggtggagctgctctactccaagttcgtgtcgctggtgcgctccgaccccatcatccagacgctgctccccatgtcgcccaagggcgagatctgcgacgtcaacggcgtctgcgtggacgccacggaggacgagctcttccgcctcaccaccaaggaggggaagctcaccgtggagcgcgagaaggtgaagatcgagacgcagcccttctcccccgtggtgcagttcgagcaggaccccgtgcagatcctggacgcgctgctcccgctctacctcaacagccagatcctccgtgccctgcaggagtcgctcgccagcgagctcgccgcccggatgagcgccatgagcagcgccaccgacaacgccatcgagctccgcaagaacctctccatcgcctacaaccgacagcgccaggccaagatcaccggggagatcctcgagatcgtcgccggtgccgacgccctcgctggctgagcctgagtccccttggtggtgcggtgctcctgctatatataattctttttcctcattttctccactctgcctgtaattcctgataatagcacaaacgcaacggagttctgtgttccttgcgacacacaagaatttcaatccagagatgccaaaatgtataatcttgccgcaactgagacgtcgaagctcagtgtatttttatgcccaagtcttccaaatgtttggcacg

SEQ ID NO: 9393 - protein, 392 aa, Zea mays subsp. mays
  peptide (1)..(392): Ceres Seq. ID no. 12555163
KPNPSKPISLAPIPSRPLSLPLPPDPARRGPAAMSCSHLSTAWSSSALASSASTTRRRSPPRSGLLVRCSLRELRTRIDSVRNTQKITEAMKLVAAAKVRRAQEAVVSSRPFSEALVEVLYNMNQEIQTEDIDLPLTRTRPVKKVALVVLTGERGLCGSFNNNVLKKAETRIDELKQLGLQYTVVSVGKKGNAYFQRRPYIPLERDLEVSSVPTVKDSQAICDLVYSLFVSEEVDKVELLYSKFVSLVRSDPIIQTLLPMSPKGEICDVNGVCVDATEDELFRLTTKEGKLTVEREKVKIETQPFSPVVQFEQDPVQILDALLPLYLNSQILRALQESLASELAARMSAMSSATDNAIELRKNLSIAYNRQRQAKITGEILEIVAGADALAG

SEQ ID NO: 9394 - protein, 359 aa, Zea mays subsp. mays
  peptide (1)..(359): Ceres Seq. ID no. 12555164
MSCSHLSTAWSSSALASSASTTRRRSPPRSGLLVRCSLRELRTRIDSVRNTQKITEAMKLVAAAKVRRAQEAVVSSRPFSEALVEVLYNMNQEIQTEDIDLPLTRTRPVKKVALVVLTGERGLCGSFNNNVLKKAETRIDELKQLGLQYTVVSVGKKGNAYFQRRPYIPLERDLEVSSVPTVKDSQAICDLVYSLFVSEEVDKVELLYSKFVSLVRSDPIIQTLLPMSPKGEICDVNGVCVDATEDELFRLTTKEGKLTVEREKVKIETQPFSPVVQFEQDPVQILDALLPLYLNSQILRALQESLASELAARMSAMSSATDNAIELRKNLSIAYNRQRQAKITGEILEIVAGADALAG

SEQ ID NO: 9395 - protein, 302 aa, Zea mays subsp. mays
  peptide (1)..(302): Ceres Seq. ID no. 12555165
MKLVAAAKVRRAQEAVVSSRPFSEALVEVLYNMNQEIQTEDIDLPLTRTRPVKKVALVVLTGERGLCGSFNNNVLKKAETRIDELKQLGLQYTVVSVGKKGNAYFQRRPYIPLERDLEVSSVPTVKDSQAICDLVYSLFVSEEVDKVELLYSKFVSLVRSDPIIQTLLPMSPKGEICDVNGVCVDATEDELFRLTTKEGKLTVEREKVKIETQPFSPVVQFEQDPVQILDALLPLYLNSQILRALQESLASELAARMSAMSSATDNAIELRKNLSIAYNRQRQAKITGEILEIVAGADALAG

SEQ ID NO: 9396 - DNA, 965 bp, Zea mays subsp. mays
  misc_feature (1)..(965): Ceres Seq. ID no. 12415225
  misc_feature (1)..(965): Ortholog of  Ceres SEQ ID NO 15169786 as cited in SEQ ID NO 59711
accaccagcagagagcagacccgccgtctccgctatcagcacgcgtgtagccctgcagcgaggaatcaccacacacacacacacgcagagagacagagaagaggagggagatgtcgccgcagtctcagcagcagacggcgatantcggggaggagtactgcgagggcgaggacagggagctgacggtgcgcaagangacgctcttcaccccgggggacgggctggaggcgtacgaccaccgcacgggcgcgctggcgttccgcgtcgagacgtacggccgcggcggggcgtgcgggggcggggccgccaggggggacctcgcgctgctgggcgcccagggggagcccgtcctcacggtgcgccgccgccgccccagcctgcacaaccgctgggacggcttcctcggcgacggcgccgcgcacggccagaagaagcccgtcttctccgcgcgccgctcctccatcctcggcgccggcacgggcgccgccgccgtcctcgtcgacctcctcgcccccggcgccgccggggagttccgcgtcgacggctccttcccgcgccgctgctgccgcgtcgtggcctccgccagggcntgggccgcgcccgtcgccaaggagnnggaggaggaggaggaggaggacgtggtggtggcggaggtcaggcggaaggtggacgaggacgcgcacgtcatgatgggccgggacgtcttcgtgctctgggtgcgcgccggcttcgacgccgccttcgccatggggatcgtgctcgtgctcgaccggatcaccggggatgacgtcgacggcgactgcgggaggacctgctcgaggccgctacatnccgccggcgtaagcacgcgggaccgacctcccgctcgcgtggggcgtggcttcagtacaattccacaaacaattttctcatggttcttcgatccgatgtactttaccttcgagcatgatgtgaattatcttctc

SEQ ID NO: 9397 - protein, 285 aa, Zea mays subsp. mays
  peptide (1)..(285): Ceres Seq. ID no. 12415226
  misc_feature (12)..(12): Xaa is any aa, unknown or other
  misc_feature (29)..(29): Xaa is any aa, unknown or other
  misc_feature (160)..(160): Xaa is any aa, unknown or other
  misc_feature (169)..(169): Xaa is any aa, unknown or other
  misc_feature (241)..(241): Xaa is any aa, unknown or other
MSPQSQQQTAIXGEEYCEGEDRELTVRKXTLFTPGDGLEAYDHRTGALAFRVETYGRGGACGGGAARGDLALLGAQGEPVLTVRRRRPSLHNRWDGFLGDGAAHGQKKPVFSARRSSILGAGTGAAAVLVDLLAPGAAGEFRVDGSFPRRCCRVVASARXWAAPVAKEXEEEEEEDVVVAEVRRKVDEDAHVMMGRDVFVLWVRAGFDAAFAMGIVLVLDRITGDDVDGDCGRTCSRPLHXAGVSTRDRPPARVGRGFSTIPQTIFSWFFDPMYFTFEHDVNYLL

SEQ ID NO: 9398 - protein, 261 aa, Zea mays subsp. mays
  peptide (1)..(261): Ceres Seq. ID no. 12415227
  misc_feature (48)..(48): Xaa is any aa, unknown or other
  misc_feature (65)..(65): Xaa is any aa, unknown or other
  misc_feature (197)..(197): Xaa is any aa, unknown or other
  misc_feature (205)..(205): Xaa is any aa, unknown or other
PPAESRPAVSAISTRVALQRGITTHTHTQRDREEEGDVAAVSAADGDXRGGVLRGRGQGADGAQXDALHPGGRAGGVRPPHGRAGVPRRDVRPRRGVRGRGRQGGPRAAGRPGGARPHGAPPPPQPAQPLGRLPRRRRRARPEEARLLRAPLLHPRRRHGRRRRPRRPPRPRRRRGVPRRRLLPAPLLPRRGLRQGXGRARRQGXGGGGGGGRGGGGGQAEGGRGRARHDGPGRLRALGARRLRRRLRHGDRARARPDHRG

SEQ ID NO: 9399 - DNA, 960 bp, Zea mays subsp. mays
  misc_feature (1)..(960): Ceres Seq. ID no. 12369133
  misc_feature (1)..(960): Ortholog of  Ceres SEQ ID NO 12609185 as cited in SEQ ID NO 55761
  misc_feature (1)..(960): Ortholog of  Ceres SEQ ID NO 12615291 as cited in SEQ ID NO 62444
gaacctgagaacctgacgcggcatcatgcaaacaaaaccgatcagagagatggcggccgtctcctccaccgccaccgcctcctcgcagccggagctgccgacctccaccgcccaccctaccgccaatgccgccgccatcagcaggctggcgcggcggccacggcggaacaacagcttcgtgatggtggaggaggcgtcctatgccagcggcggcggcgacggcggggtggccaggacgaagagcctcacggaggacgacctggaggagctcaagggctgcgtcgacctcggcttcggcttcgcgtacagcgagatacccgagctctgcgggacgctgcccgcgctcgagctctgctactccatgacccggaggttcctcgacgagcagagggcgccgggacaggatgaggaggaggaggagcctgcgtcgccgccgctcccaaattggaggatctttgcaccgggtgacgatccggaggaagtgaaggccaggttgaagtattgggctcaagcagtagcatgcactgtcaagctctgcagctgaaccagaggctggttttaactgctgtctgttctgttagcgtatgctgcgacgggccgaaccgagggcctgttggaggttgaacagtctggttgtatgtgttttgggattcgggggagcgaagaactctcttcataggtttcttctctggctgcttctgcaagaacttgggagggcggaggagggatcatgatccgggacagcgacagaccccgattgagatccatggtttgagggttctacgccgcaagcctttgcaaaatgcaggacctgctgtttcgttgttaataataataatgatgatgatgatcactaggtgttctaactgtcgtagtcctgtaataattaatgatgcactgaatggaagtttcgagttttggctactaatccaagggttgattagctccaatttttgatct

SEQ ID NO: 9400 - protein, 172 aa, Zea mays subsp. mays
  peptide (1)..(172): Ceres Seq. ID no. 12369134
MQTKPIREMAAVSSTATASSQPELPTSTAHPTANAAAISRLARRPRRNNSFVMVEEASYASGGGDGGVARTKSLTEDDLEELKGCVDLGFGFAYSEIPELCGTLPALELCYSMTRRFLDEQRAPGQDEEEEEPASPPLPNWRIFAPGDDPEEVKARLKYWAQAVACTVKLCS

SEQ ID NO: 9401 - protein, 164 aa, Zea mays subsp. mays
  peptide (1)..(164): Ceres Seq. ID no. 12369135
MAAVSSTATASSQPELPTSTAHPTANAAAISRLARRPRRNNSFVMVEEASYASGGGDGGVARTKSLTEDDLEELKGCVDLGFGFAYSEIPELCGTLPALELCYSMTRRFLDEQRAPGQDEEEEEPASPPLPNWRIFAPGDDPEEVKARLKYWAQAVACTVKLCS

SEQ ID NO: 9402 - protein, 135 aa, Zea mays subsp. mays
  peptide (1)..(135): Ceres Seq. ID no. 12369136
EPENLTRHHANKTDQRDGGRLLHRHRLLAAGAADLHRPPYRQCRRHQQAGAAATAEQQLRDGGGGVLCQRRRRRRGGQDEEPHGGRPGGAQGLRRPRLRLRVQRDTRALRDAARARALLLHDPEVPRRAEGAGTG

SEQ ID NO: 9403 - DNA, 1016 bp, Zea mays subsp. mays
  misc_feature (1)..(1016): Ceres Seq. ID no. 13499183
  misc_feature (1)..(1016): Ortholog of  Ceres SEQ ID NO 14306223 as cited in SEQ ID NO 56928
  misc_feature (1)..(1016): Ortholog of  Ceres SEQ ID NO 12784326 as cited in SEQ ID NO 61717
  misc_feature (1)..(1016): Ortholog of  Ceres SEQ ID NO 12634627 as cited in SEQ ID NO 0
acacagacacagcagccgtttccactgacagtttctcagaaccacagcctcgatccatcgggggagaggatgggagagcctacgcggcaggagctggcggaggcggcgctcgccggggagtcggcggagcagcgcaaccgcttcctggtgctgcggctgtacgaggcgctcggctcccgcgacgcgcgccgggcgcggaagctgctggcgcccgacctcgagtggtggttccacgggccccccacgcgccagcacatgatgcgcctcctcaccggcgcggaccaccagcgccacatgagcggcggcgggttcgccttctccccgcgctccgtcgacgccttcgggtccaccgtcgtcgcggagggcggcgctgacgacgcgcgccagctctactgggtgcacgcctggaccgtggggcccgacggggtcatcacacagctcagggagtacttcaacaccgacctcactgtcaccctcctcgccggcgctgcctccgccaagaaagctgctccgcctaagcagcagcaggacgctgcctcttcttctacctcctcctcctcacccccctcggctgcgtcgtcgtctgcagctgcagggtccaggtgcctgtggcagagccgccgcgccgacagcgcgcacaagtcgctgccgggcctcgtcctcgccatctgagactagagacagcaagatccatctaccctccattataagtttataaccttattacaaaagatcctaaaattcgaaactgttattgcataaataatctggaactgcactagttgtatgtactcggagtcggagtcagtcagtgaagacgtaatgacgatgcgcgtatggactgaactgctcgatcctccgtgttgtgacttgtgaggttcaggtaccagttccttgcttagctcgtgtcgtgtgtgctgctactaggctgtaaggatcgactgttattgtccgagtctgctggatcatggatgtgatgtgatggtatatcgtggtggttaaataaaagttgcatg

SEQ ID NO: 9404 - protein, 223 aa, Zea mays subsp. mays
  peptide (1)..(223): Ceres Seq. ID no. 13499184
TQTQQPFPLTVSQNHSLDPSGERMGEPTRQELAEAALAGESAEQRNRFLVLRLYEALGSRDARRARKLLAPDLEWWFHGPPTRQHMMRLLTGADHQRHMSGGGFAFSPRSVDAFGSTVVAEGGADDARQLYWVHAWTVGPDGVITQLREYFNTDLTVTLLAGAASAKKAAPPKQQQDAASSSTSSSSPPSAASSSAAAGSRCLWQSRRADSAHKSLPGLVLAI

SEQ ID NO: 9405 - protein, 200 aa, Zea mays subsp. mays
  peptide (1)..(200): Ceres Seq. ID no. 13499185
MGEPTRQELAEAALAGESAEQRNRFLVLRLYEALGSRDARRARKLLAPDLEWWFHGPPTRQHMMRLLTGADHQRHMSGGGFAFSPRSVDAFGSTVVAEGGADDARQLYWVHAWTVGPDGVITQLREYFNTDLTVTLLAGAASAKKAAPPKQQQDAASSSTSSSSPPSAASSSAAAGSRCLWQSRRADSAHKSLPGLVLAI

SEQ ID NO: 9406 - protein, 138 aa, Zea mays subsp. mays
  peptide (1)..(138): Ceres Seq. ID no. 13499186
MMRLLTGADHQRHMSGGGFAFSPRSVDAFGSTVVAEGGADDARQLYWVHAWTVGPDGVITQLREYFNTDLTVTLLAGAASAKKAAPPKQQQDAASSSTSSSSPPSAASSSAAAGSRCLWQSRRADSAHKSLPGLVLAI

SEQ ID NO: 9407 - DNA, 1244 bp, Zea mays subsp. mays
  misc_feature (1)..(1244): Ceres Seq. ID no. 12354322
  misc_feature (1)..(1244): Ortholog of  Ceres SEQ ID NO 14312208 as cited in SEQ ID NO 54845
  misc_feature (1)..(1244): Ortholog of  Ceres SEQ ID NO 15171755 as cited in SEQ ID NO 57047
  misc_feature (1)..(1244): Ortholog of  Ceres SEQ ID NO 13597613 as cited in SEQ ID NO 65334
  misc_feature (1)..(1244): Ortholog of  Ceres SEQ ID NO 14303664 as cited in SEQ ID NO 65892
  misc_feature (1)..(1244): Ortholog of  Ceres SEQ ID NO 15178832 as cited in SEQ ID NO 0
aagcaaaccctaatccgtcggccatgtcgtcctcccccgcggcgctgcgcttctactgccaccagtgcgaccgcaccgtctccctcgcccctcccgcatccccggacgccgacgtcttctgcccccgctgcggcggcggattcgtcgaggagcttcctcccaaccctagccccgcgcctccggccgccgccttctttgccccgccctccttcgacatccgccaccccagcgacctctccgctttcttcggccccgcctcccccgagccgctcgccccaggcctcttcgatccctccaacttccttcacgaccacttcggcggcctcctctccggcggcgccaccatccagatcgtcctcgagggtgggcccccgcccccaggcctcaactttgccgactacttcgtcggctcctccggcctcgagcagctcatccagcagctcgccgagaacgaccccaaccgctacggcaccccgcccgccgccaaggccgccgtcgcctcgctccctgacgtcgctgtctcggccgacatgatgcaggccgacggcggcgctcagtgtgccgtctgcatggacgacttccacctcggcgccgccgccaagcagctcccctgcaagcacgtcttccacaaggactgcatcgtcccatggctacctccacagctcctgcccggtctgccgcttcgagctgcccaccgacgaccctgactacaatcacacccatcagcagcacggtgattcgtctgcccctgctcccccttcccccgctcccgcggtctcctcccccagggtggccgagaggaggtttaggatttcgctgccctggcctctcagggccgcttttggcgctgctcaggcagagagcagcaatcccaccgatgatgacgtgcctccgtctggcagcgatgcagctggtggccctcagtctcagactggatatgatgatctcgactgaggcctcaatagccgatcttggaaacaaataggctatacaccaaagatgagagatgataccgtcgtgtaccaaattaataaatgtgcatcagaagtatggagtcctttaggaacctctgctgactgttgatggaatatggttggtttgttgacactgtcagtgcattgtttctgaagggatatgggcctgttaatttaaaatttgtattcactaatggttgggggaggaacggtggagaaactgagtcatgtatagttgttccttttgcaattgctgcatggtttttttct

SEQ ID NO: 9408 - protein, 234 aa, Zea mays subsp. mays
  peptide (1)..(234): Ceres Seq. ID no. 12354323
ANPNPSAMSSSPAALRFYCHQCDRTVSLAPPASPDADVFCPRCGGGFVEELPPNPSPAPPAAAFFAPPSFDIRHPSDLSAFFGPASPEPLAPGLFDPSNFLHDHFGGLLSGGATIQIVLEGGPPPPGLNFADYFVGSSGLEQLIQQLAENDPNRYGTPPAAKAAVASLPDVAVSADMMQADGGAQCAVCMDDFHLGAAAKQLPCKHVFHKDCIVPWLPPQLLPGLPLRAAHRRP

SEQ ID NO: 9409 - protein, 227 aa, Zea mays subsp. mays
  peptide (1)..(227): Ceres Seq. ID no. 12354324
MSSSPAALRFYCHQCDRTVSLAPPASPDADVFCPRCGGGFVEELPPNPSPAPPAAAFFAPPSFDIRHPSDLSAFFGPASPEPLAPGLFDPSNFLHDHFGGLLSGGATIQIVLEGGPPPPGLNFADYFVGSSGLEQLIQQLAENDPNRYGTPPAAKAAVASLPDVAVSADMMQADGGAQCAVCMDDFHLGAAAKQLPCKHVFHKDCIVPWLPPQLLPGLPLRAAHRRP

SEQ ID NO: 9410 - protein, 177 aa, Zea mays subsp. mays
  peptide (1)..(177): Ceres Seq. ID no. 12354325
KQTLIRRPCRPPPRRCASTATSATAPSPSPLPHPRTPTSSAPAAAADSSRSFLPTLAPRLRPPPSLPRPPSTSATPATSPLSSAPPPPSRSPQASSIPPTSFTTTSAASSPAAPPSRSSSRVGPRPQASTLPTTSSAPPASSSSSSSSPRTTPTATAPRPPPRPPSPRSLTSLSRPT

SEQ ID NO: 9411 - DNA, 816 bp, Zea mays subsp. mays
  misc_feature (1)..(816): Ceres Seq. ID no. 12384239
  misc_feature (1)..(816): Ortholog of  Ceres SEQ ID NO 13595538 as cited in SEQ ID NO 59858
acaggtaattctctcgtagttcagttgtagccgttgagacttgggaggcaggcgacatgggtggcgggaaggacgacggccacgatccctccaaggcggacaagggattccacggaggagggtacccggccgccggtggatactacggcggccagtaccccggcggcggctaccctgctccaccgggcggcggtgcgtaccctcccgggcctgggtacccggtaccacctggtgggtacccgcctccgggtggctaccctcagcctggcggatacccgccgtcgcacggggcgtacccggcgccgggtgcaggcgcgtatcctcccagcgggtacccccatcaaccggtctacccacagcctggctatccatcgatgcccggtcatggtggcatgtacggaggagggcacggcgcagggggttctgcaggccacggggcgatgctggccggaggtgccgcggcggcgtacggagctcacacggtgtcccactcccacgggatgtacggccacggccacggccacggcaagttcaagcatggcaagttcaagcacggcaagtttggcaagcacaagaagatgtttggcaagcacaagaatatgttcggtcgcaagtggaagtgattaacgtacagctttaatccgattctggacgagcagacgtatatatatacaccggagtccagaatgctaagttatgctattttgattgtgattcgaatacgggaggttgttagggttttcgaagtacgtactgacggctgcctgtaagctttgttggagctgttcttgccgtgttggcagtccgaattaattt

SEQ ID NO: 9412 - protein, 188 aa, Zea mays subsp. mays
  peptide (1)..(188): Ceres Seq. ID no. 12384240
MGGGKDDGHDPSKADKGFHGGGYPAAGGYYGGQYPGGGYPAPPGGGAYPPGPGYPVPPGGYPPPGGYPQPGGYPPSHGAYPAPGAGAYPPSGYPHQPVYPQPGYPSMPGHGGMYGGGHGAGGSAGHGAMLAGGAAAAYGAHTVSHSHGMYGHGHGHGKFKHGKFKHGKFGKHKKMFGKHKNMFGRKWK

SEQ ID NO: 9413 - DNA, 726 bp, Zea mays subsp. mays
  misc_feature (1)..(726): Ceres Seq. ID no. 12354125
  misc_feature (1)..(726): Ortholog of  Ceres SEQ ID NO 12625405 as cited in SEQ ID NO 63172
ccactcatctatttcttttgaatcattgtatactagctagctagctagccagagcttgtatggccactgctcatcatgcggatgaccatcgtgcagggagaagaagcgaggccgtcggagagaactacatgaggggcctctacggcgacgatgactacaacgccacccactacggtcaccagcagcagcagcggccgccgcccgcgcccatggcggtggccaaggcgttagccacagccacggcagccttctccatgttgttgttgtcggggctggcggtgacgggcacggtgctggcgctcatcgtggcgacgccattgatggtgatcttcagccccgtgctggtgccggcggccatcacggtggcgctgctcacggtaggcatcgtttcgtcgggagggttcggcgtggctgcggtggctgtgctggcgtgggtgtaccgctaccttcagaccacgacctcgtcgtcgggtcagcagccgcacatcgtcaaggactgggcgcagcagcaccgtctggagcagacacgcgcgcactgaaataaaaaaaaaagcgtagtacccctccgtttctttttatttgttgctgtttagttcatatttgtcactgtttcgttaaaaatgaactagcgggataacgagaacgggaggtaatatagcttttcatttaatgtaatgtaacgtaatcttatgtttgcagcagtaataatgtgtattatatatttgc

SEQ ID NO: 9414 - protein, 159 aa, Zea mays subsp. mays
  peptide (1)..(159): Ceres Seq. ID no. 12354126
MATAHHADDHRAGRRSEAVGENYMRGLYGDDDYNATHYGHQQQQRPPPAPMAVAKALATATAAFSMLLLSGLAVTGTVLALIVATPLMVIFSPVLVPAAITVALLTVGIVSSGGFGVAAVAVLAWVYRYLQTTTSSSGQQPHIVKDWAQQHRLEQTRAH

SEQ ID NO: 9415 - protein, 136 aa, Zea mays subsp. mays
  peptide (1)..(136): Ceres Seq. ID no. 12354127
MRGLYGDDDYNATHYGHQQQQRPPPAPMAVAKALATATAAFSMLLLSGLAVTGTVLALIVATPLMVIFSPVLVPAAITVALLTVGIVSSGGFGVAAVAVLAWVYRYLQTTTSSSGQQPHIVKDWAQQHRLEQTRAH

SEQ ID NO: 9416 - protein, 109 aa, Zea mays subsp. mays
  peptide (1)..(109): Ceres Seq. ID no. 12354128
MAVAKALATATAAFSMLLLSGLAVTGTVLALIVATPLMVIFSPVLVPAAITVALLTVGIVSSGGFGVAAVAVLAWVYRYLQTTTSSSGQQPHIVKDWAQQHRLEQTRAH

SEQ ID NO: 9417 - DNA, 1141 bp, Zea mays subsp. mays
  misc_feature (1)..(1141): Ceres Seq. ID no. 12367647
  misc_feature (1)..(1141): Ortholog of  Ceres SEQ ID NO 14313959 as cited in SEQ ID NO 57842
gcgacacacaccacacacacacattttcaaatctagcttgttcgctaagctcaggctagctgagctgatctgagaaacgatcgctgcttcagtttcagcttgatcgctagctcgctacacagatcgatcgacctcttatttagcttgttcctccaaggaccgagatcggttgttgttgataaaccagccatggttgcggttgcggaggcagcggtgacgacgaccatgacgacgacgggcgggcggtacgcgctgctgatggcggcgcacgactcggagtacgtgctcaacaagtacggcgggtacctccacgtcttcgtggcggccttcggcgacgccggcgagacgtgggacctgtatcgggccatcgacagcgagctccctggccccggtgagcttgaggcctacgacgggttcgtgatcagcggcagcccccacgacgcgtacgccgacgagctgtggatcctgcggctgtgcctcctggtgcgggcgctgcacggcatgcgcaagcgggtcctcggcgtctgcttcggccaccaggtgatctgccgcgcgctgggaggccgcgtgggcaaggcccgcgccggctgggacgtcggcgtcagggaggtggccatcgccgaggcgccgccgcgcaggttcctcgacgcgctgcgggagcgggaccagctgccgctccgcgccaggatcaccgaggtccatcaggacgaggtgtgggaggtgccggagggcgcggaggttctggcctcctccgacaagaccggcgtcgagatgttctgcgtcggcgagcacgtgctgggcatccaggggcacccggagtacaccaaggacatcttcctcagcctcgtcgaccgcctcctcgccgccggatccatcaccattccctttgctgaggccgtgaacaggcagctggagatcactgcgccggaccgggagttctggctcatgctctgcaagagcttcctcaaggctcgtgaagaataagagtattaattagagtttgcacactgtgatgtcattgtcacttaattaccattaaaacggttgtaaatcttctatcacttcaacaaataaacctctctcgagtcaaatacttgaccatcttcttcaaatgagagaaaaaaaatggaagaccactttc

SEQ ID NO: 9418 - protein, 264 aa, Zea mays subsp. mays
  peptide (1)..(264): Ceres Seq. ID no. 12367648
MVAVAEAAVTTTMTTTGGRYALLMAAHDSEYVLNKYGGYLHVFVAAFGDAGETWDLYRAIDSELPGPGELEAYDGFVISGSPHDAYADELWILRLCLLVRALHGMRKRVLGVCFGHQVICRALGGRVGKARAGWDVGVREVAIAEAPPRRFLDALRERDQLPLRARITEVHQDEVWEVPEGAEVLASSDKTGVEMFCVGEHVLGIQGHPEYTKDIFLSLVDRLLAAGSITIPFAEAVNRQLEITAPDREFWLMLCKSFLKAREE

SEQ ID NO: 9419 - protein, 252 aa, Zea mays subsp. mays
  peptide (1)..(252): Ceres Seq. ID no. 12367649
MTTTGGRYALLMAAHDSEYVLNKYGGYLHVFVAAFGDAGETWDLYRAIDSELPGPGELEAYDGFVISGSPHDAYADELWILRLCLLVRALHGMRKRVLGVCFGHQVICRALGGRVGKARAGWDVGVREVAIAEAPPRRFLDALRERDQLPLRARITEVHQDEVWEVPEGAEVLASSDKTGVEMFCVGEHVLGIQGHPEYTKDIFLSLVDRLLAAGSITIPFAEAVNRQLEITAPDREFWLMLCKSFLKAREE

SEQ ID NO: 9420 - protein, 241 aa, Zea mays subsp. mays
  peptide (1)..(241): Ceres Seq. ID no. 12367650
MAAHDSEYVLNKYGGYLHVFVAAFGDAGETWDLYRAIDSELPGPGELEAYDGFVISGSPHDAYADELWILRLCLLVRALHGMRKRVLGVCFGHQVICRALGGRVGKARAGWDVGVREVAIAEAPPRRFLDALRERDQLPLRARITEVHQDEVWEVPEGAEVLASSDKTGVEMFCVGEHVLGIQGHPEYTKDIFLSLVDRLLAAGSITIPFAEAVNRQLEITAPDREFWLMLCKSFLKAREE

SEQ ID NO: 9421 - DNA, 893 bp, Zea mays subsp. mays
  misc_feature (1)..(893): Ceres Seq. ID no. 12347530
  misc_feature (1)..(893): Ortholog of  Ceres SEQ ID NO 12633896 as cited in SEQ ID NO 0
ggcattccgaccgatcccaccgaatggacagccgcctcgccatcgccgcgctcctcctgctcgcctccgcctcctccgctgccgctgccgcggacggcgggaaggtggccgtggcgctgtactacgagtcgctgtgcccctactcggcgcgcttcgtggtcaaccacctcgccaaggtcttcgcggacggcctccgcgaggtcgtggacctcacgctcgtcccctacggcaacgcccggatccatcccggcggagagatctcgtgccagcatggtccgtacgagtgtctgctcaacaccgtggaagcttgcgccatcgacgcctggccggatctggatgtgcatttcagcttcatctactgcgtggaggacctggtggtgaagcggcagtacaaggactgggagtcctgcttcgagaagctgggcctcgacgccaagcccgtaacagaatgctacaaaagcgagcatggccacaagctcgagctcaagtacgcgaaccagaccgacgctctcgagccgccgcaccggtacgtgccctgggtggtcgtcgacgggcagcccctgcttgaggattacgagaatttcgaggcttacatctgcaaggcttacaagggcactccaccgaaggcctgccagggcctgggacgtctgcagatggccctcgagacagcggcggaggcgcgcaacggcgtcagctacaactccggtgtcagcaagcttgcgactgctgaagatgagggtggggagcataaggtgggagaatactagtacataattgactagcgacgtgccccttttttgggtcatgtgaagttgaaggaccgttccatctcgttgtccggttttttattgtacagtaatagctaatatgataatgataataattacatttcg

SEQ ID NO: 9422 - protein, 254 aa, Zea mays subsp. mays
  peptide (1)..(254): Ceres Seq. ID no. 12347531
HSDRSHRMDSRLAIAALLLLASASSAAAAADGGKVAVALYYESLCPYSARFVVNHLAKVFADGLREVVDLTLVPYGNARIHPGGEISCQHGPYECLLNTVEACAIDAWPDLDVHFSFIYCVEDLVVKRQYKDWESCFEKLGLDAKPVTECYKSEHGHKLELKYANQTDALEPPHRYVPWVVVDGQPLLEDYENFEAYICKAYKGTPPKACQGLGRLQMALETAAEARNGVSYNSGVSKLATAEDEGGEHKVGEY

SEQ ID NO: 9423 - protein, 247 aa, Zea mays subsp. mays
  peptide (1)..(247): Ceres Seq. ID no. 12347532
MDSRLAIAALLLLASASSAAAAADGGKVAVALYYESLCPYSARFVVNHLAKVFADGLREVVDLTLVPYGNARIHPGGEISCQHGPYECLLNTVEACAIDAWPDLDVHFSFIYCVEDLVVKRQYKDWESCFEKLGLDAKPVTECYKSEHGHKLELKYANQTDALEPPHRYVPWVVVDGQPLLEDYENFEAYICKAYKGTPPKACQGLGRLQMALETAAEARNGVSYNSGVSKLATAEDEGGEHKVGEY

SEQ ID NO: 9424 - protein, 188 aa, Zea mays subsp. mays
  peptide (1)..(188): Ceres Seq. ID no. 12347533
AFRPIPPNGQPPRHRRAPPARLRLLRCRCRGRREGGRGAVLRVAVPLLGALRGQPPRQGLRGRPPRGRGPHARPLRQRPDPSRRRDLVPAWSVRVSAQHRGSLRHRRLAGSGCAFQLHLLRGGPGGEAAVQGLGVLLREAGPRRQARNRMLQKRAWPQARAQVREPDRRSRAAAPVRALGGRRRAAPA

SEQ ID NO: 9425 - DNA, 1004 bp, Zea mays subsp. mays
  misc_feature (1)..(1004): Ceres Seq. ID no. 12354129
  misc_feature (1)..(1004): Ortholog of  Ceres SEQ ID NO 15173936 as cited in SEQ ID NO 61736
  misc_feature (1)..(1004): Ortholog of  Ceres SEQ ID NO 13596373 as cited in SEQ ID NO 67991
aggcaaacggttcacacgttcgaaccccatatggctgaacccaagtcaaataatggcggggcggacgcgacggcatcgatgatgctccacggccgcgtagccattgtcaccggtggtgccggcggcatcggctcggccgtgtcgaagcacctgtcgtcgctcggcgcgcgcgtcgtggtggggtacatcggcgacccggcacctgctctgacgctggtagccgccatcaactcctccgagcaccccggcgagagccagcagccgcgagccatcgcggtcgaggcggacgtgtccgacgcggcagccgtgaaggcgctgttcgacgcggccgccgcagccttcggcggggagctccacatcctggtaacgttggcggcggtgctggactactcctacccgccgctggcggagaccagcgaggcgacgttcgacgccgccttcagcgtcaacacacggggcaccttcctgtgctgccgcgaggcggccaggcggctggtgcgtgacggccgcggccgaatcgtgacgttctcttcgtcgggagttgggtctctgcgccctggctactcggcatacgcagcaagcaaggccgcggtggaggtgatgactaagatcctggcgcgcgagctgcgcggcacggggatcacggccaacgtggtggcgccagggtccacggggacacccatgatgtacaccggcaagacggaggatgacatggagcgatacatcgccgaggcgccgctgggccggctcggcatgcccgaggacatcgcgccgctcgtcagcttcctcgctagtgatgctggccactgggtcaacgcgcaggtcctgcgctgcaacggtggcaccatctagctagtactgcgtgcctactttttatggttgattagatgtattttcctcggagcataaatttaagcttgtggcgcagttatcgcttggcagttcattaatttatttaaagattgtgtcgtttattctattgtgtgtatttataatcaggctcc

SEQ ID NO: 9426 - protein, 283 aa, Zea mays subsp. mays
  peptide (1)..(283): Ceres Seq. ID no. 12354130
RQTVHTFEPHMAEPKSNNGGADATASMMLHGRVAIVTGGAGGIGSAVSKHLSSLGARVVVGYIGDPAPALTLVAAINSSEHPGESQQPRAIAVEADVSDAAAVKALFDAAAAAFGGELHILVTLAAVLDYSYPPLAETSEATFDAAFSVNTRGTFLCCREAARRLVRDGRGRIVTFSSSGVGSLRPGYSAYAASKAAVEVMTKILARELRGTGITANVVAPGSTGTPMMYTGKTEDDMERYIAEAPLGRLGMPEDIAPLVSFLASDAGHWVNAQVLRCNGGTI

SEQ ID NO: 9427 - protein, 273 aa, Zea mays subsp. mays
  peptide (1)..(273): Ceres Seq. ID no. 12354131
MAEPKSNNGGADATASMMLHGRVAIVTGGAGGIGSAVSKHLSSLGARVVVGYIGDPAPALTLVAAINSSEHPGESQQPRAIAVEADVSDAAAVKALFDAAAAAFGGELHILVTLAAVLDYSYPPLAETSEATFDAAFSVNTRGTFLCCREAARRLVRDGRGRIVTFSSSGVGSLRPGYSAYAASKAAVEVMTKILARELRGTGITANVVAPGSTGTPMMYTGKTEDDMERYIAEAPLGRLGMPEDIAPLVSFLASDAGHWVNAQVLRCNGGTI

SEQ ID NO: 9428 - protein, 257 aa, Zea mays subsp. mays
  peptide (1)..(257): Ceres Seq. ID no. 12354132
MMLHGRVAIVTGGAGGIGSAVSKHLSSLGARVVVGYIGDPAPALTLVAAINSSEHPGESQQPRAIAVEADVSDAAAVKALFDAAAAAFGGELHILVTLAAVLDYSYPPLAETSEATFDAAFSVNTRGTFLCCREAARRLVRDGRGRIVTFSSSGVGSLRPGYSAYAASKAAVEVMTKILARELRGTGITANVVAPGSTGTPMMYTGKTEDDMERYIAEAPLGRLGMPEDIAPLVSFLASDAGHWVNAQVLRCNGGTI

SEQ ID NO: 9429 - DNA, 1120 bp, Zea mays subsp. mays
  misc_feature (1)..(1120): Ceres Seq. ID no. 12365896
  misc_feature (1)..(1120): Ortholog of  Ceres SEQ ID NO 13657873 as cited in SEQ ID NO 66361
ctttggagtttatagctaccattgcgtcatctatttggtgtgaaatgaatattcgcaaagagaggtttaaacaagaatgggatttggtgattgttaatgctttgactgcagcttgttgcaacttgatggttcttggacttttagcaccatgccgttcatatgcgagtacatctcgatttgacttccaaaatgcaattgagaaacttccgaacaacatatttgagaagagctatcctttgagagagtttgatctagcaaaacgaatcagtgcattcttttataaagctgctgagcttagtctggtcgggtttgtagctggctctgtgcaagggggtatgtcaatagtcttgtccgcaagaaaagaaaggaggttatcggtgactattccctctatcagcaccaatgctcttggttatggagctttcctaggactctatgctaacttgcgttatcaattgctatgtggagtagaccaatatatggtcaagcgcttcgatgttttgggtgtggcaatcttcttcagcacagcagcaagactgatcaatattcagattggtgaggcatcaaggaggacttggcttggcgaggaagctgatccacagtactcagatcgactgttgagagcatacaagagacctgtggaggttgacgcggaccaatcaaggtggtttatatccaaggatgcaattgtatctggccttggtcttctaggtatcaagcagggtggacctgaggcaacattttctaagtctcgtcgaaagagagtcatccgcaaaaaggtcacttcaggttgagtttagtggatttggatagcaatgctggaacaattttgcttctgttccactatgccagagggaggtctacccaaattatggtaaatgagaaaaaggtatcaagtcaaccagcacgtggtctgtcggcgaagggatcaaagggtttgttactgggaagggttagttaaaaggtgccaattactattttataatttaattgcagttatttaaggtaagaaaatatgttgttttcttgtattgctgtgaggcaaatagacacgtttagtggtagttttgtaagattgttaatgtactgactttacatgagaaatggattctgcattttt

SEQ ID NO: 9430 - protein, 263 aa, Zea mays subsp. mays
  peptide (1)..(263): Ceres Seq. ID no. 12365897
LEFIATIASSIWCEMNIRKERFKQEWDLVIVNALTAACCNLMVLGLLAPCRSYASTSRFDFQNAIEKLPNNIFEKSYPLREFDLAKRISAFFYKAAELSLVGFVAGSVQGGMSIVLSARKERRLSVTIPSISTNALGYGAFLGLYANLRYQLLCGVDQYMVKRFDVLGVAIFFSTAARLINIQIGEASRRTWLGEEADPQYSDRLLRAYKRPVEVDADQSRWFISKDAIVSGLGLLGIKQGGPEATFSKSRRKRVIRKKVTSG

SEQ ID NO: 9431 - protein, 249 aa, Zea mays subsp. mays
  peptide (1)..(249): Ceres Seq. ID no. 12365898
MNIRKERFKQEWDLVIVNALTAACCNLMVLGLLAPCRSYASTSRFDFQNAIEKLPNNIFEKSYPLREFDLAKRISAFFYKAAELSLVGFVAGSVQGGMSIVLSARKERRLSVTIPSISTNALGYGAFLGLYANLRYQLLCGVDQYMVKRFDVLGVAIFFSTAARLINIQIGEASRRTWLGEEADPQYSDRLLRAYKRPVEVDADQSRWFISKDAIVSGLGLLGIKQGGPEATFSKSRRKRVIRKKVTSG

SEQ ID NO: 9432 - protein, 222 aa, Zea mays subsp. mays
  peptide (1)..(222): Ceres Seq. ID no. 12365899
MVLGLLAPCRSYASTSRFDFQNAIEKLPNNIFEKSYPLREFDLAKRISAFFYKAAELSLVGFVAGSVQGGMSIVLSARKERRLSVTIPSISTNALGYGAFLGLYANLRYQLLCGVDQYMVKRFDVLGVAIFFSTAARLINIQIGEASRRTWLGEEADPQYSDRLLRAYKRPVEVDADQSRWFISKDAIVSGLGLLGIKQGGPEATFSKSRRKRVIRKKVTSG

SEQ ID NO: 9433 - DNA, 1122 bp, Zea mays subsp. mays
  misc_feature (1)..(1122): Ceres Seq. ID no. 13495286
  misc_feature (1)..(1122): Ortholog of  Ceres SEQ ID NO 14305286 as cited in SEQ ID NO 0
aaactcctcgctatcctcttccaatccgaaccacccggactcccggagcaagcggccgccggctaagcagacacgaacgcaggtccggcggcaatgcaacgcgccgcgctcgtcgggtcccctctcgtacctgtgggtccccttgctcagcttgccgtgcggcgccgctgccgcttccatggtggtgttcgcgtgaggtcctcaaccgggaaggacgggaccgggactgggaccgggggcggaagcgagggcggcgacggcgccggtgccgcagcgtcttggctgagctcggcggtcggggagaaagtggacgagcttctgcgccgcgaagagaaccgggccctgctcgagggcgtcgaggacgccgagcgccgcgttgagcgcgcgcgcgccgcgctcgccgacatcgagcgccaggaggccgccgcacgcctcgcccgcgaggaggtccgccgcctcgagaagcggcgcgatgagattgcagagtcccagcgggaattgcttcaagcaagagaaatgattgatgaagctcagcgatccttgtcttctagtcttgacgaaggaagctttggagatatgtcaagtggtgatgttgatgaagataacgagagaatagaatccgtaaaagctgctgcagtttcctctgtcgtcggtgttctggctagtttgcccatatctttctatgaagttgaagatcttccacaactattccttcggtcatcaattgttttcataagttgtgctttgtttggagtcacattccggtacgctgttagaagagatctggataatatccaactaaaaactggggctcctgcagcatttgcttttgttagaggccttgctctgctggaatctggtagaaccttcgagctgagtactgataccttaatatcagttactcttgatgctgcagtcagtgtggttgagaacattttcatatttctgcctgctgctgttgcactggactactgttttaagatgagatttttgagtccctttcctagaagaaaacaatagcttctgtgaagaatatgtatgatcaatagcaatcttgatagctcaaatggtcatatgtaacacaagtgatatcttagattcattaaaaaaacatttcccccc

SEQ ID NO: 9434 - protein, 308 aa, Zea mays subsp. mays
  peptide (1)..(308): Ceres Seq. ID no. 13495287
MQRAALVGSPLVPVGPLAQLAVRRRCRFHGGVRVRSSTGKDGTGTGTGGGSEGGDGAGAAASWLSSAVGEKVDELLRREENRALLEGVEDAERRVERARAALADIERQEAAARLAREEVRRLEKRRDEIAESQRELLQAREMIDEAQRSLSSSLDEGSFGDMSSGDVDEDNERIESVKAAAVSSVVGVLASLPISFYEVEDLPQLFLRSSIVFISCALFGVTFRYAVRRDLDNIQLKTGAPAAFAFVRGLALLESGRTFELSTDTLISVTLDAAVSVVENIFIFLPAAVALDYCFKMRFLSPFPRRKQ

SEQ ID NO: 9435 - protein, 167 aa, Zea mays subsp. mays
  peptide (1)..(167): Ceres Seq. ID no. 13495288
MIDEAQRSLSSSLDEGSFGDMSSGDVDEDNERIESVKAAAVSSVVGVLASLPISFYEVEDLPQLFLRSSIVFISCALFGVTFRYAVRRDLDNIQLKTGAPAAFAFVRGLALLESGRTFELSTDTLISVTLDAAVSVVENIFIFLPAAVALDYCFKMRFLSPFPRRKQ

SEQ ID NO: 9436 - DNA, 913 bp, Zea mays subsp. mays
  misc_feature (1)..(913): Ceres Seq. ID no. 12415447
  misc_feature (1)..(913): Ortholog of  Ceres SEQ ID NO 13654922 as cited in SEQ ID NO 62796
gcacgagaccattacctagaacatcctaatcgaaaagtataaccagctagagtagcttggtagctaggctcggctcgctagcgagctcgtcgatccaatccatcgctcgttcgtccactataacaatcgacgacgtgtacgatggcagctgcggcggcgccgaggcccaagtcgccgcctgcctcgccggacccctgcggccgccaccgcctccagctcgccgtcgacgcgctccaccgggagatcggcttcctcgagggcgaaataagttccatcgagggggtccacgctgcctccagatgctgcaaagaggttgatgagttcgttggaaggaacccggatccgttcctaacgattcagcaagagagaggaagccacgatcaatctcagcagtttctgaagaagttccgaggaaagagctgcctgagctactacctctcgtggatctncggtggcgggtggtggtgcccgccgccgttgcagctcaagaggccaccggcgccgagctgctcctgcgcgccgcggctggggaagctctgctcctccaccgcctcctcctgctgcagctgttgctgctgccggttccgcgtcgtgtacgccgccgccggctgcgggtgctgcgcgccgtgcccgcgctgctcgtgcgactgcacctgcgcctgcccgcgctgctgctcctgcgcctgccccatgtgcagcgccgcgtgctgcgccccgcgctgctgcctgtgcctatgatggccatgagaaattttgcgtgcatgctagtagtagtagtacctggagatgatgatggatgactggcattttgcagcatggttttttttttgtttagtttcggcgacacgagtactgttgtaactggctgtacgtggctgatctggttagtgctggtgaatggtgtcgattccgc

SEQ ID NO: 9437 - protein, 198 aa, Zea mays subsp. mays
  peptide (1)..(198): Ceres Seq. ID no. 12415448
  misc_feature (103)..(103): Xaa is any aa, unknown or other
MAAAAAPRPKSPPASPDPCGRHRLQLAVDALHREIGFLEGEISSIEGVHAASRCCKEVDEFVGRNPDPFLTIQQERGSHDQSQQFLKKFRGKSCLSYYLSWIXGGGWWCPPPLQLKRPPAPSCSCAPRLGKLCSSTASSCCSCCCCRFRVVYAAAGCGCCAPCPRCSCDCTCACPRCCSCACPMCSAACCAPRCCLCL

SEQ ID NO: 9438 - DNA, 1176 bp, Zea mays subsp. mays
  misc_feature (1)..(1176): Ceres Seq. ID no. 12416015
  misc_feature (1)..(1176): Ortholog of  Ceres SEQ ID NO 13594252 as cited in SEQ ID NO 57528
  misc_feature (1)..(1176): Ortholog of  Ceres SEQ ID NO 13594430 as cited in SEQ ID NO 60181
  misc_feature (1)..(1176): Ortholog of  Ceres SEQ ID NO 13597809 as cited in SEQ ID NO 64598
  misc_feature (1)..(1176): Ortholog of  Ceres SEQ ID NO 12617960 as cited in SEQ ID NO 69051
  misc_feature (1)..(1176): Ortholog of  Ceres SEQ ID NO 13589401 as cited in SEQ ID NO 0
cgcaattaaccctcactaaagggaacaaaagctggagctccaccgcggtggcggccgctctagaactagtggatcccccgggctgcaggaattcgcacgagaccattacctagaacatcctaatcgaaaaagattataaggcgaagagccgtcgtgatcaccagacgagttaccagaccaagccgcagcaggaatttctcagatgtctaaagccaagcttcctcacgtcgagacggattcttccggcgacgacgatgggccgaagccaaggctagtgttccgtagacgcatgcgcacaccagttaagctgctcggtggccggaaagtctcggacgtcctgctatggaggaacaggaacctgtcagcggggatcctcgcgggggcgacgctggtctggttcctgttcgacgtggcggagtacaacgtggtgacgctcctttgccacgtcgcgctgctcgggatggtcctgctcttcgtctggtccaacgccgcgcctctccttgacaggccgcctccacagatcccggaggtgatcgtttctgaacacgcgttcagagaagctgcgcggaccacccattacagactggctcactttgtatccgtcctctacgacgttgcgtgcgggaaggatctcaagaagttcctcatggtgattggttctctgtggatactggcgatacttggagacacatgcagcttcacgacgctgttatatggcgggcttttgtgtgctctgactttaccggcgctgtacgagagatacgaagccgaggtggaccatcttgtggccaagggacgcgaagacctcaagaaattctacaggaaggttgactccaacgtgctcaacaagataccaagaggccctgtcaagacaaaggctctctgatcaagatgtgtgctttgtcaaattgccggtgcacgccggcagtcccgtacataaaagaaaaacagtaaccagtgtcaccagaccatctcaaatcagtttttatggtatctgattgtacgtgctagactactgctgcaatgatccaccatactttaccgtgtcagcagtaaacaagcctaaaatctgaagtaatttattcgtaaaaaaacaaataggtactggaagattgtaagtgttgccaaaacggaaaagtggcgaataaaaatctgaggtcattcggtgtgggacct

SEQ ID NO: 9439 - protein, 227 aa, Zea mays subsp. mays
  peptide (1)..(227): Ceres Seq. ID no. 12416016
MSKAKLPHVETDSSGDDDGPKPRLVFRRRMRTPVKLLGGRKVSDVLLWRNRNLSAGILAGATLVWFLFDVAEYNVVTLLCHVALLGMVLLFVWSNAAPLLDRPPPQIPEVIVSEHAFREAARTTHYRLAHFVSVLYDVACGKDLKKFLMVIGSLWILAILGDTCSFTTLLYGGLLCALTLPALYERYEAEVDHLVAKGREDLKKFYRKVDSNVLNKIPRGPVKTKAL

SEQ ID NO: 9440 - protein, 198 aa, Zea mays subsp. mays
  peptide (1)..(198): Ceres Seq. ID no. 12416017
MRTPVKLLGGRKVSDVLLWRNRNLSAGILAGATLVWFLFDVAEYNVVTLLCHVALLGMVLLFVWSNAAPLLDRPPPQIPEVIVSEHAFREAARTTHYRLAHFVSVLYDVACGKDLKKFLMVIGSLWILAILGDTCSFTTLLYGGLLCALTLPALYERYEAEVDHLVAKGREDLKKFYRKVDSNVLNKIPRGPVKTKAL

SEQ ID NO: 9441 - protein, 141 aa, Zea mays subsp. mays
  peptide (1)..(141): Ceres Seq. ID no. 12416018
MVLLFVWSNAAPLLDRPPPQIPEVIVSEHAFREAARTTHYRLAHFVSVLYDVACGKDLKKFLMVIGSLWILAILGDTCSFTTLLYGGLLCALTLPALYERYEAEVDHLVAKGREDLKKFYRKVDSNVLNKIPRGPVKTKAL

SEQ ID NO: 9442 - DNA, 1284 bp, Zea mays subsp. mays
  misc_feature (1)..(1284): Ceres Seq. ID no. 12354326
  misc_feature (1)..(1284): Ortholog of  Ceres SEQ ID NO 15176383 as cited in SEQ ID NO 53468
  misc_feature (1)..(1284): Ortholog of  Ceres SEQ ID NO 15170324 as cited in SEQ ID NO 57860
ctagccagcggccagcccgtccgccagcgagaggtcaaaaactactacgagccaaaaactggagcccagggaaagcgacgagcaaaccaaacatggcggcgatcctcgcgcgcgccggcgtcatcgccaccgccggcaaaggtttctcgggccgccgccggggcaatggtatcgtcgtcgcggcggtcactaaaacgggggctgctgtgccacaggagggggcgctggaacggccggcgtggtccggcgagaccacgctgtcgcgtctggttggcgcgctcatcgcgttcaagccgctctactcggtattgaagctcgcctcccgcgaggtcatcatcaggacggcggagaagtcgaacatcccgtggagggagatgacgaaggaggtgctggagtcggacgtgtacgaggtgttcgagagaatccaagacccaaacctcgtgtaccctgactactatctcaacccgtttcatgcctacgacgaagggaatctatcatggctggctgcagcagaggccgagccggcaacaatgtcaatcgcaaagagggcaatacctgaggctacatcaatcgaagaggccaaccaaatcgtccgcggcaactggctgaatgtaattgaggagcatcatctgaagtactcggggaactgtcaggtaaacgacatcctggacattggctgctctgttggagtaagcaccagatacctcgccgagaagttcccatcagctcaagctgttgggctcgacctatcaccgtactttcttgctgtggcggcacaaaaggaagaaaaactgtcacgaccaaagcctattcgctgggttcatgccaatggtgaagcgaccgggctatcttcagattcatttgaccttgtctcccttgcttatgtgtgccatgagtgcccagcacgagcaataaccgcattggtgaaggaagcattcagggtccttcgcccaggaggaacaatcgccttaacagacaattcgccgaagtccaaagtacttcaggaactatccccagttttgttcactctgatgaagagtaccgagcctttcctggacgagtactacatgctggatttggaggagacgatgagaaaagtgggctttgttaacgtttgctccgtcctgacagaccccaggcacagaacagtcactgcaaccgtgccttactaattgggtcagaccatcaaatcccaagcccggccggtgtacaacaattgactatttgaaattttgtatccttactggtatggttgcaattgtataaagtagagcaatctgagtg

SEQ ID NO: 9443 - protein, 389 aa, Zea mays subsp. mays
  peptide (1)..(389): Ceres Seq. ID no. 12354327
SQRPARPPARGQKLLRAKNWSPGKATSKPNMAAILARAGVIATAGKGFSGRRRGNGIVVAAVTKTGAAVPQEGALERPAWSGETTLSRLVGALIAFKPLYSVLKLASREVIIRTAEKSNIPWREMTKEVLESDVYEVFERIQDPNLVYPDYYLNPFHAYDEGNLSWLAAAEAEPATMSIAKRAIPEATSIEEANQIVRGNWLNVIEEHHLKYSGNCQVNDILDIGCSVGVSTRYLAEKFPSAQAVGLDLSPYFLAVAAQKEEKLSRPKPIRWVHANGEATGLSSDSFDLVSLAYVCHECPARAITALVKEAFRVLRPGGTIALTDNSPKSKVLQELSPVLFTLMKSTEPFLDEYYMLDLEETMRKVGFVNVCSVLTDPRHRTVTATVPY

SEQ ID NO: 9444 - protein, 359 aa, Zea mays subsp. mays
  peptide (1)..(359): Ceres Seq. ID no. 12354328
MAAILARAGVIATAGKGFSGRRRGNGIVVAAVTKTGAAVPQEGALERPAWSGETTLSRLVGALIAFKPLYSVLKLASREVIIRTAEKSNIPWREMTKEVLESDVYEVFERIQDPNLVYPDYYLNPFHAYDEGNLSWLAAAEAEPATMSIAKRAIPEATSIEEANQIVRGNWLNVIEEHHLKYSGNCQVNDILDIGCSVGVSTRYLAEKFPSAQAVGLDLSPYFLAVAAQKEEKLSRPKPIRWVHANGEATGLSSDSFDLVSLAYVCHECPARAITALVKEAFRVLRPGGTIALTDNSPKSKVLQELSPVLFTLMKSTEPFLDEYYMLDLEETMRKVGFVNVCSVLTDPRHRTVTATVPY

SEQ ID NO: 9445 - protein, 265 aa, Zea mays subsp. mays
  peptide (1)..(265): Ceres Seq. ID no. 12354329
MTKEVLESDVYEVFERIQDPNLVYPDYYLNPFHAYDEGNLSWLAAAEAEPATMSIAKRAIPEATSIEEANQIVRGNWLNVIEEHHLKYSGNCQVNDILDIGCSVGVSTRYLAEKFPSAQAVGLDLSPYFLAVAAQKEEKLSRPKPIRWVHANGEATGLSSDSFDLVSLAYVCHECPARAITALVKEAFRVLRPGGTIALTDNSPKSKVLQELSPVLFTLMKSTEPFLDEYYMLDLEETMRKVGFVNVCSVLTDPRHRTVTATVPY

SEQ ID NO: 9446 - DNA, 843 bp, Zea mays subsp. mays
  misc_feature (1)..(843): Ceres Seq. ID no. 12415746
  misc_feature (1)..(843): Ortholog of  Ceres SEQ ID NO 13594918 as cited in SEQ ID NO 55747
  misc_feature (1)..(843): Ortholog of  Ceres SEQ ID NO 12587066 as cited in SEQ ID NO 63204
agttcttcttcctcggtgcatttgcaagcgttaggaaagggagaagagaaaggaattaatggaacgtgaagaggagctgccttcatcttcttcttccttgggttacatgatgcagtgcagggtctgccatgaggaagaggatcaagggcgtgcgaccatggagtctccttgtggatgctccggctctctcaagtacgctcacaggggatgtgtgcagagatggtgtgacgagaaggggagcaccctctgtgagatctgccttcagaatttcaagccaggctacacaatgcctcccaagaaaaccccggtggttgaaacggcggtcactatcagtgaacacgaggacatgcaacatttggaacctccggagggcttggttgacggtgcagattacaccaggtgctcctacgccgcagatcaatgcgccacatggtgccggtcgctggcgatcacgttcaccattgtgacgctcgcatggcatctggttgcagtggcgacggctgaagcagcagagcactgcgcgttcagtctcctcacaatgtacttacttcgtgctgctggtatcctgctgccgctctaccttgtcatgcgaatgattggcgtcgtccaaagtgggcagaggcagtaccggttgcagctgctggaggaacaaagaagaaatgcatcaactatatgaattatatgcgtgtccaggaagaggaccagctagtaattaatattcattagccaattcatttaaataaatcttatggaaggttgtattaatgggaaaactttcaaacagaacatcatttgtaaactttcagtatacatacagttggtgcagtgaaacagcagcatttt

SEQ ID NO: 9447 - protein, 205 aa, Zea mays subsp. mays
  peptide (1)..(205): Ceres Seq. ID no. 12415747
MEREEELPSSSSSLGYMMQCRVCHEEEDQGRATMESPCGCSGSLKYAHRGCVQRWCDEKGSTLCEICLQNFKPGYTMPPKKTPVVETAVTISEHEDMQHLEPPEGLVDGADYTRCSYAADQCATWCRSLAITFTIVTLAWHLVAVATAEAAEHCAFSLLTMYLLRAAGILLPLYLVMRMIGVVQSGQRQYRLQLLEEQRRNASTI

SEQ ID NO: 9448 - protein, 189 aa, Zea mays subsp. mays
  peptide (1)..(189): Ceres Seq. ID no. 12415748
MMQCRVCHEEEDQGRATMESPCGCSGSLKYAHRGCVQRWCDEKGSTLCEICLQNFKPGYTMPPKKTPVVETAVTISEHEDMQHLEPPEGLVDGADYTRCSYAADQCATWCRSLAITFTIVTLAWHLVAVATAEAAEHCAFSLLTMYLLRAAGILLPLYLVMRMIGVVQSGQRQYRLQLLEEQRRNASTI

SEQ ID NO: 9449 - protein, 188 aa, Zea mays subsp. mays
  peptide (1)..(188): Ceres Seq. ID no. 12415749
MQCRVCHEEEDQGRATMESPCGCSGSLKYAHRGCVQRWCDEKGSTLCEICLQNFKPGYTMPPKKTPVVETAVTISEHEDMQHLEPPEGLVDGADYTRCSYAADQCATWCRSLAITFTIVTLAWHLVAVATAEAAEHCAFSLLTMYLLRAAGILLPLYLVMRMIGVVQSGQRQYRLQLLEEQRRNASTI

SEQ ID NO: 9450 - DNA, 818 bp, Zea mays subsp. mays
  misc_feature (1)..(818): Ceres Seq. ID no. 12350165
  misc_feature (1)..(818): Ortholog of  Ceres SEQ ID NO 14307883 as cited in SEQ ID NO 67277
aatttttgaaattggtcgtgagccgctgccgcacacggcgagaggaatagggttgctccccccgttgccgactcgccgccgcatcgccgcgagcgtcatgaagaccttcccgctgtccaggggaagcaccatctccctagccctcttctccgacgtctccaacagccgggagctcctggacttgatgcagtcagggaagctggagccggcggtcgctctcctcaacgcgtcactggtgccggatgtgttccctatcctcgcggcagcgcttaaggcgctgttgtccaagactagggagtcactgaccacaaggactctgcactctgagctcgtctacaactactcggggtccaaacatataacagagtccctgaagcgctgtgggatctctgataatacaacttacatccttgctgcttgttttgatgcttccgacgaggagatgaaggcagtggagaagctcatcagtggcaccgagattgatctcacagaactggaaagaagagcaaaccagccacagatcttgaagcattacaagatacctccccaagaactatcgatatctacgttgccggacgcaattgtatgcaggattgctgctcgagatgctctctgaagtctcaataatcaccgtaagctatgtggtttcaggatgtaggtctctctctaccacatgtatggtgtgacattgacagcacaagtgcacaactagaattaggtatccgaaataccattgatgttcgcattccttgcaagcaacccagaagcacattgcgtggttaatttttcttgctaaactgtgctgcaaagcaacagtt

SEQ ID NO: 9451 - protein, 204 aa, Zea mays subsp. mays
  peptide (1)..(204): Ceres Seq. ID no. 12350166
IFEIGREPLPHTARGIGLLPPLPTRRRIAASVMKTFPLSRGSTISLALFSDVSNSRELLDLMQSGKLEPAVALLNASLVPDVFPILAAALKALLSKTRESLTTRTLHSELVYNYSGSKHITESLKRCGISDNTTYILAACFDASDEEMKAVEKLISGTEIDLTELERRANQPQILKHYKIPPQELSISTLPDAIVCRIAARDAL

SEQ ID NO: 9452 - protein, 172 aa, Zea mays subsp. mays
  peptide (1)..(172): Ceres Seq. ID no. 12350167
MKTFPLSRGSTISLALFSDVSNSRELLDLMQSGKLEPAVALLNASLVPDVFPILAAALKALLSKTRESLTTRTLHSELVYNYSGSKHITESLKRCGISDNTTYILAACFDASDEEMKAVEKLISGTEIDLTELERRANQPQILKHYKIPPQELSISTLPDAIVCRIAARDAL

SEQ ID NO: 9453 - protein, 143 aa, Zea mays subsp. mays
  peptide (1)..(143): Ceres Seq. ID no. 12350168
MQSGKLEPAVALLNASLVPDVFPILAAALKALLSKTRESLTTRTLHSELVYNYSGSKHITESLKRCGISDNTTYILAACFDASDEEMKAVEKLISGTEIDLTELERRANQPQILKHYKIPPQELSISTLPDAIVCRIAARDAL

SEQ ID NO: 9454 - DNA, 1076 bp, Zea mays subsp. mays
  misc_feature (1)..(1076): Ceres Seq. ID no. 12355259
  misc_feature (1)..(1076): Ortholog of  Ceres SEQ ID NO 13581682 as cited in SEQ ID NO 57913
  misc_feature (1)..(1076): Ortholog of  Ceres SEQ ID NO 14304144 as cited in SEQ ID NO 59152
agtcctccacgcacgcacgcacgcacgaccagttgccacggcagaccaccccgcccagcggccagcttgctcgccacgaccacgatgggcttccccgtggggtactcggagtcggagatgctgctcccgcgcgtgctgctgcaggtgctcctcctcctcggccacttccaccgcttcctcctctgggccttccacgccgtggggctcggcgacctgatcgacctcggctgcaactacccgccgccgccgccctccgcgtccacggcgcacgagatgatggagcaccagcaccagcaccaggggcgcgacgacgtggcctccccgctgcagcaccagcgcccggagttccggcccgtcgcggcggcgctcatcgaggaggcgctccccgtggtgcggttcgacgagctgggcggcgcgccgtgcggcggcggcgactgcgcggtgtgcctgagcggcatcggcggcggcgacgaggtgcggcggctcggcaactgccgccacgccttccaccgggcctgcctggaccgctggatggcgcacgaccagcgcacctgcccgctctgccgcgcgccgctcatcccctgggccgccgacgccgactacgacatgtcctatccgtctcccctgccgcccacgccactgcggcggcctcacgagctgctgctgctgcttaccggcctgggcggcttccagtgatgcgcctgcgcgtgggcagcgtggctggcacttgggcaggccggccacgcgaatccgatccgtggcgaggcaaaccgcgtgctcatgtgcggcccagnacgcccggtcggtcaggcgggtgaccgccgccaaacctgctcagttgccagccgtacacgcttgccggcctcgtcttcggtcgtgtctccgactccgttggtttttttacagaggctcccagtcccaggtcaaacaaaaaaggaggcgaaacagacaaagcagtcggaaattaggcaggtactgtactaggttgatctgtaggccgattgggcgactccaaatctgtggagctgtgaatcctttggcagattaaactaaaaattgtctctatagatcagacc

SEQ ID NO: 9455 - protein, 271 aa, Zea mays subsp. mays
  peptide (1)..(271): Ceres Seq. ID no. 12355260
  misc_feature (264)..(264): Xaa is any aa, unknown or other
SSTHARTHDQLPRQTTPPSGQLARHDHDGLPRGVLGVGDAAPARAAAGAPPPRPLPPLPPLGLPRRGARRPDRPRLQLPAAAALRVHGARDDGAPAPAPGARRRGLPAAAPAPGVPARRGGAHRGGAPRGAVRRAGRRAVRRRRLRGVPERHRRRRRGAAARQLPPRLPPGLPGPLDGARPAHLPALPRAAHPLGRRRRLRHVLSVSPAAHATAAASRAAAAAYRPGRLPVMRLRVGSVAGTWAGRPRESDPWRGKPRAHVRPXTPGRSGG

SEQ ID NO: 9456 - protein, 231 aa, Zea mays subsp. mays
  peptide (1)..(231): Ceres Seq. ID no. 12355261
SPPRTHARTTSCHGRPPRPAASLLATTTMGFPVGYSESEMLLPRVLLQVLLLLGHFHRFLLWAFHAVGLGDLIDLGCNYPPPPPSASTAHEMMEHQHQHQGRDDVASPLQHQRPEFRPVAAALIEEALPVVRFDELGGAPCGGGDCAVCLSGIGGGDEVRRLGNCRHAFHRACLDRWMAHDQRTCPLCRAPLIPWAADADYDMSYPSPLPPTPLRRPHELLLLLTGLGGFQ

SEQ ID NO: 9457 - protein, 203 aa, Zea mays subsp. mays
  peptide (1)..(203): Ceres Seq. ID no. 12355262
MGFPVGYSESEMLLPRVLLQVLLLLGHFHRFLLWAFHAVGLGDLIDLGCNYPPPPPSASTAHEMMEHQHQHQGRDDVASPLQHQRPEFRPVAAALIEEALPVVRFDELGGAPCGGGDCAVCLSGIGGGDEVRRLGNCRHAFHRACLDRWMAHDQRTCPLCRAPLIPWAADADYDMSYPSPLPPTPLRRPHELLLLLTGLGGFQ

SEQ ID NO: 9458 - DNA, 656 bp, Zea mays subsp. mays
  misc_feature (1)..(656): Ceres Seq. ID no. 12347270
  misc_feature (1)..(656): Ortholog of  Ceres SEQ ID NO 13581579 as cited in SEQ ID NO 58361
  misc_feature (1)..(656): Ortholog of  Ceres SEQ ID NO 13595926 as cited in SEQ ID NO 67778
atcgactcatcctcttgcacagcggcgcacacggtggggttcgcgcactgcagcacgttctcggaccggatccagccgcagtcggtggacccgacaatgaacgcgacgtacgcggaggacctgcaggcggcgtgcccggcgggggtggaccccaacatcgcgctgcagctggaccccgtgacgccgcaggccttcgacaaccagtacttcgccaacctggtggacggccgggggctgttcgcctccgaccaggtgctcttctccgacgcgcggtcgcagcccaccgtggtggcgtgggcgcagaacgccaccgccttcgagcaggccttcgtcgacgccatcaccaggctcggccgcgtcggcgtcaagaccgacccgtcgctgggggacgtccgccgcgactgcgccttcctcaactgaaaaggatggacatggagagctggtttatatctcacacaagtgttcatacacaatctagagtaaagtttttttgttgttgttattattatcatgtcaggtatgagcacaaggttgaattaatggttaatgcgattgatatactgtaagtggcacttgcattggtaggccaagaccgagatgtattccttttccttgttgattttgttcggtctcggagcaatatttgtttcagtgtt

SEQ ID NO: 9459 - protein, 187 aa, Zea mays subsp. mays
  peptide (1)..(187): Ceres Seq. ID no. 12347271
RLILLHSGAHGGVRALQHVLGPDPAAVGGPDNERDVRGGPAGGVPGGGGPQHRAAAGPRDAAGLRQPVLRQPGGRPGAVRLRPGALLRRAVAAHRGGVGAERHRLRAGLRRRHHQARPRRRQDRPVAGGRPPRLRLPQLKRMDMESWFISHTSVHTQSRVKFFCCCYYYHVRYEHKVELMVNAIDIL

SEQ ID NO: 9460 - protein, 139 aa, Zea mays subsp. mays
  peptide (1)..(139): Ceres Seq. ID no. 12347272
IDSSSCTAAHTVGFAHCSTFSDRIQPQSVDPTMNATYAEDLQAACPAGVDPNIALQLDPVTPQAFDNQYFANLVDGRGLFASDQVLFSDARSQPTVVAWAQNATAFEQAFVDAITRLGRVGVKTDPSLGDVRRDCAFLN

SEQ ID NO: 9461 - protein, 107 aa, Zea mays subsp. mays
  peptide (1)..(107): Ceres Seq. ID no. 12347273
MNATYAEDLQAACPAGVDPNIALQLDPVTPQAFDNQYFANLVDGRGLFASDQVLFSDARSQPTVVAWAQNATAFEQAFVDAITRLGRVGVKTDPSLGDVRRDCAFLN

SEQ ID NO: 9462 - DNA, 1993 bp, Zea mays subsp. mays
  misc_feature (1)..(1993): Ceres Seq. ID no. 13586155
  misc_feature (1)..(1993): Ortholog of  Ceres SEQ ID NO 13590904 as cited in SEQ ID NO 66072
cttttttccttttcttttatcttatggttggctgtcccgtcccgtccatcagccgccacaccacaaacacccaccactctgctctcgcccgcttgctttctctcccccgctccagcttatggcggaggcggcgccagcagccggcggcggcatcggggacatcctcgccacgagcgatcgggacttcctcgtccgcaactccggcgagcaggtgaagatcagcagcgttgaggcgagccctgtggccatctacttctccgcctcatggtgcccgccatgcaggaggttcacgcccaagcttattgaagtatacgaaaaactggcctcacagggcaagagcttcgaggtcgtctttgcttcggccgatcgcaatgaggaagctttcaatgaatactttgcaaagatgccatggttggctgtccccttttctgacagtgaaggccgtgaggcccttgatggccagttcaaggtctctggtatcccacacctggtcatcctggatgcaaaaactggtgaagtttacactgaagatggtgttgaattcgtgagtgagtatggcgtggaggcttaccctttcacaccagatcggatcaatgaactgaaggaacaggaaaaggcagaaaaggagaatcaaactattcaaagcgtgcttgtcacatctactcgagactatctcatttcaaacaagggagacaaggtacccatctctgagcttgaggggaagtatgttggtctttgctttgtggtggatggctttccaccactcgctgaattcactgaggtgcttgctaagatctatgagaaactcaaagaagtgggagagaaatttgaagttgtagctgtatccttggacagtgaagagtcatcatttaatgagagttttgcaaagatgccttggcttgcaattcctcaaggtgacattaagtgtcagacgctggttcgttactttgagcttagttctcttccaacactagttctgattggccctgatgggaagacactgaacaacaatgtcgccgacataattgacgaccatggttttgaggcatgggagggcttccccttcagtgctgagaagctggaaattcttgctgagaaggcaaagattaaagctgcatcacagaccttggagtccattctaatcagtggtcatttagactttgtcattggaaaagatggtgcaaaggttcctgtatcagaacttgttgggaagactgtccttgtttacttctcaggaaaatggtgcccaccatgccgtgccttcctgcccacacttgtcaaggagtacaacaagatcaaagagaagaacagtgattttgagatcgtcttcatctctagtgacgaggatcagagctcattcgatgattttttctctgaaatgccatggcttgctgtaccctgggaagatgaaaggaaagcatcgctgaagaaaaccttcaagatccgtggaatcccttcacttgtcgccatcggacctactgggcagacagtcagcagggacgcaaagtcccagctgatgatccacggtgctgatgctttcccattcaccgaggagagacttgaggagctacagaagaagctggatgagatggcgaaggggtggcctcagaagctgaagcatgagctgcatgacgagcacgaacttgtcctgctgcgccgtggtacgtaccgctgtgatggttgtaacgagatgggcagcagctggtcctacaggtgcgacgagtgtgactttgacctgcaccccaagtgcgcgttgggtgaggaaaagatgggcgaggaagcccctgctgggtatgtgtgcgagggaggcgtgtgcaggaaggcctaatctgaatgctgtgaaggatgacaataatcgtgagatggctgtgttttgatgtaaggtttttcggccgttgatgtttgtgtgttaataaatagtagttgcaggagcaaatgtgtgtatgcaaaactatgtgagtattgtgtcagatcaaagtaatggttttgctgc

SEQ ID NO: 9463 - protein, 608 aa, Zea mays subsp. mays
  peptide (1)..(608): Ceres Seq. ID no. 13586156
FFPFLLSYGWLSRPVHQPPHHKHPPLCSRPLAFSPPLQLMAEAAPAAGGGIGDILATSDRDFLVRNSGEQVKISSVEASPVAIYFSASWCPPCRRFTPKLIEVYEKLASQGKSFEVVFASADRNEEAFNEYFAKMPWLAVPFSDSEGREALDGQFKVSGIPHLVILDAKTGEVYTEDGVEFVSEYGVEAYPFTPDRINELKEQEKAEKENQTIQSVLVTSTRDYLISNKGDKVPISELEGKYVGLCFVVDGFPPLAEFTEVLAKIYEKLKEVGEKFEVVAVSLDSEESSFNESFAKMPWLAIPQGDIKCQTLVRYFELSSLPTLVLIGPDGKTLNNNVADIIDDHGFEAWEGFPFSAEKLEILAEKAKIKAASQTLESILISGHLDFVIGKDGAKVPVSELVGKTVLVYFSGKWCPPCRAFLPTLVKEYNKIKEKNSDFEIVFISSDEDQSSFDDFFSEMPWLAVPWEDERKASLKKTFKIRGIPSLVAIGPTGQTVSRDAKSQLMIHGADAFPFTEERLEELQKKLDEMAKGWPQKLKHELHDEHELVLLRRGTYRCDGCNEMGSSWSYRCDECDFDLHPKCALGEEKMGEEAPAGYVCEGGVCRKA

SEQ ID NO: 9464 - protein, 569 aa, Zea mays subsp. mays
  peptide (1)..(569): Ceres Seq. ID no. 13586157
MAEAAPAAGGGIGDILATSDRDFLVRNSGEQVKISSVEASPVAIYFSASWCPPCRRFTPKLIEVYEKLASQGKSFEVVFASADRNEEAFNEYFAKMPWLAVPFSDSEGREALDGQFKVSGIPHLVILDAKTGEVYTEDGVEFVSEYGVEAYPFTPDRINELKEQEKAEKENQTIQSVLVTSTRDYLISNKGDKVPISELEGKYVGLCFVVDGFPPLAEFTEVLAKIYEKLKEVGEKFEVVAVSLDSEESSFNESFAKMPWLAIPQGDIKCQTLVRYFELSSLPTLVLIGPDGKTLNNNVADIIDDHGFEAWEGFPFSAEKLEILAEKAKIKAASQTLESILISGHLDFVIGKDGAKVPVSELVGKTVLVYFSGKWCPPCRAFLPTLVKEYNKIKEKNSDFEIVFISSDEDQSSFDDFFSEMPWLAVPWEDERKASLKKTFKIRGIPSLVAIGPTGQTVSRDAKSQLMIHGADAFPFTEERLEELQKKLDEMAKGWPQKLKHELHDEHELVLLRRGTYRCDGCNEMGSSWSYRCDECDFDLHPKCALGEEKMGEEAPAGYVCEGGVCRKA

SEQ ID NO: 9465 - protein, 474 aa, Zea mays subsp. mays
  peptide (1)..(474): Ceres Seq. ID no. 13586158
MPWLAVPFSDSEGREALDGQFKVSGIPHLVILDAKTGEVYTEDGVEFVSEYGVEAYPFTPDRINELKEQEKAEKENQTIQSVLVTSTRDYLISNKGDKVPISELEGKYVGLCFVVDGFPPLAEFTEVLAKIYEKLKEVGEKFEVVAVSLDSEESSFNESFAKMPWLAIPQGDIKCQTLVRYFELSSLPTLVLIGPDGKTLNNNVADIIDDHGFEAWEGFPFSAEKLEILAEKAKIKAASQTLESILISGHLDFVIGKDGAKVPVSELVGKTVLVYFSGKWCPPCRAFLPTLVKEYNKIKEKNSDFEIVFISSDEDQSSFDDFFSEMPWLAVPWEDERKASLKKTFKIRGIPSLVAIGPTGQTVSRDAKSQLMIHGADAFPFTEERLEELQKKLDEMAKGWPQKLKHELHDEHELVLLRRGTYRCDGCNEMGSSWSYRCDECDFDLHPKCALGEEKMGEEAPAGYVCEGGVCRKA

SEQ ID NO: 9466 - DNA, 793 bp, Zea mays subsp. mays
  misc_feature (1)..(793): Ceres Seq. ID no. 12415980
  misc_feature (1)..(793): Ortholog of  Ceres SEQ ID NO 12611884 as cited in SEQ ID NO 51018
  misc_feature (1)..(793): Ortholog of  Ceres SEQ ID NO 15177083 as cited in SEQ ID NO 51917
  misc_feature (1)..(793): Ortholog of  Ceres SEQ ID NO 12609093 as cited in SEQ ID NO 52008
  misc_feature (1)..(793): Ortholog of  Ceres SEQ ID NO 12609839 as cited in SEQ ID NO 52022
  misc_feature (1)..(793): Ortholog of  Ceres SEQ ID NO 13638885 as cited in SEQ ID NO 55803
  misc_feature (1)..(793): Ortholog of  Ceres SEQ ID NO 14301452 as cited in SEQ ID NO 60984
  misc_feature (1)..(793): Ortholog of  Ceres SEQ ID NO 12587429 as cited in SEQ ID NO 63113
  misc_feature (1)..(793): Ortholog of  Ceres SEQ ID NO 12615635 as cited in SEQ ID NO 63133
  misc_feature (1)..(793): Ortholog of  Ceres SEQ ID NO 12586351 as cited in SEQ ID NO 64028
  misc_feature (1)..(793): Ortholog of  Ceres SEQ ID NO 15173174 as cited in SEQ ID NO 64046
  misc_feature (1)..(793): Ortholog of  Ceres SEQ ID NO 13654441 as cited in SEQ ID NO 67814
gagagagagagagcgcgcgcgcgctggcaatggcgggagccgacgacctgaaggtgctgggcctgtggacgagcccgttcgtgatccgggtccgcatcgtgctcaacctcaagggcctggcgtacgagtacgtggaggacgacctcggcaacaagagcgcgctcctgctcagctccaacccggtgcacaagaccgtgcccgtgctgctccacgcgggtcgccccgtaaacgagtcccagatcatcctgcagtacatcgacgaggtctgggcggggaccgggccggccgtgctgccgcgcgacccctatgagcgcgcggccgcgcggttctgggcggcctacatcgacgacaaggtgaagtccgcgtggctgggcatgctgttcgagtgcagggacgagggggagcgggcggaggcggtggcgcgggccggcgaggcgctcgggacgctggagggcgcgctcagggggaagcccttcttcggcggcgacggcgtcggcttcgtggacgccgtgctcggcgggtacctcggctggttcggggccgtcggcaggatcatcggccgcaggctgatcgacccgactaagacgccgctgctggccgcgtgggaggaccggttccgcgccgccgacgtggccaagggcgtcgtaccggacgacgtcgacaagatgctcgcgttcctggagaccctgctcgcgaactactactccaagtgactgtactgagagcgaactactgctccaagtgactaaataagaagggctgcttaattaataattacagtatataattgtgc

SEQ ID NO: 9467 - protein, 236 aa, Zea mays subsp. mays
  peptide (1)..(236): Ceres Seq. ID no. 12415981
ERESARALAMAGADDLKVLGLWTSPFVIRVRIVLNLKGLAYEYVEDDLGNKSALLLSSNPVHKTVPVLLHAGRPVNESQIILQYIDEVWAGTGPAVLPRDPYERAAARFWAAYIDDKVKSAWLGMLFECRDEGERAEAVARAGEALGTLEGALRGKPFFGGDGVGFVDAVLGGYLGWFGAVGRIIGRRLIDPTKTPLLAAWEDRFRAADVAKGVVPDDVDKMLAFLETLLANYYSK

SEQ ID NO: 9468 - protein, 227 aa, Zea mays subsp. mays
  peptide (1)..(227): Ceres Seq. ID no. 12415982
MAGADDLKVLGLWTSPFVIRVRIVLNLKGLAYEYVEDDLGNKSALLLSSNPVHKTVPVLLHAGRPVNESQIILQYIDEVWAGTGPAVLPRDPYERAAARFWAAYIDDKVKSAWLGMLFECRDEGERAEAVARAGEALGTLEGALRGKPFFGGDGVGFVDAVLGGYLGWFGAVGRIIGRRLIDPTKTPLLAAWEDRFRAADVAKGVVPDDVDKMLAFLETLLANYYSK

SEQ ID NO: 9469 - DNA, 897 bp, Zea mays subsp. mays
  misc_feature (1)..(897): Ceres Seq. ID no. 13493255
  misc_feature (1)..(897): Ortholog of  Ceres SEQ ID NO 14306675 as cited in SEQ ID NO 52939
  misc_feature (1)..(897): Ortholog of  Ceres SEQ ID NO 12608114 as cited in SEQ ID NO 57218
  misc_feature (1)..(897): Ortholog of  Ceres SEQ ID NO 12625980 as cited in SEQ ID NO 65586
aatctatacacgattgacctgagctgagccgcctcccgtctcgagagggagggagagcgagagcgagagcgagagagctagcgcgcgcgatcgcaaagagatcggtgaagatgaaggtgcagtgcgacgtgtgcgcggccgaggcggcgtctgtgttctgctgcgccgacgaggccgcgctgtgcgaggcgtgcgaccgccgcgtgcaccgcgccaacaagctcgccggcaagcaccgccggctctcgctgctcggcccggcggcgccgtcctcgtcggcgcagcagacaccgccgcctccgctctgcgacatctgccaggagaagcgcgggctcctgttctgcaaggaggaccgggcgatcctgtgccgcgactgcgacgtgccggtgcacacggccagcgagctggccatgcgccacacccggttcctgctcacgggcgtgcgcctctccgcagagcccgccgcgcgcccgccgccntcggaggaggacgagaacgacagcagcggcagcagcatctccgagtacctgaccaagacgctgcccgggtggcatgtcgaggacttcctggtggacgagaccgccgccgccgcaactaccattggcgtctccacagacgtgtcgtatcaggcgggagggctagctcggacaggcgacggctactactccgcgtggatggcgccggagcagatcttctgcgagggcaagggcagcaggatgccgcagatggcgatgtgcagcagcagcaagagacccagagccacgtcctcctattcttactggtgaacaacccaacaggagacgaccgtgtcagagccgtcagccgtctgtctgtattattatttcgttcatgcatatgcctcggctggtgcattattcttaccgctagtctgcctgc

SEQ ID NO: 9470 - protein, 224 aa, Zea mays subsp. mays
  peptide (1)..(224): Ceres Seq. ID no. 13493256
  misc_feature (123)..(123): Xaa is any aa, unknown or other
MKVQCDVCAAEAASVFCCADEAALCEACDRRVHRANKLAGKHRRLSLLGPAAPSSSAQQTPPPPLCDICQEKRGLLFCKEDRAILCRDCDVPVHTASELAMRHTRFLLTGVRLSAEPAARPPXSEEDENDSSGSSISEYLTKTLPGWHVEDFLVDETAAAATTIGVSTDVSYQAGGLARTGDGYYSAWMAPEQIFCEGKGSRMPQMAMCSSSKRPRATSSYSYW

SEQ ID NO: 9471 - protein, 124 aa, Zea mays subsp. mays
  peptide (1)..(124): Ceres Seq. ID no. 13493257
  misc_feature (23)..(23): Xaa is any aa, unknown or other
MRHTRFLLTGVRLSAEPAARPPXSEEDENDSSGSSISEYLTKTLPGWHVEDFLVDETAAAATTIGVSTDVSYQAGGLARTGDGYYSAWMAPEQIFCEGKGSRMPQMAMCSSSKRPRATSSYSYW

SEQ ID NO: 9472 - DNA, 719 bp, Zea mays subsp. mays
  misc_feature (1)..(719): Ceres Seq. ID no. 12347337
  misc_feature (1)..(719): Ortholog of  Ceres SEQ ID NO 13585616 as cited in SEQ ID NO 63719
ccgaaatttgggtgaacccgaacgcgcagtcctagttcaagctgaaaggagaacataaaagaggagaggctagggttttggcgtccgagaccaaaccaagctctctccggcgacggtgagggctcgatatcggagtccagtaggcggctcctgctgcttcggcggtccctaatccctctctcggcagtgtacagatggcgtccggcggtccggcgctcgagccgctcgtcgaccaggtcatctccgtcatcaccaacgatggccgcaacatcgtgggtacgctcaggggattcgatcaggccaccaacattatactcgacgagtcccatgagagggtctattctagaaaggagggagtccaacaacttgttcttggtctgtacattatcaggggtgacaacataagcgttgtgggcgangttgatgaagagctggattcaagattggatatgtcgaagctaagggcgcacccactgaagcctgttattcactgaggtccgagtatgtctttgggtaatatgtggactggatggatgggtcactgttgaatgcaggatgtagcatcatcatggtgaggggactgagtaatatggacatgtatcttgcgtattgtgcaatgaatgtgttggctgttgggtcgcttgcctacgcattctgtaagattgcagttaccattaggaactgaactcaactcgactgaattaatatcatttggcttt

SEQ ID NO: 9473 - protein, 99 aa, Zea mays subsp. mays
  peptide (1)..(99): Ceres Seq. ID no. 12347338
  misc_feature (75)..(75): Xaa is any aa, unknown or other
MASGGPALEPLVDQVISVITNDGRNIVGTLRGFDQATNIILDESHERVYSRKEGVQQLVLGLYIIRGDNISVVGXVDEELDSRLDMSKLRAHPLKPVIH

SEQ ID NO: 9474 - protein, 51 aa, Zea mays subsp. mays
  peptide (1)..(51): Ceres Seq. ID no. 12347339
MDGSLLNAGCSIIMVRGLSNMDMYLAYCAMNVLAVGSLAYAFCKIAVTIRN

SEQ ID NO: 9475 - DNA, 1031 bp, Zea mays subsp. mays
  misc_feature (1)..(1031): Ceres Seq. ID no. 12355251
  misc_feature (1)..(1031): Ortholog of  Ceres SEQ ID NO 13597182 as cited in SEQ ID NO 63654
agaacgcactagcatttccacgcggcgttccacttccacccgaaaccccaatcaagcgtgcactgcatctgcgtagcccgttcaccacgcactcgcttccctccctaccgtgcgatctatggacggcgacggcgcgacgtgggggcagccgatgctggagaagcggccgagccaccgggagcggcatttcacggcgggggaagtggtgcgggacgtcatcatgggggtgtccgacggcctcaccgtgcccttcgccctcgccgcggggctctccggcgccagcgcgccctcctcgctcgtcctcaccgccggcctcgccgaggccccgccggcgccatctccatgggactcggagggtaccttgcggcccagagcgaggcggaccactacaagcgggagatgagaagggagcaggaggagatcatcgccgtcccagacaccgaggccgctgagattggagagatcatgtcacggtatgggctcgagccgcaggagtacggccctgtcgtcgccggactcaggcgaaaccctcaagcttggctagacttcatgatgaggttcgagctgggactggagagaccggatcccagaagggctctgcagagcgccttcacgatcgcagtgtcctacgtggtcggcgggctggtccctctcctgccctacgtgctcgtctccgcggcgaaggatgccatgctcacatccgtcagagtcacgctggccgcgctgcttttcttcggctacgtcaagggccgcttcacggggaactggccgttcgccagtgccgtccagaccgctgtcattggagcgctcgcttcggcggcggcgtacgggatggcgaaggctgttcaggcgaggtagttgtttgttggtgaggcggcggcgtcaggcgttttgggaaccagagtttcagtaggatgcggtaaaactgaagaaagctgtataattccgatcctttgggggacttctcgtttacagtgttaatcgcgggatctagtgctagtctactcttttgaataaatctaggggaggat

SEQ ID NO: 9476 - protein, 171 aa, Zea mays subsp. mays
  peptide (1)..(171): Ceres Seq. ID no. 12355252
MGLGGYLAAQSEADHYKREMRREQEEIIAVPDTEAAEIGEIMSRYGLEPQEYGPVVAGLRRNPQAWLDFMMRFELGLERPDPRRALQSAFTIAVSYVVGGLVPLLPYVLVSAAKDAMLTSVRVTLAALLFFGYVKGRFTGNWPFASAVQTAVIGALASAAAYGMAKAVQAR

SEQ ID NO: 9477 - protein, 152 aa, Zea mays subsp. mays
  peptide (1)..(152): Ceres Seq. ID no. 12355253
MRREQEEIIAVPDTEAAEIGEIMSRYGLEPQEYGPVVAGLRRNPQAWLDFMMRFELGLERPDPRRALQSAFTIAVSYVVGGLVPLLPYVLVSAAKDAMLTSVRVTLAALLFFGYVKGRFTGNWPFASAVQTAVIGALASAAAYGMAKAVQAR

SEQ ID NO: 9478 - protein, 149 aa, Zea mays subsp. mays
  peptide (1)..(149): Ceres Seq. ID no. 12355254
NALAFPRGVPLPPETPIKRALHLRSPFTTHSLPSLPCDLWTATARRGGSRCWRSGRATGSGISRRGKWCGTSSWGCPTASPCPSPSPRGSPAPARPPRSSSPPASPRPRRRHLHGTRRVPCGPERGGPLQAGDEKGAGGDHRRPRHRGR

SEQ ID NO: 9479 - DNA, 1065 bp, Zea mays subsp. mays
  misc_feature (1)..(1065): Ceres Seq. ID no. 12374811
  misc_feature (1)..(1065): Ortholog of  Ceres SEQ ID NO 14313284 as cited in SEQ ID NO 67146
actccccaagcgtcacaccgaatcactacagtcgagctcgagcaggaacaatccttgagcgcctgcctccccggtcctcagtatctattccacacctcatggcgccggcgctgagcaggaccctgggcccgtcgtcggtggccgcgctgcgcccgagcccgtcgtgccggggtctgctacgggccgcgctcgtgccgcagggcaggggcgcctccgcgaggtgcgcggtaggggtgagatgggaggcagccaggcggaggaggatggccggggtgaggtgcgacgccgccgtcgctgagaagcctgccggcgaggaggagacggccggcgagaagtacgagtaccaggctgaggttacccgcttgatggacttaattgtacacagtttatacagccacaaggaagtatttttacgtgagcttgtaagtaacgcgagtgatgcactggataagctgagattcctcagcgtaactgattcttctgtgttggctgatggtggtgagttggagataaggattaaacccgacctagaggcggggacaatcactatcacagatactggcattggaatgactaaagatgagctcaaagactgtcttggaaccattgcacaaagtggcacctcaaaatttttgaaggctctaaaggagaacaaagaccttggtgcagataatggactcattggtcaattcggtgtcgggttctattccgctttccttgttgcagagagggttgtggtgtctactaaaagtccaaaggcagataagcagtatgtttgggaagcagaggctgacagcagctcgtatgttatcaaggaagaaactgatcctgagaaaatgctttcacgtggaacagagattactctttatttgagagatgatgacaaatatgagtttgctgaccctaccaggattcaaggcttagttaagaactactcgcagtttgtctcattccccatatatacatggcaggaaaaatcaaaaacagttgaggttgaagaggaggaagaatcaaagggtgaagaggctactgaagaatcaaaaagtgaagaggctactgagggtg

SEQ ID NO: 9480 - protein, 354 aa, Zea mays subsp. mays
  peptide (1)..(354): Ceres Seq. ID no. 12374812
SPSVTPNHYSRARAGTILERLPPRSSVSIPHLMAPALSRTLGPSSVAALRPSPSCRGLLRAALVPQGRGASARCAVGVRWEAARRRRMAGVRCDAAVAEKPAGEEETAGEKYEYQAEVTRLMDLIVHSLYSHKEVFLRELVSNASDALDKLRFLSVTDSSVLADGGELEIRIKPDLEAGTITITDTGIGMTKDELKDCLGTIAQSGTSKFLKALKENKDLGADNGLIGQFGVGFYSAFLVAERVVVSTKSPKADKQYVWEAEADSSSYVIKEETDPEKMLSRGTEITLYLRDDDKYEFADPTRIQGLVKNYSQFVSFPIYTWQEKSKTVEVEEEEESKGEEATEESKSEEATEG

SEQ ID NO: 9481 - protein, 322 aa, Zea mays subsp. mays
  peptide (1)..(322): Ceres Seq. ID no. 12374813
MAPALSRTLGPSSVAALRPSPSCRGLLRAALVPQGRGASARCAVGVRWEAARRRRMAGVRCDAAVAEKPAGEEETAGEKYEYQAEVTRLMDLIVHSLYSHKEVFLRELVSNASDALDKLRFLSVTDSSVLADGGELEIRIKPDLEAGTITITDTGIGMTKDELKDCLGTIAQSGTSKFLKALKENKDLGADNGLIGQFGVGFYSAFLVAERVVVSTKSPKADKQYVWEAEADSSSYVIKEETDPEKMLSRGTEITLYLRDDDKYEFADPTRIQGLVKNYSQFVSFPIYTWQEKSKTVEVEEEEESKGEEATEESKSEEATEG

SEQ ID NO: 9482 - protein, 267 aa, Zea mays subsp. mays
  peptide (1)..(267): Ceres Seq. ID no. 12374814
MAGVRCDAAVAEKPAGEEETAGEKYEYQAEVTRLMDLIVHSLYSHKEVFLRELVSNASDALDKLRFLSVTDSSVLADGGELEIRIKPDLEAGTITITDTGIGMTKDELKDCLGTIAQSGTSKFLKALKENKDLGADNGLIGQFGVGFYSAFLVAERVVVSTKSPKADKQYVWEAEADSSSYVIKEETDPEKMLSRGTEITLYLRDDDKYEFADPTRIQGLVKNYSQFVSFPIYTWQEKSKTVEVEEEEESKGEEATEESKSEEATEG

SEQ ID NO: 9483 - DNA, 751 bp, Zea mays subsp. mays
  misc_feature (1)..(751): Ceres Seq. ID no. 12356736
  misc_feature (1)..(751): Ortholog of  Ceres SEQ ID NO 14315626 as cited in SEQ ID NO 52943
ggagaaagtaccaagtgctcagggagttcagtctgacaatgatcctaacaatacaaccatttttgttggtggtcttgaccccaatgtcactgaagatatgttgaaacaagttttcaccccttatggggacgtagtccatgttaagattcctgttggcaaaagatgtggttttgttcaatatgctaacagatcttcggcagaggaggcattggtaattctgcaaggcaccttggttggagggcagaatgtgaggctttcatggggtcgcagcccttcaaacaaacaagttcagcctcaacaggactccaaccagtgggccggggctaatgctggatattatggctacggtcaaggctatgaggcctatgggtacccccagtctcaggaccctaatatgtataattatggagctggagcttatgctggctatccaaattaccaacaacaaccagtagcacagcaaccgccgcagcaacagtgagaggtccagtgacgctactgtcatttgggtgattgacgtggaaatatttatgagttgtaagatgagcttcggatgcaagctggattaggtatacagacatgattttcgtagtactcagattctgagttgccctcgtatcagagcttgtggtcccaatagcctgcagctgcagctaaaacgatctattttggtagcggaatgttttatctgcttattttgtaccgtgtcttccgctactgcggagccttgataacttgctatgttggattt

SEQ ID NO: 9484 - protein, 159 aa, Zea mays subsp. mays
  peptide (1)..(159): Ceres Seq. ID no. 12356737
EKVPSAQGVQSDNDPNNTTIFVGGLDPNVTEDMLKQVFTPYGDVVHVKIPVGKRCGFVQYANRSSAEEALVILQGTLVGGQNVRLSWGRSPSNKQVQPQQDSNQWAGANAGYYGYGQGYEAYGYPQSQDPNMYNYGAGAYAGYPNYQQQPVAQQPPQQQ

SEQ ID NO: 9485 - protein, 127 aa, Zea mays subsp. mays
  peptide (1)..(127): Ceres Seq. ID no. 12356738
MLKQVFTPYGDVVHVKIPVGKRCGFVQYANRSSAEEALVILQGTLVGGQNVRLSWGRSPSNKQVQPQQDSNQWAGANAGYYGYGQGYEAYGYPQSQDPNMYNYGAGAYAGYPNYQQQPVAQQPPQQQ

SEQ ID NO: 9486 - DNA, 771 bp, Zea mays subsp. mays
  misc_feature (1)..(771): Ceres Seq. ID no. 12415488
  misc_feature (1)..(771): Ortholog of  Ceres SEQ ID NO 14305854 as cited in SEQ ID NO 52331
atcgatcgaacttgctaaaccagcggaaacctaaccagctaggcagcattagcttttcaacaagcctcgctcgcgcgccgtgaccgataggatggccatcacccacgacgactacgtctccctgtgcctcatggcgctcgcagccgcgggaggaggaggagggcacgctgcggctgccagtgccaggacgacgacgatgacgacgcaagagtgcgagctccgcttccggtgctccgtctgcggcaaggccttcgcgtcgcaccaggcgctgggcgggcacaaggccagccaccggaagccgccgccgacgctcgtacaggcggcgtcgtcgtcgtcgtcggtgacgacgaatacctcgtcggcgggcggcagcggcgccgggcaggggaggcacaggtgctcggtgtgccaccggggcttcgccacggggcaggcgctcggcgggcacaagaggtgccattactgggacgggctctcggtgtcgctcaccgcgtcggcggcgtcggggtccgcgtccagcttgaggggcttcgatctgaatttggtgccggccgccggcgcggcaaggtggcgagaggaggaagaggtgcagagccccttgccggtcaagaagcggcggctgtcctccggtccttccaccgaacttagtttaacgatttagagttccttttggtgagctgaggcatgtagagtgttttcgtagcttcattcttttaaccgtattttggtttttgtgtttgcgcggtgaataaacgtgtatttaattttgtc

SEQ ID NO: 9487 - protein, 189 aa, Zea mays subsp. mays
  peptide (1)..(189): Ceres Seq. ID no. 12415489
MAITHDDYVSLCLMALAAAGGGGGHAAAASARTTTMTTQECELRFRCSVCGKAFASHQALGGHKASHRKPPPTLVQAASSSSSVTTNTSSAGGSGAGQGRHRCSVCHRGFATGQALGGHKRCHYWDGLSVSLTASAASGSASSLRGFDLNLVPAAGAARWREEEEVQSPLPVKKRRLSSGPSTELSLTI

SEQ ID NO: 9488 - protein, 176 aa, Zea mays subsp. mays
  peptide (1)..(176): Ceres Seq. ID no. 12415490
MALAAAGGGGGHAAAASARTTTMTTQECELRFRCSVCGKAFASHQALGGHKASHRKPPPTLVQAASSSSSVTTNTSSAGGSGAGQGRHRCSVCHRGFATGQALGGHKRCHYWDGLSVSLTASAASGSASSLRGFDLNLVPAAGAARWREEEEVQSPLPVKKRRLSSGPSTELSLTI

SEQ ID NO: 9489 - protein, 154 aa, Zea mays subsp. mays
  peptide (1)..(154): Ceres Seq. ID no. 12415491
MTTQECELRFRCSVCGKAFASHQALGGHKASHRKPPPTLVQAASSSSSVTTNTSSAGGSGAGQGRHRCSVCHRGFATGQALGGHKRCHYWDGLSVSLTASAASGSASSLRGFDLNLVPAAGAARWREEEEVQSPLPVKKRRLSSGPSTELSLTI

SEQ ID NO: 9490 - DNA, 975 bp, Zea mays subsp. mays
  misc_feature (1)..(975): Ceres Seq. ID no. 12367671
  misc_feature (1)..(975): Ortholog of  Ceres SEQ ID NO 14310784 as cited in SEQ ID NO 58503
  misc_feature (1)..(975): Ortholog of  Ceres SEQ ID NO 14312180 as cited in SEQ ID NO 59480
gcataacgccgctgccggaggtctccaaggccagcgacgtcgccggcggcgcggtgaagagatggccgcagcggctcacggccgtgccgcccagggtctcccgcggcaccgtcaggggcgtcacggccaggtcgttcgcgcaggacacggagctgtggcggaggagggtccggcactacaagtcggtggccagccagctcgagcagaaggggcggtaccgcaacgtgctggacatgaacgcgcgcctgggcgggttcgccgcggcgctggcgctggcgggcgacccgctgtgggtcatgaacatggtcccgaccgtggcgaacgcgaccacgctcggggccatctacgagcgcgggctcatcggaagctaccaggactggtgcgagggcatgtctacctacccgaggacctacgacctcatccatgcggattcggtgttcaccctgtacaaggacaggtgtgagatggaccgcatcctcctggagatggacaggatcctgaggcccaggggcacggtgatcgtcagggaagacgtggacatgctggtgaaggtcaagagcctggcggacgggatgaggtgggagagccagatcgtcgaccacgaatacggcccgctcgtcagggagaagatcctcctggttgtcaagacgtactggactgcccaggaccaagaccagtagcaggaccggacttgtcaagcgaagttcagcaatgttgataagcatttttcttgcttcgaattgcattggatcgccatttctagctccttgagctagtagtgttctctgtttgtttgctgttccttttggactgtacttgctcagataggaaatttgtatcctaaggtgtaacagggggaaatggaagggcttaggtaaaacccctggcccctgcaaagttttttttttttgttttccttcaattgcgaaattgtggcaagtggtaaatagaaagtcactgttgcgagtcatcccg

SEQ ID NO: 9491 - protein, 225 aa, Zea mays subsp. mays
  peptide (1)..(225): Ceres Seq. ID no. 12367672
ITPLPEVSKASDVAGGAVKRWPQRLTAVPPRVSRGTVRGVTARSFAQDTELWRRRVRHYKSVASQLEQKGRYRNVLDMNARLGGFAAALALAGDPLWVMNMVPTVANATTLGAIYERGLIGSYQDWCEGMSTYPRTYDLIHADSVFTLYKDRCEMDRILLEMDRILRPRGTVIVREDVDMLVKVKSLADGMRWESQIVDHEYGPLVREKILLVVKTYWTAQDQDQ

SEQ ID NO: 9492 - protein, 153 aa, Zea mays subsp. mays
  peptide (1)..(153): Ceres Seq. ID no. 12367673
HNAAAGGLQGQRRRRRRGEEMAAAAHGRAAQGLPRHRQGRHGQVVRAGHGAVAEEGPALQVGGQPARAEGAVPQRAGHERAPGRVRRGAGAGGRPAVGHEHGPDRGERDHARGHLRARAHRKLPGLVRGHVYLPEDLRPHPCGFGVHPVQGQV

SEQ ID NO: 9493 - protein, 148 aa, Zea mays subsp. mays
  peptide (1)..(148): Ceres Seq. ID no. 12367674
MNARLGGFAAALALAGDPLWVMNMVPTVANATTLGAIYERGLIGSYQDWCEGMSTYPRTYDLIHADSVFTLYKDRCEMDRILLEMDRILRPRGTVIVREDVDMLVKVKSLADGMRWESQIVDHEYGPLVREKILLVVKTYWTAQDQDQ

SEQ ID NO: 9494 - DNA, 1203 bp, Zea mays subsp. mays
  misc_feature (1)..(1203): Ceres Seq. ID no. 12374808
  misc_feature (1)..(1203): Ortholog of  Ceres SEQ ID NO 13593379 as cited in SEQ ID NO 20573
atcaatggtagaattgcaggaagtgcacaaggtagtgcaagcagctcactcatctcatggcagaaaccaattgaacttgtacctgggaagaacaaaatagatcttctaagtgcaacagttgggctgtcgaattatggtgcattctttgacctggtaggtgctggaattactggcccagtaaaactgagtggactaaacggtgcgctatctgtcttctgcagaatggacatatcagattggactcagaggagaagatttgcacctatatgatccttcagaagcttcaccagaatgggtctcagccaatgcttatccaatcaatcatccactgatttggtacaagaccaagttcacacctcctgcaggtgatgatcctgtcgcgattgacttcacgggaatggggaaaggtgaagcatgggtgaatggacagagcattggtcgatactggccaacaaatctggctccacagagcggttgcgtcaactcttgcaactatagaggagcctacagttcaagcaaatgcctcaagaagtgtggccagccatcacagactttgtaccatgttccccgttcgtttctccaaccaggcagcaatgatctagtccttttcgagcattttggtggtgacccaagcaagatatcctttgtgatgaggcagacaggaagtgtgtgcgcacaagtatcagaggcacatccagcccaaattgatagttggagttctcaacagccgatgcagagatttggacctgcacttcgcctggaatgcccaaaagaaggccaggtcatcagcagcgtcaagtttgcaagctttgggacaccgagtggcacatgtggaagctacagccatggcgaatgcagcagcactcaggctctctcagttgttcaggaggcttgcatcggagtgagcagctgcagcgtgccagtgtcgtcgaattattttggaaatccatgtacaggggtcacaaaaagccttgcagttgaagctgcatgctcgtgacatgtctgattaatattgattcataggaagcaaatcacctaggacaaggtgaaaccttctctgtaggcaagcaggcaaaaaggaataaatgttcccatcctaatcaaaaggaataaaaatattctgaaaattgccacatccaagctattagatggtatgcttatgaagtagtgttatcgttaagatataaatccatccatcatgac

SEQ ID NO: 9495 - protein, 199 aa, Zea mays subsp. mays
  peptide (1)..(199): Ceres Seq. ID no. 12374809
MGKGEAWVNGQSIGRYWPTNLAPQSGCVNSCNYRGAYSSSKCLKKCGQPSQTLYHVPRSFLQPGSNDLVLFEHFGGDPSKISFVMRQTGSVCAQVSEAHPAQIDSWSSQQPMQRFGPALRLECPKEGQVISSVKFASFGTPSGTCGSYSHGECSSTQALSVVQEACIGVSSCSVPVSSNYFGNPCTGVTKSLAVEAACS

SEQ ID NO: 9496 - protein, 115 aa, Zea mays subsp. mays
  peptide (1)..(115): Ceres Seq. ID no. 12374810
MRQTGSVCAQVSEAHPAQIDSWSSQQPMQRFGPALRLECPKEGQVISSVKFASFGTPSGTCGSYSHGECSSTQALSVVQEACIGVSSCSVPVSSNYFGNPCTGVTKSLAVEAACS

SEQ ID NO: 9497 - DNA, 974 bp, Zea mays subsp. mays
  misc_feature (1)..(974): Ceres Seq. ID no. 12356906
  misc_feature (1)..(974): Ortholog of  Ceres SEQ ID NO 15173035 as cited in SEQ ID NO 56029
  misc_feature (1)..(974): Ortholog of  Ceres SEQ ID NO 12608745 as cited in SEQ ID NO 58289
acacacgcgcaccaaagccaagcgcccaagcccagcactcgacaccaccacagcgcgcagccacgctcacgcacaccgagctgcgggagtggagtagtggaccgatggggagcagcgggggcagcagcgagcacttcctgcggcagctgagttcgagcgacggcggcagcgcgccgcaccatctgctgcagcgagagtgggagtgcggcggcgtcaccggcagcggcagcaggcgcgggtcgcggaagaagaccagggcgcggggacaccgccgccgcggcggcgggttctgcagggcggaggaggctgcgccggggcggaagcgggtaatgtggtggtggaccagagctccggcgccaagcacgccatgttgtgggcgctcacccacgtggccaacaagggcgacttcctcaccctgctccacgtcctgccgccggagagcggccacagcagccgcggtgctgcggaggacgcctccgcgctcgccaactccctcggcgcgctttgcaaggcctgcaagcctgaggtcgaggtggaggcgcctgtgatccaggggcccaagctgccgaccatcctcagccaggtgaagaagctggaggcgtccgtgctggtgctgagccaacgcagcccctcgcctttctgctgcttcccgcggagcagcagcgaggagctcgtggaggagtgcatcgaccgggcggagtgcctgacgctggcagtgcggcggcaaagcaagggcgtcggcggctacctcgtcagcacccggtggcagaagaacttctggctcctcgcgtgatccacaaccatattcccccccttctttggaaggcgtttggtttgagtctgaaagcatgggatggaacggaacgggctgggaaatggcgtttggttcagggacaagagggttgggaattgggatcgcctacaggtcggagggacgggatagtcctctatatatgaaagtcgtttcttccgcc

SEQ ID NO: 9498 - protein, 181 aa, Zea mays subsp. mays
  peptide (1)..(181): Ceres Seq. ID no. 12356907
TRAPKPSAQAQHSTPPQRAATLTHTELREWSSGPMGSSGGSSEHFLRQLSSSDGGSAPHHLLQREWECGGVTGSGSRRGSRKKTRARGHRRRGGGFCRAEEAAPGRKRVMWWWTRAPAPSTPCCGRSPTWPTRATSSPCSTSCRRRAATAAAVLRRTPPRSPTPSARFARPASLRSRWRRL

SEQ ID NO: 9499 - protein, 147 aa, Zea mays subsp. mays
  peptide (1)..(147): Ceres Seq. ID no. 12356908
MGSSGGSSEHFLRQLSSSDGGSAPHHLLQREWECGGVTGSGSRRGSRKKTRARGHRRRGGGFCRAEEAAPGRKRVMWWWTRAPAPSTPCCGRSPTWPTRATSSPCSTSCRRRAATAAAVLRRTPPRSPTPSARFARPASLRSRWRRL

SEQ ID NO: 9500 - protein, 141 aa, Zea mays subsp. mays
  peptide (1)..(141): Ceres Seq. ID no. 12356909
MLWALTHVANKGDFLTLLHVLPPESGHSSRGAAEDASALANSLGALCKACKPEVEVEAPVIQGPKLPTILSQVKKLEASVLVLSQRSPSPFCCFPRSSSEELVEECIDRAECLTLAVRRQSKGVGGYLVSTRWQKNFWLLA

SEQ ID NO: 9501 - DNA, 1230 bp, Zea mays subsp. mays
  misc_feature (1)..(1230): Ceres Seq. ID no. 12369252
  misc_feature (1)..(1230): Ortholog of  Ceres SEQ ID NO 13593955 as cited in SEQ ID NO 54278
  misc_feature (1)..(1230): Ortholog of  Ceres SEQ ID NO 13597380 as cited in SEQ ID NO 64054
  misc_feature (1)..(1230): Ortholog of  Ceres SEQ ID NO 12625474 as cited in SEQ ID NO 64169
acgaacaagcaatggcgcgcaccatggcagccatcgcgatcttgctcgccgccttcttcgtcctcgctccggatctggccaccgcagcggcagcggcagcggcgcagagcgccatcccggccgtgttcgcgttcggggactccacgctggacccgggcaacaacaacggcctgggccacgctggtgcgcgccgaccacgcgccctacggccgcggcttcccgggcggcgcggccacgggccgcttctcggacggcaagctcatcaccgactacatcgtcgagtcgctcggcatcaaggacctcctgccggcgtaccgcggcagcggcctcaccgtggcggaggcgtccacgggggtcagcttcgcgtcgggcgggtccggcctcgacgacctgaccgcgcagaccgccatggtgtccacgttcggctcgcagatcaccgacttccaggccctgctcggcaggatcggcatgcccaaggtcgccgggatcgccaacaggtcgctctacgtggtctccgccggcaccaacgacgtcaccatgaactacttcgtcctgccggtccggaccatcagcttccccaccgtcgaccagtacagtgcctacctcatcggcaggctccagggatacatccagagcttgtacaagctgggagcccggaacttcatggtgtccggcctgccgccggtggggtgcctgccgatcacgaagagcctccacagtctcgggtcgggaggttgcgtcgccgaccagaacgcggccgcggagcggtacaacgcggcgctgcggcagatgctgaccagggctggaggccgcgtcccccggcgccgcgctcgcgtacgtcgacgtgtacaccccgttgatggacatggtcgcgcagccccagaaatacggtttcaccgagacgagccgaggctgctgcgggaacggtctgccggcgatgggggcgctctgcaccagcgcgctgccgcagtgccggtcgccggcgcagttcatgttcttcgactcggtgcacccgacgcaggccacctacaaggcgctcgccgaccacatcgtccagtcacaaaaacctaagacttagattagcattagattagcattagctgcaggaggaacggcattgcacatgaagctggctacctcggtgctttttgtagatccatttatttgcacatgcagagatggatgtttacatagcgaagtttttaatatacagagagtcgtttattttgc

SEQ ID NO: 9502 - protein, 356 aa, Zea mays subsp. mays
  peptide (1)..(356): Ceres Seq. ID no. 12369253
TNKQWRAPWQPSRSCSPPSSSSLRIWPPQRQRQRRRAPSRPCSRSGTPRWTRATTTAWATLVRADHAPYGRGFPGGAATGRFSDGKLITDYIVESLGIKDLLPAYRGSGLTVAEASTGVSFASGGSGLDDLTAQTAMVSTFGSQITDFQALLGRIGMPKVAGIANRSLYVVSAGTNDVTMNYFVLPVRTISFPTVDQYSAYLIGRLQGYIQSLYKLGARNFMVSGLPPVGCLPITKSLHSLGSGGCVADQNAAAERYNAALRQMLTRAGGRVPRRRARVRRRVHPVDGHGRAAPEIRFHRDEPRLLRERSAGDGGALHQRAAAVPVAGAVHVLRLGAPDAGHLQGARRPHRPVTKT

SEQ ID NO: 9503 - protein, 285 aa, Zea mays subsp. mays
  peptide (1)..(285): Ceres Seq. ID no. 12369254
EQAMARTMAAIAILLAAFFVLAPDLATAAAAAAAQSAIPAVFAFGDSTLDPGNNNGLGHAGARRPRALRPRLPGRRGHGPLLGRQAHHRLHRRVARHQGPPAGVPRQRPHRGGGVHGGQLRVGRVRPRRPDRADRHGVHVRLADHRLPGPARQDRHAQGRRDRQQVALRGLRRHQRRHHELLRPAGPDHQLPHRRPVQCLPHRQAPGIHPELVQAGSPELHGVRPAAGGVPADHEEPPQSRVGRLRRRPERGRGAVQRGAAADADQGWRPRPPAPRSRTSTCTPR

SEQ ID NO: 9504 - protein, 282 aa, Zea mays subsp. mays
  peptide (1)..(282): Ceres Seq. ID no. 12369255
MARTMAAIAILLAAFFVLAPDLATAAAAAAAQSAIPAVFAFGDSTLDPGNNNGLGHAGARRPRALRPRLPGRRGHGPLLGRQAHHRLHRRVARHQGPPAGVPRQRPHRGGGVHGGQLRVGRVRPRRPDRADRHGVHVRLADHRLPGPARQDRHAQGRRDRQQVALRGLRRHQRRHHELLRPAGPDHQLPHRRPVQCLPHRQAPGIHPELVQAGSPELHGVRPAAGGVPADHEEPPQSRVGRLRRRPERGRGAVQRGAAADADQGWRPRPPAPRSRTSTCTPR

SEQ ID NO: 9505 - DNA, 2064 bp, Zea mays subsp. mays
  misc_feature (1)..(2064): Ceres Seq. ID no. 13622175
  misc_feature (1)..(2064): Ortholog of  Ceres SEQ ID NO 14308221 as cited in SEQ ID NO 60363
acggcaccagtgacgcgaaagcaaaacgccaaacaggctcctctgaaactcccagagccggtagaggcacgccactccgcagtgtcagtcactgcccccccatcacgccgcccgccctttctcggccgttgccgcgagctcgcttcgacccaccgccgatggcgacggcgatgggcgcgatggccgccacctgcatggcctcgatcccggccgccgctacgttccccggtgatctcggcgtcggacgacgccgagcggttgtaccagggtggcgcgccggtgggagacggctgcgtgcgacgccgcctgcccggaggccgttcctgttctcgccgaagggcgtttcggactcgcggagctcgcaaacgtgccttgatccggacgccagcacgagtgttcttgggatcatccttggagggggtgctgggacaaggctgtatccactgacgaagaagagggcgaaaccagcagtgccgttgggcgccaactacaggctcatagatatccctgtcagcaactgtctcaacagtaacgtctccaagatatatgtgctaacacagttcaactctgcttcgctcaaccgccacctctcgagggcctatggaaacaacattgccgggtacaagaatgagggattcgttgaggtccttgcagcacaacagagtccagagaatcccaactggtttcagggtactgcagatgccgtgcgtcaatatatgtggctatttgaggagcataatatcatggagttccttattctggctggagatcatctgtaccgtatggattaccaaaagttcattcaagctcatagagaaacagatgctgatataacagttgcagccctgccaatggatgaacaacgtgcaactgcatttggtcttatgaaaattgatgatgaagggaggatagttgagtttgcagaaaaaccaaaaggagagaagctgagatcaatgatggtagacaccactatattgggccttgatcctgaaagggccaaagaactgccttatattgccagtatgggaatctatgtttttagcaaagatgtgatgcttcgtcttctcagagaaaattttcctgcagcaaatgactttggaagtgaggttattcctggcgcaacagaaattggattaagggtgcaagcttacttatatgatggttactgggaagatattggtactattgaagcattttataatgcaaacttgggaataaccaagaagcctgtaccggattttagcttctatgatcgttctgctccaatttatacgcaacctagatatttgcctccttcgaaggttcttgatgctgatgtgacagacagtgttattggagaagggtgtgttattaaacattgcacaatcaatcattccgtagttggactccgttcctgcatttctgaaggtgcagttatagaggactctttgctaatgggtgcagactattacgagactgagaatgataagaatgtcctttctgagactggtggcattcccattggtattgggaaaaattcacatatcagaaaagcaataattgacaaaaatgctcgcattggagaaaatgtgaagataatcaattttgataatgtccaagaagcagtaagggagacagaaggatattttatcaaaagtggaattgtcacggtgattaaagatgctttaattcctagtggaacaatcatataaagtcagccaacaccatgtatataaggttgggttgcatcatatggtgatcgccaatgcgcatcaagttctctcatcccttgcgagaccatgcttatttccattgcaaaatcatcaagctctgcatcaacttgttgtggataataatgaaataataaatggtgccattccatggcaacatttttctgtcactagtatgaggcactgttctaaatgtactgttgagtggaatttgaatatgtatgcttttgcaatcgcacacctaaataccttgtgcttatactccttgttacctaaatatgctcactgcattgcccaaggaatcagattaaaaatgtcatgcataacatgatttttgttagattgttgtaaagct

SEQ ID NO: 9506 - protein, 562 aa, Zea mays subsp. mays
  peptide (1)..(562): Ceres Seq. ID no. 13622176
GTSDAKAKRQTGSSETPRAGRGTPLRSVSHCPPITPPALSRPLPRARFDPPPMATAMGAMAATCMASIPAAATFPGDLGVGRRRAVVPGWRAGGRRLRATPPARRPFLFSPKGVSDSRSSQTCLDPDASTSVLGIILGGGAGTRLYPLTKKRAKPAVPLGANYRLIDIPVSNCLNSNVSKIYVLTQFNSASLNRHLSRAYGNNIAGYKNEGFVEVLAAQQSPENPNWFQGTADAVRQYMWLFEEHNIMEFLILAGDHLYRMDYQKFIQAHRETDADITVAALPMDEQRATAFGLMKIDDEGRIVEFAEKPKGEKLRSMMVDTTILGLDPERAKELPYIASMGIYVFSKDVMLRLLRENFPAANDFGSEVIPGATEIGLRVQAYLYDGYWEDIGTIEAFYNANLGITKKPVPDFSFYDRSAPIYTQPRYLPPSKVLDADVTDSVIGEGCVIKHCTINHSVVGLRSCISEGAVIEDSLLMGADYYETENDKNVLSETGGIPIGIGKNSHIRKAIIDKNARIGENVKIINFDNVQEAVRETEGYFIKSGIVTVIKDALIPSGTII

SEQ ID NO: 9507 - protein, 510 aa, Zea mays subsp. mays
  peptide (1)..(510): Ceres Seq. ID no. 13622177
MATAMGAMAATCMASIPAAATFPGDLGVGRRRAVVPGWRAGGRRLRATPPARRPFLFSPKGVSDSRSSQTCLDPDASTSVLGIILGGGAGTRLYPLTKKRAKPAVPLGANYRLIDIPVSNCLNSNVSKIYVLTQFNSASLNRHLSRAYGNNIAGYKNEGFVEVLAAQQSPENPNWFQGTADAVRQYMWLFEEHNIMEFLILAGDHLYRMDYQKFIQAHRETDADITVAALPMDEQRATAFGLMKIDDEGRIVEFAEKPKGEKLRSMMVDTTILGLDPERAKELPYIASMGIYVFSKDVMLRLLRENFPAANDFGSEVIPGATEIGLRVQAYLYDGYWEDIGTIEAFYNANLGITKKPVPDFSFYDRSAPIYTQPRYLPPSKVLDADVTDSVIGEGCVIKHCTINHSVVGLRSCISEGAVIEDSLLMGADYYETENDKNVLSETGGIPIGIGKNSHIRKAIIDKNARIGENVKIINFDNVQEAVRETEGYFIKSGIVTVIKDALIPSGTII

SEQ ID NO: 9508 - protein, 506 aa, Zea mays subsp. mays
  peptide (1)..(506): Ceres Seq. ID no. 13622178
MGAMAATCMASIPAAATFPGDLGVGRRRAVVPGWRAGGRRLRATPPARRPFLFSPKGVSDSRSSQTCLDPDASTSVLGIILGGGAGTRLYPLTKKRAKPAVPLGANYRLIDIPVSNCLNSNVSKIYVLTQFNSASLNRHLSRAYGNNIAGYKNEGFVEVLAAQQSPENPNWFQGTADAVRQYMWLFEEHNIMEFLILAGDHLYRMDYQKFIQAHRETDADITVAALPMDEQRATAFGLMKIDDEGRIVEFAEKPKGEKLRSMMVDTTILGLDPERAKELPYIASMGIYVFSKDVMLRLLRENFPAANDFGSEVIPGATEIGLRVQAYLYDGYWEDIGTIEAFYNANLGITKKPVPDFSFYDRSAPIYTQPRYLPPSKVLDADVTDSVIGEGCVIKHCTINHSVVGLRSCISEGAVIEDSLLMGADYYETENDKNVLSETGGIPIGIGKNSHIRKAIIDKNARIGENVKIINFDNVQEAVRETEGYFIKSGIVTVIKDALIPSGTII

SEQ ID NO: 9509 - DNA, 1794 bp, Zea mays subsp. mays
  misc_feature (1)..(1794): Ceres Seq. ID no. 12365974
  misc_feature (1)..(1794): Ortholog of  Ceres SEQ ID NO 14315362 as cited in SEQ ID NO 59401
aaaaaacttttttaaaaaaaaaaaatcactcccacgtcgcctcgcccgctgcgacagcgcatacgccaccctcccgttgcgtacaccgtatgtatctacggtgactcggggggcacgcagacgcagtgggggagagcgagagcgagagcgaccgaccgaccgagcaagggtttcttctccggcggctgcagcggcggcggcggaggcggatctgggagggatggggaaccggataggcgggaggcggaagtcgggtgtggaggagcggttcacgcggccgcacgggctctacgagcacaaggatatcgaccagaagaagctgcgcaagctgatcctcgaggccaagctcgcgccctgctacccgggcgccgacgacgccgcggccggtggaggggacctcgaccttgaggagtgccccatctgcttcctgtactacccaagcctcaaccgttcaaagtgttgctcaaaggggatatgtacagagtgttttcttcaaatgaaaccgactcatactgctcggcctacacagtgcccattctgcaaaacgcccaattatgctgtggagtatcgtggcgtcaaaacaaaggaggaaaggagcatagagcagtttgaagaacagaaagtcatagaagcacaattgaggatgcgccaaaaagaactccaagatgaagaggctaaaatgaaaagaaaacagagcaggtgttcttctagcagaacagtaaccccaacaacagaagttgagtatcgagatatttgcagcacatccttttcagtgccatcatatcaatgtactgaacaaggaaatgaatgctgttcatctgaaccctcatgctctagccaggctaacatgcggcctttccattctaggcacaaccgtgatgataatgttgacatgaatctggaggatatgatggttatggaagcaatttggcgttccattcaggaacaagggcatctagtaaatcctgtctgtggcagctactttcctgtaatcgagccaccatcacgtgagaggcaggcatttgttccggctgctcctctagaaatgcctcatccaggtggatattcgtgtgcagttgcggctttggctgagcaccaggcaccaagcatggatttctcttacatgagtggcagtagcacatacccagtctttgacatgatccgacggccatgcaacatgtccagtggaagcctgtgcggcgccgagaacagttcactggacacctggagcgggatagcgccaagttgcagcagggaagtggtaagagacgagggagagtgctcggccgaccactggtcggagggcgcggaggcaggaacaagcctacgccggatcggacatcatggcggatgcaggggccatgcagccgctgcctttcgccgagaactttgccatgggtccaagccacttccgcccggagagcgtcgaggagcagatgatgttttccatggccgtgtcactggcagaagctcatcacggtaggacgcaggcgcaagggctggcatggttgtaagttgtaacactaattttgacgcttcggtgcccccctgcccccttcctgttgcgctgccgttccacttgccccgccccgcttctctgttttttttttttttttttggtgccaccttgtttggcattttgctcttttctttctttctctctttttttttgcatgtgttgcttcatggcttgatatagatcttgctatagccctccattgccattgcttatatgtatgtaaaatggaatatgtggaaataggaaagaaaatgggtcagagttcttttgccggc

SEQ ID NO: 9510 - protein, 493 aa, Zea mays subsp. mays
  peptide (1)..(493): Ceres Seq. ID no. 12365975
KNFFKKKKSLPRRLARCDSAYATLPLRTPYVSTVTRGARRRSGGERERERPTDRARVSSPAAAAAAAEADLGGMGNRIGGRRKSGVEERFTRPHGLYEHKDIDQKKLRKLILEAKLAPCYPGADDAAAGGGDLDLEECPICFLYYPSLNRSKCCSKGICTECFLQMKPTHTARPTQCPFCKTPNYAVEYRGVKTKEERSIEQFEEQKVIEAQLRMRQKELQDEEAKMKRKQSRCSSSRTVTPTTEVEYRDICSTSFSVPSYQCTEQGNECCSSEPSCSSQANMRPFHSRHNRDDNVDMNLEDMMVMEAIWRSIQEQGHLVNPVCGSYFPVIEPPSRERQAFVPAAPLEMPHPGGYSCAVAALAEHQAPSMDFSYMSGSSTYPVFDMIRRPCNMSSGSLCGAENSSLDTWSGIAPSCSREVVRDEGECSADHWSEGAEAGTSLRRIGHHGGCRGHAAAAFRRELCHGSKPLPPGERRGADDVFHGRVTGRSSSR

SEQ ID NO: 9511 - protein, 420 aa, Zea mays subsp. mays
  peptide (1)..(420): Ceres Seq. ID no. 12365976
MGNRIGGRRKSGVEERFTRPHGLYEHKDIDQKKLRKLILEAKLAPCYPGADDAAAGGGDLDLEECPICFLYYPSLNRSKCCSKGICTECFLQMKPTHTARPTQCPFCKTPNYAVEYRGVKTKEERSIEQFEEQKVIEAQLRMRQKELQDEEAKMKRKQSRCSSSRTVTPTTEVEYRDICSTSFSVPSYQCTEQGNECCSSEPSCSSQANMRPFHSRHNRDDNVDMNLEDMMVMEAIWRSIQEQGHLVNPVCGSYFPVIEPPSRERQAFVPAAPLEMPHPGGYSCAVAALAEHQAPSMDFSYMSGSSTYPVFDMIRRPCNMSSGSLCGAENSSLDTWSGIAPSCSREVVRDEGECSADHWSEGAEAGTSLRRIGHHGGCRGHAAAAFRRELCHGSKPLPPGERRGADDVFHGRVTGRSSSR

SEQ ID NO: 9512 - protein, 328 aa, Zea mays subsp. mays
  peptide (1)..(328): Ceres Seq. ID no. 12365977
MKPTHTARPTQCPFCKTPNYAVEYRGVKTKEERSIEQFEEQKVIEAQLRMRQKELQDEEAKMKRKQSRCSSSRTVTPTTEVEYRDICSTSFSVPSYQCTEQGNECCSSEPSCSSQANMRPFHSRHNRDDNVDMNLEDMMVMEAIWRSIQEQGHLVNPVCGSYFPVIEPPSRERQAFVPAAPLEMPHPGGYSCAVAALAEHQAPSMDFSYMSGSSTYPVFDMIRRPCNMSSGSLCGAENSSLDTWSGIAPSCSREVVRDEGECSADHWSEGAEAGTSLRRIGHHGGCRGHAAAAFRRELCHGSKPLPPGERRGADDVFHGRVTGRSSSR

SEQ ID NO: 9513 - DNA, 1402 bp, Zea mays subsp. mays
  misc_feature (1)..(1402): Ceres Seq. ID no. 13493652
  misc_feature (1)..(1402): Ortholog of  Ceres SEQ ID NO 14315162 as cited in SEQ ID NO 60005
  misc_feature (1)..(1402): Ortholog of  Ceres SEQ ID NO 13659881 as cited in SEQ ID NO 66938
aaaaaattctagggaacccccactacgcctgcacgcgcccactagctagccaccttagatcggtcgatacagctagctatacccgctagctgcacctctcgctgccgccgcccggccgggccgcgcgagaccgctcaaaattcgcgcgcaccgccacgcggcgcggacatgctgcgggcggcggggagcagctagcaggtagccgagcacggcagggcgacccggcgcgcgatccgccgctgcccgcgtgggcggccgcctatggatctggccgcatggcgggcttccctctaggcggaggaggccacggccgcggcgaccaccaccaccctcacgtgaacccttcctccggctccggctccgactccgcggccgccgcctacctctacacggccgccgccgcgccgcgcggcggcttccagctatggccgcctcacccggcgcaggagcaccaccaccacttctacgcccccaacatcatccgcttcgccgatgaccccgccgcgggctcctcgcgcggcggcaggggctccgccagcggcgccggcgcgggcaccatcagctgccaggactgcggcaaccaggccaagaaggactgcgtccacatgcgctgccgcacctgctgcaagagccggggcttcgactgccccacccatgtcaagtccacctgggtgcccgccgccaagcgccgggagcgccagcagcagcaggccaccggcgccgccgagccctccaagcgccaccgtgacgccgctaccggtgcccagccctcctctaccaccgccacaaccacttcctcgggtgagcagcagcagatggcggtggtggcggagcggttcccgcgggaagtgagctcggaggcgctgttccgctgcgtccgcctgggcccggtcgacgagcccgacgccgaggtggcgtaccagaccagcgtcagcatcgccggccacgtcttcaagggcatcctgcacgacgtcggcccggagccgtcgacggtcgctgcgggcggcggcttccgccacgccaccgaggggtcctcccctagcacggccgcggcgggcgaaggcagcgtcgtggggcccgtctcgtcatcggctgtggtcatggacccgtacccgacgcccggcccgtacggcgccgctcatttcttccacggccatccgaggtgatgatcaaacggccaccatgattgacacggctagctagcctagctgaatctgatgggtttcgttccctttggacatgccatgcatctttccatccactgcttcaatatttgctttactagagggattatcgatcgtcacaaaattgttactagtagcttttatttgtctccgtcctccatccctgttctcgacgatcgatgcataaactgatgagcaccattcatcactgtttcttt

SEQ ID NO: 9514 - protein, 296 aa, Zea mays subsp. mays
  peptide (1)..(296): Ceres Seq. ID no. 13493653
MAGFPLGGGGHGRGDHHHPHVNPSSGSGSDSAAAAYLYTAAAAPRGGFQLWPPHPAQEHHHHFYAPNIIRFADDPAAGSSRGGRGSASGAGAGTISCQDCGNQAKKDCVHMRCRTCCKSRGFDCPTHVKSTWVPAAKRRERQQQQATGAAEPSKRHRDAATGAQPSSTTATTTSSGEQQQMAVVAERFPREVSSEALFRCVRLGPVDEPDAEVAYQTSVSIAGHVFKGILHDVGPEPSTVAAGGGFRHATEGSSPSTAAAGEGSVVGPVSSSAVVMDPYPTPGPYGAAHFFHGHPR

SEQ ID NO: 9515 - protein, 186 aa, Zea mays subsp. mays
  peptide (1)..(186): Ceres Seq. ID no. 13493654
MRCRTCCKSRGFDCPTHVKSTWVPAAKRRERQQQQATGAAEPSKRHRDAATGAQPSSTTATTTSSGEQQQMAVVAERFPREVSSEALFRCVRLGPVDEPDAEVAYQTSVSIAGHVFKGILHDVGPEPSTVAAGGGFRHATEGSSPSTAAAGEGSVVGPVSSSAVVMDPYPTPGPYGAAHFFHGHPR

SEQ ID NO: 9516 - DNA, 1097 bp, Zea mays subsp. mays
  misc_feature (1)..(1097): Ceres Seq. ID no. 13496171
  misc_feature (1)..(1097): Ortholog of  Ceres SEQ ID NO 14314939 as cited in SEQ ID NO 58010
gacctcacttgatccgctcccttcgccgcgacgacgttcctacgcagctgcggtcgacgcgcgcacggcagctcgctcgctagctgatcacgacagctcgctcggctcgaccgaatggcgccgcggctgctggcgtgcttcgggcgcggcgtcgcggcggcgccggacgacgcgactggcgagggccagctggaggcgccccccgctggcccggtgctggtggagctgttcgggtcgcaggggtgcggggcgtcgcccgaggcggacgccgtggcggcgcggctggcgcaggactccgggtccggggacggcgccgtcgtggtgctggcgttccacgtcgactactgggactaccgcgggtggaaggaccccttcgcgtccagcgcctggaccgtgcgccagaaggcctacgtggaggcgctccgcctcgacacgctcttcacgccgcaggtcgtcctgcagggccgcgcgcactgcgtcggcaccgaccaggacgcgctcgcgctggccgtccgcgacgccccgcgctaccccgcgcccgccatcaaggtcacgttccagcggccgagccccgcaacactgcaggcgtcgttcacgggcaccctgcgcagccgcgtggagggcccaggcggcgcgagcgtgctggtggcgctgtacgagagcgggctggtgaccgactgcgggcgcggcgagaacaagggcaagtcgctgctcaacgaccacgtggtgcgccgtctcgagaaggtggccgccgtgcgggagggcgcctcgccgaagaagaccgtgtcgggcaccgtccagttcccgctctgggacggctttcgcgccaccaagtgcggcctcgtgctcttcgtccagaacgccgcgctgcaggtgctcgacgtccagcacttcgacctgcctgacaacgtctgagctcgtgacgcggtggggcgcgcgcgcgttccgcgttggctgcctccctgcggcgggcgtcacattctttgtatcactgtatgtagtacatcactggatggtatttagatggaaaacctgagtattctttatctccacgtatgttcttgttctgcattatggcaatggatcttctgttttgc

SEQ ID NO: 9517 - protein, 266 aa, Zea mays subsp. mays
  peptide (1)..(266): Ceres Seq. ID no. 13496172
MAPRLLACFGRGVAAAPDDATGEGQLEAPPAGPVLVELFGSQGCGASPEADAVAARLAQDSGSGDGAVVVLAFHVDYWDYRGWKDPFASSAWTVRQKAYVEALRLDTLFTPQVVLQGRAHCVGTDQDALALAVRDAPRYPAPAIKVTFQRPSPATLQASFTGTLRSRVEGPGGASVLVALYESGLVTDCGRGENKGKSLLNDHVVRRLEKVAAVREGASPKKTVSGTVQFPLWDGFRATKCGLVLFVQNAALQVLDVQHFDLPDNV

SEQ ID NO: 9518 - protein, 223 aa, Zea mays subsp. mays
  peptide (1)..(223): Ceres Seq. ID no. 13496173
TSLDPLPSPRRRSYAAAVDARTAARSLADHDSSLGSTEWRRGCWRASGAASRRRRTTRLARASWRRPPLARCWWSCSGRRGAGRRPRRTPWRRGWRRTPGPGTAPSWCWRSTSTTGTTAGGRTPSRPAPGPCARRPTWRRSASTRSSRRRSSCRAARTASAPTRTRSRWPSATPRATPRPPSRSRSSGRAPQHCRRRSRAPCAAAWRAQAARACWWRCTRAGW

SEQ ID NO: 9519 - DNA, 1017 bp, Zea mays subsp. mays
  misc_feature (1)..(1017): Ceres Seq. ID no. 12357240
  misc_feature (1)..(1017): Ortholog of  Ceres SEQ ID NO 13655712 as cited in SEQ ID NO 63394
actctcgctgtttcctgcgtgatctgcttgtgtagctactagctagctagcggagcggaacccatgggctgcgaggaggaagagaggctgctgttcccgtccttcgtctttcccgagagcttcgcggaggccgccacccccggctccggtggtgagcagaagaaggctcggcagcgtcggaggcgcaagccgcggccggcggagggcggcgagggcgcggacgagcaggccaggaagcggcggctgagcgacgaccaggcgcggttcctggagctcagcttcaggaaggagcgcaagctggagacgccccgcaaggtgcagctggccgccgatctgggcctcgacgccaagcaggtggccgtctggttccagaaccgccgcgcccgccacaagagcaagctcatggaggaggagttctccaagctccgcgccgcgcacgacgccgtcgtcctccacaactgccacctcgagaccgagctgctgaagatgaaggacaggctggcggaggtggaggaggagaagacgaagctcgtcgcggcggcggcggcggcggccggcggcgcagcgggcgcagggagcagcagcccgagctcgtcgtcgttctcgacggtgacgcaccacccggccgcggcgctgcaggtggggcagttcggggtggagccggaggaggccgccgacctcgcctacatgaccgagtacgcctacaacagctacatgaacatgatggacctcgcgcccggctacttcggcggagtcgtctacgactacgaccacttcaactgatccacgagcatgcaggaggaggaggagggaagctacaagacgaaggaaggattgactggcctatcagctaggtactattttcgtgttaatggatggatggaccgatttgcagggcgcgcgtagcagtagtagcaatcaaggtcactagtatagtctgtcagtacgacgacgtcgatcagtcaatgtctcccctgacgataattattaagtcgatctattcagtagtaacttgtt

SEQ ID NO: 9520 - protein, 239 aa, Zea mays subsp. mays
  peptide (1)..(239): Ceres Seq. ID no. 12357241
MGCEEEERLLFPSFVFPESFAEAATPGSGGEQKKARQRRRRKPRPAEGGEGADEQARKRRLSDDQARFLELSFRKERKLETPRKVQLAADLGLDAKQVAVWFQNRRARHKSKLMEEEFSKLRAAHDAVVLHNCHLETELLKMKDRLAEVEEEKTKLVAAAAAAAGGAAGAGSSSPSSSSFSTVTHHPAAALQVGQFGVEPEEAADLAYMTEYAYNSYMNMMDLAPGYFGGVVYDYDHFN

SEQ ID NO: 9521 - protein, 126 aa, Zea mays subsp. mays
  peptide (1)..(126): Ceres Seq. ID no. 12357242
MEEEFSKLRAAHDAVVLHNCHLETELLKMKDRLAEVEEEKTKLVAAAAAAAGGAAGAGSSSPSSSSFSTVTHHPAAALQVGQFGVEPEEAADLAYMTEYAYNSYMNMMDLAPGYFGGVVYDYDHFN

SEQ ID NO: 9522 - DNA, 1695 bp, Zea mays subsp. mays
  misc_feature (1)..(1695): Ceres Seq. ID no. 12374922
  misc_feature (1)..(1695): Ortholog of  Ceres SEQ ID NO 14302251 as cited in SEQ ID NO 62093
catccggatgagggggaaggaagacgataccagacgctactcctacaactcaccaccactacactatcccctccgctctctctccgcactactgcgtattaggtagcctctcgcattgacaagccagccggtggtttggttcgctttgctttgcttacgtgctgcgctgcgcgctccgaccaggcccgccccgaccggcgatgcagcggtggctcccggcgctcctccgccgcgcggcgcccggcggcggcgcggcgcggctcctcgccacgtcctccctcctcttcgacgacacgcaggagcagttcaaggagagcgtgcgcaagttcgcgcaggaggccatcgcgccgcgcgccgcggccatcgacgcctccaaccacttcccgcgggacgtggacctgtggaggctcatgggggacttcaacctccacggcctcaccgcgcccgaggagtacggcgggatggggctcgggtacatgtaccactgcatcgccatggaggagatcaccagggcatccggcgccgtcggcctctcctacggcgcgcactccaacctctgcatcaaccagctcgtccggcacggaaacccggagcagaagctcaagtatctgcccaagctgatcagtggggagcatatcggggcactggcgatgagtgaacccaactctggctctgatgtcgtcagcatgaagtgcaaagctgagaaagtggacggtggctatgtccttaatgggaataagatgtggtgcaccaatggcccgtctgctcagacactggttgtttacgcaaaaacagatctagctgcagggtcaaaaggaataactgcattcataatcgagaaagggatgcccgggttcagtactgctcagaagttggacaaacttggcatgagaggaagcgacacgtgtgagcttgtttttgagaactgctttgtgccatgcgaaaatgtcctcggtgaagaaggcaaaggtgtttatgtcatgatgtcagggcttgatctggaaaggcttgtattagctgcgggccctattggccttatgcaggcatgccttgatgttgtacttccatatgttcgccagagggagcaattcggccgtccaattggtgaatttcagttcatacaggggaaaatggctgatatgtacacttcgttgcagtcgtcaagatcatttgtatactcagttgctagggactgcgataatggcaaagttgatcgcaaggattgtgcaggagtaattctctttgctgctgaaaatgcaacccaagttgcacttcaggcaatccagtgtcttggtggaaatgggtacataaatgagtacccaactggtcgtctcctgagagatgcaaaattgtttgagattggtgccggtactagtgaggtaagaagaatgataattggccgtgagctcttcaaagaggactgaaacttctattttgcaagccagatatcagagcatattgttagctggaggaggtgagggcgatttagatatttagcaaatcacccctgtggttcaatgcttttgtataaccgcagacatacatcaaataaagttcacttgtacttgctgcttgcagtggctctatttttctgtcaataaagttttttatgtctctgacttatgcaatgttgttcagttgcattttactatattagtgtagacaagacagtaatataaatgtttcaatgagtgc

SEQ ID NO: 9523 - protein, 407 aa, Zea mays subsp. mays
  peptide (1)..(407): Ceres Seq. ID no. 12374923
MQRWLPALLRRAAPGGGAARLLATSSLLFDDTQEQFKESVRKFAQEAIAPRAAAIDASNHFPRDVDLWRLMGDFNLHGLTAPEEYGGMGLGYMYHCIAMEEITRASGAVGLSYGAHSNLCINQLVRHGNPEQKLKYLPKLISGEHIGALAMSEPNSGSDVVSMKCKAEKVDGGYVLNGNKMWCTNGPSAQTLVVYAKTDLAAGSKGITAFIIEKGMPGFSTAQKLDKLGMRGSDTCELVFENCFVPCENVLGEEGKGVYVMMSGLDLERLVLAAGPIGLMQACLDVVLPYVRQREQFGRPIGEFQFIQGKMADMYTSLQSSRSFVYSVARDCDNGKVDRKDCAGVILFAAENATQVALQAIQCLGGNGYINEYPTGRLLRDAKLFEIGAGTSEVRRMIIGRELFKED

SEQ ID NO: 9524 - protein, 337 aa, Zea mays subsp. mays
  peptide (1)..(337): Ceres Seq. ID no. 12374924
MGDFNLHGLTAPEEYGGMGLGYMYHCIAMEEITRASGAVGLSYGAHSNLCINQLVRHGNPEQKLKYLPKLISGEHIGALAMSEPNSGSDVVSMKCKAEKVDGGYVLNGNKMWCTNGPSAQTLVVYAKTDLAAGSKGITAFIIEKGMPGFSTAQKLDKLGMRGSDTCELVFENCFVPCENVLGEEGKGVYVMMSGLDLERLVLAAGPIGLMQACLDVVLPYVRQREQFGRPIGEFQFIQGKMADMYTSLQSSRSFVYSVARDCDNGKVDRKDCAGVILFAAENATQVALQAIQCLGGNGYINEYPTGRLLRDAKLFEIGAGTSEVRRMIIGRELFKED

SEQ ID NO: 9525 - protein, 320 aa, Zea mays subsp. mays
  peptide (1)..(320): Ceres Seq. ID no. 12374925
MGLGYMYHCIAMEEITRASGAVGLSYGAHSNLCINQLVRHGNPEQKLKYLPKLISGEHIGALAMSEPNSGSDVVSMKCKAEKVDGGYVLNGNKMWCTNGPSAQTLVVYAKTDLAAGSKGITAFIIEKGMPGFSTAQKLDKLGMRGSDTCELVFENCFVPCENVLGEEGKGVYVMMSGLDLERLVLAAGPIGLMQACLDVVLPYVRQREQFGRPIGEFQFIQGKMADMYTSLQSSRSFVYSVARDCDNGKVDRKDCAGVILFAAENATQVALQAIQCLGGNGYINEYPTGRLLRDAKLFEIGAGTSEVRRMIIGRELFKED

SEQ ID NO: 9526 - DNA, 1058 bp, Zea mays subsp. mays
  misc_feature (1)..(1058): Ceres Seq. ID no. 12381373
  misc_feature (1)..(1058): Ortholog of  Ceres SEQ ID NO 14305363 as cited in SEQ ID NO 1276
  misc_feature (1)..(1058): Ortholog of  Ceres SEQ ID NO 14314743 as cited in SEQ ID NO 56854
acacccttctactagagcagctgagctgagagtgacagcagcggagcggcaatggcgcagatgctcctcctcctcctcctccttgccgcacccacagtgccagcggaggcagcagccaccgcctccactccgacgctcgtgttcctcctggccgggcagtccaacatgggcggccgcggcggcgccaccaacggcacctgggacggcgtggtgccgcccgcgtgcgcgccttccccgcgcatcctccgcctctccccgtccctgcgctgggaggaggccagggagccgctgcacgccggcattgacctgcacaacgtgctcggcgtgggccccgggatgcccttcgcgcacgcgctcctccgctcctggcgccgctccggccgccgccccgccgtggtggggctggtcccctgcgcgcagggcgccacgcccatcgccagctggtcccgcggcacgccgctgtacgaccgcatgctcgcgcgcgcaagggccgccgtcgcccgcgggcccgccaccaggctggccgcgctgctctggtaccagggcgaggccgacaccatcaggcgccaggacgccgacgcctacacgccccgcatggaggccttggtccgcgacgtccgccgggacctgggcatgccggacctgctggtcatccaggtggggctggccacggggcagggcaggttcgtggacatcgtcagggaggcgcagaggagggtcagcctccgcaacgtcaggtacgtggacgccaagggcctgcccgtcgccaacgactacacgcatctgacaacgccggcgcaggtcaagctcggcaacatgctcgccgccgcctacatggcagcgacacacacgcactgactgagccatctactacctcgattcttaatcaattctacttgactactcagtaattgagccagcaagcagcaagcaacgctacgccgttctactttaattttgttctgcacatgtccttactatgcataacatcctttgctttgacgatgatgatttagcatcctttgatgatggtactcaaatagaatattcttcttttt

SEQ ID NO: 9527 - protein, 268 aa, Zea mays subsp. mays
  peptide (1)..(268): Ceres Seq. ID no. 12381374
MAQMLLLLLLLAAPTVPAEAAATASTPTLVFLLAGQSNMGGRGGATNGTWDGVVPPACAPSPRILRLSPSLRWEEAREPLHAGIDLHNVLGVGPGMPFAHALLRSWRRSGRRPAVVGLVPCAQGATPIASWSRGTPLYDRMLARARAAVARGPATRLAALLWYQGEADTIRRQDADAYTPRMEALVRDVRRDLGMPDLLVIQVGLATGQGRFVDIVREAQRRVSLRNVRYVDAKGLPVANDYTHLTTPAQVKLGNMLAAAYMAATHTH

SEQ ID NO: 9528 - protein, 265 aa, Zea mays subsp. mays
  peptide (1)..(265): Ceres Seq. ID no. 12381375
MLLLLLLLAAPTVPAEAAATASTPTLVFLLAGQSNMGGRGGATNGTWDGVVPPACAPSPRILRLSPSLRWEEAREPLHAGIDLHNVLGVGPGMPFAHALLRSWRRSGRRPAVVGLVPCAQGATPIASWSRGTPLYDRMLARARAAVARGPATRLAALLWYQGEADTIRRQDADAYTPRMEALVRDVRRDLGMPDLLVIQVGLATGQGRFVDIVREAQRRVSLRNVRYVDAKGLPVANDYTHLTTPAQVKLGNMLAAAYMAATHTH

SEQ ID NO: 9529 - protein, 261 aa, Zea mays subsp. mays
  peptide (1)..(261): Ceres Seq. ID no. 12381376
HPSTRAAELRVTAAERQWRRCSSSSSSLPHPQCQRRQQPPPPLRRSCSSWPGSPTWAAAAAPPTAPGTAWCRPRARLPRASSASPRPCAGRRPGSRCTPALTCTTCSAWAPGCPSRTRSSAPGAAPAAAPPWWGWSPARRAPRPSPAGPAARRCTTACSRAQGPPSPAGPPPGWPRCSGTRARPTPSGARTPTPTRPAWRPWSATSAGTWACRTCWSSRWGWPRGRAGSWTSSGRRRGGSASATSGTWTPRACPSPTTTRI

SEQ ID NO: 9530 - DNA, 1784 bp, Zea mays subsp. mays
  misc_feature (1)..(1784): Ceres Seq. ID no. 12414416
  misc_feature (1)..(1784): Ortholog of  Ceres SEQ ID NO 14307273 as cited in SEQ ID NO 54302
  misc_feature (1)..(1784): Ortholog of  Ceres SEQ ID NO 14315317 as cited in SEQ ID NO 58242
  misc_feature (1)..(1784): Ortholog of  Ceres SEQ ID NO 13655375 as cited in SEQ ID NO 63347
  misc_feature (1)..(1784): Ortholog of  Ceres SEQ ID NO 12626166 as cited in SEQ ID NO 64505
  misc_feature (1)..(1784): Ortholog of  Ceres SEQ ID NO 14301599 as cited in SEQ ID NO 65699
  misc_feature (1)..(1784): Ortholog of  Ceres SEQ ID NO 14301978 as cited in SEQ ID NO 0
  misc_feature (1)..(1784): Ortholog of  Ceres SEQ ID NO 14303290 as cited in SEQ ID NO 0
gcacgagaccattacctagaacatcctaatcaaaaaaccacactctcgtctccctcctccccgttccttattcgccagaccggagggaggggtacgagcttcaccgctttcatcccgcccgcgctcctccccagatctcgtctccattaaagccgaccttgcccagattcgcgccctcctcgctcatatctgaaagcggctctgattttccaatccgaccgcaggagcggtgcaccgggccgcgtgattccggcggcttgatttggaatttgtgatctttcggggcattcgtcggtttgtctgtcggtgccggtggtgctgcgttttcgagggcagcgaagatgggtgtcggcggagagaagttccagctggggacggtgggggcgctgagcctatccgtggtctcctccgtctccattgtcatctgcaacaaggccctcatgagctccctcggctttaacttcgccactaccttgacaagctggcatctgctggttacattctgctcccttcatgtggcattatggatgaaattctttgagcataagccttttgattcaagaactgtcatgggatttggagtacttaatggaatctccattgggctcctcaacttgagtcttggcttcaactctgttgggttttaccagatgactaagctggcgatcatcccgtgcactgtcatcttagagacacttttcttcaggaagaagttcagtcggagtatccagatgtccctttctgtgctccttcttggtgttggtgttgcaactgtcactgatctgcaactcaatgctgtgggatccatactctccttgctggcaattatcacgacttgcattgctcaaattatgacaaacactatccagaagaagttcaaggtctcatcgacccaactgctctaccagtcttgcccttatcaatcactgaccctgtttctcattggccccttccttgatggctttttgactaaccaaaacgtctttgcttttaattatacatcacaagttgtgtttttcattgtgttgtcatgcctgatatcggtctcagtgaacttcagcacttttcttgtgattggaaagacgtctcctgttacttaccaagtcctgggccatcttaaaacatgccttgttcttacctttggttatgttttgcttcatgacccatttagctggagaaacatacttgggatcctaattgcagtagttggaatggtcttatattcatacttctgcacagtggagacccagcataagaacactgaagtctccccacagcaggtgaaagaaagtgaggcagcccctttgatctcagactctttgagcaaagttgaaaatgggggcggtgttgttgatgacgagcctttgaaggtacccatgtggagctcaaagtattcgcgggagtgaaattttctcccgctagacggtggcatcatacaggattcagtttagtaggcagatagtagggttggaagccaacccagagtgtaatgaacatttgagttacattttttggccttttttagcgtcacgatctactactggtaaaagggtctgtttcttgggaggatcttaccttcaggattgccagatatacattgaaactagacggcagatattgtatgatttgtatctggacatgttccacatcgtctaactgtaacttccaactggtacatggcatgcctatatccaaagatagatttcatttttttttgtatcagaaagatccggacaagacttgtgcaaaatttgtagtactattggttcgagtttgttgctttc

SEQ ID NO: 9531 - protein, 354 aa, Zea mays subsp. mays
  peptide (1)..(354): Ceres Seq. ID no. 12414417
MGVGGEKFQLGTVGALSLSVVSSVSIVICNKALMSSLGFNFATTLTSWHLLVTFCSLHVALWMKFFEHKPFDSRTVMGFGVLNGISIGLLNLSLGFNSVGFYQMTKLAIIPCTVILETLFFRKKFSRSIQMSLSVLLLGVGVATVTDLQLNAVGSILSLLAIITTCIAQIMTNTIQKKFKVSSTQLLYQSCPYQSLTLFLIGPFLDGFLTNQNVFAFNYTSQVVFFIVLSCLISVSVNFSTFLVIGKTSPVTYQVLGHLKTCLVLTFGYVLLHDPFSWRNILGILIAVVGMVLYSYFCTVETQHKNTEVSPQQVKESEAAPLISDSLSKVENGGGVVDDEPLKVPMWSSKYSRE

SEQ ID NO: 9532 - protein, 321 aa, Zea mays subsp. mays
  peptide (1)..(321): Ceres Seq. ID no. 12414418
MSSLGFNFATTLTSWHLLVTFCSLHVALWMKFFEHKPFDSRTVMGFGVLNGISIGLLNLSLGFNSVGFYQMTKLAIIPCTVILETLFFRKKFSRSIQMSLSVLLLGVGVATVTDLQLNAVGSILSLLAIITTCIAQIMTNTIQKKFKVSSTQLLYQSCPYQSLTLFLIGPFLDGFLTNQNVFAFNYTSQVVFFIVLSCLISVSVNFSTFLVIGKTSPVTYQVLGHLKTCLVLTFGYVLLHDPFSWRNILGILIAVVGMVLYSYFCTVETQHKNTEVSPQQVKESEAAPLISDSLSKVENGGGVVDDEPLKVPMWSSKYSRE

SEQ ID NO: 9533 - protein, 292 aa, Zea mays subsp. mays
  peptide (1)..(292): Ceres Seq. ID no. 12414419
MKFFEHKPFDSRTVMGFGVLNGISIGLLNLSLGFNSVGFYQMTKLAIIPCTVILETLFFRKKFSRSIQMSLSVLLLGVGVATVTDLQLNAVGSILSLLAIITTCIAQIMTNTIQKKFKVSSTQLLYQSCPYQSLTLFLIGPFLDGFLTNQNVFAFNYTSQVVFFIVLSCLISVSVNFSTFLVIGKTSPVTYQVLGHLKTCLVLTFGYVLLHDPFSWRNILGILIAVVGMVLYSYFCTVETQHKNTEVSPQQVKESEAAPLISDSLSKVENGGGVVDDEPLKVPMWSSKYSRE

SEQ ID NO: 9534 - DNA, 878 bp, Zea mays subsp. mays
  misc_feature (1)..(878): Ceres Seq. ID no. 12435195
  misc_feature (1)..(878): Ortholog of  Ceres SEQ ID NO 14306309 as cited in SEQ ID NO 1394
  misc_feature (1)..(878): Ortholog of  Ceres SEQ ID NO 13595377 as cited in SEQ ID NO 56088
  misc_feature (1)..(878): Ortholog of  Ceres SEQ ID NO 12618538 as cited in SEQ ID NO 64474
  misc_feature (1)..(878): Ortholog of  Ceres SEQ ID NO 13598648 as cited in SEQ ID NO 64497
acaaccatcaggacgcggacgcggacgcggctcacatcaaacacccccttcagctgtgctcagtgctcactgccgcaaaaccacagccacacaggcaacaagcgcccagcgccctttcacatcaccacatccaccgtccacgctcctccgttccatggccatgtcgagcagcgccagcaagaagcaagcccaggcccagaaggccgggcggaggcccccggcggtgtcgtcggccgcggccgcggacgcggagatgcagagggtgttctcgcgcatcgacgcggacggcgacgggcggatctcgccgtcggagctggcggcggtgtcgcgcgccatctccccgccggcgagctcctcgcacgggcggcgcgaggtggcggccatgatggaggagctggacacggaccgcgacggcttcgtggacctgggcgagttcagggcgttccacgcgcgcggcgttggcggcggcggggacgacgacgacgacgcggagctccgcgccgccttcgccgtgtacgacgccgacggcgacgggcgcatcacggcggccgagctgggcagcgtgctcgcccgcatcggcgaggggtgcagcgccgaggagtgccgccggatgatcgccggcgtcgacgccgacggcgacggctgcgtcgggttcgaggagttcaagatcatgatgcgcggcccccagccccagccccagccccaggccggcgccggactgactgccgtgccggacaaggccaagaaggagtgacgggtgtaggtgtaggtgtactcatcagggcatcagtcgggggggaaagggatcgggttcctctgcctcttctgttgctttcacctagtctggactggaggaatggaaatactcaacttcctgc

SEQ ID NO: 9535 - protein, 292 aa, Zea mays subsp. mays
  peptide (1)..(292): Ceres Seq. ID no. 12435196
TTIRTRTRTRLTSNTPFSCAQCSLPQNHSHTGNKRPAPFHITTSTVHAPPFHGHVEQRQQEASPGPEGRAEAPGGVVGRGRGRGDAEGVLAHRRGRRRADLAVGAGGGVARHLPAGELLARAARGGGHDGGAGHGPRRLRGPGRVQGVPRARRWRRRGRRRRRGAPRRLRRVRRRRRRAHHGGRAGQRARPHRRGVQRRGVPPDDRRRRRRRRRLRRVRGVQDHDARPPAPAPAPGRRRTDCRAGQGQEGVTGVGVGVLIRASVGGERDRVPLPLLLLSPSLDWRNGNTQLP

SEQ ID NO: 9536 - protein, 250 aa, Zea mays subsp. mays
  peptide (1)..(250): Ceres Seq. ID no. 12435197
QPSGRGRGRGSHQTPPSAVLSAHCRKTTATQATSAQRPFTSPHPPSTLLRSMAMSSSASKKQAQAQKAGRRPPAVSSAAAADAEMQRVFSRIDADGDGRISPSELAAVSRAISPPASSSHGRREVAAMMEELDTDRDGFVDLGEFRAFHARGVGGGGDDDDDAELRAAFAVYDADGDGRITAAELGSVLARIGEGCSAEECRRMIAGVDADGDGCVGFEEFKIMMRGPQPQPQPQAGAGLTAVPDKAKKE

SEQ ID NO: 9537 - protein, 199 aa, Zea mays subsp. mays
  peptide (1)..(199): Ceres Seq. ID no. 12435198
MAMSSSASKKQAQAQKAGRRPPAVSSAAAADAEMQRVFSRIDADGDGRISPSELAAVSRAISPPASSSHGRREVAAMMEELDTDRDGFVDLGEFRAFHARGVGGGGDDDDDAELRAAFAVYDADGDGRITAAELGSVLARIGEGCSAEECRRMIAGVDADGDGCVGFEEFKIMMRGPQPQPQPQAGAGLTAVPDKAKKE

SEQ ID NO: 9538 - DNA, 807 bp, Zea mays subsp. mays
  misc_feature (1)..(807): Ceres Seq. ID no. 13496185
  misc_feature (1)..(807): Ortholog of  Ceres SEQ ID NO 14306309 as cited in SEQ ID NO 1394
acacaggcaacaagcgcccagcgccccttcacatcaccacatccacgttcctccgtttcacggccatgtcgagcagcgccagcaagaagcaggcccaggcccagaaggccgggcggaggcccccggcggtgtcgtcggccgcggccgcggccgcggacgcggagatgcagagggtgttctcgcgcatcgacgcggacggcgacgggcggatctcgccgtcggagctggcggcggtgtcgcgcgccatctccccgccggcgagctcctcgcacgggcggcgcgaggtggcggccatgatggaggagctggacacggaccgcgacggcttcgtggacctgggcgagttcagggcgttccacgcgcgcggcggcggcgtcgtcgccgccgctgtcatcgccgccgccgccccggtttccttcgtaagcccgtcgtcctccgtccgcgactctgcgcgagaagcgagagtatggacacccaagtgaagcttgctgttgtggtgaaggtgatgggaaggaccggctccaggggtcaggttacccaggtcagagtgaagttcttggatgaccagaaccgtctcatcatgaggaacgtcaagggaccggttcgcgagggagacatcctcacactgctcgagtctgagagggaggctaggaggctgcgttgaggcggaatagtgtcttggtagttttcgtatggagttggatgtcatctaattgtgctatgtttgtcaaactttggtatgaccttcaaaacacctgccttgtatgattatttgtgagcctggtgataagattgcagtttggtttt

SEQ ID NO: 9539 - protein, 220 aa, Zea mays subsp. mays
  peptide (1)..(220): Ceres Seq. ID no. 13496186
HRQQAPSAPSHHHIHVPPFHGHVEQRQQEAGPGPEGRAEAPGGVVGRGRGRGRGDAEGVLAHRRGRRRADLAVGAGGGVARHLPAGELLARAARGGGHDGGAGHGPRRLRGPGRVQGVPRARRRRRRRRCHRRRRPGFLRKPVVLRPRLCARSESMDTQVKLAVVVKVMGRTGSRGQVTQVRVKFLDDQNRLIMRNVKGPVREGDILTLLESEREARRLR

SEQ ID NO: 9540 - protein, 159 aa, Zea mays subsp. mays
  peptide (1)..(159): Ceres Seq. ID no. 13496187
TGNKRPAPLHITTSTFLRFTAMSSSASKKQAQAQKAGRRPPAVSSAAAAAADAEMQRVFSRIDADGDGRISPSELAAVSRAISPPASSSHGRREVAAMMEELDTDRDGFVDLGEFRAFHARGGGVVAAAVIAAAAPVSFVSPSSSVRDSAREARVWTPK

SEQ ID NO: 9541 - protein, 138 aa, Zea mays subsp. mays
  peptide (1)..(138): Ceres Seq. ID no. 13496188
MSSSASKKQAQAQKAGRRPPAVSSAAAAAADAEMQRVFSRIDADGDGRISPSELAAVSRAISPPASSSHGRREVAAMMEELDTDRDGFVDLGEFRAFHARGGGVVAAAVIAAAAPVSFVSPSSSVRDSAREARVWTPK

SEQ ID NO: 9542 - DNA, 1768 bp, Zea mays subsp. mays
  misc_feature (1)..(1768): Ceres Seq. ID no. 12416821
  misc_feature (1)..(1768): Ortholog of  Ceres SEQ ID NO 13597446 as cited in SEQ ID NO 64098
  misc_feature (1)..(1768): Ortholog of  Ceres SEQ ID NO 15226246 as cited in SEQ ID NO 68314
ctttagagaaggtgtacccccaatattccattaccggcccactgacgagagagagagagagagattttggcgtgactatccagagtccccaatcttacacctaaaaactcttctcagctaccggtgcggcatatcgcccctatcggcggcgaacatttgagttctcgcgacgtgtcctcgaggattctgtggtggaagatcggatcttttgctgcgggttccagttgccaaccagagatgtcggctctcctcgatctactgatggggatctttcgccagcagaccctcggcggcgccgccctggagctcgccgcgctggcggcgccgctctcgctcgccgccctcgtcggccttctcatcgggtgggcatggcgcccgaggtgggcgggggtcgtcgtcttcgacaacgcccaacagatggcgcagctccccgcggcggcggcgcctccggaccgcgccaccgccaccaccaccgcggtggtatctcgcaacgaggcggccgccgtcgtaccgagaactgtggtggctcatgcggcggccgaggacgagcagcagcagctggcggtcaacaccggtgacttgattcacctctggcggctcgtcgacgagaaggacggtggcccgtcgtggattcacatgatggaccgcaccttaccaaccatgaggtaccaagcctggcggagagacccaccgagtggtccaccacagtaccgcagcagcacaatcttggaagatgcgtcaccagaggttgtgagagatttcttctgggacgacgagttccggatgaacaacagctgggacgacatgcttcttcagcacgagacgctggaggagtgcaccgagactggaaccatggttgtccggtgggtcaggaagttcccgttcttctgcagcgacagggagtacatcataggccgcaggatatgggcgtctgggaagacattttactgtgtgaccaagggtgttcctcgtccctccgttccaagacaaaacaaacctcgccgtgtggacttgtactactctagctggtgcatccgtccagttgagtcgagaaaaggcgacggtgcaatgagtgcatgcgaggtgctcttgttccaccacgaggacatggggattccatgggagatcgcgaagcttggcgtccggcaggggatgtggggctgcgtcaagaggatagagcctggccttcgggcgtaccaggttgggaggaccgccggagaggctgtttccaagtgtgctgccatggcacaggtcaccaccaggttcagtgccgacgagctcgtcatcgcagggccgggcaacacggaggccagttcttcttcgtccggcgacggcgcagaggttgacaaggcgacgaagcactgggcgaacagcatacccaaggttctcatggtcggtggcgctgtggccctggcctgctgcaccttcgacggtgggttgttgaccaaggccgtcatcttcggcactgccaggaggtttgcaggagggccaggaaggcggtaggtacggtgtaacggtggacggaaagatccagcggcacaacacaaaacaagtgttgctgcactgcagcccgctgcgggttaataggttagaaatatagcatttgttacgaggaaacatagaagtattatgcaagaaaaccgctgttagataagaaatacactgctgtgtattagtagttaataacaagagttcttggtttttgtatgtaaccatattgtggatcggatccattgttcttccccatggacactactactaccagtct

SEQ ID NO: 9543 - protein, 421 aa, Zea mays subsp. mays
  peptide (1)..(421): Ceres Seq. ID no. 12416822
MSALLDLLMGIFRQQTLGGAALELAALAAPLSLAALVGLLIGWAWRPRWAGVVVFDNAQQMAQLPAAAAPPDRATATTTAVVSRNEAAAVVPRTVVAHAAAEDEQQQLAVNTGDLIHLWRLVDEKDGGPSWIHMMDRTLPTMRYQAWRRDPPSGPPQYRSSTILEDASPEVVRDFFWDDEFRMNNSWDDMLLQHETLEECTETGTMVVRWVRKFPFFCSDREYIIGRRIWASGKTFYCVTKGVPRPSVPRQNKPRRVDLYYSSWCIRPVESRKGDGAMSACEVLLFHHEDMGIPWEIAKLGVRQGMWGCVKRIEPGLRAYQVGRTAGEAVSKCAAMAQVTTRFSADELVIAGPGNTEASSSSSGDGAEVDKATKHWANSIPKVLMVGGAVALACCTFDGGLLTKAVIFGTARRFAGGPGRR

SEQ ID NO: 9544 - protein, 413 aa, Zea mays subsp. mays
  peptide (1)..(413): Ceres Seq. ID no. 12416823
MGIFRQQTLGGAALELAALAAPLSLAALVGLLIGWAWRPRWAGVVVFDNAQQMAQLPAAAAPPDRATATTTAVVSRNEAAAVVPRTVVAHAAAEDEQQQLAVNTGDLIHLWRLVDEKDGGPSWIHMMDRTLPTMRYQAWRRDPPSGPPQYRSSTILEDASPEVVRDFFWDDEFRMNNSWDDMLLQHETLEECTETGTMVVRWVRKFPFFCSDREYIIGRRIWASGKTFYCVTKGVPRPSVPRQNKPRRVDLYYSSWCIRPVESRKGDGAMSACEVLLFHHEDMGIPWEIAKLGVRQGMWGCVKRIEPGLRAYQVGRTAGEAVSKCAAMAQVTTRFSADELVIAGPGNTEASSSSSGDGAEVDKATKHWANSIPKVLMVGGAVALACCTFDGGLLTKAVIFGTARRFAGGPGRR

SEQ ID NO: 9545 - protein, 361 aa, Zea mays subsp. mays
  peptide (1)..(361): Ceres Seq. ID no. 12416824
MAQLPAAAAPPDRATATTTAVVSRNEAAAVVPRTVVAHAAAEDEQQQLAVNTGDLIHLWRLVDEKDGGPSWIHMMDRTLPTMRYQAWRRDPPSGPPQYRSSTILEDASPEVVRDFFWDDEFRMNNSWDDMLLQHETLEECTETGTMVVRWVRKFPFFCSDREYIIGRRIWASGKTFYCVTKGVPRPSVPRQNKPRRVDLYYSSWCIRPVESRKGDGAMSACEVLLFHHEDMGIPWEIAKLGVRQGMWGCVKRIEPGLRAYQVGRTAGEAVSKCAAMAQVTTRFSADELVIAGPGNTEASSSSSGDGAEVDKATKHWANSIPKVLMVGGAVALACCTFDGGLLTKAVIFGTARRFAGGPGRR

SEQ ID NO: 9546 - DNA, 533 bp, Zea mays subsp. mays
  misc_feature (1)..(533): Ceres Seq. ID no. 12348236
  misc_feature (1)..(533): Ortholog of  Ceres SEQ ID NO 13595556 as cited in SEQ ID NO 56727
ctagctgatgaattgagagcaacggtcgcagatgaatttgtcaagaggcggaaagagaccgaatggttcgttgagggggattttgatacatatgtatcccatattagggagccacatgtgtggggaggcgagccagaattgttcatggcgtcccatgttcttcagatgccaataacggtttacatgcgcgacgaggatgctggcggtctgatagcaatcgcagagtatggccagcagtatggtaaagaagacccaatccaagtcctgtatcatggttttggccattacgacgcactacagatcccagcaaaggttggttcgaagaggaaactgtagacgccggcgtgagcttgaggtacgctccttgttccagtgtttatacaaccttgtcgaacacactcatgctatatgcatgcgagtgcggaagaagacagcttaacatgaaatggcgttagttcgcgccatgcataaatgttattacatgattcatgtacttccccaggagcagatgagttggaacagagcatcacttc

SEQ ID NO: 9547 - protein, 111 aa, Zea mays subsp. mays
  peptide (1)..(111): Ceres Seq. ID no. 12348237
LADELRATVADEFVKRRKETEWFVEGDFDTYVSHIREPHVWGGEPELFMASHVLQMPITVYMRDEDAGGLIAIAEYGQQYGKEDPIQVLYHGFGHYDALQIPAKVGSKRKL

SEQ ID NO: 9548 - protein, 70 aa, Zea mays subsp. mays
  peptide (1)..(70): Ceres Seq. ID no. 12348238
MASSMVKKTQSKSCIMVLAITTHYRSQQRLVRRGNCRRRRELEVRSLFQCLYNLVEHTHAICMRVRKKTA

SEQ ID NO: 9549 - protein, 66 aa, Zea mays subsp. mays
  peptide (1)..(66): Ceres Seq. ID no. 12348239
MVKKTQSKSCIMVLAITTHYRSQQRLVRRGNCRRRRELEVRSLFQCLYNLVEHTHAICMRVRKKTA

SEQ ID NO: 9550 - protein, 63 aa, Zea mays subsp. mays
  peptide (1)..(63): Ceres Seq. ID no. 12348240
MASHVLQMPITVYMRDEDAGGLIAIAEYGQQYGKEDPIQVLYHGFGHYDALQIPAKVGSKRKL

SEQ ID NO: 9551 - DNA, 1246 bp, Zea mays subsp. mays
  misc_feature (1)..(1246): Ceres Seq. ID no. 12416638
  misc_feature (1)..(1246): Ortholog of  Ceres SEQ ID NO 14308077 as cited in SEQ ID NO 58566
  misc_feature (1)..(1246): Ortholog of  Ceres SEQ ID NO 15226608 as cited in SEQ ID NO 64190
acgccaccggaccggaaacgcgaagcagccccacactgcccacgcggacacgctctgcaccaccacctgccggccgttgccgggctcccggctcgccgccgccgttgcgccctcgcgctcacacctccgccagcccaggtccatcgagcggagaaacccatggccccctcgccgatcctcgtccggccgccggcgctggcgaattcaccccttccgcctccccgatgcgtggccgcggtagcagcggcgccggcggttcggacggctccggcggccccattctctaggctccgtaccaagtgtaggttcgccgcatcggatgtgagagaagactactcttctactccgatagatattgtcgctgatgttaagacggagaagattgtggtgttaggaggaagtggattcgttggttctgcaatttgcagagctgctgtatctaaaggcattgaggttgtgagcttcagcaggtcaggaagaccatcttactctgattcctgggttgatcaagtcaattggctgccaggagatgttttctatgcaagatgggatgaagtattggttggggctactgctgttgtgtctacccttggagggtttggcaatgaagaacaaatgaaaaggataaatggtgaggcaaatgtcatagcagtaaatgctgcaaaagaatatggagtcccaaaattcattttaatctccgtccatgactacaaccttccatcctttcttcttacatcgggttacttcactggcaagagaaaggcagaatctgaagtcctttccaaatacccagcctcgggtgtcgtgttgaggccaggcttcatttacggtaaaaggaaagtaaatggcttcgaggtaccactcgacgctgtcggagaaccattggagaagttgctctcctctgtcgaaaacttcaccaagccgttgagctcgctgcctgcctctgacctaatccttgcaccccctgtgagcgtggatgatgttgcctatgctgtaatcaacggagtcatagacgacagcttctttggggtgttcacgattgaacagatcaaggaagccgcgtccaaggtacgagtgtgaacccggggtcttgttccacaatctctgaacgtgtgttgtaggtggaaagttcataaacttagcagtaactcattgatccttgtgttctttatttctcgctgaattttgaccatagtcaaccgttcaaaagtcagtgcagcattcttttttctgctggaatctcttg

SEQ ID NO: 9552 - protein, 359 aa, Zea mays subsp. mays
  peptide (1)..(359): Ceres Seq. ID no. 12416639
TPPDRKREAAPHCPRGHALHHHLPAVAGLPARRRRCALALTPPPAQVHRAEKPMAPSPILVRPPALANSPLPPPRCVAAVAAAPAVRTAPAAPFSRLRTKCRFAASDVREDYSSTPIDIVADVKTEKIVVLGGSGFVGSAICRAAVSKGIEVVSFSRSGRPSYSDSWVDQVNWLPGDVFYARWDEVLVGATAVVSTLGGFGNEEQMKRINGEANVIAVNAAKEYGVPKFILISVHDYNLPSFLLTSGYFTGKRKAESEVLSKYPASGVVLRPGFIYGKRKVNGFEVPLDAVGEPLEKLLSSVENFTKPLSSLPASDLILAPPVSVDDVAYAVINGVIDDSFFGVFTIEQIKEAASKVRV

SEQ ID NO: 9553 - protein, 306 aa, Zea mays subsp. mays
  peptide (1)..(306): Ceres Seq. ID no. 12416640
MAPSPILVRPPALANSPLPPPRCVAAVAAAPAVRTAPAAPFSRLRTKCRFAASDVREDYSSTPIDIVADVKTEKIVVLGGSGFVGSAICRAAVSKGIEVVSFSRSGRPSYSDSWVDQVNWLPGDVFYARWDEVLVGATAVVSTLGGFGNEEQMKRINGEANVIAVNAAKEYGVPKFILISVHDYNLPSFLLTSGYFTGKRKAESEVLSKYPASGVVLRPGFIYGKRKVNGFEVPLDAVGEPLEKLLSSVENFTKPLSSLPASDLILAPPVSVDDVAYAVINGVIDDSFFGVFTIEQIKEAASKVRV

SEQ ID NO: 9554 - DNA, 909 bp, Zea mays subsp. mays; identical to SEQ ID NO: 3686
  misc_feature (1)..(909): Ceres Seq. ID no. 12356120
  misc_feature (1)..(909): Ortholog of  Ceres SEQ ID NO 12609656 as cited in SEQ ID NO 51891
  misc_feature (1)..(909): Ortholog of  Ceres SEQ ID NO 13664337 as cited in SEQ ID NO 61267
  misc_feature (1)..(909): Ortholog of  Ceres SEQ ID NO 15224278 as cited in SEQ ID NO 63590
  misc_feature (1)..(909): Ortholog of  Ceres SEQ ID NO 12635152 as cited in SEQ ID NO 0

SEQ ID NO: 9555 - protein, 198 aa, Zea mays subsp. mays; identical to SEQ ID NO: 3687
  peptide (1)..(198): Ceres Seq. ID no. 12356121

SEQ ID NO: 9556 - protein, 190 aa, Zea mays subsp. mays; identical to SEQ ID NO: 3688
  peptide (1)..(190): Ceres Seq. ID no. 12356122

SEQ ID NO: 9557 - protein, 173 aa, Zea mays subsp. mays; identical to SEQ ID NO: 3689
  peptide (1)..(173): Ceres Seq. ID no. 12356123

SEQ ID NO: 9558 - DNA, 1283 bp, Zea mays subsp. mays
  misc_feature (1)..(1283): Ceres Seq. ID no. 13494816
  misc_feature (1)..(1283): Ortholog of  Ceres SEQ ID NO 14312266 as cited in SEQ ID NO 59225
  misc_feature (1)..(1283): Ortholog of  Ceres SEQ ID NO 13597620 as cited in SEQ ID NO 65383
aaaacaccgattcgtttccccttggcacctggcgccctgtcgccttcgaaaaacagccgccgccgtcgcccgtcccggatccgacggcccccgctccttcgtctagtatttatactagtgccttgccggcgctgctcctgttgcctctcgcatttgcccacgcccgcagcgcctcgcctcggctgctctacctctatcccgcgacccgcgagatcggaatcgcggcgccccgccgccctcctccaaaatggcaccgtctctgctcggggggttcaccaagtcgttggccatgacggtgctctccgagatcggggacaagaccttcttcgccgccgcgattctggctatgcgccatcccaggaaactcgtattggcaggctgtttaactgcactaatagtcatgacagctctatcggcttctctaggttgggttgcaccaaatctgatttcacgtaaatggactcatcatttgaccactctattgttctttctatttggcatttggtcattgtgggaaggcttcaaggaagatgggtaccgagattcggaagaattggctgaagttgaagcagagctggatgctgcctttaagagtaataaaggtgaatctaaaaataaatttaaggcgaatgatgatatgaagaaacagcaaagaccatttctcatgcagttcttctcaccaatttttctgaaggcattttctattacattctttggtgagtggggtgacaagagccagattgctacaattggcttggctgctgatgaaaacccgttcggtgttgtcctgggtggaatcatagcgcaagcactctgcactactgctgccgttcttggtggaaagagcctagcgtcccagatatctgagaagatggttgaactgtcaagcggagtgctcttcctgctcttcggtatcatgtccttactctctggaccagaaggagaattgtaatccctgcttgagcctttttcagctagctgattaacatggctttctcttcttagacctatcttatttcagtacatgaatgatggcaacgaaagccatccatccatggcgaacaggatggtgatttaacagtttagccgacacgctgtaaacatttcagtcgcccttcaaaaattactacatgttacagaagtctgtagcgattgtatatttgtattctgtcgtgcccagcacgtgaaattttgttatcgcaattacatgcgttaacaaagctttgttcgtgaaccaagtattcaggcaattaatatggggcttatagcaggcctttgtcttt

SEQ ID NO: 9559 - protein, 234 aa, Zea mays subsp. mays
  peptide (1)..(234): Ceres Seq. ID no. 13494817
MAPSLLGGFTKSLAMTVLSEIGDKTFFAAAILAMRHPRKLVLAGCLTALIVMTALSASLGWVAPNLISRKWTHHLTTLLFFLFGIWSLWEGFKEDGYRDSEELAEVEAELDAAFKSNKGESKNKFKANDDMKKQQRPFLMQFFSPIFLKAFSITFFGEWGDKSQIATIGLAADENPFGVVLGGIIAQALCTTAAVLGGKSLASQISEKMVELSSGVLFLLFGIMSLLSGPEGEL

SEQ ID NO: 9560 - protein, 220 aa, Zea mays subsp. mays
  peptide (1)..(220): Ceres Seq. ID no. 13494818
MTVLSEIGDKTFFAAAILAMRHPRKLVLAGCLTALIVMTALSASLGWVAPNLISRKWTHHLTTLLFFLFGIWSLWEGFKEDGYRDSEELAEVEAELDAAFKSNKGESKNKFKANDDMKKQQRPFLMQFFSPIFLKAFSITFFGEWGDKSQIATIGLAADENPFGVVLGGIIAQALCTTAAVLGGKSLASQISEKMVELSSGVLFLLFGIMSLLSGPEGEL

SEQ ID NO: 9561 - protein, 201 aa, Zea mays subsp. mays
  peptide (1)..(201): Ceres Seq. ID no. 13494819
MRHPRKLVLAGCLTALIVMTALSASLGWVAPNLISRKWTHHLTTLLFFLFGIWSLWEGFKEDGYRDSEELAEVEAELDAAFKSNKGESKNKFKANDDMKKQQRPFLMQFFSPIFLKAFSITFFGEWGDKSQIATIGLAADENPFGVVLGGIIAQALCTTAAVLGGKSLASQISEKMVELSSGVLFLLFGIMSLLSGPEGEL

SEQ ID NO: 9562 - DNA, 1693 bp, Zea mays subsp. mays; identical to SEQ ID NO: 7356
  misc_feature (1)..(1693): Ceres Seq. ID no. 13498349
  misc_feature (1)..(1693): Ortholog of  Ceres SEQ ID NO 13655506 as cited in SEQ ID NO 64493

SEQ ID NO: 9563 - protein, 208 aa, Zea mays subsp. mays; identical to SEQ ID NO: 7357
  peptide (1)..(208): Ceres Seq. ID no. 13498350

SEQ ID NO: 9564 - protein, 206 aa, Zea mays subsp. mays; identical to SEQ ID NO: 7358
  peptide (1)..(206): Ceres Seq. ID no. 13498351

SEQ ID NO: 9565 - protein, 185 aa, Zea mays subsp. mays; identical to SEQ ID NO: 7359
  peptide (1)..(185): Ceres Seq. ID no. 13498352

SEQ ID NO: 9566 - DNA, 1867 bp, Zea mays subsp. mays
  misc_feature (1)..(1867): Ceres Seq. ID no. 12374910
  misc_feature (1)..(1867): Ortholog of  Ceres SEQ ID NO 12586556 as cited in SEQ ID NO 64667
  misc_feature (1)..(1867): Ortholog of  Ceres SEQ ID NO 13660894 as cited in SEQ ID NO 67475
gtccatggtatgcgcgggaacctcccgtctctcgccgcggccagtaatggcgtcgctctccctctgtccttcttccacacgaagcagctccacgcgcgcctcatcgtcgcatccccctcctccgcctctggccctgcctacctccgcctcctagtgctccgctcctatgctgcccgcggagacctttcctccgcccgccgcctgctggacgaggctccccgcccggcctcgccgcttctctacaacgccctaatccgcgcgcacgcccgccgtctcgaccttccagccgggctcgcgcttttcgcccgcatgcgctgctccgccactccgcccgacgcgcacaccttcgcctgcgtcctccgcgcctgcgctgaatcctcgcgcccggatgctgttaaggtcgttcatggtatcgctacaacatgcggtatgtgctcccgtccgattgtcctgagctcgcttgtcagtgcgtacgcgaagcttggcctcgtggacaatgctcgcagcttgttcgatggattgtgtgagccggacttggtcatttggaactccatgatgtccgcatatgggtaccaagggatgtggtatgatggtctacagatgttctccttaatgcggagagctgggcagcatccggatgggtattcaatggttagcttagtctcatgcttctggaatccggaaatacttgcatttggtcaagcagttcatggaatatgtgtcaagggaggttatgactctggacaccatgtgagaagcacacttgtgtcaatgtacatgaggtgtgggtgtgtggaatctggccaaagattgtttggtagcttgcctgatgtggatttgattacctggtcgtcactgattactgggctaatacaaacgggcaagtatgaggaatcatttgatttgttccggaaaatgtgctttacaggtaggaggcccgacagccatattgattgctagtgttctctcggtatttgcttctactgctgctattagctataccaaggaggtccactgttatgcagtcaagcttggagctgatatagacataagagtctcttcttcgctaatggatgcttatgcaaaatgtggtttcactgagctcggatactgggtgttccgccaagtacctaataagaactcagtcatgtacaacacggtcatatcaaaccttgaatctcacgggtttgcaactaaggctattgaagtcctagatgagatggttaatgataagctcaggcctgatagtgctaccttctcctctttacttgctgcttgttgtcatgtggggcacttggaggagggatggaagttgttcaggagaatgagggatgagttcaagatagttgttgaaatggagcactatgtgtacatggtgaggcttcttgcaacatttggccagctgaaggaggcatatgatcttatacagacaatgcaaatccaaccagattgtggtgtgtggggtgcattgctttggggttgttgtgtccatcgtgattctagcttcggcaggattgttgctgaaaagctatgtgaactcaattcagacaaagctgcttacagggttatgctctcaaacatgtatgcctcacaagagatgtggtgggatgctgaggaggttagggatgagttatcaaaagaaaatatgtacaagaacacagggacgagttgggttggtgaagtaaaaaaatgatggttggcatttgtcattgagaaagcatgtcagatatcaagtacatatgaactctatattgttatattctggtagagatgatatcttgtgaaactccaaacatgtactcgttggattttagcttaaccagttttgtactcagtctttccttataatcatgggaggttcatttgc

SEQ ID NO: 9567 - protein, 319 aa, Zea mays subsp. mays
  peptide (1)..(319): Ceres Seq. ID no. 12374911
VHGMRGNLPSLAAASNGVALPLSFFHTKQLHARLIVASPSSASGPAYLRLLVLRSYAARGDLSSARRLLDEAPRPASPLLYNALIRAHARRLDLPAGLALFARMRCSATPPDAHTFACVLRACAESSRPDAVKVVHGIATTCGMCSRPIVLSSLVSAYAKLGLVDNARSLFDGLCEPDLVIWNSMMSAYGYQGMWYDGLQMFSLMRRAGQHPDGYSMVSLVSCFWNPEILAFGQAVHGICVKGGYDSGHHVRSTLVSMYMRCGCVESGQRLFGSLPDVDLITWSSLITGLIQTGKYEESFDLFRKMCFTGRRPDSHIDC

SEQ ID NO: 9568 - protein, 316 aa, Zea mays subsp. mays
  peptide (1)..(316): Ceres Seq. ID no. 12374912
MRGNLPSLAAASNGVALPLSFFHTKQLHARLIVASPSSASGPAYLRLLVLRSYAARGDLSSARRLLDEAPRPASPLLYNALIRAHARRLDLPAGLALFARMRCSATPPDAHTFACVLRACAESSRPDAVKVVHGIATTCGMCSRPIVLSSLVSAYAKLGLVDNARSLFDGLCEPDLVIWNSMMSAYGYQGMWYDGLQMFSLMRRAGQHPDGYSMVSLVSCFWNPEILAFGQAVHGICVKGGYDSGHHVRSTLVSMYMRCGCVESGQRLFGSLPDVDLITWSSLITGLIQTGKYEESFDLFRKMCFTGRRPDSHIDC

SEQ ID NO: 9569 - protein, 268 aa, Zea mays subsp. mays
  peptide (1)..(268): Ceres Seq. ID no. 12374913
MRNHLICSGKCALQVGGPTAILIASVLSVFASTAAISYTKEVHCYAVKLGADIDIRVSSSLMDAYAKCGFTELGYWVFRQVPNKNSVMYNTVISNLESHGFATKAIEVLDEMVNDKLRPDSATFSSLLAACCHVGHLEEGWKLFRRMRDEFKIVVEMEHYVYMVRLLATFGQLKEAYDLIQTMQIQPDCGVWGALLWGCCVHRDSSFGRIVAEKLCELNSDKAAYRVMLSNMYASQEMWWDAEEVRDELSKENMYKNTGTSWVGEVKK

SEQ ID NO: 9570 - DNA, 1168 bp, Zea mays subsp. mays
  misc_feature (1)..(1168): Ceres Seq. ID no. 12367987
  misc_feature (1)..(1168): Ortholog of  Ceres SEQ ID NO 12611101 as cited in SEQ ID NO 55920
gtgtccggtgcgggctgcgagtgacgtgggctaaataaagtgtgcgtcgggtggtaatggtggtggggcccggtgtcagtgcccgcgtccctcgctgctttgccctctccaccctccgccatcaccgccgcggcgtccttctgtaccggatccgtcgcagccaccactccgcagatccgctgggttgacgtccacggagctccggggatgtcgtcctccgcttccagcgtcgagggcgacgccgccggagagttcacggaggtcgtaatcgtgcgtcacggcgagacgtcatggaacgcctcgcgcatcatacagggacacttggatgcagagcttaatgatattggaaggcagcaagctgttgcggttgctcatcgtctttctaaagaagtgaaaccagttgtcatatactcttctgatctgaagcgagcagcagagactgcgcaaacaattgcaagaatttgcaatgtgccaaatgtcgtgttcgatccagcactgagagaaagacacattggagatctgcaaggcatgacgcttcaagatgctgctacagagaggccagaggcatacaaagcttttatgtcccacaagagaaatcaacaagttcctggtggtggagagagtcttgatcaactgtcggagcgatgtgtgtcttttctgtacgacattgttggtaaacacaaaggggagcgagttatcctggtttcacatggcggcaccatcagagagctctacagacacgtgagtcccacgaagccgctccacggcaaaatacacaacacgtcggtgagcgtcatcctcgtgtccgacgccaccggccggtgcatcgtcaagatgtgcggggacgtcagccacctccaggagacgggcgtcctggagaacgccttcggtggcgacaagacctccgcctgagattccaacattcatcacgcgccgagagctctcggcaattatcacgcgccgagtgagcgctcgtttcggccgtctttttttccactgtaccaatcatcctgttgctaccagtagtggtctagcggagaatgatgcacacttccccccgctgggaacgcggcgatttttgctggaacagttgaaggccgagccggggcgaatccttttggcctggccgtgcactgcttgctgaactgcacgtacgcatgtggagctg

SEQ ID NO: 9571 - protein, 234 aa, Zea mays subsp. mays
  peptide (1)..(234): Ceres Seq. ID no. 12367988
MSSSASSVEGDAAGEFTEVVIVRHGETSWNASRIIQGHLDAELNDIGRQQAVAVAHRLSKEVKPVVIYSSDLKRAAETAQTIARICNVPNVVFDPALRERHIGDLQGMTLQDAATERPEAYKAFMSHKRNQQVPGGGESLDQLSERCVSFLYDIVGKHKGERVILVSHGGTIRELYRHVSPTKPLHGKIHNTSVSVILVSDATGRCIVKMCGDVSHLQETGVLENAFGGDKTSA

SEQ ID NO: 9572 - protein, 127 aa, Zea mays subsp. mays
  peptide (1)..(127): Ceres Seq. ID no. 12367989
MTLQDAATERPEAYKAFMSHKRNQQVPGGGESLDQLSERCVSFLYDIVGKHKGERVILVSHGGTIRELYRHVSPTKPLHGKIHNTSVSVILVSDATGRCIVKMCGDVSHLQETGVLENAFGGDKTSA

SEQ ID NO: 9573 - DNA, 1157 bp, Zea mays subsp. mays
  misc_feature (1)..(1157): Ceres Seq. ID no. 12367688
  misc_feature (1)..(1157): Ortholog of  Ceres SEQ ID NO 15175425 as cited in SEQ ID NO 0
aaaacacgactagagtgggtgggagactgggaaagacgagacagcgagacaccactgagacgagagtcagccggcaggtgagacatcgcaggggaaccagctctcaagacggccgacggccggcttgcctacctgctcccatccttcccgagggaccgagaaagataagaaaggcggtggtcaacttgtgtcctgaggtgcccgtagaagcccaaggacaagaaacaaggagaagagtagatctacatctactccaccgatgagcgcgtctcggttcatcaagtgcgtcaccgtgggggacggtgccgtcggaaagacctgcatgctcatctcctacacatccaacactttccccactgactatgttccaactgtgttcgacaacttcagtgccaatgttgtggttgacgggagcactgtcaacttgggtctgtgggatacagcaggacaagaagattacaatagactgcgtccgttgagctatcgtggtgctgatgtttttctgctcgccttttctcttatcagcaaagcaagctatgagaatgtctctaagaagtgggttcctgaattaaggcactatgctcctggcgtgcccataatccttgttgggacaaaacttgatctgcgtgatgataagcagttttttgttgatcaccctggtgctgttccaatttccactgcccagggcgaagagctgaggaagctaattggtgctgccgcctacatcgaatgcagttcaaaaacccagcagaacataaaagcagtgtttgacgcagcaattaaggtggttctccagccaccaaagcaaaagaagaggaagaagaaggtgcagaagggatgcaccattttgtaactacaaacggtagagggcaacagtctggctgcggcgctgctgccaatgataaccatcgcctccttgctgtataatatatcgcctgatcatgccaccagcatgcacaagggagatggtggttttaggatccttgtcctactgtgttgtgtagaccaccgggtgtagttgactgtatctggttgtttgtatgtatggacaagacaaaactagcactgcagatggtatggtaaggcgtaagcaaatacaatatgacactggtccagttccaggaatgaatggaatatgacattggtccgagatttgc

SEQ ID NO: 9574 - protein, 197 aa, Zea mays subsp. mays
  peptide (1)..(197): Ceres Seq. ID no. 12367689
MSASRFIKCVTVGDGAVGKTCMLISYTSNTFPTDYVPTVFDNFSANVVVDGSTVNLGLWDTAGQEDYNRLRPLSYRGADVFLLAFSLISKASYENVSKKWVPELRHYAPGVPIILVGTKLDLRDDKQFFVDHPGAVPISTAQGEELRKLIGAAAYIECSSKTQQNIKAVFDAAIKVVLQPPKQKKRKKKVQKGCTIL

SEQ ID NO: 9575 - protein, 176 aa, Zea mays subsp. mays
  peptide (1)..(176): Ceres Seq. ID no. 12367690
MLISYTSNTFPTDYVPTVFDNFSANVVVDGSTVNLGLWDTAGQEDYNRLRPLSYRGADVFLLAFSLISKASYENVSKKWVPELRHYAPGVPIILVGTKLDLRDDKQFFVDHPGAVPISTAQGEELRKLIGAAAYIECSSKTQQNIKAVFDAAIKVVLQPPKQKKRKKKVQKGCTIL

SEQ ID NO: 9576 - DNA, 1019 bp, Zea mays subsp. mays
  misc_feature (1)..(1019): Ceres Seq. ID no. 12369259
  misc_feature (1)..(1019): Ortholog of  Ceres SEQ ID NO 14307484 as cited in SEQ ID NO 59427
atccgttgatcccatcggcttccccttcctcttccccgatccccttcctcccccgatcccatccaattccacttccacaccgcgggcctcgccgccgacgccgacgccgccggccatgtccaagtacggcaccattcccacctcctcctccgcgggcggagggcccgtgcccctcggcggcgcctccccgctcgatttcatctcccgcgccaaggctcggggcgcctcggcgctggcgacgcgccggccctggcgcgagctcgtggacgtccacgccgtcggcctgcccccgagcctcggcgacgcgtacctccgcgtgcgcgccaacctcgcccacttcgccatgaactatgccatcgtcgtcctcgtcgtcgtcttcctctccctcctctggcaccccgtctccctcatcgtattcctcgtctgcatgcttgcctggctcgtcctctacttcctccgcgacgagcccctcgtcctcttcggccgcgtcgtcgccgacggctacgtcctcgccgtgctcgccgtcgtcacgctcgtcctgctcctcctcaccgacgccaccgccaacatcctctcctcgctgctcatcggcctcgtgctcgtcctcgtccacgccgcgctgcacaaggcggaggacaacgccgccgacgaggctgaccgctggtacgcgccggtgtcacagcagccgtcgcactgaggatctgaatgtggccgttctgcgccttggctgtgattctattctgtactccctgtttccgagttcctccagctgcgcaagctgggccatccccatctcatctgcgatgaaaaacctgtccctgttggttgtgattcacctgctgccggttccatgggaagttttggatccagcgacgacgctgggctgttaaacttgttctccacgcccatttctgtgatacgtttaaagcgtctcgttcacgtgtatcaaatccggactgaagtctagtgtacattttgagttggagaaatgtgatgccagggacctgcgttcagatttc

SEQ ID NO: 9577 - protein, 231 aa, Zea mays subsp. mays
  peptide (1)..(231): Ceres Seq. ID no. 12369260
SVDPIGFPFLFPDPLPPPIPSNSTSTPRASPPTPTPPAMSKYGTIPTSSSAGGGPVPLGGASPLDFISRAKARGASALATRRPWRELVDVHAVGLPPSLGDAYLRVRANLAHFAMNYAIVVLVVVFLSLLWHPVSLIVFLVCMLAWLVLYFLRDEPLVLFGRVVADGYVLAVLAVVTLVLLLLTDATANILSSLLIGLVLVLVHAALHKAEDNAADEADRWYAPVSQQPSH

SEQ ID NO: 9578 - protein, 193 aa, Zea mays subsp. mays
  peptide (1)..(193): Ceres Seq. ID no. 12369261
MSKYGTIPTSSSAGGGPVPLGGASPLDFISRAKARGASALATRRPWRELVDVHAVGLPPSLGDAYLRVRANLAHFAMNYAIVVLVVVFLSLLWHPVSLIVFLVCMLAWLVLYFLRDEPLVLFGRVVADGYVLAVLAVVTLVLLLLTDATANILSSLLIGLVLVLVHAALHKAEDNAADEADRWYAPVSQQPSH

SEQ ID NO: 9579 - protein, 179 aa, Zea mays subsp. mays
  peptide (1)..(179): Ceres Seq. ID no. 12369262
MPSSSSSSSSSPSSGTPSPSSYSSSACLPGSSSTSSATSPSSSSAASSPTATSSPCSPSSRSSCSSSPTPPPTSSPRCSSASCSSSSTPRCTRRRTTPPTRLTAGTRRCHSSRRTEDLNVAVLRLGCDSILYSLFPSSSSCASWAIPISSAMKNLSLLVVIHLLPVPWEVLDPATTLGC

SEQ ID NO: 9580 - DNA, 1560 bp, Zea mays subsp. mays
  misc_feature (1)..(1560): Ceres Seq. ID no. 12382424
  misc_feature (1)..(1560): Ortholog of  Ceres SEQ ID NO 14313811 as cited in SEQ ID NO 54578
gcaccgtttcccaaaccctccggactcgaacccaacccacgcacccacatcgggagacgagccaggccgagctctagaagagtctccggaaggcccgcatcgtcgatggcggccgagggcagcggcgtccaagagacgttcgaggcgcgggtgaagcgcctgttcgggtcccgcctcttcgacgccgtcccggactcctccttcccgacggcctcctggtccgtggccgcgggcgacgtcgagcgccaccgttggtcgaagccgtcggaggcccgcgacgcggaggaggaggcagcgggggaggccggccgcggggacacgccctgcgtctccgcgttctacgacgccaacgggtgccttcgtggccggaggcgcaggtccaggaaggaggagttcgaggggaacctcgacgacctagatgaagacgaggaggaagacggggagagggagaggaatgcggcagaacaggacgaggaggagggggttagagttaacatcggcctcgaccccactctggatcgggaggaagaggaggacaagtatgacagagaggcctttggcagagaggaggctgctgaccgcgtgtacatgcatgatataatggatgccggcataaacatgagcatcaacagtatagtccctgacctccttgatgattccattgaagaggtgtaccgttttaggaaggatccccgtgcagatatgagggcagcatctccaagactcagagaagatggttctactaaagattgtgattctcactatcccactcaagccaaggatttccccagtgtagttcatacaaagaaagctgtggaggaagtcaatgtaaaacctatactgaagaggaaggagtcacaagctgatttaaaaccaaggaaacgtgtcaggtttgatgctaatgttaaggatagtgagttggatatgtttgaacatgacgaagattctccaacggttcctcaatccatggatgtaatcactgagttggagagcacatctactttgtctgcatctcctggggtccctgactatgtaaggaacccttcaaagtacacccgatacaccctggatgtaccagagtctaatgatggctcgaacaggacagctcttgctgacatgcatgatctgttagcgagatcatacccaaacaggatacattctgagacgcctgttaagattcctagctcagtcacattcatccctcgcaagaagtcagttgataccatggcagtggatgagggccccagagctattgattccaactcctctgcaattggaatggtagcaggcgcctcagatgaacctgatcaatgtgaaatggatgaagatgacagtaaatcaccgacaacgccacagatgcatacaaactcaaaggcgagctcccggcgttacaggtcaagcagaacagatgatgatgagtgaaattgaggatcccagggtatccaatctgatgtttgtttctaagaaaattttgagtttcagaataccttatgtaaatccggatatatgtgtgttcttgtgatttgagctaattaactatgttgaactacttttcccccc

SEQ ID NO: 9581 - protein, 473 aa, Zea mays subsp. mays
  peptide (1)..(473): Ceres Seq. ID no. 12382425
APFPKPSGLEPNPRTHIGRRARPSSRRVSGRPASSMAAEGSGVQETFEARVKRLFGSRLFDAVPDSSFPTASWSVAAGDVERHRWSKPSEARDAEEEAAGEAGRGDTPCVSAFYDANGCLRGRRRRSRKEEFEGNLDDLDEDEEEDGERERNAAEQDEEEGVRVNIGLDPTLDREEEEDKYDREAFGREEAADRVYMHDIMDAGINMSINSIVPDLLDDSIEEVYRFRKDPRADMRAASPRLREDGSTKDCDSHYPTQAKDFPSVVHTKKAVEEVNVKPILKRKESQADLKPRKRVRFDANVKDSELDMFEHDEDSPTVPQSMDVITELESTSTLSASPGVPDYVRNPSKYTRYTLDVPESNDGSNRTALADMHDLLARSYPNRIHSETPVKIPSSVTFIPRKKSVDTMAVDEGPRAIDSNSSAIGMVAGASDEPDQCEMDEDDSKSPTTPQMHTNSKASSRRYRSSRTDDDE

SEQ ID NO: 9582 - protein, 438 aa, Zea mays subsp. mays
  peptide (1)..(438): Ceres Seq. ID no. 12382426
MAAEGSGVQETFEARVKRLFGSRLFDAVPDSSFPTASWSVAAGDVERHRWSKPSEARDAEEEAAGEAGRGDTPCVSAFYDANGCLRGRRRRSRKEEFEGNLDDLDEDEEEDGERERNAAEQDEEEGVRVNIGLDPTLDREEEEDKYDREAFGREEAADRVYMHDIMDAGINMSINSIVPDLLDDSIEEVYRFRKDPRADMRAASPRLREDGSTKDCDSHYPTQAKDFPSVVHTKKAVEEVNVKPILKRKESQADLKPRKRVRFDANVKDSELDMFEHDEDSPTVPQSMDVITELESTSTLSASPGVPDYVRNPSKYTRYTLDVPESNDGSNRTALADMHDLLARSYPNRIHSETPVKIPSSVTFIPRKKSVDTMAVDEGPRAIDSNSSAIGMVAGASDEPDQCEMDEDDSKSPTTPQMHTNSKASSRRYRSSRTDDDE

SEQ ID NO: 9583 - protein, 277 aa, Zea mays subsp. mays
  peptide (1)..(277): Ceres Seq. ID no. 12382427
MHDIMDAGINMSINSIVPDLLDDSIEEVYRFRKDPRADMRAASPRLREDGSTKDCDSHYPTQAKDFPSVVHTKKAVEEVNVKPILKRKESQADLKPRKRVRFDANVKDSELDMFEHDEDSPTVPQSMDVITELESTSTLSASPGVPDYVRNPSKYTRYTLDVPESNDGSNRTALADMHDLLARSYPNRIHSETPVKIPSSVTFIPRKKSVDTMAVDEGPRAIDSNSSAIGMVAGASDEPDQCEMDEDDSKSPTTPQMHTNSKASSRRYRSSRTDDDE

SEQ ID NO: 9584 - DNA, 1917 bp, Zea mays subsp. mays
  misc_feature (1)..(1917): Ceres Seq. ID no. 12375014
  misc_feature (1)..(1917): Ortholog of  Ceres SEQ ID NO 14314363 as cited in SEQ ID NO 52272
atagggcgtgttctaaaagacacaagatcttctctgggcacactagtgtatgaaaaaccacaagggtgattcagcttgccactgtcggctccttctatgcatgcagctgatccctgctgctcactcccatggcgcaaggtgaggagagctcgtggtgcatggcgagcagcgatcatgcatcattcgcccaagcagtcgcgtgtggaacccaaaggcgcgcttctgccgcacaacctgccaatttcttggagttgcaacctgcagcagctgctccttattactttggtgagttggaggaggcccttatccatggcacccgtacatctgttgatcacggcatgatcggaagtgatgtggacacagagcgtaagactgctggataccttgcagctaggccccccacactggagatcttcccttcatggccaatgagtcatctacagcagccatacagtggtaactcgcactcagtagggagcaccactgagtcgagctcaggtcagaacagtatgccacagaccgagctggtgtccccagggagcatgagggccgactctggacagcgtcaggagcttttgatggtgactgttgatgattacaactacgagcaaggactcggagccgcagcaaccacagctccaatctttcagcagcatgcagcaggccaagacaagggaaagcatggatccacaaggaaagacggcaggctgttagacgccaagaccgagaggcgattggcccagaacagagaagctgcaaggaagagcaggctgagaaaaaaggcctacgtacagcagctagagacgagtcggatcaggcttcagcaaatcgagcaggagctgcatggagcacgctcacagggtctgttcccgggaggaggtggtgcgcctggagacttgagttcaggcgctgtgattttcgacatggagtacgcccggtggctagaagacgacaccaagcacatgacggagctccaggccgtgctgcagccccagatcatcgacgcgaacctgggggccatcgtcgaggactgcatgcggcactacgacgagctgttccacctgagggccatgctcgcaagatccgacgtgttccacctgatgaccggcctgtgggcgaccacggccgagcgatgcttcctctggatgggagggttccgtccttctgaaatcctcaagatgctgataccgcagctcgaccctctcgcggagccgcagctgctagggatgtacaatctgcaacggtcgtcggagcagaccgaggaggcgctcgtgcaggggcttcagcagctgcaccagtcgctggcggacgccgtgggcgctagtcctctcagcgacggcgcgaatgtcgccaactacaccgctctcatggccctggcacttgacaggctcgacaccctcgagagcttttaccgccaggcggacagcctgaggcagcagaccttgcaccagatgcggcggatcctgacgatccgccagacggctcggtgcttcgtctccatcagcgagtaccaccgccgcctccgcgcccttagctccgtctgggcatcgtcccgccctccaactcctccaagcgagggcgtcgttgcggccgcagagaatgttagccctacagggacgacgagcgagcaagctctccctccgtaccaccatagccagccgttccctggcttctgatcgaaggttcgatgcatgcatgcatgctggttgtcgcggctagctagggtacagattccgtcgtcagtggtggcgagcggacgacgaggcccggccgagggggacagattgtagtgtataacgttcttctatatatcattcgtcgagaacggaaacatgcatcatcagtcggtattcagtcagtgcatcatcactatgaaaaaaaagaggacacacaaagggtctctgctctctttctctc

SEQ ID NO: 9585 - protein, 515 aa, Zea mays subsp. mays
  peptide (1)..(515): Ceres Seq. ID no. 12375015
MAQGEESSWCMASSDHASFAQAVACGTQRRASAAQPANFLELQPAAAAPYYFGELEEALIHGTRTSVDHGMIGSDVDTERKTAGYLAARPPTLEIFPSWPMSHLQQPYSGNSHSVGSTTESSSGQNSMPQTELVSPGSMRADSGQRQELLMVTVDDYNYEQGLGAAATTAPIFQQHAAGQDKGKHGSTRKDGRLLDAKTERRLAQNREAARKSRLRKKAYVQQLETSRIRLQQIEQELHGARSQGLFPGGGGAPGDLSSGAVIFDMEYARWLEDDTKHMTELQAVLQPQIIDANLGAIVEDCMRHYDELFHLRAMLARSDVFHLMTGLWATTAERCFLWMGGFRPSEILKMLIPQLDPLAEPQLLGMYNLQRSSEQTEEALVQGLQQLHQSLADAVGASPLSDGANVANYTALMALALDRLDTLESFYRQADSLRQQTLHQMRRILTIRQTARCFVSISEYHRRLRALSSVWASSRPPTPPSEGVVAAAENVSPTGTTSEQALPPYHHSQPFPGF

SEQ ID NO: 9586 - protein, 505 aa, Zea mays subsp. mays
  peptide (1)..(505): Ceres Seq. ID no. 12375016
MASSDHASFAQAVACGTQRRASAAQPANFLELQPAAAAPYYFGELEEALIHGTRTSVDHGMIGSDVDTERKTAGYLAARPPTLEIFPSWPMSHLQQPYSGNSHSVGSTTESSSGQNSMPQTELVSPGSMRADSGQRQELLMVTVDDYNYEQGLGAAATTAPIFQQHAAGQDKGKHGSTRKDGRLLDAKTERRLAQNREAARKSRLRKKAYVQQLETSRIRLQQIEQELHGARSQGLFPGGGGAPGDLSSGAVIFDMEYARWLEDDTKHMTELQAVLQPQIIDANLGAIVEDCMRHYDELFHLRAMLARSDVFHLMTGLWATTAERCFLWMGGFRPSEILKMLIPQLDPLAEPQLLGMYNLQRSSEQTEEALVQGLQQLHQSLADAVGASPLSDGANVANYTALMALALDRLDTLESFYRQADSLRQQTLHQMRRILTIRQTARCFVSISEYHRRLRALSSVWASSRPPTPPSEGVVAAAENVSPTGTTSEQALPPYHHSQPFPGF

SEQ ID NO: 9587 - protein, 445 aa, Zea mays subsp. mays
  peptide (1)..(445): Ceres Seq. ID no. 12375017
MIGSDVDTERKTAGYLAARPPTLEIFPSWPMSHLQQPYSGNSHSVGSTTESSSGQNSMPQTELVSPGSMRADSGQRQELLMVTVDDYNYEQGLGAAATTAPIFQQHAAGQDKGKHGSTRKDGRLLDAKTERRLAQNREAARKSRLRKKAYVQQLETSRIRLQQIEQELHGARSQGLFPGGGGAPGDLSSGAVIFDMEYARWLEDDTKHMTELQAVLQPQIIDANLGAIVEDCMRHYDELFHLRAMLARSDVFHLMTGLWATTAERCFLWMGGFRPSEILKMLIPQLDPLAEPQLLGMYNLQRSSEQTEEALVQGLQQLHQSLADAVGASPLSDGANVANYTALMALALDRLDTLESFYRQADSLRQQTLHQMRRILTIRQTARCFVSISEYHRRLRALSSVWASSRPPTPPSEGVVAAAENVSPTGTTSEQALPPYHHSQPFPGF

SEQ ID NO: 9588 - DNA, 1535 bp, Zea mays subsp. mays
  misc_feature (1)..(1535): Ceres Seq. ID no. 12382136
  misc_feature (1)..(1535): Ortholog of  Ceres SEQ ID NO 15168502 as cited in SEQ ID NO 60095
  misc_feature (1)..(1535): Ortholog of  Ceres SEQ ID NO 15169466 as cited in SEQ ID NO 66135
atgaagctcacatttctcaatggcattccattcttgcacaatcattccagccagccaccatagctccatgtcgtcgtcgacctcacaaatggcgtcgctcgccgtgctcgtcttcctggtggtctgcgcaacgcttgcgtccggcgccgccagcgtccgcgttgggctcacgcgcatccactccgacccggacaccaccgcgccccagttcgtgcgcgacgcgctgcgccgcgacatgcaccggcagcggtcccggtcgttcggccgcgaccgcgaccgcgagctcgcggagtccgacgggcgcaccagcaccacggtgtccgcgcgcacccgcaaggacctgcccaacggcggggagtacctcatgacgctggccatcggcacgccgccgctgccgtacgcggccgtcgccgacacgggcagcgacctcatctggacgcagtgcgcgccctgcggcacccagtgcttcgagcagccggcgccgctgtacaacccagcgagctcgaccacgttcagcgtgctcccgtgcaacagctccctgagcatgtgcgcgggggcgctggcgggggccgcgccgccgcccgggtgcgcctgcatgtactaccagacgtacggcaccgggtggacggcgggcgtgcagggctccgagaccttcaccttcggctcgtccgccgccgaccaggcccgcgtccccggcgtcgccttcggctgcagcaacgccagcagcagcgactggaacgggtcggcggggctggtggggctgggcaggggcagcctgtcgctcgtctcgcagctcggcgccggcaggttctcctactgcctgacgccgttccaggacaccaacagcaccagcaccctcctcctcggcccgtcggcggcgctcaacggcaccggcgtccgctccacgccgttcgtcgctagcccggccagggcgcccatgagcacctactactacctcaacctgacgggcatatccctgggcgcgaaggcgctgcccatctctcccggcgcattctccctgaagcccgacggcacgggcggcctcatcatcgactccggcacgaccatcacctcgctggccaacgcggcgtaccagcaggtccgcgccgcggtaaagtcccagctggtcacgacgctgccaacggtcgacgggtcggactccacggggctcgacctgtgcttcgcgctgccggccccgacgtcggcgccgccggccgtgctgccgagcatgacgctccacttcgacggcgccgacatggtgctccccgcggacagctacatgatctcggggtccggcgtgtggtgcctggccatgcggaaccagacggacggcgcgatgagcacgttcgggaactaccagcagcagaacatgcacatcctctacgacgtccgggaggagacgctgtcgttcgctccggccaagtgcagcactctttgacgatgcgatagttgtacatatgtatatgtgtgcatatataggattcgtgatttttttgtatacagtggattgttaaccgaacacgctaattaattcc

SEQ ID NO: 9589 - protein, 472 aa, Zea mays subsp. mays
  peptide (1)..(472): Ceres Seq. ID no. 12382137
MAFHSCTIIPASHHSSMSSSTSQMASLAVLVFLVVCATLASGAASVRVGLTRIHSDPDTTAPQFVRDALRRDMHRQRSRSFGRDRDRELAESDGRTSTTVSARTRKDLPNGGEYLMTLAIGTPPLPYAAVADTGSDLIWTQCAPCGTQCFEQPAPLYNPASSTTFSVLPCNSSLSMCAGALAGAAPPPGCACMYYQTYGTGWTAGVQGSETFTFGSSAADQARVPGVAFGCSNASSSDWNGSAGLVGLGRGSLSLVSQLGAGRFSYCLTPFQDTNSTSTLLLGPSAALNGTGVRSTPFVASPARAPMSTYYYLNLTGISLGAKALPISPGAFSLKPDGTGGLIIDSGTTITSLANAAYQQVRAAVKSQLVTTLPTVDGSDSTGLDLCFALPAPTSAPPAVLPSMTLHFDGADMVLPADSYMISGSGVWCLAMRNQTDGAMSTFGNYQQQNMHILYDVREETLSFAPAKCSTL

SEQ ID NO: 9590 - protein, 456 aa, Zea mays subsp. mays
  peptide (1)..(456): Ceres Seq. ID no. 12382138
MSSSTSQMASLAVLVFLVVCATLASGAASVRVGLTRIHSDPDTTAPQFVRDALRRDMHRQRSRSFGRDRDRELAESDGRTSTTVSARTRKDLPNGGEYLMTLAIGTPPLPYAAVADTGSDLIWTQCAPCGTQCFEQPAPLYNPASSTTFSVLPCNSSLSMCAGALAGAAPPPGCACMYYQTYGTGWTAGVQGSETFTFGSSAADQARVPGVAFGCSNASSSDWNGSAGLVGLGRGSLSLVSQLGAGRFSYCLTPFQDTNSTSTLLLGPSAALNGTGVRSTPFVASPARAPMSTYYYLNLTGISLGAKALPISPGAFSLKPDGTGGLIIDSGTTITSLANAAYQQVRAAVKSQLVTTLPTVDGSDSTGLDLCFALPAPTSAPPAVLPSMTLHFDGADMVLPADSYMISGSGVWCLAMRNQTDGAMSTFGNYQQQNMHILYDVREETLSFAPAKCSTL

SEQ ID NO: 9591 - protein, 449 aa, Zea mays subsp. mays
  peptide (1)..(449): Ceres Seq. ID no. 12382139
MASLAVLVFLVVCATLASGAASVRVGLTRIHSDPDTTAPQFVRDALRRDMHRQRSRSFGRDRDRELAESDGRTSTTVSARTRKDLPNGGEYLMTLAIGTPPLPYAAVADTGSDLIWTQCAPCGTQCFEQPAPLYNPASSTTFSVLPCNSSLSMCAGALAGAAPPPGCACMYYQTYGTGWTAGVQGSETFTFGSSAADQARVPGVAFGCSNASSSDWNGSAGLVGLGRGSLSLVSQLGAGRFSYCLTPFQDTNSTSTLLLGPSAALNGTGVRSTPFVASPARAPMSTYYYLNLTGISLGAKALPISPGAFSLKPDGTGGLIIDSGTTITSLANAAYQQVRAAVKSQLVTTLPTVDGSDSTGLDLCFALPAPTSAPPAVLPSMTLHFDGADMVLPADSYMISGSGVWCLAMRNQTDGAMSTFGNYQQQNMHILYDVREETLSFAPAKCSTL

SEQ ID NO: 9592 - DNA, 1422 bp, Zea mays subsp. mays
  misc_feature (1)..(1422): Ceres Seq. ID no. 13492589
  misc_feature (1)..(1422): Ortholog of  Ceres SEQ ID NO 15179320 as cited in SEQ ID NO 0
gaccaacccaaccgtgggggtgccgggtgccctacggcctacgggccggagcagcgcttgggagccgcggcacggaggcatcgacgccgttgagctcgaggcgaccggcggctggcggccccgccacagcgttgctgtggcagtgtggcttcttctggtttctgcgggctcagcgcggaggcctattgcaggattaaatggcaaatagggcaagatggatgatgaagtacgaaaagggtcttgttgatatacttcatgagaacaacacttcacattatcgtacccaaaacggttggagaacataggggtggaggaaaattgttagggatttcaatgtacggtaccctgaagcaaagtttagtaaaatgcaaatccaggaacatgagactcaattgaagaaagactacaggtcgataaaatatatcctccaacgtgatggtgtctcgtgggaccagagtgcgtccatgtttagaacaacagatgaaatctgggatgagattatcgaggatatgcccaaggcacggaagtaccaaagcaagagctttccattgcttgactcactagaaccgttatttgatggtcctattcctgaaggggcacaaaaatcaccttccagcatacctcagaatgttggtggaaacgttggtgatggaggcaacaatatcagcacagtcccagacttgtctgaaagacctagtggaacaattaacacaagcgttaatgaggcatggaataatatcagcctacttaagcaaacagcattgggaccccaaggtatagacaatctcgattctcgacacgctgcaaaatcgtgataaagaggtgctggaacggctacagcatggctcggaccggaggccgaagagagcggatgaacaggcacagtcaagttcttgcgtagaactgcagagagacaggcgcaagaagcggaaggccccagacatccagcagatcatggagacctatatgaatttcagaatgaagcaacctcgcgtcaaacaacgaagagcaaaggacggtgaccagttcacgatttcaagctgtatcaaggctctgcacaccatggctgatatgtcagatgaggtcaaggtattagcctctgatgttttcaaggacgctgagaacagggagacctttctttcgtatgaacccaggctgcgcaccttgtggctgaagagggaagttggcaagctactctcctatagaagtggcagcccttgcttgttttgtttgctacccgtgcctaggcttcatttaacaaactctactagtgacttaacttgttccatgcacagtacgtcactatactgcttagtcattcatgatcaatgatgtgcttgctgcatgtagtgcttccaaaattttgcatctgtgccaatacactgttaaaaaatgcgacagaatgcttgtttcttgacagct

SEQ ID NO: 9593 - protein, 149 aa, Zea mays subsp. mays
  peptide (1)..(149): Ceres Seq. ID no. 13492590
MQIQEHETQLKKDYRSIKYILQRDGVSWDQSASMFRTTDEIWDEIIEDMPKARKYQSKSFPLLDSLEPLFDGPIPEGAQKSPSSIPQNVGGNVGDGGNNISTVPDLSERPSGTINTSVNEAWNNISLLKQTALGPQGIDNLDSRHAAKS

SEQ ID NO: 9594 - protein, 125 aa, Zea mays subsp. mays
  peptide (1)..(125): Ceres Seq. ID no. 13492591
METYMNFRMKQPRVKQRRAKDGDQFTISSCIKALHTMADMSDEVKVLASDVFKDAENRETFLSYEPRLRTLWLKREVGKLLSYRSGSPCLFCLLPVPRLHLTNSTSDLTCSMHSTSLYCLVIHDQ

SEQ ID NO: 9595 - protein, 121 aa, Zea mays subsp. mays
  peptide (1)..(121): Ceres Seq. ID no. 13492592
MNFRMKQPRVKQRRAKDGDQFTISSCIKALHTMADMSDEVKVLASDVFKDAENRETFLSYEPRLRTLWLKREVGKLLSYRSGSPCLFCLLPVPRLHLTNSTSDLTCSMHSTSLYCLVIHDQ

SEQ ID NO: 9596 - DNA, 1464 bp, Zea mays subsp. mays
  misc_feature (1)..(1464): Ceres Seq. ID no. 12381445
  misc_feature (1)..(1464): Ortholog of  Ceres SEQ ID NO 14302852 as cited in SEQ ID NO 64814
  misc_feature (1)..(1464): Ortholog of  Ceres SEQ ID NO 13598593 as cited in SEQ ID NO 64978
  misc_feature (1)..(1464): Ortholog of  Ceres SEQ ID NO 14303067 as cited in SEQ ID NO 67078
  misc_feature (1)..(1464): Ortholog of  Ceres SEQ ID NO 13595992 as cited in SEQ ID NO 68401
aagtcacatcagcgcgtccgccttcacctatcatcatcgtctcaatctccggccggtctcagccgggcacccaaactgagatggcgtccgtccggtggtcccgccgtgggccctgatcgcctccttcctcgtcgtcgcggcagtgggagcccagccgatggacccgaagaaccccatctcgtcggaccccaacgtgatccccgtatacatgagccccggctcgccccccacctacgtgagctgttacaacagcacccatgggcagcaagggtcggaacccacgtgctccatcctcgcgcgccagtgtccccgcggttgccgggacacctgctacgtccactgcccgtcctgcaagctcgtctgcctgtgcgagctgaccggctcggagtgctacgacccgcgcttcgtgggaggcgacggcaacaagttcctgttccacggccggcgcgacgccgacttctgtctggtgtcggacgccaacctgcacatcaacgcgcacttcatcggcaagcgcaacgacgcgcgcgccgccgcgccggcgcgggacttcacgtgggtgcaggcgctgggcatccggttcggcgggcaccggctgtacctgggcgtccggaggacggccgtctgggacgacgccgaggaccggctggccatcaccttcgacggggtgcccgtggcgctggacgccgtggccggcgccagctggagccccgcggcggcgcccgcgctgtccgtgttccgcacgggccccgccaacggcgtggtggtgcgcctggacgggcggttccgggccgtggccaacgccgtgccggtgaccgcggaggactcgagggtccacggctacggcctgcgccccggggacggcagcctcgcgcacctcaacgtggcgttcaggttctacgccctcagcgccgacgtgcacggcgtgctgggccagacctaccgcccgggctacgtcagcgccgccggggtggacgcgggcgccagggtccccgtcatgggcggcgccggaaggttccaggtgtacggcggcatcttcgacaccagctgcgaggtcgggcggttcgctggcgaggaccacgggcccgtgggcggcgtcatcaccgtggaggagccgaccgacgcgctctgcggcagcggcaaggccagcactggcctggtctgcaagaagtgacgactgacgaggccggcggcgtgaggtcccgctccgcttgtgtagtgtttttgcttgtgtgtacgtgcgtgctgacgtatatcggtatatatagctgctgctgctgctgcgaagtatagtagcaatggttctatgtatggcggggcggccgaataaaagactgtgacgcgtctcttgtgctatagtcgtgtggacaacactggaaaaaatgccgtgttggtctggtcacgtaagaagtgtgtattattattattattattattattattattattattactaaaaaaaaaaaa

SEQ ID NO: 9597 - protein, 429 aa, Zea mays subsp. mays
  peptide (1)..(429): Ceres Seq. ID no. 12381446
KSHQRVRLHLSSSSQSPAGLSRAPKLRWRPSGGPAVGPDRLLPRRRGSGSPADGPEEPHLVGPQRDPRIHEPRLAPHLRELLQQHPWAARVGTHVLHPRAPVSPRLPGHLLRPLPVLQARLPVRADRLGVLRPALRGRRRQQVPVPRPARRRLLSGVGRQPAHQRALHRQAQRRARRRAGAGLHVGAGAGHPVRRAPAVPGRPEDGRLGRRRGPAGHHLRRGARGAGRRGRRQLEPRGGARAVRVPHGPRQRRGGAPGRAVPGRGQRRAGDRGGLEGPRLRPAPRGRQPRAPQRGVQVLRPQRRRARRAGPDLPPGLRQRRRGGRGRQGPRHGRRRKVPGVRRHLRHQLRGRAVRWRGPRARGRRHHRGGADRRALRQRQGQHWPGLQEVTTDEAGGVRSRSACVVFLLVCTCVLTYIGIYSCCCCCEV

SEQ ID NO: 9598 - protein, 337 aa, Zea mays subsp. mays
  peptide (1)..(337): Ceres Seq. ID no. 12381447
MDPKNPISSDPNVIPVYMSPGSPPTYVSCYNSTHGQQGSEPTCSILARQCPRGCRDTCYVHCPSCKLVCLCELTGSECYDPRFVGGDGNKFLFHGRRDADFCLVSDANLHINAHFIGKRNDARAAAPARDFTWVQALGIRFGGHRLYLGVRRTAVWDDAEDRLAITFDGVPVALDAVAGASWSPAAAPALSVFRTGPANGVVVRLDGRFRAVANAVPVTAEDSRVHGYGLRPGDGSLAHLNVAFRFYALSADVHGVLGQTYRPGYVSAAGVDAGARVPVMGGAGRFQVYGGIFDTSCEVGRFAGEDHGPVGGVITVEEPTDALCGSGKASTGLVCKK

SEQ ID NO: 9599 - protein, 320 aa, Zea mays subsp. mays
  peptide (1)..(320): Ceres Seq. ID no. 12381448
MSPGSPPTYVSCYNSTHGQQGSEPTCSILARQCPRGCRDTCYVHCPSCKLVCLCELTGSECYDPRFVGGDGNKFLFHGRRDADFCLVSDANLHINAHFIGKRNDARAAAPARDFTWVQALGIRFGGHRLYLGVRRTAVWDDAEDRLAITFDGVPVALDAVAGASWSPAAAPALSVFRTGPANGVVVRLDGRFRAVANAVPVTAEDSRVHGYGLRPGDGSLAHLNVAFRFYALSADVHGVLGQTYRPGYVSAAGVDAGARVPVMGGAGRFQVYGGIFDTSCEVGRFAGEDHGPVGGVITVEEPTDALCGSGKASTGLVCKK

SEQ ID NO: 9600 - DNA, 738 bp, Zea mays subsp. mays
  misc_feature (1)..(738): Ceres Seq. ID no. 12356758
  misc_feature (1)..(738): Ortholog of  Ceres SEQ ID NO 13581889 as cited in SEQ ID NO 50900
  misc_feature (1)..(738): Ortholog of  Ceres SEQ ID NO 13581902 as cited in SEQ ID NO 52223
  misc_feature (1)..(738): Ortholog of  Ceres SEQ ID NO 12585528 as cited in SEQ ID NO 62991
atcactgccaaatcccccagaaaatcaactcctcctcaattccacgctgccaccaactcgccgtcctccgcgccaagcatcaaagctccgatggcccgcacgaagcagacggctcgcaagtcgacgggcggcaaggcgccccgcaagcagctggcgaccaaggcggcgcgcaagtctgcgccggccaccggcggcgtgaagaagccccaccgcttccgccccggcaccgtcgcgctccgggagatccgcaagtaccagaagagcacggagctgctcatccgcaagttgcccttccagcgcctcgtccgtgagatcgcgcaggacttcaagaccgatctccgcttccagtcctccgccgtcgcggcgctgcaggaggccgccgaggcctaccttgtggggctctttgaggacactaacctctgcgccatccacgccaagcgcgtcaccatcatgcccaaggacatccagctcgcgcgccgcatcaggggcgagagggcctgagcgaggcgagctcctctcaccgcaggcggcgtcgttgttgcttcggacctgcttgtaggacttgtgcttctcttggtttcctttctggtggcagaggcatcttggtaccattgtgcttgttcttagaatcttagggatagagagttttcagttgctgggtaacctgattgtttatcttgcattcctgcctctgtaatggttgtctgctgtcttaatggaaattatatttgctttttt

SEQ ID NO: 9601 - protein, 166 aa, Zea mays subsp. mays
  peptide (1)..(166): Ceres Seq. ID no. 12356759
ITAKSPRKSTPPQFHAATNSPSSAPSIKAPMARTKQTARKSTGGKAPRKQLATKAARKSAPATGGVKKPHRFRPGTVALREIRKYQKSTELLIRKLPFQRLVREIAQDFKTDLRFQSSAVAALQEAAEAYLVGLFEDTNLCAIHAKRVTIMPKDIQLARRIRGERA

SEQ ID NO: 9602 - protein, 136 aa, Zea mays subsp. mays; identical to SEQ ID NO: 8709
  peptide (1)..(136): Ceres Seq. ID no. 12356760

SEQ ID NO: 9603 - protein, 102 aa, Zea mays subsp. mays
  peptide (1)..(102): Ceres Seq. ID no. 12356761
HCQIPQKINSSSIPRCHQLAVLRAKHQSSDGPHEADGSQVDGRQGAPQAAGDQGGAQVCAGHRRREEAPPLPPRHRRAPGDPQVPEEHGAAHPQVALPAPRP

SEQ ID NO: 9604 - DNA, 1364 bp, Zea mays subsp. mays
  misc_feature (1)..(1364): Ceres Seq. ID no. 12354363
  misc_feature (1)..(1364): Ortholog of  Ceres SEQ ID NO 15171279 as cited in SEQ ID NO 51378
  misc_feature (1)..(1364): Ortholog of  Ceres SEQ ID NO 13596816 as cited in SEQ ID NO 62287
acaacgagccaacgctcggggttttcactgcacacaagctttgctcagtcgttctgtgcttactgttcctgactcgtgtcgtgcaggagtcgaaggcattggcgtcaactacggcacgatcgccagcaacctgccgtcccccgacaaggtgatcacgctgtgcaaggccaagggcatcaccgacgtccggctcttccacccggacaccgccgtcctggcggcgctccgaggctcgggcctgggcgtcgtgctcggcaccctgaacgaggacctggcccgcctggcctccgacccctcgttcgccgcgtcgtgggtgcagtcctacgtgcggcccttcgccggcgccgtccgcttccgctacgtgggccgcgggcaacgaggtcgtcccgggggacctagcctcgcacgtccttccgtccatgcacaacctcgagtccgcgctccgtgccgcggggctcggcggcgtgcgggtcaccaccgccgtgtcgacgtccgtgctgggaacctcgtacccgccgtcgcagggcgccttctccgacgcggcgctgccgtccatggggcccatcgcgtcgttcctggcgcccaggtccacgccgctgctcgtcaacgtgtacccctacttcgcctactcggccgacccggcgtcggtgtcgctggactacgcgctgctgcggtccgactcgggcggcggggccgtcgtcgtggcggacggcggggcgtcgtacggcaacatgttcgacgccatcgtggacgccgtgtacgcggcgctggagagggccggcgcgcggggcctggagctggtggtctcggagaccgggtggccgtcgggcggaggcggcgccggcgcaagcgtgggtaacgcgtcggcgtacgtcaacaacgtggtgcgccacgtcgggagcggccgcggcacgccgcggcggcccgggaagcccgtggaggcgttcatcttcgccatgttcaatgagaaccagaagcccgagggcgtggagcagcacttcggcatgttccagccggacatgaccgaggtgtaccacgtcgacttcatggcggcatcttcctcgtaggcgaaacaacgtacgtactgcgctgcgcggattaaggacgacacacacgttggcattttttttgtaaaaaaaaagtttttaatggtctcatcgacgtcgatctgcattattgtgcacgaactattaagatttgggagatgattactcgcatctagttccagtaggattcatcgaatggttgggtcggcgattgttggtgacatttgcacatatgagtgcatcttaaagcatcaaccaacgccacgttactatacaatgcaatgctgcatatattatcaatatagttttttatgctct

SEQ ID NO: 9605 - protein, 285 aa, Zea mays subsp. mays
  peptide (1)..(285): Ceres Seq. ID no. 12354364
QRANARGFHCTQALLSRSVLTVPDSCRAGVEGIGVNYGTIASNLPSPDKVITLCKAKGITDVRLFHPDTAVLAALRGSGLGVVLGTLNEDLARLASDPSFAASWVQSYVRPFAGAVRFRYVGRGQRGRPGGPSLARPSVHAQPRVRAPCRGARRRAGHHRRVDVRAGNLVPAVAGRLLRRGAAVHGAHRVVPGAQVHAAARQRVPLLRLLGRPGVGVAGLRAAAVRLGRRGRRRGGRRGVVRQHVRRHRGRRVRGAGEGRRAGPGAGGLGDRVAVGRRRRRRKRG

SEQ ID NO: 9606 - protein, 215 aa, Zea mays subsp. mays
  peptide (1)..(215): Ceres Seq. ID no. 12354365
MHNLESALRAAGLGGVRVTTAVSTSVLGTSYPPSQGAFSDAALPSMGPIASFLAPRSTPLLVNVYPYFAYSADPASVSLDYALLRSDSGGGAVVVADGGASYGNMFDAIVDAVYAALERAGARGLELVVSETGWPSGGGGAGASVGNASAYVNNVVRHVGSGRGTPRRPGKPVEAFIFAMFNENQKPEGVEQHFGMFQPDMTEVYHVDFMAASSS

SEQ ID NO: 9607 - protein, 170 aa, Zea mays subsp. mays
  peptide (1)..(170): Ceres Seq. ID no. 12354366
MGPIASFLAPRSTPLLVNVYPYFAYSADPASVSLDYALLRSDSGGGAVVVADGGASYGNMFDAIVDAVYAALERAGARGLELVVSETGWPSGGGGAGASVGNASAYVNNVVRHVGSGRGTPRRPGKPVEAFIFAMFNENQKPEGVEQHFGMFQPDMTEVYHVDFMAASSS

SEQ ID NO: 9608 - DNA, 1285 bp, Zea mays subsp. mays
  misc_feature (1)..(1285): Ceres Seq. ID no. 12416626
  misc_feature (1)..(1285): Ortholog of  Ceres SEQ ID NO 13637842 as cited in SEQ ID NO 54650
  misc_feature (1)..(1285): Ortholog of  Ceres SEQ ID NO 12608127 as cited in SEQ ID NO 57579
  misc_feature (1)..(1285): Ortholog of  Ceres SEQ ID NO 12634558 as cited in SEQ ID NO 0
  misc_feature (1)..(1285): Ortholog of  Ceres SEQ ID NO 15180294 as cited in SEQ ID NO 0
gaagtcgccggagccacacgcattcccctgcctcgcccttccccctcctatttaccgcccgcgtcgtcccccaacgcacgccttcccacccccgtgcctgcctctgcctgcctgctccccgacgccggggggccccacgacgacccagccccggccccgcgcggtcacagcaagccgggacatggcgcgcggcggcatcgcccgcctactcgccacgctccttttcttcctcctgctcgccacgcccctcgcagacggagcttccgaggcagagacgggcctcgcgcagggcgcgtctgaggcggcggcgccggacgcgggcgcggacacgcagcagcagcacctcctgccgcggcccctcgtcatcgagctcccgtcgtcgcgggccgaggacgaggacgagcccggcgctgacgccgtgccgccggacgtgcgctgcgccagctggcggctggcggcggaggccaacaacctcgcgccgtggagggcggtgccgccggagtgcgcgccgcacgtgcgggactacgtcaccggcgtcgcctaccgctccgacctcgacctcgtggcgcgggagtccgccgcctacgcgcgcgccgccgcgccgctcggcgccgacgggcgcgacgcctgggtcttcgacgtcgacgagaccctgctctccaacctcccgtactacgccgagcacggctacggggctgagttgttcgaccaccacaagtttgacgagtgggtggagaggggcgaggcggccgccatcccctcgagcttgaagctgtacaatgaggttcgcgagctggggttcaagaccttcctgctcacgggcagaagcgaggggcaccgaggcgtcacggtggacaacctcaacaaacaggggttccatgactgggaaaagctcgtactcagggcagcaggtgaccgcaagaaaacagcgacagtctacaaatcagaaaagaggaaggagatggaacaagagggttacaggatcctaggcaactctggcgaccaatggagcgacctgctggggtcttccatgggtgcccgctctttcaagctccctaacccaatgtattatatcccgtgacagaaactgggaaacaaggccgggtgaaaggtgctgcgtttattggatgcacaggcccggtcgaaaacagaaatcatttcgcaatggaatttaaaactgtacaaatgcttctttcactaacttggtgtacattactcgactgcatgtgcagagttacttcaactatgtaagagtgaaaacgggtccggggatcaatgttcctcg

SEQ ID NO: 9609 - protein, 359 aa, Zea mays subsp. mays
  peptide (1)..(359): Ceres Seq. ID no. 12416627
KSPEPHAFPCLALPPPIYRPRRPPTHAFPPPCLPLPACSPTPGGPTTTQPRPRAVTASRDMARGGIARLLATLLFFLLLATPLADGASEAETGLAQGASEAAAPDAGADTQQQHLLPRPLVIELPSSRAEDEDEPGADAVPPDVRCASWRLAAEANNLAPWRAVPPECAPHVRDYVTGVAYRSDLDLVARESAAYARAAAPLGADGRDAWVFDVDETLLSNLPYYAEHGYGAELFDHHKFDEWVERGEAAAIPSSLKLYNEVRELGFKTFLLTGRSEGHRGVTVDNLNKQGFHDWEKLVLRAAGDRKKTATVYKSEKRKEMEQEGYRILGNSGDQWSDLLGSSMGARSFKLPNPMYYIP

SEQ ID NO: 9610 - protein, 299 aa, Zea mays subsp. mays
  peptide (1)..(299): Ceres Seq. ID no. 12416628
MARGGIARLLATLLFFLLLATPLADGASEAETGLAQGASEAAAPDAGADTQQQHLLPRPLVIELPSSRAEDEDEPGADAVPPDVRCASWRLAAEANNLAPWRAVPPECAPHVRDYVTGVAYRSDLDLVARESAAYARAAAPLGADGRDAWVFDVDETLLSNLPYYAEHGYGAELFDHHKFDEWVERGEAAAIPSSLKLYNEVRELGFKTFLLTGRSEGHRGVTVDNLNKQGFHDWEKLVLRAAGDRKKTATVYKSEKRKEMEQEGYRILGNSGDQWSDLLGSSMGARSFKLPNPMYYIP

SEQ ID NO: 9611 - protein, 255 aa, Zea mays subsp. mays
  peptide (1)..(255): Ceres Seq. ID no. 12416629
SRRSHTHSPASPFPLLFTARVVPQRTPSHPRACLCLPAPRRRGAPRRPSPGPARSQQAGTWRAAASPAYSPRSFSSSCSPRPSQTELPRQRRASRRARLRRRRRTRARTRSSSTSCRGPSSSSSRRRGPRTRTSPALTPCRRTCAAPAGGWRRRPTTSRRGGRCRRSARRTCGTTSPASPTAPTSTSWRGSPPPTRAPPRRSAPTGATPGSSTSTRPCSPTSRTTPSTATGLSCSTTTSLTSGWRGARRPPSPRA

SEQ ID NO: 9612 - DNA, 1240 bp, Zea mays subsp. mays
  misc_feature (1)..(1240): Ceres Seq. ID no. 12354293
  misc_feature (1)..(1240): Ortholog of  Ceres SEQ ID NO 13637842 as cited in SEQ ID NO 54650
  misc_feature (1)..(1240): Ortholog of  Ceres SEQ ID NO 12608127 as cited in SEQ ID NO 57579
  misc_feature (1)..(1240): Ortholog of  Ceres SEQ ID NO 12634558 as cited in SEQ ID NO 0
  misc_feature (1)..(1240): Ortholog of  Ceres SEQ ID NO 15180294 as cited in SEQ ID NO 0
aaaaacagtgcactgactgagtgagtgtcatccagtgcaagctcccagtcccagtcccagtcccagtcccagggtagtagaggactagaggcaggctagagcaaagcacgcggattgcgtggctagcgcaacaatggcgatggccacggccaagctcgtccttctcatggtcctcgtggccggcagctccagcggcggcagcgcgtgggggccgctgatgagccgcctccggatgccgacggcgcgggtcgccccgtcgaggtggcgaaggagcgcctccaggaggactacgtcgtatcggcggctgcgccgctgatccacgcgctgcggccgctgctgggctccgcgggggacctgggccggcgcgccggcgtgccgtgcgacagctggcgcctggccgtggagacgtacaacaagcgcgattggacgacggtgccggccagctgcgagcgctacgtcggccactacatgctcggcggccactaccgccgggactcccgcgtcgtcatcgacgaggccatcgcctacgccgagggcctcaagctgggcggcaacggcaaggaggtctgggtcttcgatatcgacgagacgtccctctccaatctcccctactatgccacccacggcttcggcactaagctatacaacgcgacgagcttcaacgagtacgtgctggaggggagcgcgccggtgctcccggagacgcagcggctgttcaagaagctcgtctcgctgggcatcaagccggtgttcctgacgggccgcaccgaggaccagagggccatcaccgtcaccaacctccgccgccaggggtactccggctggatgacgctgctgctcaagcccgtcggcctcaaggccaccgccatcgcctacaagtccggcgagcgccagaagctccaggacgccgggtacgtcatcgtcggcaacatcggcgaccagtggagcgacatcctcggcgcgccggagggcgcgcgcaccttcaagctgcctgaccccctctactacattggctaagcagcgatgccaacggcgcggctctccatcagcccatcgatcaacccgtcaccccggctccagtgcctgtgctcaactgctctttgtttgttacccctcacttcttatcatcattaattcctaaggttaattccctgagctgagtggaaataaggccgactcggtggagagctgtcgacttctcaataattgctcatgaaaaccatgatggtttatgttatgc

SEQ ID NO: 9613 - protein, 182 aa, Zea mays subsp. mays
  peptide (1)..(182): Ceres Seq. ID no. 12354294
MLGGHYRRDSRVVIDEAIAYAEGLKLGGNGKEVWVFDIDETSLSNLPYYATHGFGTKLYNATSFNEYVLEGSAPVLPETQRLFKKLVSLGIKPVFLTGRTEDQRAITVTNLRRQGYSGWMTLLLKPVGLKATAIAYKSGERQKLQDAGYVIVGNIGDQWSDILGAPEGARTFKLPDPLYYIG

SEQ ID NO: 9614 - DNA, 1412 bp, Zea mays subsp. mays
  misc_feature (1)..(1412): Ceres Seq. ID no. 12416622
  misc_feature (1)..(1412): Ortholog of  Ceres SEQ ID NO 15178131 as cited in SEQ ID NO 52639
ctaactagggttttgccaagccctctccttccctatcctcacccccatggaccccttttccaagaagcgcaagcccgacgagaacggtgccgtcaccgcctctcccgccggtggggctgccacgctgggcctcacccgcgacgacgtcatccgccttctcgagccgctctcccgggaccagcttgcggacatagcggccgccgccgcgctcgtctcctcgcaagcgctcgacgccgtgcgcgcagccgccgaccgtgacccggccctccgcaagctcttcgttcgggggctaggttgggagaccacatccgactcgctccgcgccatcttctccgcttacggggacctggaggaggccgtcgtcatcactgacaaacccacggggcggtccaagggctacgggttcgtcaccttccgccacgccgattccgccgtcctcgcgctcaaggagccatccaagaagatcgacggtcgcatgactgtcacgcagctcgccgccgccggctcggctggtgggcccgccggtgggcccgccggcagtggcggtgctcctgtgtctgatgtgtcgctccggaagatcttcgttggtaacgttccggcagacatggcatcagagcgtctccttgcgcattttgcctcctatggcgagattgaggaggggccgctgggttttgacaagcagacgggcaagttccggggttttgcactcttcgtatacaagacaccagaaggtgcgcaggcctccctagtggacacggtgaaggtaattgacggccaccagcttgtatgcaagcttgccttagacgggaagaaggagaagcaggggcaatcacagcaacctggacctggcaatcaccaccagcagcagatactgccgggtggtccgcaggacattcagggagggcttgggcttgggtcacaaatgggagcacagtatggtgtccctgggactggtatgccttcatttggttttggtggtgttggcggcgggtttgggggtccaaatccttatggtaacatgccatcttccatgggtggaagtggcgcaggtggtttagggtcgatgggaggccaggtgcccagtggtttggctagtgctggggctggtgcatttgggcctggcggattgggtggtggttcatttggtgtatcatctcagttcggtgctgctgggatgggggcatatggtggccttggaattggtggaggctctatgtaccgcatacaacagggagcaggtgggctgcctgcaggcgcatttggtgatggagggagctacccacctccaggttctggtttccggggccaggaccctcaaggtggaatgtctcctcctggtccaggtggcagggctcctcctatgtatcccaacgtgccaccttatttctaaggtattcatttacactgcttcc

SEQ ID NO: 9615 - protein, 447 aa, Zea mays subsp. mays
  peptide (1)..(447): Ceres Seq. ID no. 12416623
MDPFSKKRKPDENGAVTASPAGGAATLGLTRDDVIRLLEPLSRDQLADIAAAAALVSSQALDAVRAAADRDPALRKLFVRGLGWETTSDSLRAIFSAYGDLEEAVVITDKPTGRSKGYGFVTFRHADSAVLALKEPSKKIDGRMTVTQLAAAGSAGGPAGGPAGSGGAPVSDVSLRKIFVGNVPADMASERLLAHFASYGEIEEGPLGFDKQTGKFRGFALFVYKTPEGAQASLVDTVKVIDGHQLVCKLALDGKKEKQGQSQQPGPGNHHQQQILPGGPQDIQGGLGLGSQMGAQYGVPGTGMPSFGFGGVGGGFGGPNPYGNMPSSMGGSGAGGLGSMGGQVPSGLASAGAGAFGPGGLGGGSFGVSSQFGAAGMGAYGGLGIGGGSMYRIQQGAGGLPAGAFGDGGSYPPPGSGFRGQDPQGGMSPPGPGGRAPPMYPNVPPYF

SEQ ID NO: 9616 - protein, 304 aa, Zea mays subsp. mays
  peptide (1)..(304): Ceres Seq. ID no. 12416624
MTVTQLAAAGSAGGPAGGPAGSGGAPVSDVSLRKIFVGNVPADMASERLLAHFASYGEIEEGPLGFDKQTGKFRGFALFVYKTPEGAQASLVDTVKVIDGHQLVCKLALDGKKEKQGQSQQPGPGNHHQQQILPGGPQDIQGGLGLGSQMGAQYGVPGTGMPSFGFGGVGGGFGGPNPYGNMPSSMGGSGAGGLGSMGGQVPSGLASAGAGAFGPGGLGGGSFGVSSQFGAAGMGAYGGLGIGGGSMYRIQQGAGGLPAGAFGDGGSYPPPGSGFRGQDPQGGMSPPGPGGRAPPMYPNVPPYF

SEQ ID NO: 9617 - protein, 261 aa, Zea mays subsp. mays
  peptide (1)..(261): Ceres Seq. ID no. 12416625
MASERLLAHFASYGEIEEGPLGFDKQTGKFRGFALFVYKTPEGAQASLVDTVKVIDGHQLVCKLALDGKKEKQGQSQQPGPGNHHQQQILPGGPQDIQGGLGLGSQMGAQYGVPGTGMPSFGFGGVGGGFGGPNPYGNMPSSMGGSGAGGLGSMGGQVPSGLASAGAGAFGPGGLGGGSFGVSSQFGAAGMGAYGGLGIGGGSMYRIQQGAGGLPAGAFGDGGSYPPPGSGFRGQDPQGGMSPPGPGGRAPPMYPNVPPYF

SEQ ID NO: 9618 - DNA, 2061 bp, Zea mays subsp. mays
  misc_feature (1)..(2061): Ceres Seq. ID no. 12416040
  misc_feature (1)..(2061): Ortholog of  Ceres SEQ ID NO 14312989 as cited in SEQ ID NO 59121
  misc_feature (1)..(2061): Ortholog of  Ceres SEQ ID NO 12586556 as cited in SEQ ID NO 64667
  misc_feature (1)..(2061): Ortholog of  Ceres SEQ ID NO 14316045 as cited in SEQ ID NO 66810
  misc_feature (1)..(2061): Ortholog of  Ceres SEQ ID NO 13660894 as cited in SEQ ID NO 67475
cattgttgattacacggtatgcgcagagtggttattctgatgaggctgtagaattgtttcttgacatgctggagaacggatttcagccggaccagtacaccttgagcagtatgttatcggcctgtacagagttgggatcattcaggttggggcagcaactgcactctctagcgctcaggcttggactggaatcagacagttgcgtgagctgtgggcttgtggacatgtatgcaaagtctcacaatggacagtccttgcacaatgcgagagaagtcttcaatcggatgccaaagcataatgtgatgtcgtggacggcacttttgtcagggtatgtgcagcgtggatcgcaggacaaccaggttatgatactgttttgcaagatgttaaatgaaggcatcagaccaaaccatatcacatattctagtatgcttaaggcatgtgcaaaccttggtgatcaagattcaggcaggcaaattcatactcattgcgtcaaatctaacctagctgacttaaacgttgttgggaatgctttagtaagcatgtatgctgaatctggttccatagaggaagctagacatgcgttcgaccagctatatgaaaagaacatggtatccttcagcggcaatttagacggagatgggaggagcaacacttatcaagactatcagattgaaagaatggagttaggaatcagcactttcacatttggtagtctgatcagtgctgccgcttgtgtagggatgctaaccaaaggccagcagctgcatgccctctcactgaaggctggatttgggtcagatagagccataggaaactctcttgtatctatgtattctaggtgtggatacctagtagatgcttgccaagtctttgatgaaatgaatgaccataatgtgatctcatggacttcaatgatcagtggtttggcaaaacatgggtatgcagcaagagctctggaattgtttcacgatatgatcgcagctggggtgaaaccaaatgatgtcacatacattgctgttttatctgcatgtagccatgccggtctagttaaagaagggaaggaacactttagaatgatgcagaagcatcatggactcataccaaggatggagcattatgcttgcatggttgatctccttgggcgatcaggccttgttgaagatgcactagattttatcaacgaaatgccttgtcaagtagacgcattggtctggaagacacttcttggtgcctgtaagacccacaacaacatggatattggtgagattgctgctaaccatgtcatacagctcgaaccacaagatccagccccctatgtcttgctttccaacttatacgcagaggctggtttgtgggatcaagtagctaggataaggagtctaatgagggataaaaacttgatgaaagaaaaagggttgagctggatgcatgttgacaataccattcacgagtttcgagctggtgataccagccatccacaagcagaggagatctatacaaagttggagacactgataagagaaatcaaagtcatgggctatgtaccagacaccagcgtagtgctccatgacatgtcggatgagcttaaggaactgtgtctgcttcagcacagcgagaagattgctgttgcattcggtttgatcagttgtacatcagcaacaaagccaataaggatatttaagaacctccgtgtatgcgttgattgtcattcagcactcaagtatgtctccaaggccaccggtagggagataatattgagagatagcaacagattccacaggatgaaggatggggaatgctcgtgcggagaatactggtaacaagcaagctagctagctcacgtagtcacgtttagctgaagagccatgtacagagttctggcgcaccacaacattattgacagtgagtgtccatgttcatattttctgtaggaccttcacaaaatcatagtttatacaaagcatgagttgttgtgatagtttatactttatactagggtcagagtttgtacagttgtatgcactctcctatcaccataaatgcaaattgttttgagtggtc

SEQ ID NO: 9619 - protein, 605 aa, Zea mays subsp. mays
  peptide (1)..(605): Ceres Seq. ID no. 12416041
LLITRYAQSGYSDEAVELFLDMLENGFQPDQYTLSSMLSACTELGSFRLGQQLHSLALRLGLESDSCVSCGLVDMYAKSHNGQSLHNAREVFNRMPKHNVMSWTALLSGYVQRGSQDNQVMILFCKMLNEGIRPNHITYSSMLKACANLGDQDSGRQIHTHCVKSNLADLNVVGNALVSMYAESGSIEEARHAFDQLYEKNMVSFSGNLDGDGRSNTYQDYQIERMELGISTFTFGSLISAAACVGMLTKGQQLHALSLKAGFGSDRAIGNSLVSMYSRCGYLVDACQVFDEMNDHNVISWTSMISGLAKHGYAARALELFHDMIAAGVKPNDVTYIAVLSACSHAGLVKEGKEHFRMMQKHHGLIPRMEHYACMVDLLGRSGLVEDALDFINEMPCQVDALVWKTLLGACKTHNNMDIGEIAANHVIQLEPQDPAPYVLLSNLYAEAGLWDQVARIRSLMRDKNLMKEKGLSWMHVDNTIHEFRAGDTSHPQAEEIYTKLETLIREIKVMGYVPDTSVVLHDMSDELKELCLLQHSEKIAVAFGLISCTSATKPIRIFKNLRVCVDCHSALKYVSKATGREIILRDSNRFHRMKDGECSCGEYW

SEQ ID NO: 9620 - protein, 584 aa, Zea mays subsp. mays
  peptide (1)..(584): Ceres Seq. ID no. 12416042
MLENGFQPDQYTLSSMLSACTELGSFRLGQQLHSLALRLGLESDSCVSCGLVDMYAKSHNGQSLHNAREVFNRMPKHNVMSWTALLSGYVQRGSQDNQVMILFCKMLNEGIRPNHITYSSMLKACANLGDQDSGRQIHTHCVKSNLADLNVVGNALVSMYAESGSIEEARHAFDQLYEKNMVSFSGNLDGDGRSNTYQDYQIERMELGISTFTFGSLISAAACVGMLTKGQQLHALSLKAGFGSDRAIGNSLVSMYSRCGYLVDACQVFDEMNDHNVISWTSMISGLAKHGYAARALELFHDMIAAGVKPNDVTYIAVLSACSHAGLVKEGKEHFRMMQKHHGLIPRMEHYACMVDLLGRSGLVEDALDFINEMPCQVDALVWKTLLGACKTHNNMDIGEIAANHVIQLEPQDPAPYVLLSNLYAEAGLWDQVARIRSLMRDKNLMKEKGLSWMHVDNTIHEFRAGDTSHPQAEEIYTKLETLIREIKVMGYVPDTSVVLHDMSDELKELCLLQHSEKIAVAFGLISCTSATKPIRIFKNLRVCVDCHSALKYVSKATGREIILRDSNRFHRMKDGECSCGEYW

SEQ ID NO: 9621 - protein, 569 aa, Zea mays subsp. mays
  peptide (1)..(569): Ceres Seq. ID no. 12416043
MLSACTELGSFRLGQQLHSLALRLGLESDSCVSCGLVDMYAKSHNGQSLHNAREVFNRMPKHNVMSWTALLSGYVQRGSQDNQVMILFCKMLNEGIRPNHITYSSMLKACANLGDQDSGRQIHTHCVKSNLADLNVVGNALVSMYAESGSIEEARHAFDQLYEKNMVSFSGNLDGDGRSNTYQDYQIERMELGISTFTFGSLISAAACVGMLTKGQQLHALSLKAGFGSDRAIGNSLVSMYSRCGYLVDACQVFDEMNDHNVISWTSMISGLAKHGYAARALELFHDMIAAGVKPNDVTYIAVLSACSHAGLVKEGKEHFRMMQKHHGLIPRMEHYACMVDLLGRSGLVEDALDFINEMPCQVDALVWKTLLGACKTHNNMDIGEIAANHVIQLEPQDPAPYVLLSNLYAEAGLWDQVARIRSLMRDKNLMKEKGLSWMHVDNTIHEFRAGDTSHPQAEEIYTKLETLIREIKVMGYVPDTSVVLHDMSDELKELCLLQHSEKIAVAFGLISCTSATKPIRIFKNLRVCVDCHSALKYVSKATGREIILRDSNRFHRMKDGECSCGEYW

SEQ ID NO: 9622 - DNA, 861 bp, Zea mays subsp. mays
  misc_feature (1)..(861): Ceres Seq. ID no. 12347397
  misc_feature (1)..(861): Ortholog of  Ceres SEQ ID NO 12609902 as cited in SEQ ID NO 51816
accccgactcctccccatcgcccatcgccgccctccgatccttcatggccgctgccacagccgccgccgccgcgctcgcctccccggcgggcctctccacatcgctggcgcgccgcggcctcgtcagcttcgcacccgcgctccgccccggccctgaccgcagctctcgcgccgtcgccctcctcggtgtacgaactcatgtcacggctgttgatcaagccattgtaaaaggtgatacaaagttggaaggtcctgtggttgttgttactggtgcttccagggggattggaaaagccactgcattggctcttggaaaagcaggctgcaaggtcttggtgaattatgctcgatcttcaaaggaggctgaagaagtctccaaggagattgaagcatctggaggccaggccattacctttggaggagatgtttccaaagaggctgatgtttaatctattataaaagtggctgttgatacatggggaacgattgatgtactagtaaataatgcaggaatcacacgggacacattgttgatgagaatgaagaaatcacagtggcaagatgtgattgatttgaatcttacaggcgttttcctttgcacgcaggctgcaacaaaagtaatgatgaagaagaaaaagggaagaattatcaatatagcatcggttgttggtcttactggtaatgctggacaagctaattatgctgctgccaaaggtttgtattcctgtatatggtacaaattgtaaaatccgtgccagggtttatgtttcctgaccgtggcgacggtcctgttttcactcttctttcttcattgccctgtattctttttgtctgcattcttttttgtcaagcttggcgtcc

SEQ ID NO: 9623 - protein, 148 aa, Zea mays subsp. mays
  peptide (1)..(148): Ceres Seq. ID no. 12347398
PDSSPSPIAALRSFMAAATAAAAALASPAGLSTSLARRGLVSFAPALRPGPDRSSRAVALLGVRTHVTAVDQAIVKGDTKLEGPVVVVTGASRGIGKATALALGKAGCKVLVNYARSSKEAEEVSKEIEASGGQAITFGGDVSKEADV

SEQ ID NO: 9624 - protein, 134 aa, Zea mays subsp. mays
  peptide (1)..(134): Ceres Seq. ID no. 12347399
MAAATAAAAALASPAGLSTSLARRGLVSFAPALRPGPDRSSRAVALLGVRTHVTAVDQAIVKGDTKLEGPVVVVTGASRGIGKATALALGKAGCKVLVNYARSSKEAEEVSKEIEASGGQAITFGGDVSKEADV

SEQ ID NO: 9625 - protein, 75 aa, Zea mays subsp. mays
  peptide (1)..(75): Ceres Seq. ID no. 12347400
TPTPPHRPSPPSDPSWPLPQPPPPRSPPRRASPHRWRAAASSASHPRSAPALTAALAPSPSSVYELMSRLLIKPL

SEQ ID NO: 9626 - DNA, 1417 bp, Zea mays subsp. mays
  misc_feature (1)..(1417): Ceres Seq. ID no. 12383227
  misc_feature (1)..(1417): Ortholog of  Ceres SEQ ID NO 13598368 as cited in SEQ ID NO 62140
gcacgagaccattacctagaacatcctaatcgaaaaaggcaattgcaagcagcacaaggctccaaagatgcaccgctccttcctcctcgtctctgcactcgtagccaccgcgctttccaccgacaccaccgttgccgctgcccagagccagaggcagaggtcatgggccgaactcagcgggcgggacaactgggacgggctcctggacccgctcgacggcgacctccggcgcgccgtcatccggtacgggaagctggcgcaggcgacgtcgtacgcgttcatcggcgacccggcgtcgccgtacgcgggcgcgtcgcggtacgcccccggcgcgttcctccgcagggcgcaggcgcccgacccggacgcgtacaacgtgacgaggttcctgtacgcgacgtcgagcgcgcgcgtccccggccagttcatcacgcggccggcgccgccgggggcgtggagcgccgagtccaactggatggggtacgtcggccgtggccacggacgccggcgtcgcgaggcctggggaggcgggacatcgtggtggcgtggcgcgggaccaagcgcgccgtggagtgggccaacgacctggacatcacgctggtgccggcggcgggcgtcgtcgggcctggccccgggtggtcgcagccggcggtgcaccggggtttcttgtccgtgtacgcgtcgaggaactccacgtcgcggttcaacaagcaaagcgccagagagcaggtgttggcctagattagaaggctattggacgcgtacaagggcgagaactgcagcatcacgctaaccggccacagcctgggcgcggcgctctccacgctcaccgccatcgacatcgtcgccaacggcctcaacgtccggggccccaacaacgacacggtccccgtcgccgccatcgtcttcggcagcccccgcgtgggcgacgaccagttcaagaaggcgttcgactcggcgcccggcgcccggctgctccgggtccggaacgcgcccgacgtcgtgcccaccgtcctgcccaacgccttctacaaggacgtcggcgtggagctgctgctggacacgcgcaagtcgccgcacctcaagaggcccggcccgggccccgccgcctggcacaacctcgagtgctacctgcacggcgtcgcgggcacgcagggcgccggcgacgccgccgggttcagcctggaggtggaccgcgacgtcgcgctggtgaacaaggaggtggacgcgctcagcgacgactaccccgtgccggcggcctggtgggtggaggggaacaagggcatgaccagggacgccagcggacgctgggttttgcaggatcatgaggagggtaacctcgctatgtgatgattttgataacttcattaaagatggttattaatgaattaataatacgaaagcaagagttttctcc

SEQ ID NO: 9627 - protein, 246 aa, Zea mays subsp. mays
  peptide (1)..(246): Ceres Seq. ID no. 12383228
ARDHYLEHPNRKRQLQAAQGSKDAPLLPPRLCTRSHRAFHRHHRCRCPEPEAEVMGRTQRAGQLGRAPGPARRRPPARRHPVREAGAGDVVRVHRRPGVAVRGRVAVRPRRVPPQGAGARPGRVQRDEVPVRDVERARPRPVHHAAGAAGGVERRVQLDGVRRPWPRTPASRGLGRRDIVVAWRGTKRAVEWANDLDITLVPAAGVVGPGPGWSQPAVHRGFLSVYASRNSTSRFNKQSAREQVLA

SEQ ID NO: 9628 - protein, 241 aa, Zea mays subsp. mays
  peptide (1)..(241): Ceres Seq. ID no. 12383229
MHRSFLLVSALVATALSTDTTVAAAQSQRQRSWAELSGRDNWDGLLDPLDGDLRRAVIRYGKLAQATSYAFIGDPASPYAGASRYAPGAFLRRAQAPDPDAYNVTRFLYATSSARVPGQFITRPAPPGAWSAESNWMGYVGRGHGRRRREAWGGGTSWWRGAGPSAPWSGPTTWTSRWCRRRASSGLAPGGRSRRCTGVSCPCTRRGTPRRGSTSKAPESRCWPRLEGYWTRTRARTAASR

SEQ ID NO: 9629 - protein, 192 aa, Zea mays subsp. mays
  peptide (1)..(192): Ceres Seq. ID no. 12383230
MGRTQRAGQLGRAPGPARRRPPARRHPVREAGAGDVVRVHRRPGVAVRGRVAVRPRRVPPQGAGARPGRVQRDEVPVRDVERARPRPVHHAAGAAGGVERRVQLDGVRRPWPRTPASRGLGRRDIVVAWRGTKRAVEWANDLDITLVPAAGVVGPGPGWSQPAVHRGFLSVYASRNSTSRFNKQSAREQVLA

SEQ ID NO: 9630 - DNA, 1672 bp, Zea mays subsp. mays
  misc_feature (1)..(1672): Ceres Seq. ID no. 12354367
  misc_feature (1)..(1672): Ortholog of  Ceres SEQ ID NO 14311862 as cited in SEQ ID NO 51654
  misc_feature (1)..(1672): Ortholog of  Ceres SEQ ID NO 13597334 as cited in SEQ ID NO 64244
  misc_feature (1)..(1672): Ortholog of  Ceres SEQ ID NO 14303165 as cited in SEQ ID NO 65181
  misc_feature (1)..(1672): Ortholog of  Ceres SEQ ID NO 15224550 as cited in SEQ ID NO 0
acactcccactcggccactcccacctgtaggttcacgggaggcgaggaccttgcccccctgcattcttcccgtatcgcggaccgatcctcgccgcgggaggcgagcggagcggggcgtttctgcgggggagaagcgcgtccctgcaatttctgagagaggggaggcggcgagtggaaaagagcagacgttgctatcctatcttgctgacacagcggcgttgtggcgaggcgcatggcgagggcgcgcggtggcgccgcgtggtgggtgctggcagcggcgtgggtgctgtgggcggcggcggctgcggcggaggcagaggccaggtcgccgtcggcgaggagggtgcaccggcacctcaagcgcctcaacaagccggccgtcaagagcatcgagagtccagatggagacatcatcgactgcgtgcatatctcccaccagccagcctttgatcatcctctcctcaagaaccacacaatacagtttaggccggcgtaccaccctgaaggtctatacgatgataccaagagcagcataggctcaaacaatgctggcgagaggccgatgctccagatgtggcatcgaaatggcaggtgccccgagggcacggttccaatcaggagaaccaagaaggacgacctgcttcgagctagctccgtgaggcggtatggcaggaagcggcacactgctccgaacccactgtctgttgatcccaacatgctcagcgagggtggccaccaacacgccatcgcgtacgtccagggcgacaagtactatggtgcaaaggccaccattaatgtgtgggagcccaagattcagcaggctaacgaatttagcctgtcccagctctggatcttggggggttcatttggggaggatctcaacagcatagaggctggctggcaggttagccctgacctctatggagacaacaacaccaggctgttcacatattggactagtgatgcataccaagccacaggttgctacaacatgttgtgctctggtttcattcagataaacagcgaggttgccatgggggctagtatcttccccatctcgaactacgcgggctcccaatatgatattagcatcctgatctggaaggaccccaaggaaggcaactggtggatgcagtttggcaaggaatacgtcctgggctactggccgtccttcctcttctcctacctcgcggacagcgcgtcgatgatcgaatggggcggggaggtggtgaactcggagcccgacggcacgcacacatcgacccagatgggcagcgggcacttcccggaggaagggttcagcaaggcgagctacttcaagaacgttcaggtggtgtacagcagcaaccagctcagcgcccccaagggcgtaggcaccttcaccgagcagtccaactgctacgacgtgcagaacggtaacaatggggactggggcacctacttctactacggcggccctggcaagaactcgaactgcccgtgactggtgcttctaatgtgtagtgtgaagtgccgtcaccactagcaaaaaaatgtaacccaagcgttcaggttcgcttatacagcgtcaatctgcatctccttgttcagtcttaggtagtgtgtaacatgtgcatgtgctctctagaccctaatgttttcttcttcttttcattgtattttcttcttgtgc

SEQ ID NO: 9631 - protein, 416 aa, Zea mays subsp. mays
  peptide (1)..(416): Ceres Seq. ID no. 12354368
MARARGGAAWWVLAAAWVLWAAAAAAEAEARSPSARRVHRHLKRLNKPAVKSIESPDGDIIDCVHISHQPAFDHPLLKNHTIQFRPAYHPEGLYDDTKSSIGSNNAGERPMLQMWHRNGRCPEGTVPIRRTKKDDLLRASSVRRYGRKRHTAPNPLSVDPNMLSEGGHQHAIAYVQGDKYYGAKATINVWEPKIQQANEFSLSQLWILGGSFGEDLNSIEAGWQVSPDLYGDNNTRLFTYWTSDAYQATGCYNMLCSGFIQINSEVAMGASIFPISNYAGSQYDISILIWKDPKEGNWWMQFGKEYVLGYWPSFLFSYLADSASMIEWGGEVVNSEPDGTHTSTQMGSGHFPEEGFSKASYFKNVQVVYSSNQLSAPKGVGTFTEQSNCYDVQNGNNGDWGTYFYYGGPGKNSNCP

SEQ ID NO: 9632 - protein, 306 aa, Zea mays subsp. mays
  peptide (1)..(306): Ceres Seq. ID no. 12354369
MLQMWHRNGRCPEGTVPIRRTKKDDLLRASSVRRYGRKRHTAPNPLSVDPNMLSEGGHQHAIAYVQGDKYYGAKATINVWEPKIQQANEFSLSQLWILGGSFGEDLNSIEAGWQVSPDLYGDNNTRLFTYWTSDAYQATGCYNMLCSGFIQINSEVAMGASIFPISNYAGSQYDISILIWKDPKEGNWWMQFGKEYVLGYWPSFLFSYLADSASMIEWGGEVVNSEPDGTHTSTQMGSGHFPEEGFSKASYFKNVQVVYSSNQLSAPKGVGTFTEQSNCYDVQNGNNGDWGTYFYYGGPGKNSNCP

SEQ ID NO: 9633 - protein, 303 aa, Zea mays subsp. mays
  peptide (1)..(303): Ceres Seq. ID no. 12354370
MWHRNGRCPEGTVPIRRTKKDDLLRASSVRRYGRKRHTAPNPLSVDPNMLSEGGHQHAIAYVQGDKYYGAKATINVWEPKIQQANEFSLSQLWILGGSFGEDLNSIEAGWQVSPDLYGDNNTRLFTYWTSDAYQATGCYNMLCSGFIQINSEVAMGASIFPISNYAGSQYDISILIWKDPKEGNWWMQFGKEYVLGYWPSFLFSYLADSASMIEWGGEVVNSEPDGTHTSTQMGSGHFPEEGFSKASYFKNVQVVYSSNQLSAPKGVGTFTEQSNCYDVQNGNNGDWGTYFYYGGPGKNSNCP

SEQ ID NO: 9634 - DNA, 1255 bp, Zea mays subsp. mays
  misc_feature (1)..(1255): Ceres Seq. ID no. 12415959
  misc_feature (1)..(1255): Ortholog of  Ceres SEQ ID NO 14316161 as cited in SEQ ID NO 52384
  misc_feature (1)..(1255): Ortholog of  Ceres SEQ ID NO 14315249 as cited in SEQ ID NO 52512
  misc_feature (1)..(1255): Ortholog of  Ceres SEQ ID NO 15174595 as cited in SEQ ID NO 53460
  misc_feature (1)..(1255): Ortholog of  Ceres SEQ ID NO 13503553 as cited in SEQ ID NO 64822
  misc_feature (1)..(1255): Ortholog of  Ceres SEQ ID NO 13660155 as cited in SEQ ID NO 67635
accctcacttcccctactgcgcgtctcgtctgcactaggattggattgaatccagaaccctctcctgcagcctgcaggttgtcgtcgccctcttcctcctccttcgctgttggctgttactattgcttccgcttccgccgccgcggaaatcaaactaatctgatcgagaccacaccgttccagagagatcccccaaacaaaaaaaagagcacgggatcgaaatggagctcgacggcaagtacagcaaggaccagagcctcaaatgcgaatgcctcctcttcgacctcgatgacacactatacccgttcaactccggcattgctgccgacataaagaagaacatccaagactatatggtgcacaagctcggcgttgacgaggccataagcttggacctatgcgtcctcctctacaagcagtacggaaccaccatggctggcttgagggctgttgggtaccagtttgattacgatgactaccacagctttgttcatgggaggttgtcttatgacaaaatcaagcctgatcctgtgcttaggaacatcctcctcagcttacccattcgcaaacttgtgttcacaaacggtgacagaacacatgcttcaagggccctcaagaggcttggcattgaggattgtttcgaaggagtcgtgtgctttgagacactgaacccgacatctcctcctcctcctgtcccagctcaggaacttgaaatctttgatctaatgaagcatctggctcatccacagcccgcggtgcagctaccaaaatcacctatcctatgcaaaccgtcaagggaggccatgctgcaggctctcaaggtcgcctccattaatccacagacaactatattgttcgatgacagcttcaggaacattgaagctgcaaagcaaattggaatgtgtactgtcctggttggaacatctgagcggaaaaagggtgctgaccatgccttggaaagcctccacaacatgaaggaagcactgccggagctgtgggaggaagctgagaaggatgaagatgtgaggaattcgagcaaagccggaatcgagacatctgtgatcgcgtaatcttttttgttccttggttacaaatgtagccccttctgttttccttggaggacaacacgaggtggtggtgtatgaaaaaagaggagacctcctcaaggggtgggggggactgactgatactacgaccactgatgttacaccccgtaaactattactatccaataagaatgttttcttcttcaact

SEQ ID NO: 9635 - protein, 282 aa, Zea mays subsp. mays; identical to SEQ ID NO: 6740
  peptide (1)..(282): Ceres Seq. ID no. 12415960

SEQ ID NO: 9636 - protein, 238 aa, Zea mays subsp. mays; identical to SEQ ID NO: 6741
  peptide (1)..(238): Ceres Seq. ID no. 12415961

SEQ ID NO: 9637 - protein, 212 aa, Zea mays subsp. mays; identical to SEQ ID NO: 6742
  peptide (1)..(212): Ceres Seq. ID no. 12415962

SEQ ID NO: 9638 - DNA, 1957 bp, Zea mays subsp. mays
  misc_feature (1)..(1957): Ceres Seq. ID no. 13493484
  misc_feature (1)..(1957): Ortholog of  Ceres SEQ ID NO 14308723 as cited in SEQ ID NO 58758
aacgtgtcctcctacaattgccgacgtagccgtcgtcttcgccagagcagcgccagcgggcccagttcttgaaagggtgcagtgtatccaaggagacaaaggcatcggtctgcagtttcttggctacaaattcaaacagcactagggtgaaatcagtgggcttgagagtagcatcatccttcaaatgatggtggttatccagctgacggtttctctgggaatggcaacacgctattgccaaaaagcacatccgttcgtggcgaggaccatccggttgctgatcctgtactcccaatggattcaatgatgacgccagaaatcctctctgctaatttggcacttgttatggacaagttctcagatgatgacacagatactgaacttgatttggatagcccgacagagggcttcgcgtcgattgcagatgccattgaggacgtacggcaaggaaaacttgtgattgttgttgatgacgaatcaagggaaaatgaaggagatctgataatggctgcctccttggttaccccagaggcgatggcttttatagtaagacatggaacaggaattgtttgtgtcagcattaaagaagatgatctggaaagactatgccttcctttgatggttaccacaaaagaaaacgaggagaagctatgcactgcttttactgttacagtggatgcaaaagagggcacaactactggagtatctgccaaagacagggcaaaaacagttatgactcttgcatctcctgactctaggcctgaggacttcaaccgccctggtcatattttccctttgaaatacagagaagggggtgttctgaaacgagctggacacacagaggcatcggttgaccttgccatgctggctggattacctcctgttgctgtcctttgtgagattgtggatgatgcagatggttccatggctcgcctgccaaagttgcgtgtctttgctgaaagggaaaatttgaagattatatctattgctgacttgattaggtataggaggaaaagagacaggctagttgaacgtgcttctgttgcacgcttgccttctcaatggggcaatggccatgcatattgctacagatctgctattgatggcatcgagcatcttgccatggtgaaaggtgatattggtgatggccaagacattatggtgagggtgcactctgagtgcctcacaggcgacatttttagatcggcaagatgcgattgcggtgaccagcttgcaatggcaattgagatgattgagaaggccggaaggggcgtaatagtttatctccgtggacacgaaggacggggtatcggtctgggccacaagcttcgtgcttataacttgcaggatgatgggcgtgatactgtggaagctaatgaagaacttggtcttcctgtggactcacgagaatatgggattggcgcacagatactacgggacctaggagtccgttcgatgaagctgatgactaatagccctgcgaaatatagtggtctgaagggttatggactgagcattgcgggcagggtgcccttggttacgccaattaccagcgagaaccgtaagtacctcgagaccaaaagaacaaagatggggcatgtatatggattggctaatgcgcaggttaaccagccaagtggtagccagagcacagaagagaagcattgagcccaaaaaagtgatgcagtcttctttttgggagttcctgaaatcttctccctcgatatttccatatattctttttttctatatttccatatattctttctttcacatagaaggccgttttgttcttcaactgtagctgtaggtttcaagatggttaatgagcctaataaaagcaagtttaataatataagcaactgttcttgtaaggagctttacagtctgtcttatatagccgatatgtataatggttagctttcacaatgaatatatgatcaactgtttttctcac

SEQ ID NO: 9639 - protein, 457 aa, Zea mays subsp. mays
  peptide (1)..(457): Ceres Seq. ID no. 13493485
MDSMMTPEILSANLALVMDKFSDDDTDTELDLDSPTEGFASIADAIEDVRQGKLVIVVDDESRENEGDLIMAASLVTPEAMAFIVRHGTGIVCVSIKEDDLERLCLPLMVTTKENEEKLCTAFTVTVDAKEGTTTGVSAKDRAKTVMTLASPDSRPEDFNRPGHIFPLKYREGGVLKRAGHTEASVDLAMLAGLPPVAVLCEIVDDADGSMARLPKLRVFAERENLKIISIADLIRYRRKRDRLVERASVARLPSQWGNGHAYCYRSAIDGIEHLAMVKGDIGDGQDIMVRVHSECLTGDIFRSARCDCGDQLAMAIEMIEKAGRGVIVYLRGHEGRGIGLGHKLRAYNLQDDGRDTVEANEELGLPVDSREYGIGAQILRDLGVRSMKLMTNSPAKYSGLKGYGLSIAGRVPLVTPITSENRKYLETKRTKMGHVYGLANAQVNQPSGSQSTEEKH

SEQ ID NO: 9640 - protein, 454 aa, Zea mays subsp. mays
  peptide (1)..(454): Ceres Seq. ID no. 13493486
MMTPEILSANLALVMDKFSDDDTDTELDLDSPTEGFASIADAIEDVRQGKLVIVVDDESRENEGDLIMAASLVTPEAMAFIVRHGTGIVCVSIKEDDLERLCLPLMVTTKENEEKLCTAFTVTVDAKEGTTTGVSAKDRAKTVMTLASPDSRPEDFNRPGHIFPLKYREGGVLKRAGHTEASVDLAMLAGLPPVAVLCEIVDDADGSMARLPKLRVFAERENLKIISIADLIRYRRKRDRLVERASVARLPSQWGNGHAYCYRSAIDGIEHLAMVKGDIGDGQDIMVRVHSECLTGDIFRSARCDCGDQLAMAIEMIEKAGRGVIVYLRGHEGRGIGLGHKLRAYNLQDDGRDTVEANEELGLPVDSREYGIGAQILRDLGVRSMKLMTNSPAKYSGLKGYGLSIAGRVPLVTPITSENRKYLETKRTKMGHVYGLANAQVNQPSGSQSTEEKH

SEQ ID NO: 9641 - protein, 453 aa, Zea mays subsp. mays
  peptide (1)..(453): Ceres Seq. ID no. 13493487
MTPEILSANLALVMDKFSDDDTDTELDLDSPTEGFASIADAIEDVRQGKLVIVVDDESRENEGDLIMAASLVTPEAMAFIVRHGTGIVCVSIKEDDLERLCLPLMVTTKENEEKLCTAFTVTVDAKEGTTTGVSAKDRAKTVMTLASPDSRPEDFNRPGHIFPLKYREGGVLKRAGHTEASVDLAMLAGLPPVAVLCEIVDDADGSMARLPKLRVFAERENLKIISIADLIRYRRKRDRLVERASVARLPSQWGNGHAYCYRSAIDGIEHLAMVKGDIGDGQDIMVRVHSECLTGDIFRSARCDCGDQLAMAIEMIEKAGRGVIVYLRGHEGRGIGLGHKLRAYNLQDDGRDTVEANEELGLPVDSREYGIGAQILRDLGVRSMKLMTNSPAKYSGLKGYGLSIAGRVPLVTPITSENRKYLETKRTKMGHVYGLANAQVNQPSGSQSTEEKH

SEQ ID NO: 9642 - DNA, 1528 bp, Zea mays subsp. mays
  misc_feature (1)..(1528): Ceres Seq. ID no. 12354371
  misc_feature (1)..(1528): Ortholog of  Ceres SEQ ID NO 14308359 as cited in SEQ ID NO 55097
  misc_feature (1)..(1528): Ortholog of  Ceres SEQ ID NO 13596689 as cited in SEQ ID NO 62728
agtgagtagtagccaaccttggtctccacttcctgctgccaagtgccgacgcgagtccgtccctcttctcctccgcatccaaagaaaccagaccacaagacatcgagagaacagttgcggccttgctggcacggggatagatcttctccactccaatggcgggcttctcacggccgaacaactcgctcctcctcaagatgcctgcgactttggccagtagccacaccccgaacctctcaagcctcctgttctacgaccagaaccatggccaagctgtaaatgcaaatgcagcagcgatgacgatggtggaggacgacgcctcactccagagctcatctgcagtgctcgacacctccccgcagccacagggcagtgctgctgctgcgtctccgatggagaggaagaggaagcctgcagaagacagtgctacactcagctctctcaatccaaggaggattgcaagcagcagcaggagagcaagagcaggcggggaaagaggccccacaacaaggaggctaatactgaggagaagagcgctactgaagacgaggccaccagggggtacatccatgtgagggcgaggaggggtcaggcaacggacagccacagccttgcagagagggtaaggagagagaggatcagtgagaggatgaggatgctgcaagcactggtccctggttgtgacaaggttactggaaaggccctgattctggatgagattatcaactatgtgcagtccctgcagaaccaagttgagttcctttccatgaggattgcctccatgagcccagtgctatatgggttcggactggatagtgatggcctccatgaccacgcacaaaagatgggagtcatgttccaggaagcccttgcaatggcaggtccagtgctgagccaagccagcccagcagctccatctgaagccatcatggacaccaccacaccttactcactgcatggccatggccagggttccatctctttttcccaggacaatggcagcagcacttacctgatgcagcatcagcaagcagcgggggagccaacaagacagcaggagctgctcagccagttggtgttcaacaacatgtgctctttccagtaggggtggggagcatttgggtgagaggaagcgaggaatggaccccacattgacaataggaaggaaataatgctgcgagatttggtaggagcatgcacgtaccagatgagtttgagatgttggatctagtccatccccttgtctggatttggagagagcagtagcaagtagatcgagcctgctgtttgtttacacattttgagagactttgtagtatttgtaactcctttattgggcattgtccatgaggattttctcagcggctgcaccttccatctcaccgtgttgttgtagttcttgagcaatcggttgttagtacatacgagagctattttgttctttgccaaacagtgattgactgttccatccattcagtcttgtctagctccaagcatctgcaaatcgctacgttgttttctttaaccc

SEQ ID NO: 9643 - protein, 151 aa, Zea mays subsp. mays
  peptide (1)..(151): Ceres Seq. ID no. 12354372
MRMLQALVPGCDKVTGKALILDEIINYVQSLQNQVEFLSMRIASMSPVLYGFGLDSDGLHDHAQKMGVMFQEALAMAGPVLSQASPAAPSEAIMDTTTPYSLHGHGQGSISFSQDNGSSTYLMQHQQAAGEPTRQQELLSQLVFNNMCSFQ

SEQ ID NO: 9644 - protein, 149 aa, Zea mays subsp. mays
  peptide (1)..(149): Ceres Seq. ID no. 12354373
MLQALVPGCDKVTGKALILDEIINYVQSLQNQVEFLSMRIASMSPVLYGFGLDSDGLHDHAQKMGVMFQEALAMAGPVLSQASPAAPSEAIMDTTTPYSLHGHGQGSISFSQDNGSSTYLMQHQQAAGEPTRQQELLSQLVFNNMCSFQ

SEQ ID NO: 9645 - protein, 139 aa, Zea mays subsp. mays
  peptide (1)..(139): Ceres Seq. ID no. 12354374
MAGFSRPNNSLLLKMPATLASSHTPNLSSLLFYDQNHGQAVNANAAAMTMVEDDASLQSSSAVLDTSPQPQGSAAAASPMERKRKPAEDSATLSSLNPRRIASSSRRARAGGERGPTTRRLILRRRALLKTRPPGGTSM

SEQ ID NO: 9646 - DNA, 1542 bp, Zea mays subsp. mays
  misc_feature (1)..(1542): Ceres Seq. ID no. 12354375
  misc_feature (1)..(1542): Ortholog of  Ceres SEQ ID NO 15178228 as cited in SEQ ID NO 58330
  misc_feature (1)..(1542): Ortholog of  Ceres SEQ ID NO 13596635 as cited in SEQ ID NO 62488
accgctgttcttgctgagttgttgtggacaaaaagagcacaaaagtgggtagggcaagccaaccacactcgcagccagcctgcctgctcgcccgcccgccattcttgccgattcgagtcgacgtcacgcctccggcgcccccttcggttgtcacctcgggggtcgcggattggtggagtggaggatttgagcggcgcggccatggatacaacctctagggccgccaagatcccgtcgctccaccagacggagatcaactgggataacctcgacaagaccaagctctacgtggtgggcgcaggcatgttcagcggggtcaccgtggcgctgtaccctgtatcggtggtcaagacccggatgcaggttgcctctggggatgccatggggaggaacgcgctggctaccttcaagaacatccttaaggtggacggcgtgccagggctgtaccgggggtttcctactgttataattggggctgtaccaactaggattatcttcctcacggcgcttgagacaaccaaagcagcctctctcaagcttgttgagcccttcaagctgtcagagccggtgcaggccgcctttgccaatggccttgccggtctgtcggcatccacatgttcgcaggctatttttgtcccaattgatgtgatcagccagaaattgatggttcaagggtattctggtaatgtcagatacaaaggtggagtagatgttgctcgcaaggtcataaaggctgatggcattaaggggctctacagaggatttggactgtctgttatgacctatgcaccatcgagtgctgtgtggtgggcgagttatggttctagccagcgcataatttggagtgcccttggccatttgcataacaaagaagaggctcctagccaattgaaaatagttggtgttcaagcatcaggggggatttttgctggtgctgtgacctcttttgttacgactcccatagatacaatcaagaccaggctgcaggttatggataatgaaaataagccaaaagctggggaagttgttaaaagattgatcgctgaagatggatggaaaggtttgtacagagggttgggtccaagatttttcagctcatcagcttggggtacctcaatgatagtatgctacgagtacctgaagcgcttgtgtgctaaagttgaagaggtctgacttctgttcttactattctggaagttttgtattagaagaagtgaaataatgctgtatgtcgacaacattgacaccaccggaagcttcagttcttgctgacgtaggtgaaagcattcaacatggatgtttgatggtgtacttcatttggtgctagacaatagtctttacaaactttgcttctctgggctatatctcaaaaaatgtaggggcctatatttttttgctcatatgatgaatatgggtttggcggattattttaggtgagtataaacgatatcagatgtacacacttctcattcttttatacatgaaggctattttagcgaggctgtatgattatgaccagtctggatgattgagaccagttgt

SEQ ID NO: 9647 - protein, 390 aa, Zea mays subsp. mays
  peptide (1)..(390): Ceres Seq. ID no. 12354376
TAVLAELLWTKRAQKWVGQANHTRSQPACSPARHSCRFESTSRLRRPLRLSPRGSRIGGVEDLSGAAMDTTSRAAKIPSLHQTEINWDNLDKTKLYVVGAGMFSGVTVALYPVSVVKTRMQVASGDAMGRNALATFKNILKVDGVPGLYRGFPTVIIGAVPTRIIFLTALETTKAASLKLVEPFKLSEPVQAAFANGLAGLSASTCSQAIFVPIDVISQKLMVQGYSGNVRYKGGVDVARKVIKADGIKGLYRGFGLSVMTYAPSSAVWWASYGSSQRIIWSALGHLHNKEEAPSQLKIVGVQASGGIFAGAVTSFVTTPIDTIKTRLQVMDNENKPKAGEVVKRLIAEDGWKGLYRGLGPRFFSSSAWGTSMIVCYEYLKRLCAKVEEV

SEQ ID NO: 9648 - protein, 323 aa, Zea mays subsp. mays
  peptide (1)..(323): Ceres Seq. ID no. 12354377
MDTTSRAAKIPSLHQTEINWDNLDKTKLYVVGAGMFSGVTVALYPVSVVKTRMQVASGDAMGRNALATFKNILKVDGVPGLYRGFPTVIIGAVPTRIIFLTALETTKAASLKLVEPFKLSEPVQAAFANGLAGLSASTCSQAIFVPIDVISQKLMVQGYSGNVRYKGGVDVARKVIKADGIKGLYRGFGLSVMTYAPSSAVWWASYGSSQRIIWSALGHLHNKEEAPSQLKIVGVQASGGIFAGAVTSFVTTPIDTIKTRLQVMDNENKPKAGEVVKRLIAEDGWKGLYRGLGPRFFSSSAWGTSMIVCYEYLKRLCAKVEEV

SEQ ID NO: 9649 - protein, 289 aa, Zea mays subsp. mays
  peptide (1)..(289): Ceres Seq. ID no. 12354378
MFSGVTVALYPVSVVKTRMQVASGDAMGRNALATFKNILKVDGVPGLYRGFPTVIIGAVPTRIIFLTALETTKAASLKLVEPFKLSEPVQAAFANGLAGLSASTCSQAIFVPIDVISQKLMVQGYSGNVRYKGGVDVARKVIKADGIKGLYRGFGLSVMTYAPSSAVWWASYGSSQRIIWSALGHLHNKEEAPSQLKIVGVQASGGIFAGAVTSFVTTPIDTIKTRLQVMDNENKPKAGEVVKRLIAEDGWKGLYRGLGPRFFSSSAWGTSMIVCYEYLKRLCAKVEEV

SEQ ID NO: 9650 - DNA, 1770 bp, Zea mays subsp. mays
  misc_feature (1)..(1770): Ceres Seq. ID no. 12356921
  misc_feature (1)..(1770): Ortholog of  Ceres SEQ ID NO 13598579 as cited in SEQ ID NO 65523
atcatcactacacactacaaacactaccaccatccagcagctagcagaaggcagaagcagctagtgtagatagccggcggctggctgagaccaccacctctccctttcctttcttctctttgctttgctccctctcatctcatcttcccttcccttctccagctaacactacagctttctagggctcacaccgcagcaccgatccagcgccgtccggtcgtcgatccacatcaccattattccatccccctgataacgatcgagccccagccctccctcgctctccgggctgagctagccggacgaattcgggcgtgcggcttcgagctctcgcttatatcagcgccgcgcgcgccggccggcggccggaggagccactatcatccccggcgtttgattcggccagagcagcggccatggtcgaatatatttgatctctctcgatctgatctgagctgagccggctggtggcccgggaaggacgaagtgtgtcgccacctataatttgatgatgtttgtgtcatcatgatcggtggctagcagaataagagatgataagcggcaacctcaacaatgaagagctggggggcggcgggtgcaccaaggccgaggggccgggcgcggccggcggcgccggcgccgtcgtcgcaaagagtcccgtgctgtcgagctcccggcactggccgccgtcgacggagtcgaggatcgtgcgcgtgtcgcgggtcttcggcggcaaggaccggcacagcaaggtgaggacggtcaaggggctgcgcgaccggcgcgtgcggctgtccgtgccgacggcgatccagctctacgacctccaggaccggctgggcctcagccagccgagcaagttggtggactggctgctcgacgccgcgcaggacgagatcgacaagctgcctccgctccagttcccgccgcaagggcaggacctcgtcgcccatctcccgccgtccatggtggcgcccttcgccaacgttgcagccgaccgggccgccgccgccgctgccgccgcagaacgcgtcggccgcgatggccgaaggcggcaaacgccactgccacggaggcatcaaagggctcatgggcatgggcctcaacaattctatcggcctcgccaacgccaccatgccgctggctcacggcttgtactacacgcccggtgagtcttggaccaatggaggcaatgccgccgtccatgatcatcaggtgagccacggcggcacctcgcctcagacggtggctcaccactcgccgttctcgtctctgctgtctcttgctgctccggggccccagctcgtcttctactcgccggaaggcggcggcttcgccatgaaagaagccaccgatcatcagttcgctgtagatagcctcgatcactcgcaaggccagctctcactgagctcagctagaagcttccttcaccccggcaaccagggatgatattaggtcactgatctctactgctccaagaaggtacgtagaacaataaagcttggtgtagtagtaatcaagtactcgtttgaaggctccgtaaagcttgcaactgcagttttgagatgttattgtttggtatgatcgagtagaggggctctagcgtagagagctgctagcatgcatagtaattaaggttaattttgcaggacatgcaatgcaattcgttgcttcttttttatacaaggaagtaaccggtcatggggtttgtggtgtgtgtgtgtgttggcaatgtaataacaattttataattcgttcttgaatttgtgc

SEQ ID NO: 9651 - protein, 206 aa, Zea mays subsp. mays
  peptide (1)..(206): Ceres Seq. ID no. 12356922
MISGNLNNEELGGGGCTKAEGPGAAGGAGAVVAKSPVLSSSRHWPPSTESRIVRVSRVFGGKDRHSKVRTVKGLRDRRVRLSVPTAIQLYDLQDRLGLSQPSKLVDWLLDAAQDEIDKLPPLQFPPQGQDLVAHLPPSMVAPFANVAADRAAAAAAAAERVGRDGRRRQTPLPRRHQRAHGHGPQQFYRPRQRHHAAGSRLVLHAR

SEQ ID NO: 9652 - protein, 135 aa, Zea mays subsp. mays
  peptide (1)..(135): Ceres Seq. ID no. 12356923
MAEGGKRHCHGGIKGLMGMGLNNSIGLANATMPLAHGLYYTPGESWTNGGNAAVHDHQVSHGGTSPQTVAHHSPFSSLLSLAAPGPQLVFYSPEGGGFAMKEATDHQFAVDSLDHSQGQLSLSSARSFLHPGNQG

SEQ ID NO: 9653 - protein, 119 aa, Zea mays subsp. mays
  peptide (1)..(119): Ceres Seq. ID no. 12356924
MGMGLNNSIGLANATMPLAHGLYYTPGESWTNGGNAAVHDHQVSHGGTSPQTVAHHSPFSSLLSLAAPGPQLVFYSPEGGGFAMKEATDHQFAVDSLDHSQGQLSLSSARSFLHPGNQG

SEQ ID NO: 9654 - DNA, 1423 bp, Zea mays subsp. mays
  misc_feature (1)..(1423): Ceres Seq. ID no. 13570861
  misc_feature (1)..(1423): Ortholog of  Ceres SEQ ID NO 15177854 as cited in SEQ ID NO 51851
  misc_feature (1)..(1423): Ortholog of  Ceres SEQ ID NO 15177087 as cited in SEQ ID NO 51932
  misc_feature (1)..(1423): Ortholog of  Ceres SEQ ID NO 13662937 as cited in SEQ ID NO 64415
  misc_feature (1)..(1423): Ortholog of  Ceres SEQ ID NO 13595984 as cited in SEQ ID NO 68340
  misc_feature (1)..(1423): Ortholog of  Ceres SEQ ID NO 12635014 as cited in SEQ ID NO 0
caaccccgcacgcacaactggccgcgccaaggcaaagctagaagaagacaacgcaaagggagaggacagaggaggagcagaggacgatgggcagcggcggcgctaacactgcccccctcctcaccccctacaagatgggaaaattcgatgttacccacagggtagtcctcgcaccactgacgagacagcggtcctacggcaacgttccccagcctcatgccatactgtactatcagcagagggcgactaaaggaggtcttctgatcgctgaggccacgggggtttcagacactgctcaagggtacaaggacactcctggcatttggacccatgagcaagtcgaagcatggaagccgatcgtagacggggttcaccagaaaggagggatatttttctgtcagatttggcacgtagggagagtctccaattccacgtttcagcctaatgggcaggctccaatttcaagcaccgataagccactaaagcctcaagtgagagccaatggtatagacgtggctactttcgcagttcctagacgcttagagactgatgaaatccctttggtcgtcaatgatttcagggtagctgctcgaaatgcgattgaagctggatttgatggtgtcgaaatccatggagctcacggttacctgattgatcagtttctaaaggacggggtcaacgaccgcacagacaaatacggtggcagtctggagaaccgctgccggtttgcactggaagtaactcaagccgtggtcgacgaaattggagctgacaaggtcgggataaggctgtcaccattcgctagctactcggaggcgccggactcggacccggaagctctgggcctgtacatggcgaacgcgctgaacgagttcgggattctctactgccacatcgtggagccgcggatggtgaaactcggtgaaaagttcgaaaccccctacagccttcgcccgataagggacgctttcaggggaacgttcatcgttgccggcggctacggcagggaggatgggaatcgagcgatctccactgggtatgctgatttggtcgcgttcgggcgcttgttcttggctaatcctgacctgcctcggaggttcgaagtagacgctccccttaacaagtacaacagagacacgttttacatccctgatccggttgttggatacactgactacccatttctttcgtcagatgtataaatgttctcttttcagcaatctgctttttagattgtgtagtaactggttggtgtaccagtaaattattagaggaataaaccattggtctgaatgcctcattctcatatatatggacaaaagcaatatgatcgttgtaattgtgcctcaaatcttatagttgtaaaaaatattgtgaagaagctcagtcagttgtcattgtaaaaaatattgtgaagaagctc

SEQ ID NO: 9655 - protein, 371 aa, Zea mays subsp. mays
  peptide (1)..(371): Ceres Seq. ID no. 13570862
MGSGGANTAPLLTPYKMGKFDVTHRVVLAPLTRQRSYGNVPQPHAILYYQQRATKGGLLIAEATGVSDTAQGYKDTPGIWTHEQVEAWKPIVDGVHQKGGIFFCQIWHVGRVSNSTFQPNGQAPISSTDKPLKPQVRANGIDVATFAVPRRLETDEIPLVVNDFRVAARNAIEAGFDGVEIHGAHGYLIDQFLKDGVNDRTDKYGGSLENRCRFALEVTQAVVDEIGADKVGIRLSPFASYSEAPDSDPEALGLYMANALNEFGILYCHIVEPRMVKLGEKFETPYSLRPIRDAFRGTFIVAGGYGREDGNRAISTGYADLVAFGRLFLANPDLPRRFEVDAPLNKYNRDTFYIPDPVVGYTDYPFLSSDV

SEQ ID NO: 9656 - protein, 355 aa, Zea mays subsp. mays
  peptide (1)..(355): Ceres Seq. ID no. 13570863
MGKFDVTHRVVLAPLTRQRSYGNVPQPHAILYYQQRATKGGLLIAEATGVSDTAQGYKDTPGIWTHEQVEAWKPIVDGVHQKGGIFFCQIWHVGRVSNSTFQPNGQAPISSTDKPLKPQVRANGIDVATFAVPRRLETDEIPLVVNDFRVAARNAIEAGFDGVEIHGAHGYLIDQFLKDGVNDRTDKYGGSLENRCRFALEVTQAVVDEIGADKVGIRLSPFASYSEAPDSDPEALGLYMANALNEFGILYCHIVEPRMVKLGEKFETPYSLRPIRDAFRGTFIVAGGYGREDGNRAISTGYADLVAFGRLFLANPDLPRRFEVDAPLNKYNRDTFYIPDPVVGYTDYPFLSSDV

SEQ ID NO: 9657 - DNA, 1473 bp, Zea mays subsp. mays
  misc_feature (1)..(1473): Ceres Seq. ID no. 12347344
  misc_feature (1)..(1473): Ortholog of  Ceres SEQ ID NO 14308095 as cited in SEQ ID NO 55286
gcacgagaccattacctataacatcctaatcgaaaagagtagaggtgctactacgccacaagcgcaaccctacaagagcacaaacaaagtggagttttacgggccgctagggctaggcaagcccatggaggagatgctcatggctggaaacgcgaatccaaacccaccgccagctgctgcgccctcggcacccggggcccagacccagagccagaggggtggtggcgctcctcctcccgctgcgggtgcggcagcgcctagcgctggcgcgaccgtaggggcggcgggcacggagcggcgggcgcggccgcacaaggagaaggcgctcaactgcccgcggtgcaactccaccaacaccaagttctgctattacaacaactacagcctgcagcagccgcgctacttctgcaagacctgccgccgctactggaccgagggcggctcgctccgcaacgtcccggtgggcggcggctccaggaagaacaagcgcagctcgtcctcggcggcctccacctccgcggcgatgtccggcacggtctccgtgaagaaccccaagctggtgcacgagggcgcgcaccacgacctcaacctggccttccctcaccacaacaacggccgcgctctgcagccaccggagttcccgtcgtcgttcccgaacctggagagcagcagcgtgtgctaccccggagccgccatgctgggcaacggcgccgccggcaggggcatgggcgcgctctcggctatggagctgctcaggagcaccggctgctacgtccccctgcagcacgttcagctagggatgcccgccgagtacgcagcacccgcgggattcacgcttggcgagttccgcattcccccgccgccgcagtctcagagtgtgctcgggttctcgctggacacgcacggaacggggggttacagcgccggcgggttgcaggagagcgcggtgggcaggatgctcttccccttcgaggacttgaagccggcggtgagcgcagctggcggcggtgcaagcaacgacggagctgatcatcgtcaaaacgaccacaggaaagatcaagctgcaggcgacggcagcagcgtcaccggtggccacgagactccaggcgggttctggagcaatagcttgatcggaaatggcagcagcaatggtggtggaggccattggtaaggcggcgcggcatgcatggctcatgcacgcgcgcgccgttggcagcatgcggagatagggatagagacaaggatccaagttatcaagagggtacggtggaggaggtgattagtgttcacatatatggcgtttgatttttctctggttgtttaatttttctcggatcttcgtgttcttgtgtgtaaatcgacatcgacttggggggctaacacagcaggatatacagattgttaaggcggtggtgaaccggtgatttacagctagcttctcttatccaatggatctcttgtttctgattgtgc

SEQ ID NO: 9658 - protein, 389 aa, Zea mays subsp. mays
  peptide (1)..(389): Ceres Seq. ID no. 12347345
HETITYNILIEKSRGATTPQAQPYKSTNKVEFYGPLGLGKPMEEMLMAGNANPNPPPAAAPSAPGAQTQSQRGGGAPPPAAGAAAPSAGATVGAAGTERRARPHKEKALNCPRCNSTNTKFCYYNNYSLQQPRYFCKTCRRYWTEGGSLRNVPVGGGSRKNKRSSSSAASTSAAMSGTVSVKNPKLVHEGAHHDLNLAFPHHNNGRALQPPEFPSSFPNLESSSVCYPGAAMLGNGAAGRGMGALSAMELLRSTGCYVPLQHVQLGMPAEYAAPAGFTLGEFRIPPPPQSQSVLGFSLDTHGTGGYSAGGLQESAVGRMLFPFEDLKPAVSAAGGGASNDGADHRQNDHRKDQAAGDGSSVTGGHETPGGFWSNSLIGNGSSNGGGGHW

SEQ ID NO: 9659 - protein, 348 aa, Zea mays subsp. mays
  peptide (1)..(348): Ceres Seq. ID no. 12347346
MEEMLMAGNANPNPPPAAAPSAPGAQTQSQRGGGAPPPAAGAAAPSAGATVGAAGTERRARPHKEKALNCPRCNSTNTKFCYYNNYSLQQPRYFCKTCRRYWTEGGSLRNVPVGGGSRKNKRSSSSAASTSAAMSGTVSVKNPKLVHEGAHHDLNLAFPHHNNGRALQPPEFPSSFPNLESSSVCYPGAAMLGNGAAGRGMGALSAMELLRSTGCYVPLQHVQLGMPAEYAAPAGFTLGEFRIPPPPQSQSVLGFSLDTHGTGGYSAGGLQESAVGRMLFPFEDLKPAVSAAGGGASNDGADHRQNDHRKDQAAGDGSSVTGGHETPGGFWSNSLIGNGSSNGGGGHW

SEQ ID NO: 9660 - protein, 345 aa, Zea mays subsp. mays
  peptide (1)..(345): Ceres Seq. ID no. 12347347
MLMAGNANPNPPPAAAPSAPGAQTQSQRGGGAPPPAAGAAAPSAGATVGAAGTERRARPHKEKALNCPRCNSTNTKFCYYNNYSLQQPRYFCKTCRRYWTEGGSLRNVPVGGGSRKNKRSSSSAASTSAAMSGTVSVKNPKLVHEGAHHDLNLAFPHHNNGRALQPPEFPSSFPNLESSSVCYPGAAMLGNGAAGRGMGALSAMELLRSTGCYVPLQHVQLGMPAEYAAPAGFTLGEFRIPPPPQSQSVLGFSLDTHGTGGYSAGGLQESAVGRMLFPFEDLKPAVSAAGGGASNDGADHRQNDHRKDQAAGDGSSVTGGHETPGGFWSNSLIGNGSSNGGGGHW

SEQ ID NO: 9661 - DNA, 1171 bp, Zea mays subsp. mays
  misc_feature (1)..(1171): Ceres Seq. ID no. 12374998
  misc_feature (1)..(1171): Ortholog of  Ceres SEQ ID NO 12583280 as cited in SEQ ID NO 56136
  misc_feature (1)..(1171): Ortholog of  Ceres SEQ ID NO 13595979 as cited in SEQ ID NO 68468
  misc_feature (1)..(1171): Ortholog of  Ceres SEQ ID NO 13654715 as cited in SEQ ID NO 68676
aagatgggtagcagaagcagccagtttccgtcaatggcactggccatggccacggtgctgatggcactggccggggtagccgccacagcgcgagccggcggcggcatcgccatctactggggccagaacggcaacgaggggacgctggcgcagacctgcgccacgggcaactacaggttcgtcaacgtggccttcctccccacgttcggcaaggggcagacgccggcgcttaacctggcgggccactgcgacccagcgagcggcgggtgcacgggcgtgggcgcggacgtcaaggcgtgccagcgcatgggcgtcaaggtcctgctctccatcggcgggggcgtcggcagctacgggctctcgtcccgggccgacgcccggagcgtcgcggcgtacctctgggacaactacctcggcggcggcggcggcggcgggtccgagtccagctccaggcccctcggcgacgccgtcctcgacggcgtcgacttcgacatcgagagcggcgggggcatgtactgggacgacctggcccggttcctcaagtcctactcccggcgcgggcgcgcgcggaggcccgtgtacctgtccgctgcgccgcagtgcccgttcccggacgcgtcgctgggcaccgcgctcgcgcacggggctgttcgactacgtgtgggtgcagttctacaacaacccgccgtgccagtacagcgcgagcgccggcgtgggcagcctggcgaaagcgtgggcgcagtggacgtccatcagggcggggcgggtgttcctcggcctccccgccgcgccccaggccgctggcagcgggttcgtgccggcgagcgacctcgtggcgcaggtgctgccggtggtcaagaactccaccaagtacgggggcatcatgctctggtccaggtactacgacgggctcacggggtacagcgacgcggtcaagtcctacgttgagctagccagcctcgtgtcatgtcgggcgtgcaggagggagtaggactgtaggaggcacatgcttccatgtgcgtgcacgtgcggggcgttatcatacctatgggtatactgggtcgctattcgctaaggaagagaccggaaagaagcaaatcgcaaatacagcttcttagcggtgtttgtttgggattataatccacttagattatataaaaaaaaaaaaaaa

SEQ ID NO: 9662 - protein, 315 aa, Zea mays subsp. mays
  peptide (1)..(315): Ceres Seq. ID no. 12374999
KMGSRSSQFPSMALAMATVLMALAGVAATARAGGGIAIYWGQNGNEGTLAQTCATGNYRFVNVAFLPTFGKGQTPALNLAGHCDPASGGCTGVGADVKACQRMGVKVLLSIGGGVGSYGLSSRADARSVAAYLWDNYLGGGGGGGSESSSRPLGDAVLDGVDFDIESGGGMYWDDLARFLKSYSRRGRARRPVYLSAAPQCPFPDASLGTALAHGAVRLRVGAVLQQPAVPVQRERRRGQPGESVGAVDVHQGGAGVPRPPRRAPGRWQRVRAGERPRGAGAAGGQELHQVRGHHALVQVLRRAHGVQRRGQVLR

SEQ ID NO: 9663 - protein, 314 aa, Zea mays subsp. mays
  peptide (1)..(314): Ceres Seq. ID no. 12375000
MGSRSSQFPSMALAMATVLMALAGVAATARAGGGIAIYWGQNGNEGTLAQTCATGNYRFVNVAFLPTFGKGQTPALNLAGHCDPASGGCTGVGADVKACQRMGVKVLLSIGGGVGSYGLSSRADARSVAAYLWDNYLGGGGGGGSESSSRPLGDAVLDGVDFDIESGGGMYWDDLARFLKSYSRRGRARRPVYLSAAPQCPFPDASLGTALAHGAVRLRVGAVLQQPAVPVQRERRRGQPGESVGAVDVHQGGAGVPRPPRRAPGRWQRVRAGERPRGAGAAGGQELHQVRGHHALVQVLRRAHGVQRRGQVLR

SEQ ID NO: 9664 - protein, 304 aa, Zea mays subsp. mays
  peptide (1)..(304): Ceres Seq. ID no. 12375001
MALAMATVLMALAGVAATARAGGGIAIYWGQNGNEGTLAQTCATGNYRFVNVAFLPTFGKGQTPALNLAGHCDPASGGCTGVGADVKACQRMGVKVLLSIGGGVGSYGLSSRADARSVAAYLWDNYLGGGGGGGSESSSRPLGDAVLDGVDFDIESGGGMYWDDLARFLKSYSRRGRARRPVYLSAAPQCPFPDASLGTALAHGAVRLRVGAVLQQPAVPVQRERRRGQPGESVGAVDVHQGGAGVPRPPRRAPGRWQRVRAGERPRGAGAAGGQELHQVRGHHALVQVLRRAHGVQRRGQVLR

SEQ ID NO: 9665 - DNA, 1768 bp, Zea mays subsp. mays
  misc_feature (1)..(1768): Ceres Seq. ID no. 12354379
  misc_feature (1)..(1768): Ortholog of  Ceres SEQ ID NO 14310713 as cited in SEQ ID NO 53582
aaaatccgcttcaagtccgtcgattgttgttttgtctttcctctttctctatcgaaaacggagcgcctgatacgatagtagcagcacagctagctctcctccccagaatctcgccggattccgccccccgccgcgccctcgcttccgccgcaggttcgcgtctgtgcccgcgcgtgttgtactgccggcggacggcggtgttggtggtggttggtggagttgccgacgacggtaggctatggactaccggccctccgacagcagcggaactgatgatgatcttccacaatttccacataagagtatcagaggcagcggacgtgtcagtggtaatgggcgagctgttgttcctgctggttcatatgctagggcaccaactgatatggtagcacaagttcaacaacttgagcaagaagcatatcgctcagtccttcgtgcattcaaagcccagtctgatgccattacatgggagaaggaaggtctcatgactgaacttaggaaggagctaagagtatctgacaaagcacacagggaactgttaaatagagtcaacaacgataatattatatgtagcataagggaatggagatcaacaggagggcttcaggcaagcttgtctaataacccacaactgattcatgactctgttcccagtcctaccacctctggccgtaagaggcaaaagacatctcaatctgttcctgctttacctgcaccgcctcctgcgatgcattcacaacagctggctacaccaacacagccatcatcttcaactgctaggaaagcagtacccccaggccataaaggcaaaaagatgaaaccaggtcagaaggtaccaggtggctctgcagccaagcctataccatcttcagcaggtcctagtggaagaggaccgcacatgaataggggtggttctgctcctgaagctcaagctcagaatgtcgatccattgattggtcgtaaagtgattagtcggtggcctgaagacaatagtttctatgaagcagtcatatacgaatatgatgctgaaacgggccttcatgcactggtttatgacatcgatacggaagatgaaacctgggagtgggttgatcttaaagagatgggacctgaagacataagatggcaagaggatgactctgggatagaccctgttacatatctgcgcagccggggtggcccaactagtggcgttaggaagccagcaggtcgcggtgggcccatgccaggttctgtaagaggaagaggattacagaaaaacatgcctaagaaagattttccacctccacaaaatggtgttggcaagagaagttccgatgacattgatatccttcataccgagagcctaataaaagaggtggggaaagtttttagcgttagcaatcctgatccacaggaagtagaaaaggcaaagaaagcactgaaggagcaagaacagtcgttgattgacgccatagcaaggcttgctgaggcatcagatggtgaaagtgatgggcacaatcgtgggcgaaggaacttgtatgctgctaaccagcatcaagcaagctacgttggtgccatgcccgtcggtgacagagctggtgccatgtaaacactgcatgaacgcatgcacaacataaaataactgcctgttgtacaatccatcgctaatatttattctggatttaggtctctgtaggctcttttgctttgggatacttgtttttttttacaattgtaattcagaacgctgaccatgtaaagcttgtagatgcgtgtttctgtctcc

SEQ ID NO: 9666 - protein, 450 aa, Zea mays subsp. mays
  peptide (1)..(450): Ceres Seq. ID no. 12354380
MDYRPSDSSGTDDDLPQFPHKSIRGSGRVSGNGRAVVPAGSYARAPTDMVAQVQQLEQEAYRSVLRAFKAQSDAITWEKEGLMTELRKELRVSDKAHRELLNRVNNDNIICSIREWRSTGGLQASLSNNPQLIHDSVPSPTTSGRKRQKTSQSVPALPAPPPAMHSQQLATPTQPSSSTARKAVPPGHKGKKMKPGQKVPGGSAAKPIPSSAGPSGRGPHMNRGGSAPEAQAQNVDPLIGRKVISRWPEDNSFYEAVIYEYDAETGLHALVYDIDTEDETWEWVDLKEMGPEDIRWQEDDSGIDPVTYLRSRGGPTSGVRKPAGRGGPMPGSVRGRGLQKNMPKKDFPPPQNGVGKRSSDDIDILHTESLIKEVGKVFSVSNPDPQEVEKAKKALKEQEQSLIDAIARLAEASDGESDGHNRGRRNLYAANQHQASYVGAMPVGDRAGAM

SEQ ID NO: 9667 - protein, 402 aa, Zea mays subsp. mays
  peptide (1)..(402): Ceres Seq. ID no. 12354381
MVAQVQQLEQEAYRSVLRAFKAQSDAITWEKEGLMTELRKELRVSDKAHRELLNRVNNDNIICSIREWRSTGGLQASLSNNPQLIHDSVPSPTTSGRKRQKTSQSVPALPAPPPAMHSQQLATPTQPSSSTARKAVPPGHKGKKMKPGQKVPGGSAAKPIPSSAGPSGRGPHMNRGGSAPEAQAQNVDPLIGRKVISRWPEDNSFYEAVIYEYDAETGLHALVYDIDTEDETWEWVDLKEMGPEDIRWQEDDSGIDPVTYLRSRGGPTSGVRKPAGRGGPMPGSVRGRGLQKNMPKKDFPPPQNGVGKRSSDDIDILHTESLIKEVGKVFSVSNPDPQEVEKAKKALKEQEQSLIDAIARLAEASDGESDGHNRGRRNLYAANQHQASYVGAMPVGDRAGAM

SEQ ID NO: 9668 - protein, 368 aa, Zea mays subsp. mays
  peptide (1)..(368): Ceres Seq. ID no. 12354382
MTELRKELRVSDKAHRELLNRVNNDNIICSIREWRSTGGLQASLSNNPQLIHDSVPSPTTSGRKRQKTSQSVPALPAPPPAMHSQQLATPTQPSSSTARKAVPPGHKGKKMKPGQKVPGGSAAKPIPSSAGPSGRGPHMNRGGSAPEAQAQNVDPLIGRKVISRWPEDNSFYEAVIYEYDAETGLHALVYDIDTEDETWEWVDLKEMGPEDIRWQEDDSGIDPVTYLRSRGGPTSGVRKPAGRGGPMPGSVRGRGLQKNMPKKDFPPPQNGVGKRSSDDIDILHTESLIKEVGKVFSVSNPDPQEVEKAKKALKEQEQSLIDAIARLAEASDGESDGHNRGRRNLYAANQHQASYVGAMPVGDRAGAM

SEQ ID NO: 9669 - DNA, 1632 bp, Zea mays subsp. mays
  misc_feature (1)..(1632): Ceres Seq. ID no. 12391417
  misc_feature (1)..(1632): Ortholog of  Ceres SEQ ID NO 15178909 as cited in SEQ ID NO 0
gcacgagaccattacctagaacatcctaatcgaaaaaacaacatacttctagattctggtcgatcgtcgatgaggccggcgccggagacaagcacgcggcggccgcagctgcgtcgccgtcgtccagtgccattggtgacggtggccgtgtctttggcgctcatctcgctggcgtgccttcctgtcttcgcggatgcaagcagagcgctgcaccgcgaccgggaggagcaccggaggcagcaccaccgcacggaggacaagaagagccgcgtctcgctccctcccgacgctgacggcgactctccgcccgagcctccggactccggcggcgcgccgccgcctgccgacgacagcgactgcggcaacgtgttcgacgtgagggcgttcggcgcgtcgggcgacggctcgtgcgtcgacgacgacacggccgcgttccgcgcggtgtggaaggcggcgtgctcctccgactccgccgcggccacgctgctggtgccgtcggacggcgtgttcaccatcgcctccaccatcttctccgggccgtgcaagcccgacctcaccttccaaatcgatggcgtcctcatgccgccggacggcccggcgagctggccggcgacggacagccggaaacagtggatagtcttctacaaggccgatcgcttgacgctggcgggggaaggcaccatcgaaggcaacggtgaggagtggtgggatctgccgtgcaagcctcacaggggtccaaacggatcgacgctgcgcggaccatgtgacagccccgcgctcatacgattcttctcgagcaatgacgtgacggtatgcggcctgcggatcgagaacagcccgcagttccacctcaggttcgacgactgcgagcgcgtgcgcgtcgacggcctcttcgtcagctcgccggcgtccagccccaacacggacggcgtccacgtcgagaacaccaagtccgtccagatcctcaactctaggatctacaacggcgacgactgcgtctccatcggcgccggatgctccgatgtccacgtcgagaacataacatgcggccacggccatggaattagcatcggcagcctgggtgtccacaacacccacgcctgcgtgtccaacgtcacggtccggaacgtgcggatactcgactccgacaacggcgtccggatcaagacgtggcagggcggcgccggcgcggtgtcggcggtcgagttcaccggcgtgcagatgcagaacgtgaagaactgcatcgtcatcgaccagtactactgcctcggccacgggtgcgccaaccagacctccgcggtgcgcgtggccggcgtcgcgtacagggacatccacggcacgtacaacccgcaggccggcgcgcccatccgcctcgcgtgcagcgacgccgtcgcctgcacggacatcaccatgtctggcgtcgagctgctgccggccggcggggacgacggagcactgctcgccgacccctactgctggaacgcgtacggggtcatggagacgctcacgctgccaccggtgtactgcttgctggagggcagcccggagtctctccaggatccgctcaccagttgctgagatgagatcgttttctttactaacaaagatttctctcctgagacagtcaacgcg

SEQ ID NO: 9670 - protein, 525 aa, Zea mays subsp. mays
  peptide (1)..(525): Ceres Seq. ID no. 12391418
ARDHYLEHPNRKNNILLDSGRSSMRPAPETSTRRPQLRRRRPVPLVTVAVSLALISLACLPVFADASRALHRDREEHRRQHHRTEDKKSRVSLPPDADGDSPPEPPDSGGAPPPADDSDCGNVFDVRAFGASGDGSCVDDDTAAFRAVWKAACSSDSAAATLLVPSDGVFTIASTIFSGPCKPDLTFQIDGVLMPPDGPASWPATDSRKQWIVFYKADRLTLAGEGTIEGNGEEWWDLPCKPHRGPNGSTLRGPCDSPALIRFFSSNDVTVCGLRIENSPQFHLRFDDCERVRVDGLFVSSPASSPNTDGVHVENTKSVQILNSRIYNGDDCVSIGAGCSDVHVENITCGHGHGISIGSLGVHNTHACVSNVTVRNVRILDSDNGVRIKTWQGGAGAVSAVEFTGVQMQNVKNCIVIDQYYCLGHGCANQTSAVRVAGVAYRDIHGTYNPQAGAPIRLACSDAVACTDITMSGVELLPAGGDDGALLADPYCWNAYGVMETLTLPPVYCLLEGSPESLQDPLTSC

SEQ ID NO: 9671 - protein, 502 aa, Zea mays subsp. mays
  peptide (1)..(502): Ceres Seq. ID no. 12391419
MRPAPETSTRRPQLRRRRPVPLVTVAVSLALISLACLPVFADASRALHRDREEHRRQHHRTEDKKSRVSLPPDADGDSPPEPPDSGGAPPPADDSDCGNVFDVRAFGASGDGSCVDDDTAAFRAVWKAACSSDSAAATLLVPSDGVFTIASTIFSGPCKPDLTFQIDGVLMPPDGPASWPATDSRKQWIVFYKADRLTLAGEGTIEGNGEEWWDLPCKPHRGPNGSTLRGPCDSPALIRFFSSNDVTVCGLRIENSPQFHLRFDDCERVRVDGLFVSSPASSPNTDGVHVENTKSVQILNSRIYNGDDCVSIGAGCSDVHVENITCGHGHGISIGSLGVHNTHACVSNVTVRNVRILDSDNGVRIKTWQGGAGAVSAVEFTGVQMQNVKNCIVIDQYYCLGHGCANQTSAVRVAGVAYRDIHGTYNPQAGAPIRLACSDAVACTDITMSGVELLPAGGDDGALLADPYCWNAYGVMETLTLPPVYCLLEGSPESLQDPLTSC

SEQ ID NO: 9672 - protein, 332 aa, Zea mays subsp. mays
  peptide (1)..(332): Ceres Seq. ID no. 12391420
MPPDGPASWPATDSRKQWIVFYKADRLTLAGEGTIEGNGEEWWDLPCKPHRGPNGSTLRGPCDSPALIRFFSSNDVTVCGLRIENSPQFHLRFDDCERVRVDGLFVSSPASSPNTDGVHVENTKSVQILNSRIYNGDDCVSIGAGCSDVHVENITCGHGHGISIGSLGVHNTHACVSNVTVRNVRILDSDNGVRIKTWQGGAGAVSAVEFTGVQMQNVKNCIVIDQYYCLGHGCANQTSAVRVAGVAYRDIHGTYNPQAGAPIRLACSDAVACTDITMSGVELLPAGGDDGALLADPYCWNAYGVMETLTLPPVYCLLEGSPESLQDPLTSC

SEQ ID NO: 9673 - DNA, 1273 bp, Zea mays subsp. mays
  misc_feature (1)..(1273): Ceres Seq. ID no. 12350633
  misc_feature (1)..(1273): Ortholog of  Ceres SEQ ID NO 13664220 as cited in SEQ ID NO 61151
  misc_feature (1)..(1273): Ortholog of  Ceres SEQ ID NO 13597477 as cited in SEQ ID NO 65160
agattcatcggagatcatcgggaggagagcactaactgggcgacgcacaggcacagcatggggcagcggttcaatctgaccatgtcgctcctcgccgtcgtcgtcctagcgcttctcgccgcgcccgtgtgcctccgccgcgcaggtcaagacgaccgacacgcgctggagcttccagctccctttacccagcggggtcagcggcgccgagagcctcgcgttcgacggcaagggcgaggggccctacgccggcgtctcagacggccgtgtcctcaagtggggcggcagcgccgtcggctggaccacgttcgcgcacagcgccaactacaggaagatccccctgtgcacggccggcgtagtgccgtcggcggagaccgagagcatgtgcggccgccccctgggcctccagttccacgccaagaccggcgacctctacatcgccgacgcctacctggggctcacgcgggtcggcccgggaggcggcgaggccgaggtgctggcgaccggtgcggacgacggcgtcccgttcaacttcgtcaacggcctcgacgtcgacgaggccaccggcgacgtctacttcaccgactcgagcgcgacgtacccgaggaggttcaacacagagatcatgatgaacgcggacgcgacggggcggctgctcaggtacgacgcgcgcacgaggagcgtctccgtgctcaaggccggactgccgtacccgaacggcgtggcggtcagccccgacggcgagcaggtcgtggtcgcgcacaccgtgccctgccaggcgttcaggtacttcctccggggcgcccggaaggggcagtacgagctgctggcggacctgccgggctacccggacaacgtgaggcgggatggcaggggtggctactgggtggcgctgaaccaggagaagcagcggctggacgcgactccggcgacgggccccgtgaagcacctcgtcggggtccgcctggacgcccacggcgtggaggtggaggagcttacggcggccaagggtgtcacgctgagcgacgtggcggagacgaaggggaagctgtggctgggctccatcgagctcgagtacgtcggactcgttgcttgagcggctgcgtaccacactagcaacgttagctatggtcatgttatgttaggaattaggattaggaattaggattaggaattggattagcaagtacgagcgagtagcctttagtttcatgtcttcgcgtgacaaacatcgttattttaccgattatcaataaatttcatttattgcttg

SEQ ID NO: 9674 - protein, 371 aa, Zea mays subsp. mays
  peptide (1)..(371): Ceres Seq. ID no. 12350634
RFIGDHREESTNWATHRHSMGQRFNLTMSLLAVVVLALLAAPVCLRRAGQDDRHALELPAPFTQRGQRRREPRVRRQGRGALRRRLRRPCPQVGRQRRRLDHVRAQRQLQEDPPVHGRRSAVGGDREHVRPPPGPPVPRQDRRPLHRRRLPGAHAGRPGRRRGRGAGDRCGRRRPVQLRQRPRRRRGHRRRLLHRLERDVPEEVQHRDHDERGRDGAAAQVRRAHEERLRAQGRTAVPERRGGQPRRRAGRGRAHRALPGVQVLPPGRPEGAVRAAGGPAGLPGQREAGWQGWLLGGAEPGEAAAGRDSGDGPREAPRRGPPGRPRRGGGGAYGGQGCHAERRGGDEGEAVAGLHRARVRRTRCLSGCVPH

SEQ ID NO: 9675 - protein, 352 aa, Zea mays subsp. mays
  peptide (1)..(352): Ceres Seq. ID no. 12350635
MGQRFNLTMSLLAVVVLALLAAPVCLRRAGQDDRHALELPAPFTQRGQRRREPRVRRQGRGALRRRLRRPCPQVGRQRRRLDHVRAQRQLQEDPPVHGRRSAVGGDREHVRPPPGPPVPRQDRRPLHRRRLPGAHAGRPGRRRGRGAGDRCGRRRPVQLRQRPRRRRGHRRRLLHRLERDVPEEVQHRDHDERGRDGAAAQVRRAHEERLRAQGRTAVPERRGGQPRRRAGRGRAHRALPGVQVLPPGRPEGAVRAAGGPAGLPGQREAGWQGWLLGGAEPGEAAAGRDSGDGPREAPRRGPPGRPRRGGGGAYGGQGCHAERRGGDEGEAVAGLHRARVRRTRCLSGCVPH

SEQ ID NO: 9676 - protein, 344 aa, Zea mays subsp. mays
  peptide (1)..(344): Ceres Seq. ID no. 12350636
MSLLAVVVLALLAAPVCLRRAGQDDRHALELPAPFTQRGQRRREPRVRRQGRGALRRRLRRPCPQVGRQRRRLDHVRAQRQLQEDPPVHGRRSAVGGDREHVRPPPGPPVPRQDRRPLHRRRLPGAHAGRPGRRRGRGAGDRCGRRRPVQLRQRPRRRRGHRRRLLHRLERDVPEEVQHRDHDERGRDGAAAQVRRAHEERLRAQGRTAVPERRGGQPRRRAGRGRAHRALPGVQVLPPGRPEGAVRAAGGPAGLPGQREAGWQGWLLGGAEPGEAAAGRDSGDGPREAPRRGPPGRPRRGGGGAYGGQGCHAERRGGDEGEAVAGLHRARVRRTRCLSGCVPH

SEQ ID NO: 9677 - DNA, 1409 bp, Zea mays subsp. mays
  misc_feature (1)..(1409): Ceres Seq. ID no. 12415269
  misc_feature (1)..(1409): Ortholog of  Ceres SEQ ID NO 14307123 as cited in SEQ ID NO 54182
  misc_feature (1)..(1409): Ortholog of  Ceres SEQ ID NO 13584839 as cited in SEQ ID NO 60676
gcacgagaccattacctagaacatcctaatcgaaaagtttacaccgagggttctctctttgtctgttcactgttctactgggacgaccccaaatccccaaatcgaaaggggccgtccggctcagggtttctcgacggctccttgccctctccgccatggacgcacagcgagccctccttgacgagctcatgggcacagctcgcaacctaacggaggaggagaagaaggggcacaaagagctgaagtgggacgatccggacgtgtgcggcccttacatggttcgattctgtcctcacgaccttttcgtcaacaccaagagcaatatcgggccgtgctcgaggatccacgatccgaagctcaaggaaagctttgagaagtctcctaggcacgatacttatatgcaaaggtttgaggcagagcttgcacaacaatgtgagaaattggtaatggacttagatagaaagataaggcgtggtcgagaaaggctggctcacgattctgctgtgccaatgccaatccctggaaattagctgagctgctttcagtgcgaaaagaacaggtgaagaagctgctggatcaaattgaggagcttggtgaggctggtaaagtggatgaagctgaggcacttatgagaagggttgacattttaaacgctgagaagacagctttagctaacgaagcagacaacaaagtagctatgcttgagaagaagatggaactttgtgaaacatgtggatcattcttagttgctgatgatgctcttgagagaacgcagtcccatgtgactgggaaacaacacattggttatggcatggttagggatttcctggcagaatacaaggcagcaaaagagaagacaaaagaggaagagcggcttgcaagggagcagaaagcagaggagcatcggaaacagaggggaaaagagtatgatagtgggggcagggatagagataccagaagggagaggtctggggagcgtgactttgaccgtgatcgtcagtatgagcgaagcagaggaagagatagggtttatgattacagggacagaggatcagaacaccgaagcaatcgctacagaaatgggagggattctgaaagaggtggacacagatacaggagtggtggtatgacaaatgaccgagggagaatgaggagcagatcacgttctccaaccaggcatggctatggaagatctagaagtccagatcattagctgcctagctggacatttagatagttttattcacagttgggactcatgaggtagacagttcccttctgctatttattactgtacaatgggttttattgaagtgtcgcacttttttaagtctctgatctgttgtaacagctctgttggaaccctacagtctccctattttgcatggggaaaaattcccaggtcggtg

SEQ ID NO: 9678 - protein, 194 aa, Zea mays subsp. mays
  peptide (1)..(194): Ceres Seq. ID no. 12415270
MRRVDILNAEKTALANEADNKVAMLEKKMELCETCGSFLVADDALERTQSHVTGKQHIGYGMVRDFLAEYKAAKEKTKEEERLAREQKAEEHRKQRGKEYDSGGRDRDTRRERSGERDFDRDRQYERSRGRDRVYDYRDRGSEHRSNRYRNGRDSERGGHRYRSGGMTNDRGRMRSRSRSPTRHGYGRSRSPDH

SEQ ID NO: 9679 - protein, 171 aa, Zea mays subsp. mays
  peptide (1)..(171): Ceres Seq. ID no. 12415271
MLEKKMELCETCGSFLVADDALERTQSHVTGKQHIGYGMVRDFLAEYKAAKEKTKEEERLAREQKAEEHRKQRGKEYDSGGRDRDTRRERSGERDFDRDRQYERSRGRDRVYDYRDRGSEHRSNRYRNGRDSERGGHRYRSGGMTNDRGRMRSRSRSPTRHGYGRSRSPDH

SEQ ID NO: 9680 - protein, 166 aa, Zea mays subsp. mays
  peptide (1)..(166): Ceres Seq. ID no. 12415272
MELCETCGSFLVADDALERTQSHVTGKQHIGYGMVRDFLAEYKAAKEKTKEEERLAREQKAEEHRKQRGKEYDSGGRDRDTRRERSGERDFDRDRQYERSRGRDRVYDYRDRGSEHRSNRYRNGRDSERGGHRYRSGGMTNDRGRMRSRSRSPTRHGYGRSRSPDH

SEQ ID NO: 9681 - DNA, 1129 bp, Zea mays subsp. mays
  misc_feature (1)..(1129): Ceres Seq. ID no. 12416011
  misc_feature (1)..(1129): Ortholog of  Ceres SEQ ID NO 12566921 as cited in SEQ ID NO 0
caaaataatgattctactgacctggttgctctaatggatagcctaggccgcacctgcccgaacttgaggaacatgcacatctcatcagaccgcttgtgcaacgaagctgtgtttgctctagagagtgctaacctcaggggcatgtgcatgctctccttggttctaggttcaaaaataacagatgcagctgtcgcatcgattgttcgttcttacgcgagcttggagctgctcgatttaagcgggtctggcatcactgacaatgggcttgggatgatcagcaacacgttccctaacaccctaacacgtctgctccttgctctgtgcccaaacatcaccccatgcgggattcaggtggctgcagccacagctgccgctccttcgcctcatggactgtggcaagagcatatgtgctaccccccagcctgaagctgggagatcatactctggcgatctaactgatgggatcaaattctgctccaaattacctgtccagagaaagcagcaggctacttgccagaagctgatcataaagcatagcgccctgaagaagctcagcctgtggggctgttcagggatcgatgccctgtacgtgagctgcccggagctggtcgagctgaacctcaactcctgcacgaaccttcatccagagcggctgctgttccagtgccccaagctggaagacgtgcacgtcaacgggtgccgtgacatgctggtcggagccatcaggaaccaggtccttaacgagttcgcggccgcggcgccccgggtgccctgcaagcggctggccgacgggtccaagcgcgtgcacgtgccccactacatggtagagcagctggaggaacatgagaaatggggcagcaggccgcggaagagccagtgcaccgttcatctcacctaggctaggcgcctgttaagtgagaggccctggtgatcgccggcgtcaggagcttgcggcgtcgatacagcgagactagatggaaatggtacggatatttttcgatatccgtcggttatgaaatggtcaaaactttatatggataatctatatctaaatccaaatatttgaaatctgactttctgaatccagctactcaaaatcgtcagatttgaagacaaatatagccattcg

SEQ ID NO: 9682 - protein, 170 aa, Zea mays subsp. mays
  peptide (1)..(170): Ceres Seq. ID no. 12416012
MDCGKSICATPQPEAGRSYSGDLTDGIKFCSKLPVQRKQQATCQKLIIKHSALKKLSLWGCSGIDALYVSCPELVELNLNSCTNLHPERLLFQCPKLEDVHVNGCRDMLVGAIRNQVLNEFAAAAPRVPCKRLADGSKRVHVPHYMVEQLEEHEKWGSRPRKSQCTVHLT

SEQ ID NO: 9683 - protein, 141 aa, Zea mays subsp. mays
  peptide (1)..(141): Ceres Seq. ID no. 12416013
QNNDSTDLVALMDSLGRTCPNLRNMHISSDRLCNEAVFALESANLRGMCMLSLVLGSKITDAAVASIVRSYASLELLDLSGSGITDNGLGMISNTFPNTLTRLLLALCPNITPCGIQVAAATAAAPSPHGLWQEHMCYPPA

SEQ ID NO: 9684 - protein, 130 aa, Zea mays subsp. mays
  peptide (1)..(130): Ceres Seq. ID no. 12416014
MDSLGRTCPNLRNMHISSDRLCNEAVFALESANLRGMCMLSLVLGSKITDAAVASIVRSYASLELLDLSGSGITDNGLGMISNTFPNTLTRLLLALCPNITPCGIQVAAATAAAPSPHGLWQEHMCYPPA

SEQ ID NO: 9685 - DNA, 1173 bp, Zea mays subsp. mays
  misc_feature (1)..(1173): Ceres Seq. ID no. 12365916
  misc_feature (1)..(1173): Ortholog of  Ceres SEQ ID NO 13596762 as cited in SEQ ID NO 63019
agtagtcctctcctctcctcccatccatgcttcggtccacgcacccacccagccccaccagcggcagctccgcggcgccggcgtccagctccgacgccgcggcgatggtcgggggcggcgcggcggcgggcagcggcggcgcaccgagcggcgccaagctgctgcagatcctcaacgtgcgggtcgtgggcagcggcgaccgcgtggtggtgctgtcccacgggttcggcacggaccagtcggcgtggagccgcgtgctcccctacctcacccgcgaccaccgcgtggtgctctacgacctcgtctgcgccggcagcgtcaacccggagcacttcgacttccgccgctacgacacgctcgactcgtacgtcgacgacctcctcgccatcctcgacgcgctccgcatcgcgcgctgcgccttcgtcggccactccgtctccgccatgatcggcatcctcgcctccatccgccgccccgagctcttcgccaagctcgtactcatcggcgcgtcgcccaggttcctgaacgaccacgactaccacggcgggttcgagctgccggagatccagcaggtgttcgacgcgatggcggccaactactcggcgtgggcgaccgggtacgccccgctggcggtgggcgcggacgtgccggcggcggtgcaggagttcagccgcaccctgttcaacatgcggccggacatctccctccacgtgtgccgcaccgtgttcaacaccgacctccgcggcgtgctgggcatggtgcggtccccctgcgtggtggtgcagaccacccgcgacgtctccgtcccggcctccgtcgccgcctacctcaaggcccacctcggcggccgcaccgccgtcgagttcctccagaccgagggccacctcccgcacctcagcgcccccggcctcctcgcgcaggtgctccgccgcgcgctcgcccggtactagcggagcgcctgccacctacggtcctggtggtcatcggtattttttaccgcctcgatttaccctgtgccgagaccggggacggggatcagataatgtggcgacccgcgccgtttgctgtgcgcgccatgactgtagactgtagtacgagtgtacgacttgttctggacttctggtacccgatttttttactgctttttaatggagagccgagcagtagcactgg

SEQ ID NO: 9686 - protein, 390 aa, Zea mays subsp. mays
  peptide (1)..(390): Ceres Seq. ID no. 12365917
VVLSSPPIHASVHAPTQPHQRQLRGAGVQLRRRGDGRGRRGGGQRRRTERRQAAADPQRAGRGQRRPRGGAVPRVRHGPVGVEPRAPLPHPRPPRGALRPRLRRQRQPGALRLPPLRHARLVRRRPPRHPRRAPHRALRLRRPLRLRHDRHPRLHPPPRALRQARTHRRVAQVPERPRLPRRVRAAGDPAGVRRDGGQLLGVGDRVRPAGGGRGRAGGGAGVQPHPVQHAAGHLPPRVPHRVQHRPPRRAGHGAVPLRGGADHPRRLRPGLRRRLPQGPPRRPHRRRVPPDRGPPPAPQRPRPPRAGAPPRARPVLAERLPPTVLVVIGIFYRLDLPCAETGDGDQIMWRPAPFAVRAMTVDCSTSVRLVLDFWYPIFLLLFNGEPSSST

SEQ ID NO: 9687 - protein, 307 aa, Zea mays subsp. mays; identical to SEQ ID NO: 8425
  peptide (1)..(307): Ceres Seq. ID no. 12365918

SEQ ID NO: 9688 - protein, 281 aa, Zea mays subsp. mays
  peptide (1)..(281): Ceres Seq. ID no. 12365919
MVGGGAAAGSGGAPSGAKLLQILNVRVVGSGDRVVVLSHGFGTDQSAWSRVLPYLTRDHRVVLYDLVCAGSVNPEHFDFRRYDTLDSYVDDLLAILDALRIARCAFVGHSVSAMIGILASIRRPELFAKLVLIGASPRFLNDHDYHGGFELPEIQQVFDAMAANYSAWATGYAPLAVGADVPAAVQEFSRTLFNMRPDISLHVCRTVFNTDLRGVLGMVRSPCVVVQTTRDVSVPASVAAYLKAHLGGRTAVEFLQTEGHLPHLSAPGLLAQVLRRALARY

SEQ ID NO: 9689 - DNA, 1537 bp, Zea mays subsp. mays
  misc_feature (1)..(1537): Ceres Seq. ID no. 12361456
  misc_feature (1)..(1537): Ortholog of  Ceres SEQ ID NO 15171943 as cited in SEQ ID NO 54306
  misc_feature (1)..(1537): Ortholog of  Ceres SEQ ID NO 13655812 as cited in SEQ ID NO 64743
  misc_feature (1)..(1537): Ortholog of  Ceres SEQ ID NO 15178828 as cited in SEQ ID NO 0
gcacgagaccattacctagaacatcctaatcgaaaaagctattcgcgggaccgtatccgagcaggacagcaggttgttcagcgatcactcgagcggtcgagccctcgcgccgcggagagtgtctccagtctcaagtacagcggaggatggagagcggcttgcttgacaccgccgcggctgccggtctctgcccggtggcggccgggcgccgccgcgtcgggagcacgggcacggcgaggtgcttcctcagctgctcctgcgcttccagagactgcagggtgagcgcgtcctactcccactccatcagccggatgctgagcggggtgcggtcggcggcgcgcaagaggctcttcaggagcgacccggccgagctgctgggcgtcgccaactggtcggagacgggcggcggcggcgccgggggccaccagcactggtggacggcgctggagaacaacttcgtgctggaggccaccgacgacgagtacggcggggtcgtcgtcgacgccgatcggctgccggccgacagggccgccttcgcgcgctccctcgcggcgtcgctctcctactggaagtccgtggggaagaaaggggtgtggttgaaattaccggtggatctagccgagttcgtccctttagcagtgaaggaaggcttcaagtaccaccacgcggaggaagcgtatttgatgatgacgtactggatccccgatgaaccgaatatgctcccagcaaatgcttctcatcaggttggggttgggggttttgtgatcaacgaccaaatggaggttctagtggtgcaagagaagtaccgcggatcgtcgctggatggcgtatggaaactccccacaggcttcattcttgcgtctgaggaaatctacacgggggccagcagagaggtgaaggaggaaaccggggtcgacaccgagttcgttgacgtcgttgctttcaggcatgcccacaacgtggcgtttcacaagtccgacctcttcttcatctgcatgctgaggcctgtgtcgagtgagatcaagattgacgagacagagattcaggcagcgaagtggatggcgctggaggagttcgtgaagcagcccttcatccaggaagaccacatcttccagaagatcatggacatctgcatccagcgcctccgcaagtgctactgtgggctgacgccgcaccacgtcgtctccaagttcgacgacagaacgtccacgctctactacaatgtcgccgagcccgaggacgtgaactgcagcgccgcctgatgtaatatgatgtgagggggagggggagccaccccagcatctactagtctaatttttgctgcgcagaagtttcatgatgcagcagtgttagtcgtgcgattactgagagtgaaatactagtggcagactgcgcgaggcaatagagttgccgagcctgtacatatacgtgtagggcatatgcataaccagagagctgtatatcccggggcggatccccgggcaggaggaaaattttcattgccgccgtaaattacaatttaactttagctcgccct

SEQ ID NO: 9690 - protein, 371 aa, Zea mays subsp. mays
  peptide (1)..(371): Ceres Seq. ID no. 12361457
MESGLLDTAAAAGLCPVAAGRRRVGSTGTARCFLSCSCASRDCRVSASYSHSISRMLSGVRSAARKRLFRSDPAELLGVANWSETGGGGAGGHQHWWTALENNFVLEATDDEYGGVVVDADRLPADRAAFARSLAASLSYWKSVGKKGVWLKLPVDLAEFVPLAVKEGFKYHHAEEAYLMMTYWIPDEPNMLPANASHQVGVGGFVINDQMEVLVVQEKYRGSSLDGVWKLPTGFILASEEIYTGASREVKEETGVDTEFVDVVAFRHAHNVAFHKSDLFFICMLRPVSSEIKIDETEIQAAKWMALEEFVKQPFIQEDHIFQKIMDICIQRLRKCYCGLTPHHVVSKFDDRTSTLYYNVAEPEDVNCSAA

SEQ ID NO: 9691 - protein, 316 aa, Zea mays subsp. mays
  peptide (1)..(316): Ceres Seq. ID no. 12361458
MLSGVRSAARKRLFRSDPAELLGVANWSETGGGGAGGHQHWWTALENNFVLEATDDEYGGVVVDADRLPADRAAFARSLAASLSYWKSVGKKGVWLKLPVDLAEFVPLAVKEGFKYHHAEEAYLMMTYWIPDEPNMLPANASHQVGVGGFVINDQMEVLVVQEKYRGSSLDGVWKLPTGFILASEEIYTGASREVKEETGVDTEFVDVVAFRHAHNVAFHKSDLFFICMLRPVSSEIKIDETEIQAAKWMALEEFVKQPFIQEDHIFQKIMDICIQRLRKCYCGLTPHHVVSKFDDRTSTLYYNVAEPEDVNCSAA

SEQ ID NO: 9692 - protein, 192 aa, Zea mays subsp. mays
  peptide (1)..(192): Ceres Seq. ID no. 12361459
MMTYWIPDEPNMLPANASHQVGVGGFVINDQMEVLVVQEKYRGSSLDGVWKLPTGFILASEEIYTGASREVKEETGVDTEFVDVVAFRHAHNVAFHKSDLFFICMLRPVSSEIKIDETEIQAAKWMALEEFVKQPFIQEDHIFQKIMDICIQRLRKCYCGLTPHHVVSKFDDRTSTLYYNVAEPEDVNCSAA

SEQ ID NO: 9693 - DNA, 1159 bp, Zea mays subsp. mays
  misc_feature (1)..(1159): Ceres Seq. ID no. 12365990
  misc_feature (1)..(1159): Ortholog of  Ceres SEQ ID NO 12614195 as cited in SEQ ID NO 68460
atattggtagctcatcatcgatccagcagcacacagacgagccgacacaagcagttagctatagctgctagcctgatcgccaatggccaccgccggcagcaagcaaggaggaggctcgtccaagccgcctgcggctggtcaggagttggacccgaggtacgagtgggaggagaacgccagcagcttcatcctccgcatccacctctcaggcttcaggaaacaagatttcagggtgcaagtcgacggcgccggccgcctcaccgtccgtggccagcgctccgacgccgccgccaacgccaggcactcccgcttcaacaaggtcttccagctgccctccacctccaacctcgacgacatcgccggccgcttcgaccttggagtcctcacgctcaccgtgcccaagcgcctgcccgcgcccgcaaaggaagaccagcagcaggccaagaagcccgaggatgccgctgccgctgccgccaccaagcaggtggcgggagccaagggcgccaaatcggagccggagcagcagcacaaggaggaggcggcggcaaaggaagataagcccaagacgaccgccgcagcacctgcaccggcagccgacacgacggcaaaggaagataagcccaaggccgccgccgcagcacctgcaccggcagccgacacgaagaagcagcccgagacgcaggccaacgcagagagcaaggcgacggatccgaccgaaagcctggcggagcggcgcaccgaggaagagcgggccaatgcaaatgctgcagctgcggcggagcaccagagaaaggcatgccgtggcttcaaggagcgcgtggcggaggagctccaggggctggcgggctccgagtgggcggagggccttgtggagacgatcaagaggaacagggaggtggtcgccgtcgccgtcgccgccttctccctcggcgtcttcgtctccagcaggctcttctccaggtccagcaggaactagaagccaaccatgcatgcatctctcttttgtgacaatcgtaatagcgcttgtcaccaccacaaactacgtatactgacacatacagtccatgatgtggatatatacatgcactgcacagacacaagtgaattgtaaacatgtttataaatgtatcagaaacaagtttatacatgtaacagtgtc

SEQ ID NO: 9694 - protein, 297 aa, Zea mays subsp. mays
  peptide (1)..(297): Ceres Seq. ID no. 12365991
MATAGSKQGGGSSKPPAAGQELDPRYEWEENASSFILRIHLSGFRKQDFRVQVDGAGRLTVRGQRSDAAANARHSRFNKVFQLPSTSNLDDIAGRFDLGVLTLTVPKRLPAPAKEDQQQAKKPEDAAAAAATKQVAGAKGAKSEPEQQHKEEAAAKEDKPKTTAAAPAPAADTTAKEDKPKAAAAAPAPAADTKKQPETQANAESKATDPTESLAERRTEEERANANAAAAAEHQRKACRGFKERVAEELQGLAGSEWAEGLVETIKRNREVVAVAVAAFSLGVFVSSRLFSRSSRN

SEQ ID NO: 9695 - protein, 198 aa, Zea mays subsp. mays
  peptide (1)..(198): Ceres Seq. ID no. 12365992
MPLPLPPPSRWREPRAPNRSRSSSTRRRRRQRKISPRRPPQHLHRQPTRRQRKISPRPPPQHLHRQPTRRSSPRRRPTQRARRRIRPKAWRSGAPRKSGPMQMLQLRRSTRERHAVASRSAWRRSSRGWRAPSGRRALWRRSRGTGRWSPSPSPPSPSASSSPAGSSPGPAGTRSQPCMHLSFVTIVIALVTTTNYVY

SEQ ID NO: 9696 - protein, 185 aa, Zea mays subsp. mays
  peptide (1)..(185): Ceres Seq. ID no. 12365993
ILVAHHRSSSTQTSRHKQLAIAASLIANGHRRQQARRRLVQAACGWSGVGPEVRVGGERQQLHPPHPPLRLQETRFQGASRRRRPPHRPWPALRRRRQRQALPLQQGLPAALHLQPRRHRRPLRPWSPHAHRAQAPARARKGRPAAGQEARGCRCRCRHQAGGGSQGRQIGAGAAAQGGGGGKGR

SEQ ID NO: 9697 - DNA, 1302 bp, Zea mays subsp. mays
  misc_feature (1)..(1302): Ceres Seq. ID no. 12349766
  misc_feature (1)..(1302): Ortholog of  Ceres SEQ ID NO 14314371 as cited in SEQ ID NO 52260
gtgggcgtggacacgttgactttttcaactgtctgcccctgatgtccgttggctcccgacggaggccgccgccgccgcatcaccaccgtcgcgccatgacacctgcctcctccgtctccgtccccgcgccggttcccgcgccccctaagcctctctacctccggggcccggtcatcgcaggcgccgtcgcgctggccgcgtttctcctcctcgccgccgcctacgccaccaggcgagcagggtccccgccggccgccctcctctcccacccagctgtttccaccaggttcttctccttcgacctggtgcgcgagtaccctcacgacccggccgccttcacccagggtatcttgtacgcgggaaatgacacgcttttcgagtccactggcctctacggcaggtcttcagttcgaaaggttgagcttcagaccggaaaagttttggttaaccaccaaatggacggagatgtgtttggagaaggtttaactcttcttggtgacagattgtttcaggttacctggttgaagaacgacgggtttatatatgaccggcataacttctccaaatgcacgagttttacccataaaatgcgagatggttggggtctggcgactgatggaaaagttctttttggcagtgatggcacctcaatgctgtataagctggattcaaagtcacttgaagtcatgaaagtggtgactgtcaagtatcacggtaatcaagtcccctatcttaatgagctggaatatatagatggtgaagtctgggcaaatgtctggcagacagattgcatagctagagtgtcccctgaagatggcctagtggtgtgttggatctttcttcatgagctgaggcggcagttgtggaactcaggcaacacgaatattgacgtcttaaacgggatagcttgggatgaaagaaggcacagattatttgtgacagggaaactgtggccaaagctatatgagatcaagctacgggcagtagatggtccagcagatggatctgtagaaaagctttgtccaaaagccagcttctatcgctgaagagtgtagaaccgcatatacactgggtgtgctaacatgggccttcatttgtttaaacgcacgatgcgaaggatgtggagatgtgagtacgtacatgtttgatctggtaccactgtcatatatatatacacccatgagttagtagatgtagctgtacattgttgtgacctgtatgaattttgatgatggctgtgttgtttgtgttaagagtgaattgcaacagattttgatgcattcaatgcaacttaatagcttg

SEQ ID NO: 9698 - protein, 347 aa, Zea mays subsp. mays
  peptide (1)..(347): Ceres Seq. ID no. 12349767
GRGHVDFFNCLPLMSVGSRRRPPPPHHHRRAMTPASSVSVPAPVPAPPKPLYLRGPVIAGAVALAAFLLLAAAYATRRAGSPPAALLSHPAVSTRFFSFDLVREYPHDPAAFTQGILYAGNDTLFESTGLYGRSSVRKVELQTGKVLVNHQMDGDVFGEGLTLLGDRLFQVTWLKNDGFIYDRHNFSKCTSFTHKMRDGWGLATDGKVLFGSDGTSMLYKLDSKSLEVMKVVTVKYHGNQVPYLNELEYIDGEVWANVWQTDCIARVSPEDGLVVCWIFLHELRRQLWNSGNTNIDVLNGIAWDERRHRLFVTGKLWPKLYEIKLRAVDGPADGSVEKLCPKASFYR

SEQ ID NO: 9699 - protein, 334 aa, Zea mays subsp. mays
  peptide (1)..(334): Ceres Seq. ID no. 12349768
MSVGSRRRPPPPHHHRRAMTPASSVSVPAPVPAPPKPLYLRGPVIAGAVALAAFLLLAAAYATRRAGSPPAALLSHPAVSTRFFSFDLVREYPHDPAAFTQGILYAGNDTLFESTGLYGRSSVRKVELQTGKVLVNHQMDGDVFGEGLTLLGDRLFQVTWLKNDGFIYDRHNFSKCTSFTHKMRDGWGLATDGKVLFGSDGTSMLYKLDSKSLEVMKVVTVKYHGNQVPYLNELEYIDGEVWANVWQTDCIARVSPEDGLVVCWIFLHELRRQLWNSGNTNIDVLNGIAWDERRHRLFVTGKLWPKLYEIKLRAVDGPADGSVEKLCPKASFYR

SEQ ID NO: 9700 - protein, 316 aa, Zea mays subsp. mays
  peptide (1)..(316): Ceres Seq. ID no. 12349769
MTPASSVSVPAPVPAPPKPLYLRGPVIAGAVALAAFLLLAAAYATRRAGSPPAALLSHPAVSTRFFSFDLVREYPHDPAAFTQGILYAGNDTLFESTGLYGRSSVRKVELQTGKVLVNHQMDGDVFGEGLTLLGDRLFQVTWLKNDGFIYDRHNFSKCTSFTHKMRDGWGLATDGKVLFGSDGTSMLYKLDSKSLEVMKVVTVKYHGNQVPYLNELEYIDGEVWANVWQTDCIARVSPEDGLVVCWIFLHELRRQLWNSGNTNIDVLNGIAWDERRHRLFVTGKLWPKLYEIKLRAVDGPADGSVEKLCPKASFYR

SEQ ID NO: 9701 - DNA, 1519 bp, Zea mays subsp. mays
  misc_feature (1)..(1519): Ceres Seq. ID no. 12354390
  misc_feature (1)..(1519): Ortholog of  Ceres SEQ ID NO 14313264 as cited in SEQ ID NO 67300
agacgtgaatccaagcgtgcaagcaagcggcggtaatggcggcggctctgcaagccacgccgctcaaaaccctatccatctcccgccggcgcgtcggcggcgcgggggcgcggccgcgtccgatggcggcgagcttccgatgctccgcggcggcgaggagctacaatatcacgctcctccccggagacggcatcggccctgaggtggtcgccgtcgccaaggacgtgctgtccctcgccggcgccctcgaaggcgtcgagctccggttccaggagaagcttgtgggtggctcggccctggacgccaccggcgtgccgctccccgacgagacactcgacgcggccaagggttccgacgccgtcctcctcggcgccattggaggctataagtgggataacaatgagaagcacctcaagcctgagaccgggctgctgcagctccgtgccggacttggggtctttgccaatctgcgaccagctgcagtattgccgcagttggtagatgcatccactctgaagaaagaggtagctgaaggtgttgacatcatggttgtcagagagcttactggaggcatctacttcggcaaacccaggggttttggaacaaatgacaatggagatgacattgggttcaacacagaagtttatccagcttctgagattgatcgtatcgcacgagtcgcatttgaggttgctcgcaagagaagagggagactatgctcggttgacaaagcaaatgtcttggaggcatctatgctttggaggaaaagggtgactgcactagcttcggaattccctgatattgagctctcacacatgtatgttgataatgctgcgatgcagcttgttaggaatcctaagcagtttgacacaattgtcacaaacaatatttttggtgacatattatctgatgaagcatcaatgattacgggaagtattggaatgctcccatctgccagtgttggtgaatcgggacctggtctttttgaacctattcatggctctgcccctgatattgctggacaggacaaggccaatccattggctacaattcttagtgcagcgatgctattgagatatggcctaggagaagaaaatgctgcgaacagaattgaagctgcagttactgaaacactgaaccatgggttccgaactggggacatatattctcctggaacaacattggttggatgcaagcggatgggggaagaagtcctgaagacagtgaactcactgaaggaagtggctgctgtaaactgatgcatgttggtacttaatttataaccctacaggatgagatggttgaaagggacttgcattttattagaagttgagcctggtgaaagagagcactgcgtctggttttgaatcgcaactgtagcggctgaaccgacggtcttttttcatttctggtgtttgttggccttcctgtaactcaattttgtacaaggaaggataagcatatgtatgataaaatgggatagtttatgccagttgaataaaatatgttctataacttc

SEQ ID NO: 9702 - protein, 407 aa, Zea mays subsp. mays
  peptide (1)..(407): Ceres Seq. ID no. 12354391
MAAALQATPLKTLSISRRRVGGAGARPRPMAASFRCSAAARSYNITLLPGDGIGPEVVAVAKDVLSLAGALEGVELRFQEKLVGGSALDATGVPLPDETLDAAKGSDAVLLGAIGGYKWDNNEKHLKPETGLLQLRAGLGVFANLRPAAVLPQLVDASTLKKEVAEGVDIMVVRELTGGIYFGKPRGFGTNDNGDDIGFNTEVYPASEIDRIARVAFEVARKRRGRLCSVDKANVLEASMLWRKRVTALASEFPDIELSHMYVDNAAMQLVRNPKQFDTIVTNNIFGDILSDEASMITGSIGMLPSASVGESGPGLFEPIHGSAPDIAGQDKANPLATILSAAMLLRYGLGEENAANRIEAAVTETLNHGFRTGDIYSPGTTLVGCKRMGEEVLKTVNSLKEVAAVN

SEQ ID NO: 9703 - protein, 378 aa, Zea mays subsp. mays
  peptide (1)..(378): Ceres Seq. ID no. 12354392
MAASFRCSAAARSYNITLLPGDGIGPEVVAVAKDVLSLAGALEGVELRFQEKLVGGSALDATGVPLPDETLDAAKGSDAVLLGAIGGYKWDNNEKHLKPETGLLQLRAGLGVFANLRPAAVLPQLVDASTLKKEVAEGVDIMVVRELTGGIYFGKPRGFGTNDNGDDIGFNTEVYPASEIDRIARVAFEVARKRRGRLCSVDKANVLEASMLWRKRVTALASEFPDIELSHMYVDNAAMQLVRNPKQFDTIVTNNIFGDILSDEASMITGSIGMLPSASVGESGPGLFEPIHGSAPDIAGQDKANPLATILSAAMLLRYGLGEENAANRIEAAVTETLNHGFRTGDIYSPGTTLVGCKRMGEEVLKTVNSLKEVAAVN

SEQ ID NO: 9704 - protein, 237 aa, Zea mays subsp. mays
  peptide (1)..(237): Ceres Seq. ID no. 12354393
MVVRELTGGIYFGKPRGFGTNDNGDDIGFNTEVYPASEIDRIARVAFEVARKRRGRLCSVDKANVLEASMLWRKRVTALASEFPDIELSHMYVDNAAMQLVRNPKQFDTIVTNNIFGDILSDEASMITGSIGMLPSASVGESGPGLFEPIHGSAPDIAGQDKANPLATILSAAMLLRYGLGEENAANRIEAAVTETLNHGFRTGDIYSPGTTLVGCKRMGEEVLKTVNSLKEVAAVN

SEQ ID NO: 9705 - DNA, 1470 bp, Zea mays subsp. mays
  misc_feature (1)..(1470): Ceres Seq. ID no. 12365924
  misc_feature (1)..(1470): Ortholog of  Ceres SEQ ID NO 14314108 as cited in SEQ ID NO 63184
gcttggtacgtgcccacacacgtaccaaataaacgtacactgaccgacgtcgtcgtttcacgttgcaagattgcatcttgccgatcatcgcaacgtcggctagctctgtgacaatggcgaagagcagacgggagatctcgtttggtttggccgtcgtcctgtccctaacggccgccgcactcgtgcgaaccggacacggcgccgacgccgccttcgcgagggcgagcgggacacgtttcacgatcggtgggcggccgttctactcgaacggcttcaacgcgtactggctcatgtacatggcgtcggacccggccgaccggagcaaggcgacggccgcgctggacgaggcggcccgcctcggcggccacgctcgtgcggacgtgggcgttcagcgacggcggctaccgcgcgctgcaggtgtcgcccggggtgtacgacgaggaggtgttcaggggtctagactatgtgatatccgaagcaaagaagcgcgggatccatttaatcctgagcctggtgaacaactgggacgggtacggcgggaagaagcagtacgtgcagtgggcaagaacccaggggcacagcctgaattctgatgacgacttcttcacggacagcgtgaccaaagggttctacaagaaccatgtcaaggcagtcctcacgagagtgaacaagatgacgggagtggcgtacaaggacgagcctgccatcttcgcgtgggagctcatgaacgagcctcgctgccagaggcgacctctccgggaagacgctgcaggcctggattacggagatggccggctacgtcaagtccgtggatcccaaccacatggtagagatcgggctcgagggcttctacggcgagtccacgcccgaccgcaagcgccagttcaacccgggagggtacaccgtcggcaccgacttcatctccaacaacctgatccccggcgtcgacttcgccacgatccactcctaccccgaccaatgggtgcccggcgcgagcgacggcgcgcaggtggcgttcatgcggcggtggatggcgtcgcacgccggcgacgccgcggcggtgctgcggaagccgctgctggtggcggagttcggctggtccgcgcgctccaacagctacacggtgtccatgcgggacgcctacttccgcatggtgtacgaggcgatctacgcgtcggcgagagcgggagggccgctcgcggggggcctcttctggcaggtcatggtgcccgggatggagagctggaccgacggctacgacgtcgtgctcgaccgtagcccatccacggctgccgtcgtcggccaggagtgctcccggatgaccggactcaactaggtgtcctagctagtagccagtagcggtggactgattcgtgctggttcaaatgttcaaggcagccacggagagccggagacatgaccaatggatgtgctctaataatttaaagtaataacaaaaaaaatatcttt

SEQ ID NO: 9706 - protein, 201 aa, Zea mays subsp. mays
  peptide (1)..(201): Ceres Seq. ID no. 12365925
MTGVAYKDEPAIFAWELMNEPRCQRRPLREDAAGLDYGDGRLRQVRGSQPHGRDRARGLLRRVHARPQAPVQPGRVHRRHRLHLQQPDPRRRLRHDPLLPRPMGARRERRRAGGVHAAVDGVARRRRRGGAAEAAAGGGVRLVRALQQLHGVHAGRLLPHGVRGDLRVGESGRAARGGPLLAGHGARDGELDRRLRRRARP

SEQ ID NO: 9707 - protein, 184 aa, Zea mays subsp. mays
  peptide (1)..(184): Ceres Seq. ID no. 12365926
MNEPRCQRRPLREDAAGLDYGDGRLRQVRGSQPHGRDRARGLLRRVHARPQAPVQPGRVHRRHRLHLQQPDPRRRLRHDPLLPRPMGARRERRRAGGVHAAVDGVARRRRRGGAAEAAAGGGVRLVRALQQLHGVHAGRLLPHGVRGDLRVGESGRAARGGPLLAGHGARDGELDRRLRRRARP

SEQ ID NO: 9708 - protein, 182 aa, Zea mays subsp. mays
  peptide (1)..(182): Ceres Seq. ID no. 12365927
MAGYVKSVDPNHMVEIGLEGFYGESTPDRKRQFNPGGYTVGTDFISNNLIPGVDFATIHSYPDQWVPGASDGAQVAFMRRWMASHAGDAAAVLRKPLLVAEFGWSARSNSYTVSMRDAYFRMVYEAIYASARAGGPLAGGLFWQVMVPGMESWTDGYDVVLDRSPSTAAVVGQECSRMTGLN

SEQ ID NO: 9709 - DNA, 1954 bp, Zea mays subsp. mays
  misc_feature (1)..(1954): Ceres Seq. ID no. 12366011
  misc_feature (1)..(1954): Ortholog of  Ceres SEQ ID NO 15180309 as cited in SEQ ID NO 1272
cccaatcccaagatgaatgctacgtaggtagacagtgttcttgtggtgacgtgacctccacagagtgcagagatgggagaagctgaagaagcgccaggagacagcaatggtgaggcactggagctcctcatgtccatggcgtcctcttcgctggcctgctctgtctcgcagttcccagccaagtggcagtccatcaaggacaagctccagctgctctgctgcagcctcaattcactctgcggcggcggcggtgaccacgacgacgacgacgacaaggagcatcctgtgttggctgagcttctgcggctggcttcagcaaccgtgaggagcatccaggtcgttgcttctcagtgcagcgacgggtcatacaagggtggaaggcttcgtctgaggagcgacctggacaacctgagctgcaagctcgatgcgcacatgaagcagctcaaggagatggccgtctcgtccggggcgccgtcgccgtccaaggccattgtcgccgtcaggcccagcgccgaggccagcgtgggtgagaaggccttctacctcaaggatctcttttccaggatcaggatcggcggcaccgtccagaggagccaggcactggccgccatcagggagctgttggtggaagacgagctctgtgcgaaggttgtcgccctcgacgtcgacgacggcgtcgccctgctcacggggttcctcgagtccaccgacgcgcgcatccaagaagaggctgccggcgccgtcgccgtcgtcgcgagctccgagcgttacaggggaatgctggtgaaggcaggggtgatcgccccgctcgtccagctgctggagaacgcggacaccgccagcgagctgggcaagcagagggcggcgcacgcgctgagggagctgacggagaactccgacaacgtgtgggccgtctgcgcgcacggcggcctcaccacgctgctgcacgcctgcgcccacgccggcagcagcagcaagctcgtcagctcctcttttgcagtgctgaggaacctcagtcggatggaggaagtgaagatgttcatggtggagcaaggggtggtcacggagctggtgaagctctcccagaagaaggaggaggtccgcaagctcggcgccgtcgaattgctccacgccatggctctggatgacgccgacgtcagggaggaagccgtcggcatgggggtgatccagtccctcctccagttgatataccccgaccttccctactcgtacaaggccagggaggttgctcttgctgccatctggttcttctgcttctcttctgcaaactccttggatgacctcatcagctcggatgttcttggctggctgctcttctacctgaacaacggcgactacgccgtcctcgaatgtacgctcaagattctgaggcatctctccgaggtttctgaggagtacaaccggatgatgggcagagcagggtatttgagcgccctgtcaggcttgcttggagcgaaatcctgtcgagtccgggaaatggcggcgcaggttctttccagcttgctgatgcttcaccccaaccgtgccatcttcatccaagacggcgacaatctgaacaggctgctgcagctccttgatccagccgagggcaagttgatggcgaaggacttgatcctctctgctatcatgtccctggctgagaccaacagcggaaggaagaagattgtgacgtcggaaaatttctgcagcctgaaagaactggcagaatctggtgacttcgacgccaagaagatcgtcaggaaactatctactaacagactgcaaaccatcttcagcaaaatatggagtgtctagattattcctgactcccctttttcactgaggcttagctctagtctatttgatgtccatagtattttttctctggctttgcttgtaatctcggcgcatccatcattttgattcctttgtgatatatattgcaacttcggtt

SEQ ID NO: 9710 - protein, 580 aa, Zea mays subsp. mays
  peptide (1)..(580): Ceres Seq. ID no. 12366012
MGEAEEAPGDSNGEALELLMSMASSSLACSVSQFPAKWQSIKDKLQLLCCSLNSLCGGGGDHDDDDDKEHPVLAELLRLASATVRSIQVVASQCSDGSYKGGRLRLRSDLDNLSCKLDAHMKQLKEMAVSSGAPSPSKAIVAVRPSAEASVGEKAFYLKDLFSRIRIGGTVQRSQALAAIRELLVEDELCAKVVALDVDDGVALLTGFLESTDARIQEEAAGAVAVVASSERYRGMLVKAGVIAPLVQLLENADTASELGKQRAAHALRELTENSDNVWAVCAHGGLTTLLHACAHAGSSSKLVSSSFAVLRNLSRMEEVKMFMVEQGVVTELVKLSQKKEEVRKLGAVELLHAMALDDADVREEAVGMGVIQSLLQLIYPDLPYSYKAREVALAAIWFFCFSSANSLDDLISSDVLGWLLFYLNNGDYAVLECTLKILRHLSEVSEEYNRMMGRAGYLSALSGLLGAKSCRVREMAAQVLSSLLMLHPNRAIFIQDGDNLNRLLQLLDPAEGKLMAKDLILSAIMSLAETNSGRKKIVTSENFCSLKELAESGDFDAKKIVRKLSTNRLQTIFSKIWSV

SEQ ID NO: 9711 - protein, 561 aa, Zea mays subsp. mays
  peptide (1)..(561): Ceres Seq. ID no. 12366013
MSMASSSLACSVSQFPAKWQSIKDKLQLLCCSLNSLCGGGGDHDDDDDKEHPVLAELLRLASATVRSIQVVASQCSDGSYKGGRLRLRSDLDNLSCKLDAHMKQLKEMAVSSGAPSPSKAIVAVRPSAEASVGEKAFYLKDLFSRIRIGGTVQRSQALAAIRELLVEDELCAKVVALDVDDGVALLTGFLESTDARIQEEAAGAVAVVASSERYRGMLVKAGVIAPLVQLLENADTASELGKQRAAHALRELTENSDNVWAVCAHGGLTTLLHACAHAGSSSKLVSSSFAVLRNLSRMEEVKMFMVEQGVVTELVKLSQKKEEVRKLGAVELLHAMALDDADVREEAVGMGVIQSLLQLIYPDLPYSYKAREVALAAIWFFCFSSANSLDDLISSDVLGWLLFYLNNGDYAVLECTLKILRHLSEVSEEYNRMMGRAGYLSALSGLLGAKSCRVREMAAQVLSSLLMLHPNRAIFIQDGDNLNRLLQLLDPAEGKLMAKDLILSAIMSLAETNSGRKKIVTSENFCSLKELAESGDFDAKKIVRKLSTNRLQTIFSKIWSV

SEQ ID NO: 9712 - protein, 559 aa, Zea mays subsp. mays
  peptide (1)..(559): Ceres Seq. ID no. 12366014
MASSSLACSVSQFPAKWQSIKDKLQLLCCSLNSLCGGGGDHDDDDDKEHPVLAELLRLASATVRSIQVVASQCSDGSYKGGRLRLRSDLDNLSCKLDAHMKQLKEMAVSSGAPSPSKAIVAVRPSAEASVGEKAFYLKDLFSRIRIGGTVQRSQALAAIRELLVEDELCAKVVALDVDDGVALLTGFLESTDARIQEEAAGAVAVVASSERYRGMLVKAGVIAPLVQLLENADTASELGKQRAAHALRELTENSDNVWAVCAHGGLTTLLHACAHAGSSSKLVSSSFAVLRNLSRMEEVKMFMVEQGVVTELVKLSQKKEEVRKLGAVELLHAMALDDADVREEAVGMGVIQSLLQLIYPDLPYSYKAREVALAAIWFFCFSSANSLDDLISSDVLGWLLFYLNNGDYAVLECTLKILRHLSEVSEEYNRMMGRAGYLSALSGLLGAKSCRVREMAAQVLSSLLMLHPNRAIFIQDGDNLNRLLQLLDPAEGKLMAKDLILSAIMSLAETNSGRKKIVTSENFCSLKELAESGDFDAKKIVRKLSTNRLQTIFSKIWSV

SEQ ID NO: 9713 - DNA, 2131 bp, Zea mays subsp. mays
  misc_feature (1)..(2131): Ceres Seq. ID no. 12367699
  misc_feature (1)..(2131): Ortholog of  Ceres SEQ ID NO 12460981 as cited in SEQ ID NO 65146
ataacacaacaatctctctcccctcactccctctctgcagcgcgcagctttcaaagcgttgggagagatggcagaggagacgcaaccagaggccgcagccgccgccgcgcccgccgcggccgaggtagtcgtgaccgaagctgcgccggcggaggcggaggtgcctgcggcggcggaagctgaagccgaggccaaggatgagaagaaaggtgacgaggcggagctcaccgccgatgacgcgggggtggggaccggctcgttcaaggaggaaagcaacctggtggaagacctgcccgacccggagaagaaggcgctcgacgagttcaagcagctgatcgctgctgccctcgccgccggtgagttcaacctgcctcccccgccgccgccgccgaaggccaaggaaacaaaggtggaggaagccaaggccgaggagcccgccaaagaagagcccgcggccgaggcggaggaagccaaggcccaggtggctgcggatgccccggttgaggaggtcaagacggaggtgccgccggccgaggaggccaaggctgagacactggctgaggaagccaagccttccgagcccgagccgcaggagaagaccgtcgtggtcactgaggaggagactgccaccaagacggtggaagcaatcgaggaaaccgtcgtgtccgcccccgccgccatcccggaggaagcagcggcgccggaggcggtggtcgaggctcaggcgaccgcgcctgaacccgtgctgatttggggcgtgccgctgggtcggcgacgacgagcgcacggacacggttctgctcaagttcctgcgtgcgcgggagttcaaggtgaaggaggccatggcgatgctcaagtccgcggtgctgtggcgcaagcgcttcggcatcacctcgctcctcgacgccgaccttggcctgacggagctggagaacgtggtgttctaccgcggcacggaccgcgaaggccaccccgtgtgctacaacgtctacggcgagttccaggacaaggatctctacgagaaggccttcggcgacgatgagaagagggagcgcttcctcaagtggcgcatccagctgctggagcgcggcattctgtcgaagctggacttctcgcccagcggcatctgctccatggttcaggttaccgacctcaagaactcgccgcccatgctcggcaagcaccgcgccgtcacccgccaggctgtcacgctgctccaggacaactaccccgagttcattgccaagaaggtgttcatcaatgtgccgtggtggtatctagccgccaacaagatgatgagcccgttcctcacacagcgcaccaagagcaagttcgtctttgctagcccagccaaatcagcagcgactctattcagatacatcgcaccggaacaagttcctgtccaatttggaggcctcttcaaggaggatgatcctgagttcaccacctctgacactgtctccgagctcactatcaaaccatcctcaaaagaaaccgttgagatccctgtcaccgagaactccacaattgtatgggaactccgggtgctgagttgggaagtgagctatggcgccgagttcacccccgacgcggagggtgggtacaccgtcattgtacagaagacaaggaaggtgcctgctaacgaggaaccgatcatgaagggaagcttcaaggcaggcgagcctggaaaacttgtgctaactgtgaacaaccctgcatccaagaagaagactctactttacagatcgaaggtgaagagcgccagcgagtgagtgtgaggtcacgccgctagctgcctgggccctacagttaaaacgatctacagcatgatagaagagagaaggaaccttttggtttggttcgttaatttactgggatttgctgggttttttattttttgggttcgcattctacattttgtttggttgaaaccaaagtgagcttgtttttgtgacagtagatgggagaagtataatggcattgtgtgatggatggttgttgatgagggcagggaggacgaaaatgaggggaaggaaaggctggagaatgtctgttcctctgtagatgtgtgttctgtacattgcatctcttggattctcattgatatgttaaaatttaggagtacttggtc

SEQ ID NO: 9714 - protein, 324 aa, Zea mays subsp. mays
  peptide (1)..(324): Ceres Seq. ID no. 12367700
MAEETQPEAAAAAAPAAAEVVVTEAAPAEAEVPAAAEAEAEAKDEKKGDEAELTADDAGVGTGSFKEESNLVEDLPDPEKKALDEFKQLIAAALAAGEFNLPPPPPPPKAKETKVEEAKAEEPAKEEPAAEAEEAKAQVAADAPVEEVKTEVPPAEEAKAETLAEEAKPSEPEPQEKTVVVTEEETATKTVEAIEETVVSAPAAIPEEAAAPEAVVEAQATAPEPVLIWGVPLGRRRRAHGHGSAQVPACAGVQGEGGHGDAQVRGAVAQALRHHLAPRRRPWPDGAGERGVLPRHGPRRPPRVLQRLRRVPGQGSLREGLRRR

SEQ ID NO: 9715 - protein, 309 aa, Zea mays subsp. mays
  peptide (1)..(309): Ceres Seq. ID no. 12367701
MAMLKSAVLWRKRFGITSLLDADLGLTELENVVFYRGTDREGHPVCYNVYGEFQDKDLYEKAFGDDEKRERFLKWRIQLLERGILSKLDFSPSGICSMVQVTDLKNSPPMLGKHRAVTRQAVTLLQDNYPEFIAKKVFINVPWWYLAANKMMSPFLTQRTKSKFVFASPAKSAATLFRYIAPEQVPVQFGGLFKEDDPEFTTSDTVSELTIKPSSKETVEIPVTENSTIVWELRVLSWEVSYGAEFTPDAEGGYTVIVQKTRKVPANEEPIMKGSFKAGEPGKLVLTVNNPASKKKTLLYRSKVKSASE

SEQ ID NO: 9716 - protein, 307 aa, Zea mays subsp. mays
  peptide (1)..(307): Ceres Seq. ID no. 12367702
MLKSAVLWRKRFGITSLLDADLGLTELENVVFYRGTDREGHPVCYNVYGEFQDKDLYEKAFGDDEKRERFLKWRIQLLERGILSKLDFSPSGICSMVQVTDLKNSPPMLGKHRAVTRQAVTLLQDNYPEFIAKKVFINVPWWYLAANKMMSPFLTQRTKSKFVFASPAKSAATLFRYIAPEQVPVQFGGLFKEDDPEFTTSDTVSELTIKPSSKETVEIPVTENSTIVWELRVLSWEVSYGAEFTPDAEGGYTVIVQKTRKVPANEEPIMKGSFKAGEPGKLVLTVNNPASKKKTLLYRSKVKSASE

SEQ ID NO: 9717 - DNA, 1295 bp, Zea mays subsp. mays
  misc_feature (1)..(1295): Ceres Seq. ID no. 12354202
  misc_feature (1)..(1295): Ortholog of  Ceres SEQ ID NO 13623732 as cited in SEQ ID NO 0
aggaaatgactcgtcaacgcaactaccccaagtcgccgctgagccactctctccgtccgcgaatccgtaaatggaaggggacgaaatgctcagggttaagctcggcaggcagggccttgaggtgtccaagcttggcttcgggtgcatgggcctcactggagtgtacaacgcccctgttcctgaccaagctgggatcgacataatcaagcacgcgtttgaggccggcatcaccttcttcgacaccgctgatgcctatgggccacacaccaacgaggtcctgctcggaaaggcattgaaacattttcctcgtgagaaggtgcaaattgccaccaaatgtggcattgcaggatttgatgcaagtggcatgcgtgtgaagggcactccagattatgttcgagcttgttgtgaagcaagccttcagcgccttgctactgactacattgatatatactaccaacatcgcattgatcagtcagtgcctatagaggaaactatgggagagctcaagaagttggttgaagaagggaaagtgaggtatgttggcttatcagaggctagtgccgataccattcgacgggcacatgctgtccatccaattactgcggtgcagttggagtggtcactatggaccagagatatagaggaagatataattccagtctgcagggagcttggtattggaatagttccatatagcccacttggccgtggcttctttgctggcagggcagctgtagaacgtgttccatcagaaagtctattgtctaaacatccaagatattctggggaaaacttggagaagaataaagttctgtatacacgacttgaaatgttgtccaagaagtatgggtgcacacctgctcaactcgctctctcctgggttcttcatcaaggagaagatgtggtccccatccctggaacaacaaaagccaagaaccttgacgaaaatatcggtgctgtaaaggtaaggctgagcaaggaagacctcgaagaaatctcaggcgcattccctgctggtgaggtggctgggtctagactccttggagtcttggagcctttttcctggaggctcgcaaataccccgcctccaaaatagcgagttcagatgcaaattcttggccatcctaccatttaggtcatgttatgttagatcatatctacatgatgcaaatgattgttcctgtgctcgcgcgtgaaaatgcatgtacctgaaacaaagagatgtaacagttggttctctgtgtggaacgtgctgattgctatagttgatcaaagaaatacgttggaattaagtt

SEQ ID NO: 9718 - protein, 341 aa, Zea mays subsp. mays
  peptide (1)..(341): Ceres Seq. ID no. 12354203
MEGDEMLRVKLGRQGLEVSKLGFGCMGLTGVYNAPVPDQAGIDIIKHAFEAGITFFDTADAYGPHTNEVLLGKALKHFPREKVQIATKCGIAGFDASGMRVKGTPDYVRACCEASLQRLATDYIDIYYQHRIDQSVPIEETMGELKKLVEEGKVRYVGLSEASADTIRRAHAVHPITAVQLEWSLWTRDIEEDIIPVCRELGIGIVPYSPLGRGFFAGRAAVERVPSESLLSKHPRYSGENLEKNKVLYTRLEMLSKKYGCTPAQLALSWVLHQGEDVVPIPGTTKAKNLDENIGAVKVRLSKEDLEEISGAFPAGEVAGSRLLGVLEPFSWRLANTPPPK

SEQ ID NO: 9719 - protein, 336 aa, Zea mays subsp. mays
  peptide (1)..(336): Ceres Seq. ID no. 12354204
MLRVKLGRQGLEVSKLGFGCMGLTGVYNAPVPDQAGIDIIKHAFEAGITFFDTADAYGPHTNEVLLGKALKHFPREKVQIATKCGIAGFDASGMRVKGTPDYVRACCEASLQRLATDYIDIYYQHRIDQSVPIEETMGELKKLVEEGKVRYVGLSEASADTIRRAHAVHPITAVQLEWSLWTRDIEEDIIPVCRELGIGIVPYSPLGRGFFAGRAAVERVPSESLLSKHPRYSGENLEKNKVLYTRLEMLSKKYGCTPAQLALSWVLHQGEDVVPIPGTTKAKNLDENIGAVKVRLSKEDLEEISGAFPAGEVAGSRLLGVLEPFSWRLANTPPPK

SEQ ID NO: 9720 - protein, 316 aa, Zea mays subsp. mays
  peptide (1)..(316): Ceres Seq. ID no. 12354205
MGLTGVYNAPVPDQAGIDIIKHAFEAGITFFDTADAYGPHTNEVLLGKALKHFPREKVQIATKCGIAGFDASGMRVKGTPDYVRACCEASLQRLATDYIDIYYQHRIDQSVPIEETMGELKKLVEEGKVRYVGLSEASADTIRRAHAVHPITAVQLEWSLWTRDIEEDIIPVCRELGIGIVPYSPLGRGFFAGRAAVERVPSESLLSKHPRYSGENLEKNKVLYTRLEMLSKKYGCTPAQLALSWVLHQGEDVVPIPGTTKAKNLDENIGAVKVRLSKEDLEEISGAFPAGEVAGSRLLGVLEPFSWRLANTPPPK

SEQ ID NO: 9721 - DNA, 1346 bp, Zea mays subsp. mays
  misc_feature (1)..(1346): Ceres Seq. ID no. 12369832
  misc_feature (1)..(1346): Ortholog of  Ceres SEQ ID NO 14308095 as cited in SEQ ID NO 55286
cgtctttgtatccatttgtttggttcttacttcttagttgtgtgccatagagattctaccatccccacgtccagctccccgcctcttccctgctgcatctgcacttgcacgccgctcacacatgctatttttgttcacttgttcttgcttcttgctgtggttgttaaactgacttggtcctgataatcctccgcgttctaatgatgtgctgtcgctgcaccatgcgcgtgttgtcgtcagagcctagggctggtgaagcccatggaggagatgctgatggcggccagcgcgggcgctgcaaatccgagccaaggctcgaatccgaacccgccgccgccggcggcgcccctgacgggcgcgggtagcaccgagcggcgcgcgcggccgcagaaggagaaggcgctcaactgcccgcggtgcaactccaccaacaccaaattctgctactacaacaactacagcctccagcagccacgctacttctgcaagacgtgccgccgctactggacggagggcggatccctccgcagcgtccccgtgggcggcggctcccgcaagaacaagcgctcctcgtcgtcatcgtcgtcggcggcggcggcgtccgcttccacctcctcctcggccacgagctcgtccatggccagcacactgggggcggcgtccaagagtccggagctggcgcacgacctcaacctagcgttcccgcaccatggtggccagcacgccgccgagttcccggcgttcccgagcctgcagagcagcaacgacatgtgcgaccccggtggcgggatgacgagcaacggccggggcggcggcgcggggcccgcggtcggcgcgctctcggcaacggagctctggcggagctccggctgctacatgccgctgcagatgccaggagattacacggcagcagggttcgcgctcggggagttccgcacgccgctgctgcctgacgcgcacgggccggggtcgtccggtgctgccgcagcggcggggtacggttgcagcgcggggctgccgcagggcgtgccggacaacgcgggcaggttattgttccctttcgaggacttgaagccgccggttagccctggaggtggtggtgtggccggaggtggtgcaagtgcaaccggtggcgccggcgacggaaatagcagccacgatcagtttgaccacaacaaggagcaaggcggaggcggcagccccggtgccggtgccgggcacgacacggcggggttctggagcagggtttacaatttcggacggaaatttccgaaattttcttgatttgggtggtatccgaaaaatatatgtttttgaaattgacattttaatataaatttttgttt

SEQ ID NO: 9722 - protein, 340 aa, Zea mays subsp. mays
  peptide (1)..(340): Ceres Seq. ID no. 12369833
MEEMLMAASAGAANPSQGSNPNPPPPAAPLTGAGSTERRARPQKEKALNCPRCNSTNTKFCYYNNYSLQQPRYFCKTCRRYWTEGGSLRSVPVGGGSRKNKRSSSSSSSAAAASASTSSSATSSSMASTLGAASKSPELAHDLNLAFPHHGGQHAAEFPAFPSLQSSNDMCDPGGGMTSNGRGGGAGPAVGALSATELWRSSGCYMPLQMPGDYTAAGFALGEFRTPLLPDAHGPGSSGAAAAAGYGCSAGLPQGVPDNAGRLLFPFEDLKPPVSPGGGGVAGGGASATGGAGDGNSSHDQFDHNKEQGGGGSPGAGAGHDTAGFWSRVYNFGRKFPKFS

SEQ ID NO: 9723 - protein, 337 aa, Zea mays subsp. mays
  peptide (1)..(337): Ceres Seq. ID no. 12369834
MLMAASAGAANPSQGSNPNPPPPAAPLTGAGSTERRARPQKEKALNCPRCNSTNTKFCYYNNYSLQQPRYFCKTCRRYWTEGGSLRSVPVGGGSRKNKRSSSSSSSAAAASASTSSSATSSSMASTLGAASKSPELAHDLNLAFPHHGGQHAAEFPAFPSLQSSNDMCDPGGGMTSNGRGGGAGPAVGALSATELWRSSGCYMPLQMPGDYTAAGFALGEFRTPLLPDAHGPGSSGAAAAAGYGCSAGLPQGVPDNAGRLLFPFEDLKPPVSPGGGGVAGGGASATGGAGDGNSSHDQFDHNKEQGGGGSPGAGAGHDTAGFWSRVYNFGRKFPKFS

SEQ ID NO: 9724 - protein, 335 aa, Zea mays subsp. mays
  peptide (1)..(335): Ceres Seq. ID no. 12369835
MAASAGAANPSQGSNPNPPPPAAPLTGAGSTERRARPQKEKALNCPRCNSTNTKFCYYNNYSLQQPRYFCKTCRRYWTEGGSLRSVPVGGGSRKNKRSSSSSSSAAAASASTSSSATSSSMASTLGAASKSPELAHDLNLAFPHHGGQHAAEFPAFPSLQSSNDMCDPGGGMTSNGRGGGAGPAVGALSATELWRSSGCYMPLQMPGDYTAAGFALGEFRTPLLPDAHGPGSSGAAAAAGYGCSAGLPQGVPDNAGRLLFPFEDLKPPVSPGGGGVAGGGASATGGAGDGNSSHDQFDHNKEQGGGGSPGAGAGHDTAGFWSRVYNFGRKFPKFS

SEQ ID NO: 9725 - DNA, 1028 bp, Zea mays subsp. mays
  misc_feature (1)..(1028): Ceres Seq. ID no. 12349386
  misc_feature (1)..(1028): Ortholog of  Ceres SEQ ID NO 13660334 as cited in SEQ ID NO 67468
gcgtggtttgagtgtttgaccacggcagcaagagcagcccgctccgctcctcctcccctgccgaagcaccacacagcagaagcgaaaacggcaggaaggccaatcgggcctgccaggcatgcttgcccgctgccgcaggtgaggcgacccgcagccgtccgagacgcaccccggcgcaagcgcgcatccgccatggatccggcgtccgaggagctcgagcgccgcagccgctatctcaactcgctcatccgccgtactaagctcagcgccaccccggctccccctcctcagccggagccggagcacgaggtagcgccaccgaatccggagccggagccggagaccgcggttgggaagcgcgaggaggccaaggcggatccagtggtcgttgaggaggagaaccgggaggccaaagtggcgggggacgggaaggggaaagagatcaaggggaaggacgacgggggtcccaaggaggacaacagcaggaaggtgtcagtgcgggtgcgcgcggccgacatgcccttaccgctgcagcgccgcgcggtccggctcgcctacgaagccatcgccgccatgccgcgcctcgacagcaagcgcctcgccctcgcgctcaagaaggaatttgatacggcatatggtgccagcttggcattgcattgttggaacaagctttggttcctatgtcactcactctctgggcggtttcttgtacttctccgtcgacaaggcctatattctcctcttcagaaccgctgtcgagccattagcccatccgcgatgaggggccatgaaacagtctactagctagcgcattctgtattcgacatttaactgtagaagggtaaggagagtagaacgatcatcgcccccaccccccaatgcaaatatgtagaactaatctgctgtagctagttttttccatgtactgtgcactaatcggccatgtggaccttaccattagcttccagagttgtagcttgactcaactcagttcttccgcacgaggggaatttactttcgcatcttgt

SEQ ID NO: 9726 - protein, 267 aa, Zea mays subsp. mays
  peptide (1)..(267): Ceres Seq. ID no. 12349387
AWFECLTTAARAARSAPPPLPKHHTAEAKTAGRPIGPARHACPLPQVRRPAAVRDAPRRKRASAMDPASEELERRSRYLNSLIRRTKLSATPAPPPQPEPEHEVAPPNPEPEPETAVGKREEAKADPVVVEEENREAKVAGDGKGKEIKGKDDGGPKEDNSRKVSVRVRAADMPLPLQRRAVRLAYEAIAAMPRLDSKRLALALKKEFDTAYGASLALHCWNKLWFLCHSLSGRFLVLLRRQGLYSPLQNRCRAISPSAMRGHETVY

SEQ ID NO: 9727 - protein, 203 aa, Zea mays subsp. mays
  peptide (1)..(203): Ceres Seq. ID no. 12349388
MDPASEELERRSRYLNSLIRRTKLSATPAPPPQPEPEHEVAPPNPEPEPETAVGKREEAKADPVVVEEENREAKVAGDGKGKEIKGKDDGGPKEDNSRKVSVRVRAADMPLPLQRRAVRLAYEAIAAMPRLDSKRLALALKKEFDTAYGASLALHCWNKLWFLCHSLSGRFLVLLRRQGLYSPLQNRCRAISPSAMRGHETVY

SEQ ID NO: 9728 - DNA, 1389 bp, Zea mays subsp. mays
  misc_feature (1)..(1389): Ceres Seq. ID no. 12416088
  misc_feature (1)..(1389): Ortholog of  Ceres SEQ ID NO 15178596 as cited in SEQ ID NO 53922
  misc_feature (1)..(1389): Ortholog of  Ceres SEQ ID NO 12780542 as cited in SEQ ID NO 65674
gcacgagaccattacctagaacatcctaatcgaaaaatatacggcgaaagccctattcgtgcccgcggccgtggatagataggtcagtgacgattgagaaacccgtagtcggagcagaggaggggtagaagatggtgttcggtcaggtggtgatcggcccgccgggctccggcaagaccacctactgcaacggcatgtcgcagttcctctccctcctcggcaggaaggttgcgtttgtcaatttggaccctgcaaatgacgcattgccatatgagtgtgccataaacatcgaggacctcataaaactcagtgatgtcatgtctgagcattcgcttggccctaatggagggcttgtgtattgcatggattacttggagaagaatattgattggcttgaagaaaaactgaagccttttattgaagatcactatctgttatttgattttcctggtcaagtggaattgttcttccttcactcaaatgcaagaagtgttattaataaactcatcaaaaagatggacttgaggcttactgctgttcaccttattgatgcccatttatgctgtgatcctggaaagtatgtcagtgctttgcttctttcactatcaacgatgctacacttggaattgccacatatcaatgtcttgtcaaagattgacctcattgagaactatggaaatttagcattcaaccttgacttctacactgatgtccaagatctttcttatttgcaatatcatcttgagcaggatccccgctcagccaagtacaggaaactgactaaggagctctgtgatgtgattgatgattttggtttagtcaatttttcaactttggacatccaggacaaggaaagtgttggcaatcttgtgaagctgattgacaagagcaacggatatatattttcttctattgacagtagtgctgttgagttcagcaaaattgcagcggcgcctcttgattgggactactacagaacagcggaagtgcaggagaagtacatgaaagatgatgagttcgcgcaactgacaagcaggatgcaatgaggctggcggtgccgtcccgcacccccactttggtagcacaacgggtgaacggtgaaccacgacagtgtggcacgtcgaacttcggttgccagaacgatgtgaaacctgtctaaattcatgtagctcagttgtaggtgtttactgaagctaattgctatagttgcctgatcttctgggagtaccctttgggcagtaaaaaaatgcacttgtcacctgtgaccaaccggtcaggtcctgttttgtttgttcgcttcaacttcgaactgcatcagctacaatctttagagacaaaatattgtagtgtttggactactgcagttgtaatctttaaagacaacattgc

SEQ ID NO: 9729 - protein, 304 aa, Zea mays subsp. mays
  peptide (1)..(304): Ceres Seq. ID no. 12416089
MVFGQVVIGPPGSGKTTYCNGMSQFLSLLGRKVAFVNLDPANDALPYECAINIEDLIKLSDVMSEHSLGPNGGLVYCMDYLEKNIDWLEEKLKPFIEDHYLLFDFPGQVELFFLHSNARSVINKLIKKMDLRLTAVHLIDAHLCCDPGKYVSALLLSLSTMLHLELPHINVLSKIDLIENYGNLAFNLDFYTDVQDLSYLQYHLEQDPRSAKYRKLTKELCDVIDDFGLVNFSTLDIQDKESVGNLVKLIDKSNGYIFSSIDSSAVEFSKIAAAPLDWDYYRTAEVQEKYMKDDEFAQLTSRMQ

SEQ ID NO: 9730 - protein, 283 aa, Zea mays subsp. mays
  peptide (1)..(283): Ceres Seq. ID no. 12416090
MSQFLSLLGRKVAFVNLDPANDALPYECAINIEDLIKLSDVMSEHSLGPNGGLVYCMDYLEKNIDWLEEKLKPFIEDHYLLFDFPGQVELFFLHSNARSVINKLIKKMDLRLTAVHLIDAHLCCDPGKYVSALLLSLSTMLHLELPHINVLSKIDLIENYGNLAFNLDFYTDVQDLSYLQYHLEQDPRSAKYRKLTKELCDVIDDFGLVNFSTLDIQDKESVGNLVKLIDKSNGYIFSSIDSSAVEFSKIAAAPLDWDYYRTAEVQEKYMKDDEFAQLTSRMQ

SEQ ID NO: 9731 - protein, 242 aa, Zea mays subsp. mays
  peptide (1)..(242): Ceres Seq. ID no. 12416091
MSEHSLGPNGGLVYCMDYLEKNIDWLEEKLKPFIEDHYLLFDFPGQVELFFLHSNARSVINKLIKKMDLRLTAVHLIDAHLCCDPGKYVSALLLSLSTMLHLELPHINVLSKIDLIENYGNLAFNLDFYTDVQDLSYLQYHLEQDPRSAKYRKLTKELCDVIDDFGLVNFSTLDIQDKESVGNLVKLIDKSNGYIFSSIDSSAVEFSKIAAAPLDWDYYRTAEVQEKYMKDDEFAQLTSRMQ

SEQ ID NO: 9732 - DNA, 1986 bp, Zea mays subsp. mays
  misc_feature (1)..(1986): Ceres Seq. ID no. 12358713
  misc_feature (1)..(1986): Ortholog of  Ceres SEQ ID NO 15176081 as cited in SEQ ID NO 65838
  misc_feature (1)..(1986): Ortholog of  Ceres SEQ ID NO 13660287 as cited in SEQ ID NO 67316
  misc_feature (1)..(1986): Ortholog of  Ceres SEQ ID NO 14307892 as cited in SEQ ID NO 67490
attgggtgcagtcgagtagttgccacctaaccgtggcggaggcgcagtgctgttgcgagatgtggctgtgatcgagcgagataactaaaagcctccccacataaatgcaagggcgacgagacggcaagcaagcggacgcgaacaaacccccttattccatagcgagcgcgagcagcggcgccgggaggactgctgcgatggggggagacgccagcaccatcgaggggggcccgctcccgcatctcggcggccggccggcctcccgcgtgcccgacaccccgctggtgcgcacggcgggggacgccgcgcgcatggtctgggacgagtccaagcgcctctggggcatcgggctgcccatcggcgtgggcatgcctgagcatgtacgccatcagctccatcacccagatattcatcggccacctcggcaacctcccgctggccgccgcctccatcggcctctccgtgttcgccaccttcgcgctcggcttcctcctcggcatgggcagcgcgctcgagacgctctgcggccaggccttcggcgccggcgaggtcgccatgctcggcgtctacctgcagcggtcttggatcatcctcgtcgccgcctgcgtcgtcatgacgcccgtcttcgtcttcgccgagtcgctgctcctgctcatcggccaggacgccgacgtcgcgcgggagtccgccaggttcgccacctacatcgtcccctccatctacgccatgggcatcaacttcgccgccagcaagttcctccaggcgcagagcaaggtcaccgtacccgcctggatcggcttcggggcgctcctcgcctgtgccctcctcaactacctgttcgtcagcgtgctcggctggggcctccccggcgccgccgccgcctacgacatcgcgcactggatcatcgcgctcggccaggtcgtctacatcatcggatggtgcaaggacggatggaaaggatggtccgtagccgccttccacgaaatctggccattcgtcaggctctccctcgagtccgccgtcatgctctgcctcgaggtatggtacatgagcctgatcaccgtgctcaccggcgacctggaggacgcccagattgccgtggactcactaggcatatgcatgaacataaacggatgggaggccatgatcttcatcggcctcaatgccgctatcagtgtccgagtctccaacgagcttggctccggccgtccgagggccgcgtggaacgccgtcatggtcgtcgtcggcgaggcgctggtgatcgggattctgtgcatggcactcatcctcatcttcagagacagcttctccatcattttcaccagcgacaccaccctgcagcgagccgtcgccaggatcgccggcctgctcggcctcaccatggtgctcaacagcgtgcagcccgtggtttcaggggtcgcggttgggggcggatggcagggcctcgtcgcctacatcaacctcggctgctactatatcttcggcctgcccctgggctacttgctcggatacaagttcagctttggagttggggggatttggtccggcatgctttgtggtatcacccttcagacgctcatcttgctaggtgtggtttggaggacagattggaaagcagaggccgcacaagcttcaggccgtgtgcaaaagtggggcggcaaaggcaccgatgaagtcaagcctctcctggaatagaattagtgtagtactatcacgcacgaagctcgtttcatttgaataaacaactgggcaatacgccttatccctttcagaagcacagctcatttgctttcccatcgaatctgatagcttccctttcccctcctccgtgtagttaaattgatgtctctgtatgaacactgtttgaggcgactagtatgaaccctgtttgcggcgactagacgtattgaacatactttttttttcttccagttgactcagcatgacttgaacagtctcaaattgtgtgtaaaggatttactcgct

SEQ ID NO: 9733 - protein, 522 aa, Zea mays subsp. mays
  peptide (1)..(522): Ceres Seq. ID no. 12358714
MQGRRDGKQADANKPPYSIASASSGAGRTAAMGGDASTIEGGPLPHLGGRPASRVPDTPLVRTAGDAARMVWDESKRLWGIGLPIGVGMPEHVRHQLHHPDIHRPPRQPPAGRRLHRPLRVRHLRARLPPRHGQRARDALRPGLRRRRGRHARRLPAAVLDHPRRRLRRHDARLRLRRVAAPAHRPGRRRRAGVRQVRHLHRPLHLRHGHQLRRQQVPPGAEQGHRTRLDRLRGAPRLCPPQLPVRQRARLGPPRRRRRLRHRALDHRARPGRLHHRMVQGRMERMVRSRLPRNLAIRQALPRVRRHALPRGMVHEPDHRAHRRPGGRPDCRGLTRHMHEHKRMGGHDLHRPQCRYQCPSLQRAWLRPSEGRVERRHGRRRRGAGDRDSVHGTHPHLQRQLLHHFHQRHHPAASRRQDRRPARPHHGAQQRAARGFRGRGWGRMAGPRRLHQPRLLLYLRPAPGLLARIQVQLWSWGDLVRHALWYHPSDAHLARCGLEDRLESRGRTSFRPCAKVGRQRHR

SEQ ID NO: 9734 - protein, 491 aa, Zea mays subsp. mays
  peptide (1)..(491): Ceres Seq. ID no. 12358715
MGGDASTIEGGPLPHLGGRPASRVPDTPLVRTAGDAARMVWDESKRLWGIGLPIGVGMPEHVRHQLHHPDIHRPPRQPPAGRRLHRPLRVRHLRARLPPRHGQRARDALRPGLRRRRGRHARRLPAAVLDHPRRRLRRHDARLRLRRVAAPAHRPGRRRRAGVRQVRHLHRPLHLRHGHQLRRQQVPPGAEQGHRTRLDRLRGAPRLCPPQLPVRQRARLGPPRRRRRLRHRALDHRARPGRLHHRMVQGRMERMVRSRLPRNLAIRQALPRVRRHALPRGMVHEPDHRAHRRPGGRPDCRGLTRHMHEHKRMGGHDLHRPQCRYQCPSLQRAWLRPSEGRVERRHGRRRRGAGDRDSVHGTHPHLQRQLLHHFHQRHHPAASRRQDRRPARPHHGAQQRAARGFRGRGWGRMAGPRRLHQPRLLLYLRPAPGLLARIQVQLWSWGDLVRHALWYHPSDAHLARCGLEDRLESRGRTSFRPCAKVGRQRHR

SEQ ID NO: 9735 - protein, 453 aa, Zea mays subsp. mays
  peptide (1)..(453): Ceres Seq. ID no. 12358716
MVWDESKRLWGIGLPIGVGMPEHVRHQLHHPDIHRPPRQPPAGRRLHRPLRVRHLRARLPPRHGQRARDALRPGLRRRRGRHARRLPAAVLDHPRRRLRRHDARLRLRRVAAPAHRPGRRRRAGVRQVRHLHRPLHLRHGHQLRRQQVPPGAEQGHRTRLDRLRGAPRLCPPQLPVRQRARLGPPRRRRRLRHRALDHRARPGRLHHRMVQGRMERMVRSRLPRNLAIRQALPRVRRHALPRGMVHEPDHRAHRRPGGRPDCRGLTRHMHEHKRMGGHDLHRPQCRYQCPSLQRAWLRPSEGRVERRHGRRRRGAGDRDSVHGTHPHLQRQLLHHFHQRHHPAASRRQDRRPARPHHGAQQRAARGFRGRGWGRMAGPRRLHQPRLLLYLRPAPGLLARIQVQLWSWGDLVRHALWYHPSDAHLARCGLEDRLESRGRTSFRPCAKVGRQRHR

SEQ ID NO: 9736 - protein, 438 aa, Zea mays subsp. mays
  peptide (1)..(438): Ceres Seq. ID no. 12358717
MYAISSITQIFIGHLGNLPLAAASIGLSVFATFALGFLLGMGSALETLCGQAFGAGEVAMLGVYLQRSWIILVAACVVMTPVFVFAESLLLLIGQDADVARESARFATYIVPSIYAMGINFAASKFLQAQSKVTVPAWIGFGALLACALLNYLFVSVLGWGLPGAAAAYDIAHWIIALGQVVYIIGWCKDGWKGWSVAAFHEIWPFVRLSLESAVMLCLEVWYMSLITVLTGDLEDAQIAVDSLGICMNINGWEAMIFIGLNAAISVRVSNELGSGRPRAAWNAVMVVVGEALVIGILCMALILIFRDSFSIIFTSDTTLQRAVARIAGLLGLTMVLNSVQPVVSGVAVGGGWQGLVAYINLGCYYIFGLPLGYLLGYKFSFGVGGIWSGMLCGITLQTLILLGVVWRTDWKAEAAQASGRVQKWGGKGTDEVKPLLE

SEQ ID NO: 9737 - DNA, 1837 bp, Zea mays subsp. mays
  misc_feature (1)..(1837): Ceres Seq. ID no. 12416371
  misc_feature (1)..(1837): Ortholog of  Ceres SEQ ID NO 13660311 as cited in SEQ ID NO 67550
agtcccctcatctctcgtctctcctcctgcctcctcgtcctcgccttcccattcccccgccccaaacccccagctcgattcccagtcgtctcgccccgtgatgtcgccggctgctggtggccccgcgcccgcgccaggccagcgcaatcagcggccgccgttccgcaggcgatcgcggtaccgccggagtccggccgttcggcgcccgaggctcccgcangatccaccggcccancccgagggggccgatcccaccaatgcggcggcaaggaagacaacgtggagcgtgctggcgcagacccccgccgccgcggcggaggcgaccccagagggcggcggcatcatcggcggggacgcctcgtggccggcgctcgtggagtcgacgcgcgcgtgccccaagtcgggctcgtccgactccctcaatgccctctccgatgtttccggcccgcctccgcaggaggatacaattgctgcttcatcggtacttccacatccagttgtgggggctaatccgattcccactgcccaaaaccctacctccatacctcctcgcacgcctgcggcttcctctcagcagaacggtgccacaacccagacatttccagttcggcgcagtggcaaccgtggaaatggtagcaatggtggcgtcagggctgccaatagtagcggaggtgacgggagcagtggcagtggtggtgatggtaactggaatgatggaagccttggtactgacagcggttgcaacagcagcaatggcgatggtcccatcaattnggatgataatgtccctggcactcgttgtgcccgtgggaatgacaatgacagcngcagaaatccttctggcaatggccactggaaccacaacatacgaggtggtggtggtggtggtgatgggaacaatagaaatagcagtggtagcagcaaccactggaataataatccccgaaatagtagtagtagcaatggcgttggaggtcgtggtggttaccgggggtcgccgtgaccatgagagagggggctaatttctcccctaggaacttcccaagagttccggtaatgccatatcaacagcagcagcagcctggcatctaccagcctgggccctttcaccgaccaccaccaccggctgcccatttcatggtgccacagcatttttatgtcccatcatttccctaccttgctgatgtgcaaccttatcctgtctacctcccaccagtagaacagtttcagaacatgcatcttcttcggccacccatgcagcctgcttgggttcctcctcatcaggatcaaccaaatctccaagatagtattaggaatcagatagagttctattttagcacaaataatctatgccatgacacattcttgaggagacatatgaacaatcaaggatgggtacctattgacctaatcttagggttcaaccggatgagggcgtttacaggtttggtggacaccaactacatactagatgctatccgtggttctgagttattggaagtgcagggagataatgtccggaggcgcaatgattggatggaatggctgcttcattaaggccgtccactagtaaatcagatgccaagatgcagctgcatgccatattgggggaactgaatgaatagaagtcttgatcacggcgtgatggactgatgtacagcgagcgggtctattggaatcgggatgatttttgtttgacgtgatggctgcacgtgaaggcacattattcaaagggaaaataattttacttagggctagcaaatgtttttatggcagtctgtatagttgtccgaaaagaagtgaccaccctgccttctcattatggattattattatt

SEQ ID NO: 9738 - protein, 333 aa, Zea mays subsp. mays
  peptide (1)..(333): Ceres Seq. ID no. 12416372
  misc_feature (73)..(73): Xaa is any aa, unknown or other
  misc_feature (78)..(78): Xaa is any aa, unknown or other
  misc_feature (258)..(258): Xaa is any aa, unknown or other
  misc_feature (276)..(276): Xaa is any aa, unknown or other
VPSSLVSPPASSSSPSHSPAPNPQLDSQSSRPVMSPAAGGPAPAPGQRNQRPPFRRRSRYRRSPAVRRPRLPXDPPAXPEGADPTNAAARKTTWSVLAQTPAAAAEATPEGGGIIGGDASWPALVESTRACPKSGSSDSLNALSDVSGPPPQEDTIAASSVLPHPVVGANPIPTAQNPTSIPPRTPAASSQQNGATTQTFPVRRSGNRGNGSNGGVRAANSSGGDGSSGSGGDGNWNDGSLGTDSGCNSSNGDGPINXDDNVPGTRCARGNDNDSXRNPSGNGHWNHNIRGGGGGGDGNNRNSSGSSNHWNNNPRNSSSSNGVGGRGGYRGSP

SEQ ID NO: 9739 - protein, 300 aa, Zea mays subsp. mays
  peptide (1)..(300): Ceres Seq. ID no. 12416373
  misc_feature (40)..(40): Xaa is any aa, unknown or other
  misc_feature (45)..(45): Xaa is any aa, unknown or other
  misc_feature (225)..(225): Xaa is any aa, unknown or other
  misc_feature (243)..(243): Xaa is any aa, unknown or other
MSPAAGGPAPAPGQRNQRPPFRRRSRYRRSPAVRRPRLPXDPPAXPEGADPTNAAARKTTWSVLAQTPAAAAEATPEGGGIIGGDASWPALVESTRACPKSGSSDSLNALSDVSGPPPQEDTIAASSVLPHPVVGANPIPTAQNPTSIPPRTPAASSQQNGATTQTFPVRRSGNRGNGSNGGVRAANSSGGDGSSGSGGDGNWNDGSLGTDSGCNSSNGDGPINXDDNVPGTRCARGNDNDSXRNPSGNGHWNHNIRGGGGGGDGNNRNSSGSSNHWNNNPRNSSSSNGVGGRGGYRGSP

SEQ ID NO: 9740 - protein, 254 aa, Zea mays subsp. mays
  peptide (1)..(254): Ceres Seq. ID no. 12416374
  misc_feature (173)..(173): Xaa is any aa, unknown or other
  misc_feature (190)..(190): Xaa is any aa, unknown or other
MRRQGRQRGACWRRPPPPRRRRPQRAAASSAGTPRGRRSWSRRARAPSRARPTPSMPSPMFPARLRRRIQLLLHRYFHIQLWGLIRFPLPKTLPPYLLARLRLPLSRTVPQPRHFQFGAVATVEMVAMVASGLPIVAEVTGAVAVVVMVTGMMEALVLTAVATAAMAMVPSIXMIMSLALVVPVGMTMTXAEILLAMATGTTTYEVVVVVVMGTIEIAVVAATTGIIIPEIVVVAMALEVVVVTGGRRDHERGG

SEQ ID NO: 9741 - DNA, 1342 bp, Zea mays subsp. mays
  misc_feature (1)..(1342): Ceres Seq. ID no. 13493226
  misc_feature (1)..(1342): Ortholog of  Ceres SEQ ID NO 14307085 as cited in SEQ ID NO 54749
aagctagctagcagctgtaacttccaccaccagtactcagtactcacatcaaacacacacgaaccatcaataacccctctgcaggctgagggaaacgtgaacacaccatggcgaggccgccgtgctgcgacaaggagggcgtcaagaagggcccgtggacgccggaggaggacctcgtcctcgtctcctacatccaggaccacggccccggcaactggcgcgccgtccccaccagaaccgggctgatgcggtgcagcaagagctgccggcttcggtggaccaactacctccggccgggcatcaggcgcggcaacttcacggagcaggaggagaagctcatcgtccacctccaggccctcctcggcaacaggtgggcggccatcgcgtcgtacctgccggagcggacggacaacgacgtcaagaactactggaacacgcacctcaagcgcaagctgcaggccggcagcggcgacggcgacggcgacggggcggccaagccgccggcgcacaggccgccgccgtccaactccaaggggcagtgggagaggaggctgcagacggacatcaacctggcgcgccgcgcgctccgcgaggcgctcaccccgctcggcgacctcaagccgcagccgcagccgcagccgcagccgcagcgcgacggcgctggcgtgggcatcgtcggcggtgacagcccggcggcctcgagcttgtcgtcgcagtgctccccgccgccagcgcctgccgccttggggacgtacgttctcaccgcggacaacgtctcccggatgctggacggatgggccggcttgaactggaagcgccgcggcggggctccgggcacgcccggcggcgccgagaccgcgtccaccgggtcctcctcggaggtgtcgtacggcggtggcaccgccgtcgtcgcgccggccgctggtggcccggtgttcgagtacgagacgaagccgccggccgctccgttccagctgatgatgccgctgtctgcgatcgagtcgtggctgttcgacgacgacacccacttccaccgtcctgtccagagcgccagcttgctggacgccgcccccatggattattacctgttgtagctagcgtgtccagcagctgatccagaccaagctaatccgttcaagcaaggaagtcggtggctgattagtcggctagctagctacctgtttctaaagttgttagttttcattatatttagccttttctcttctaggtgggtaaaagctgagtgcgtacttccccttgtgcaagctgcataatgttgcgtgggaaaataacatatatagctcttgagaccactaacatatatatagcagatagttttwcc

SEQ ID NO: 9742 - protein, 328 aa, Zea mays subsp. mays
  peptide (1)..(328): Ceres Seq. ID no. 15222902
MARPPCCDKEGVKKGPWTPEEDLVLVSYIQDHGPGNWRAVPTRTGLMRCSKSCRLRWTNYLRPGIRRGNFTEQEEKLIVHLQALLGNRWAAIASYLPERTDNDVKNYWNTHLKRKLQAGSGDGDGDGAAKPPAHRPPPSNSKGQWERRLQTDINLARRALREALTPLGDLKPQPQPQPQPQRDGAGVGIVGGDSPAASSLSSQCSPPPAPAALGTYVLTADNVSRMLDGWAGLNWKRRGGAPGTPGGAETASTGSSSEVSYGGGTAVVAPAAGGPVFEYETKPPAAPFQLMMPLSAIESWLFDDDTHFHRPVQSASLLDAAPMDYYLL

SEQ ID NO: 9743 - protein, 282 aa, Zea mays subsp. mays
  peptide (1)..(282): Ceres Seq. ID no. 15222903
MRCSKSCRLRWTNYLRPGIRRGNFTEQEEKLIVHLQALLGNRWAAIASYLPERTDNDVKNYWNTHLKRKLQAGSGDGDGDGAAKPPAHRPPPSNSKGQWERRLQTDINLARRALREALTPLGDLKPQPQPQPQPQRDGAGVGIVGGDSPAASSLSSQCSPPPAPAALGTYVLTADNVSRMLDGWAGLNWKRRGGAPGTPGGAETASTGSSSEVSYGGGTAVVAPAAGGPVFEYETKPPAAPFQLMMPLSAIESWLFDDDTHFHRPVQSASLLDAAPMDYYLL

SEQ ID NO: 9744 - DNA, 1297 bp, Zea mays subsp. mays
  misc_feature (1)..(1297): Ceres Seq. ID no. 13493135
  misc_feature (1)..(1297): Ortholog of  Ceres SEQ ID NO 12615890 as cited in SEQ ID NO 62605
acacaagcagcaacatcactgatcgccgtgcaggcctggtacgtaccacacacacacacacacatacagaagaagaacgtaccttgcgctacaaccccgtcgccgccgactacgccgatcgtgtccacgggaaccaagcaaagcaaagcaagcgacgcatcggaagaagccggagaccgaccgaccgaccgagctacctagctacagctcatcagcccatggtgaagacggcgacggcgacggcggcggcgaggcacggcggcgctcataagaggacgtacaagggcgtgcggatgcggagctggggctcctgggtgtcggaggtgcgggcgccgggccagaagacgaggatntggntnggctcccactccaccgccgaggccgcggcgcgcgcntacgacgccgcgctgctctgcctcaggggctcggcggccgcgccggacctcaacttcccgccccgccgcccgctcgccgacggcctccacccgctgccccccgccgccatgtcgcccaaggccatccagcgcgtggccgccgccgccgcggcctgctgcgctcctcagagtaacggcattggcagtgcctgctgcgccgcgccctgcgctcctccgagtaatggcattggcagcgcctgcggccacgccgagaccgccccggcgttgagcggcagcccgccctccagcgacagcgacgtctcctccccggaggcggggtccaccgccagcagcgacggcgagctggcccgctacggcgacggcgacggcgacggcggcgtcagcgtggactacggctcgctcgccgacatcgacgccttcttccagtcgcccaagtgcatggacgacgaccactactactacgcagcgctcatggacccctgcggcgccttcttcgcgccggcgccatcggttgcggcggacgacgacgcagcagccgccgccggatgctgggaggacggcgacggcattgcgctctggagcttcagcttccccgctctggactgctgagctgaagcggcgcagattccgctactactgacgattgacgactaatcgccggtcaagcgatggaaaccgctttatttgcttcatcgacggcacaggtttccgcatacatgataaatttacccaatttaattcgatgtatgtaaacattcttaataagctgattgttaagcgttgtagtggtggggagctctcatggctgaagctgcatgttttaaggtagctttttccatggagttaacctctttgctattgcttgtctatgagtaaacaaaaaaaaaaacagttttattgcc

SEQ ID NO: 9745 - protein, 333 aa, Zea mays subsp. mays
  peptide (1)..(333): Ceres Seq. ID no. 13493136
  misc_feature (117)..(117): Xaa is any aa, unknown or other
  misc_feature (119)..(119): Xaa is any aa, unknown or other
  misc_feature (131)..(131): Xaa is any aa, unknown or other
TSSNITDRRAGLVRTTHTHTHTEEERTLRYNPVAADYADRVHGNQAKQSKRRIGRSRRPTDRPSYLATAHQPMVKTATATAAARHGGAHKRTYKGVRMRSWGSWVSEVRAPGQKTRXWXGSHSTAEAAARXYDAALLCLRGSAAAPDLNFPPRRPLADGLHPLPPAAMSPKAIQRVAAAAAACCAPQSNGIGSACCAAPCAPPSNGIGSACGHAETAPALSGSPPSSDSDVSSPEAGSTASSDGELARYGDGDGDGGVSVDYGSLADIDAFFQSPKCMDDDHYYYAALMDPCGAFFAPAPSVAADDDAAAAAGCWEDGDGIALWSFSFPALDC

SEQ ID NO: 9746 - protein, 261 aa, Zea mays subsp. mays
  peptide (1)..(261): Ceres Seq. ID no. 13493137
  misc_feature (45)..(45): Xaa is any aa, unknown or other
  misc_feature (47)..(47): Xaa is any aa, unknown or other
  misc_feature (59)..(59): Xaa is any aa, unknown or other
MVKTATATAAARHGGAHKRTYKGVRMRSWGSWVSEVRAPGQKTRXWXGSHSTAEAAARXYDAALLCLRGSAAAPDLNFPPRRPLADGLHPLPPAAMSPKAIQRVAAAAAACCAPQSNGIGSACCAAPCAPPSNGIGSACGHAETAPALSGSPPSSDSDVSSPEAGSTASSDGELARYGDGDGDGGVSVDYGSLADIDAFFQSPKCMDDDHYYYAALMDPCGAFFAPAPSVAADDDAAAAAGCWEDGDGIALWSFSFPALDC

SEQ ID NO: 9747 - protein, 236 aa, Zea mays subsp. mays
  peptide (1)..(236): Ceres Seq. ID no. 13493138
  misc_feature (20)..(20): Xaa is any aa, unknown or other
  misc_feature (22)..(22): Xaa is any aa, unknown or other
  misc_feature (34)..(34): Xaa is any aa, unknown or other
MRSWGSWVSEVRAPGQKTRXWXGSHSTAEAAARXYDAALLCLRGSAAAPDLNFPPRRPLADGLHPLPPAAMSPKAIQRVAAAAAACCAPQSNGIGSACCAAPCAPPSNGIGSACGHAETAPALSGSPPSSDSDVSSPEAGSTASSDGELARYGDGDGDGGVSVDYGSLADIDAFFQSPKCMDDDHYYYAALMDPCGAFFAPAPSVAADDDAAAAAGCWEDGDGIALWSFSFPALDC

SEQ ID NO: 9748 - DNA, 1675 bp, Zea mays subsp. mays
  misc_feature (1)..(1675): Ceres Seq. ID no. 12354295
  misc_feature (1)..(1675): Ortholog of  Ceres SEQ ID NO 14315418 as cited in SEQ ID NO 57506
atagaacatcctaatcgaaaaattttctggttgcagattgattctttaccatttgtatcgccattcctccctgttcgttgggcgtggggtctcaacctaaaatcagtcccattccgcgctcctagtggagagtggattcgaacggaaacacctttttgtgccccaagatgcctgtttccgcttcgtttccacgccacaccttttgaatcctttgccgtcacctcgccttttgcagcactagttgtttgtcagccttcttggagtgtggaggggcagagagcgccgtcctgttgattcaggaaaacagtccgagccgatgggcaggaagagcgacggcgcgcggttgcaatgcgctgaggccaaactggcgacggattggacctgctgcttcctggccctgccaccggcagcaccatccgctgtggatggcgatggtggattcaacctctcgtggaacctccaccagtccttccacccgccggccggcttcttcgccagcgtgggccagcaggttggggttgggttcccagggccttcgtcccagtcgccggagacgccacgggacccatacatgaagtacgtctcgccggaggttgttgtgacacctctgccgagggaaggcgtggtggggttgagggacaaggggaagaagaaagtcgtgaagctcaagattaaggttgggaatcatcacctcaagagactgatcagtggagcaatcgcaggcgcagtgtcaagaactgctgttgcacctttggagacgatcaggacgcatttgatggtgggaagtaatgggaattcgacgacggaggtgttccagtctatcatgaagcatgagggatggactgggttgttccgtggtaacgttgttaatgtcatccgggtagccccaagcaaggcaatcgagctttttgcctttgatacagctaataagttcttgacccccaaatatggggagaaaccgaagatcccagtccctccttcactagtggctggggcatttgccggtgttagctcaactctgtgtacatacccactggaattaattaagacacggctaactatacagagaggcgtgtatgacaatttccttgatgcatttgtcaaaatcatccgcgacgaagggccttctgagctctaccgaggcttaaccccaagcttgattggagtggtgccatatgctgcaacgaactacttcgcctatgacagcctgaagaaggtgtacaagaagatgttcaagacaaatgagattggcagtgttccaacactgttcatcgggtctgccgcaggagctatctcaagcacagcgacgttccctcttgaggtggcacggaagcacatgcaagttggagctgttggtggcaggaaggtttacaagaacatgcttcatgccttgttgagcattcttgaggatgaaggggttgggggcctttacagagggttggggccaagctgcatgaagttggtgcctgctgctgggatttcgttcatgtgctacgaggcttgcaagaagattctgattgaggaagaggatgagtgaagtgtatgcagatcattagaactcagttttgtgacatcctgacagcaggcagcttgaggttactgctgtagtcggcataagttcttaacccctttttgcacccagttttatctgataaactcacctcgttttttcccc

SEQ ID NO: 9749 - protein, 406 aa, Zea mays subsp. mays
  peptide (1)..(406): Ceres Seq. ID no. 12354296
MGRKSDGARLQCAEAKLATDWTCCFLALPPAAPSAVDGDGGFNLSWNLHQSFHPPAGFFASVGQQVGVGFPGPSSQSPETPRDPYMKYVSPEVVVTPLPREGVVGLRDKGKKKVVKLKIKVGNHHLKRLISGAIAGAVSRTAVAPLETIRTHLMVGSNGNSTTEVFQSIMKHEGWTGLFRGNVVNVIRVAPSKAIELFAFDTANKFLTPKYGEKPKIPVPPSLVAGAFAGVSSTLCTYPLELIKTRLTIQRGVYDNFLDAFVKIIRDEGPSELYRGLTPSLIGVVPYAATNYFAYDSLKKVYKKMFKTNEIGSVPTLFIGSAAGAISSTATFPLEVARKHMQVGAVGGRKVYKNMLHALLSILEDEGVGGLYRGLGPSCMKLVPAAGISFMCYEACKKILIEEEDE

SEQ ID NO: 9750 - protein, 321 aa, Zea mays subsp. mays
  peptide (1)..(321): Ceres Seq. ID no. 12354297
MKYVSPEVVVTPLPREGVVGLRDKGKKKVVKLKIKVGNHHLKRLISGAIAGAVSRTAVAPLETIRTHLMVGSNGNSTTEVFQSIMKHEGWTGLFRGNVVNVIRVAPSKAIELFAFDTANKFLTPKYGEKPKIPVPPSLVAGAFAGVSSTLCTYPLELIKTRLTIQRGVYDNFLDAFVKIIRDEGPSELYRGLTPSLIGVVPYAATNYFAYDSLKKVYKKMFKTNEIGSVPTLFIGSAAGAISSTATFPLEVARKHMQVGAVGGRKVYKNMLHALLSILEDEGVGGLYRGLGPSCMKLVPAAGISFMCYEACKKILIEEEDE

SEQ ID NO: 9751 - protein, 253 aa, Zea mays subsp. mays
  peptide (1)..(253): Ceres Seq. ID no. 12354298
MVGSNGNSTTEVFQSIMKHEGWTGLFRGNVVNVIRVAPSKAIELFAFDTANKFLTPKYGEKPKIPVPPSLVAGAFAGVSSTLCTYPLELIKTRLTIQRGVYDNFLDAFVKIIRDEGPSELYRGLTPSLIGVVPYAATNYFAYDSLKKVYKKMFKTNEIGSVPTLFIGSAAGAISSTATFPLEVARKHMQVGAVGGRKVYKNMLHALLSILEDEGVGGLYRGLGPSCMKLVPAAGISFMCYEACKKILIEEEDE

SEQ ID NO: 9752 - DNA, 1413 bp, Zea mays subsp. mays
  misc_feature (1)..(1413): Ceres Seq. ID no. 12381429
  misc_feature (1)..(1413): Ortholog of  Ceres SEQ ID NO 12609045 as cited in SEQ ID NO 51314
  misc_feature (1)..(1413): Ortholog of  Ceres SEQ ID NO 14316312 as cited in SEQ ID NO 60042
  misc_feature (1)..(1413): Ortholog of  Ceres SEQ ID NO 13598492 as cited in SEQ ID NO 63882
  misc_feature (1)..(1413): Ortholog of  Ceres SEQ ID NO 13657914 as cited in SEQ ID NO 66230
  misc_feature (1)..(1413): Ortholog of  Ceres SEQ ID NO 13595877 as cited in SEQ ID NO 67702
  misc_feature (1)..(1413): Ortholog of  Ceres SEQ ID NO 13654367 as cited in SEQ ID NO 67993
  misc_feature (1)..(1413): Ortholog of  Ceres SEQ ID NO 13622667 as cited in SEQ ID NO 0
acgactttatacatccgcttcctccagtcatcaaagaaacagagcgagcctagactgtgaggaagaaaggactaccatgggcgacgtcgctgccggcgctgccgccctgagtccacccccgatgaccaaggagaccaacctcttcatgcaaatcgtcggcaacccggacggcacggtcacgcgccccgaggtccccctcgtcccggcctcagccgaagccactggcggcgtcatctccagggacgtgcccctcgacgcctccgccggcacgtacctccgcctctacctgcccgacccatcctccgcgccagccgccaagcttcccgtcgtcctctacttccacggcggcggcttcgtgatcctctccgccgccaccgtattctaccacggccactgcgaggcgatggccgccgcggtgcccgccatcgtggcgtccctcgagtaccgcctcgcgccggagcaccgcctgcccgcggcctacgaggacgccgccgcggccgtggcgtggctccgcgacggcgcgccgggggacccctgggtcgcggcgcacggcgacctctcccgctgcttcctcatgggcagcagctcgggcggcaacatggctttcttcgcggcgctccggaccggaggcctcgacctgggccccgccacggtgcgcggcctcctgctgcaccagccctacctcggcggcgtcgaccggacgccctcggaggccaggtccgtcgacgacgccatgctgccgctggaggccaacgacaggctctggagcctcgcgctgcccgtgggcgccgaccgggaccacgagttctgcaaccccgtcaaggccatggcgccggaagcccttgccggcctgccgcgctgcctggtcaccgcaacttgggcgacccgctgatcgacaggcagcgggagttcgctcggtggctgcaggaccgcggcggcgcggaggcggaggtcgtcgtgaagttggacgtcgcggggttccacgcgtcggagctgttcgtgccggagatcgccgaggtgctgttcgccgcgatgcgcgagttcgtgtacaccggcgacgcttgacacgttgaatttcgtgccggccggtgacaagtggacatacgtgttgcatcgttgtggattgtgtgaccgtgcgcaataattctcggccgtgttgaatttgaatcttgacaaactggcaccagccaccaggcggcgactactatgtaacacgtgagcactgtagcagctaccgcaacgcacctgacgtccggacgtgtagttttcgcgacgcgtgcagctatcggccacggcaacgaaaataggagatgttttgttcggatttttttttggcccgcgaccattcacagcgctatctgaaactatcttcatcacatctcttatcaaatcatctatctcatcctctatttc

SEQ ID NO: 9753 - protein, 296 aa, Zea mays subsp. mays
  peptide (1)..(296): Ceres Seq. ID no. 12381430
RLYTSASSSHQRNRASLDCEEERTTMGDVAAGAAALSPPPMTKETNLFMQIVGNPDGTVTRPEVPLVPASAEATGGVISRDVPLDASAGTYLRLYLPDPSSAPAAKLPVVLYFHGGGFVILSAATVFYHGHCEAMAAAVPAIVASLEYRLAPEHRLPAAYEDAAAAVAWLRDGAPGDPWVAAHGDLSRCFLMGSSSGGNMAFFAALRTGGLDLGPATVRGLLLHQPYLGGVDRTPSEARSVDDAMLPLEANDRLWSLALPVGADRDHEFCNPVKAMAPEALAGLPRCLVTATWATR

SEQ ID NO: 9754 - protein, 271 aa, Zea mays subsp. mays
  peptide (1)..(271): Ceres Seq. ID no. 12381431
MGDVAAGAAALSPPPMTKETNLFMQIVGNPDGTVTRPEVPLVPASAEATGGVISRDVPLDASAGTYLRLYLPDPSSAPAAKLPVVLYFHGGGFVILSAATVFYHGHCEAMAAAVPAIVASLEYRLAPEHRLPAAYEDAAAAVAWLRDGAPGDPWVAAHGDLSRCFLMGSSSGGNMAFFAALRTGGLDLGPATVRGLLLHQPYLGGVDRTPSEARSVDDAMLPLEANDRLWSLALPVGADRDHEFCNPVKAMAPEALAGLPRCLVTATWATR

SEQ ID NO: 9755 - protein, 256 aa, Zea mays subsp. mays
  peptide (1)..(256): Ceres Seq. ID no. 12381432
MTKETNLFMQIVGNPDGTVTRPEVPLVPASAEATGGVISRDVPLDASAGTYLRLYLPDPSSAPAAKLPVVLYFHGGGFVILSAATVFYHGHCEAMAAAVPAIVASLEYRLAPEHRLPAAYEDAAAAVAWLRDGAPGDPWVAAHGDLSRCFLMGSSSGGNMAFFAALRTGGLDLGPATVRGLLLHQPYLGGVDRTPSEARSVDDAMLPLEANDRLWSLALPVGADRDHEFCNPVKAMAPEALAGLPRCLVTATWATR

SEQ ID NO: 9756 - DNA, 1736 bp, Zea mays subsp. mays
  misc_feature (1)..(1736): Ceres Seq. ID no. 12355141
  misc_feature (1)..(1736): Ortholog of  Ceres SEQ ID NO 14312989 as cited in SEQ ID NO 59121
  misc_feature (1)..(1736): Ortholog of  Ceres SEQ ID NO 12586556 as cited in SEQ ID NO 64667
  misc_feature (1)..(1736): Ortholog of  Ceres SEQ ID NO 14316045 as cited in SEQ ID NO 66810
  misc_feature (1)..(1736): Ortholog of  Ceres SEQ ID NO 13660894 as cited in SEQ ID NO 67475
aaaatggatatacttgaggctgcgcaaacagatatcagtgtctgacgcggccgcgggcatgtcagctgcatgcgctgcctcatggcagagcccgaccctggcggcgtgggacgccacgtccctcgcctcctccctgaaggcggcggccgcccgccgctccgcggcccacgtcggtccattgcacgccgtgctcctcaagctgggcctctccgcctccgccatccacgccacctccctggcgcacgtggctctgcgggccgggcttgcgcggtacgcgcgggagctgttcgacgagatgccccgcccggacgtggtctcttggacgtcactcgtcaccggccacgcgcaccaggggctacaccgcgattccctcgcgctgctccggcgcatggcgggttctggcgtccagcccaacggctactccttgtccggtgggctgctggcctgcgccggtgtcgggcagagcgcgcttgttcacgggaaggagatccatgccagcgtggtcaagatgagctcgcgtggactagtggacccggtcgtggagaacggggttcttggcatgtactcgaggtgcggaagcatggagtacgcgctgagagtgttcagggcgatgcctgtcaggaacatagttgcttggaactcgatgatggcagcgcttcttgggagcgggcaggccgaggacgcgctgaggctgttcgtttccatggtttcttctggcgtcggtgtggatggtttctcactctctatagccgtggatgcgtgcggggagctggcgctgctgaagcaggggatgcaggcgcacgcacaggttgctggcaatggattcgaggcagatgtcgtcgtcaggaactccttagtggacatgtacgccaagtgtggctgtgtcgattcggccgagctcgtcttcgaagcagtatcgtcaaacgacgctgttctttggaccacaatggtctcagcttacgggaagtctggccgtgcacaggacgccgtcagcttgtttgacaggatggcgcgcatggggatataacaagatggcatagcgtatcttgcggttctgtcagcttgtagccatggcggactcgtcagagaagcctggcactacttcagttcgatttctgatggttcgagctcggttgagatgcgagccgagcactacggatgcatggcggatctcctgtgcaggagaggttacctagaagaagctcttgagtttatcaagaacatgccgtttgactcgagcgtcgctgcctggagtgcgctgctcaactcatctcgaatacacgggaatgccaggctaagtcagttcgcagcttcctgtttgctcaagcttgaccctgagaaccacagcaactgggttgctctgtcaagtgtgcatgcatcagggaatgactggcacgagacctggacaatcagggagagcatgagcagagagtgtgtgaagaaagagcctgcgtgtagctgggttgagctgtgtgatggcgttcatgtttttgtaacggccgaccagtctcgtcctgaactgtttcaaatactgcagagtcttgattatttgaaggaggatacatcggtgatgccttggcaagtttcgtagaaaattctatgttttatattacagctttgtggtaggtggtttaaatctcactgcacagtgggcgattattctaatcaaaacaatcagttatgtaaagttgttgctcaatatactcgaatatgatgagttgatgactaattgtttg

SEQ ID NO: 9757 - protein, 341 aa, Zea mays subsp. mays
  peptide (1)..(341): Ceres Seq. ID no. 12355142
KWIYLRLRKQISVSDAAAGMSAACAASWQSPTLAAWDATSLASSLKAAAARRSAAHVGPLHAVLLKLGLSASAIHATSLAHVALRAGLARYARELFDEMPRPDVVSWTSLVTGHAHQGLHRDSLALLRRMAGSGVQPNGYSLSGGLLACAGVGQSALVHGKEIHASVVKMSSRGLVDPVVENGVLGMYSRCGSMEYALRVFRAMPVRNIVAWNSMMAALLGSGQAEDALRLFVSMVSSGVGVDGFSLSIAVDACGELALLKQGMQAHAQVAGNGFEADVVVRNSLVDMYAKCGCVDSAELVFEAVSSNDAVLWTTMVSAYGKSGRAQDAVSLFDRMARMGI

SEQ ID NO: 9758 - protein, 322 aa, Zea mays subsp. mays
  peptide (1)..(322): Ceres Seq. ID no. 12355143
MSAACAASWQSPTLAAWDATSLASSLKAAAARRSAAHVGPLHAVLLKLGLSASAIHATSLAHVALRAGLARYARELFDEMPRPDVVSWTSLVTGHAHQGLHRDSLALLRRMAGSGVQPNGYSLSGGLLACAGVGQSALVHGKEIHASVVKMSSRGLVDPVVENGVLGMYSRCGSMEYALRVFRAMPVRNIVAWNSMMAALLGSGQAEDALRLFVSMVSSGVGVDGFSLSIAVDACGELALLKQGMQAHAQVAGNGFEADVVVRNSLVDMYAKCGCVDSAELVFEAVSSNDAVLWTTMVSAYGKSGRAQDAVSLFDRMARMGI

SEQ ID NO: 9759 - protein, 310 aa, Zea mays subsp. mays
  peptide (1)..(310): Ceres Seq. ID no. 12355144
MRCLMAEPDPGGVGRHVPRLLPEGGGRPPLRGPRRSIARRAPQAGPLRLRHPRHLPGARGSAGRACAVRAGAVRRDAPPGRGLLDVTRHRPRAPGATPRFPRAAPAHGGFWRPAQRLLLVRWAAGLRRCRAERACSREGDPCQRGQDELAWTSGPGRGERGSWHVLEVRKHGVRAESVQGDACQEHSCLELDDGSASWERAGRGRAEAVRFHGFFWRRCGWFLTLYSRGCVRGAGAAEAGDAGARTGCWQWIRGRCRRQELLSGHVRQVWLCRFGRARLRSSIVKRRCSLDHNGLSLREVWPCTGRRQLV

SEQ ID NO: 9760 - DNA, 1147 bp, Zea mays subsp. mays
  misc_feature (1)..(1147): Ceres Seq. ID no. 12354206
  misc_feature (1)..(1147): Ortholog of  Ceres SEQ ID NO 15169248 as cited in SEQ ID NO 55022
  misc_feature (1)..(1147): Ortholog of  Ceres SEQ ID NO 14315042 as cited in SEQ ID NO 56959
  misc_feature (1)..(1147): Ortholog of  Ceres SEQ ID NO 12608620 as cited in SEQ ID NO 60192
  misc_feature (1)..(1147): Ortholog of  Ceres SEQ ID NO 15173077 as cited in SEQ ID NO 64566
  misc_feature (1)..(1147): Ortholog of  Ceres SEQ ID NO 13662898 as cited in SEQ ID NO 66199
  misc_feature (1)..(1147): Ortholog of  Ceres SEQ ID NO 13654314 as cited in SEQ ID NO 67914
atccatccatccacacacacaaacagacagacagacaagcatacaacaccgttgccatttagttgtgttcttgctaggcagttgcgcacttacattgagccgcagctagctgtctacggcacaactatctcctgcgcgcgtgctcgatctgaagctaggccagacctgagcctgtccaattttgccttgttctacccaccggtagtcgagaaggttccataagcgcaagcagacagcaaaagagctaaggggtctgagacaaggttcgaacagatggaggatgtggtgaagttcgtctttggagtttctggaaatgtcatcgctctcttcctcttcctgtccccagtgcctacgttctggaggatcatcaggaggaagtcgacggaggatttctcaggggtgccgtacagcatgacactcctcaactgcctcttgtcagcttggtacgggctgccgttcgtgtccccgaacaacatgctggtgtcgacgatcaacggcgcgggcgcggcgatcgaggccgtgtacgtggtgatcttcctggcgtcggcggtctcggcggcgttcgccgccgtggcgctggcgtcgatgctggcgctgcacggacagggccggaagctcatgtgcggcctcgccgccaccgtctgctccatctgcatgtacgcctcgccgctctccatcatgaggctggtggtgaagaccaagagcgtggagtacatgccgttcctgctgtcgctggccgtgttcctgtgcggcacgtcctggttcgtctacggcctgctcggccgggaccccttcgtcgcgattcccaacgggtgcgggagctttctgggcgcagtgcagctggtcttgtacgccatctaccgcgacagcaacagcggcggcaagcagcaggccggcgacgacgtggagatggcctccgacgccaagagcagcaagaaggtcgccgacgacgtcggcggcaaggaggaccgcctggtctagcatggagctagccactttctctttcggtgcgcgagcgtatgtttcctccccccgtgattgtgtgtgtgtgcatgtatacgagagtgcgtgctgtactgtactacctctgcgtgtgtgcaataatgtaactgggtgtttcatctcgcaatcgggtgtttttctctcc

SEQ ID NO: 9761 - protein, 235 aa, Zea mays subsp. mays
  peptide (1)..(235): Ceres Seq. ID no. 12354207
MEDVVKFVFGVSGNVIALFLFLSPVPTFWRIIRRKSTEDFSGVPYSMTLLNCLLSAWYGLPFVSPNNMLVSTINGAGAAIEAVYVVIFLASAVSAAFAAVALASMLALHGQGRKLMCGLAATVCSICMYASPLSIMRLVVKTKSVEYMPFLLSLAVFLCGTSWFVYGLLGRDPFVAIPNGCGSFLGAVQLVLYAIYRDSNSGGKQQAGDDVEMASDAKSSKKVADDVGGKEDRLV

SEQ ID NO: 9762 - protein, 189 aa, Zea mays subsp. mays
  peptide (1)..(189): Ceres Seq. ID no. 12354208
MTLLNCLLSAWYGLPFVSPNNMLVSTINGAGAAIEAVYVVIFLASAVSAAFAAVALASMLALHGQGRKLMCGLAATVCSICMYASPLSIMRLVVKTKSVEYMPFLLSLAVFLCGTSWFVYGLLGRDPFVAIPNGCGSFLGAVQLVLYAIYRDSNSGGKQQAGDDVEMASDAKSSKKVADDVGGKEDRLV

SEQ ID NO: 9763 - protein, 168 aa, Zea mays subsp. mays
  peptide (1)..(168): Ceres Seq. ID no. 12354209
MLVSTINGAGAAIEAVYVVIFLASAVSAAFAAVALASMLALHGQGRKLMCGLAATVCSICMYASPLSIMRLVVKTKSVEYMPFLLSLAVFLCGTSWFVYGLLGRDPFVAIPNGCGSFLGAVQLVLYAIYRDSNSGGKQQAGDDVEMASDAKSSKKVADDVGGKEDRLV

SEQ ID NO: 9764 - DNA, 1068 bp, Zea mays subsp. mays
  misc_feature (1)..(1068): Ceres Seq. ID no. 12578882
  misc_feature (1)..(1068): Ortholog of  Ceres SEQ ID NO 13594549 as cited in SEQ ID NO 51707
  misc_feature (1)..(1068): Ortholog of  Ceres SEQ ID NO 13595294 as cited in SEQ ID NO 55998
  misc_feature (1)..(1068): Ortholog of  Ceres SEQ ID NO 14302012 as cited in SEQ ID NO 56618
  misc_feature (1)..(1068): Ortholog of  Ceres SEQ ID NO 12598102 as cited in SEQ ID NO 61029
  misc_feature (1)..(1068): Ortholog of  Ceres SEQ ID NO 12625361 as cited in SEQ ID NO 62928
  misc_feature (1)..(1068): Ortholog of  Ceres SEQ ID NO 13599424 as cited in SEQ ID NO 0
acacggcagccggattccgaagcgcaccccctcggccccagccaaaagcatcgcagtttctaatcgtttggagagcacacaagaatgtcgttcgtgcagctctctggtgctggagtcgctgcagtggccttcacgaacaagagcctagtctctcggcacgcagcgctacgggtctgctcgtcgaggcgctcgatccgtagcctggtcgttaaggctgcaactgtcgtcaccccaaagtacacttcactgaagcctctgggagatagggtgcttgtgaagcttggtgccgcagaggagaagacagttggtggcattttgcttccatctactgcccagactaaaccacaaggaggtgaggttgttgctgttggagcaggaaggaccatcggggacaagaaaatagctgtggatatagagactggagcacaagtagtatactcaaagtatgctgggactgaggttgaattcaatgactcaaagcatcttattctcaaagaagacgatatcattggtattcttgagacagatgatgtgaaggacatgaagcctctcaatgaccgtgttctcatcaaggttgcagaagccgaagacaaaactcctgggggccttatcctcactgaaacaactaaagagaagccgtccataggaacggttgtagctgttggcccgggtcctctggacgaggaaggcaagagacagccactgtcagtgtcggcgggcagcacagtgctgtactccaagtatgcagggagtgagttcaagggcgcggatggcacggcctacattgtgttgagagcgtcggatgtgatggctgtcctgtcttgagcatttcgtttccggctcgttaatgtagtttgcagccaatagtttgtcatgtggtatgaaacgatcgctttgtggtggtcatcacaccatgctggtgatcatcacaacatatgctgatactgttccggacaatcggctagaatttgttgtgtggcaggtataaacgtcagcatctgatagtgagagcactcggttacttctacagatggtatttaaggggtgatagtcacgcctctttgctgg

SEQ ID NO: 9765 - protein, 246 aa, Zea mays subsp. mays; identical to SEQ ID NO: 6408
  peptide (1)..(246): Ceres Seq. ID no. 12578883

SEQ ID NO: 9766 - DNA, 449 bp, Zea mays subsp. mays; identical to SEQ ID NO: 4098
  misc_feature (1)..(449): Ceres Seq. ID no. 12595631
  misc_feature (1)..(449): Ortholog of  Ceres SEQ ID NO 12621592 as cited in SEQ ID NO 67016

SEQ ID NO: 9767 - protein, 124 aa, Zea mays subsp. mays; identical to SEQ ID NO: 4099
  peptide (1)..(124): Ceres Seq. ID no. 12595632
  misc_feature (100)..(100): Xaa is any aa, unknown or other
  misc_feature (105)..(105): Xaa is any aa, unknown or other
  misc_feature (117)..(117): Xaa is any aa, unknown or other

SEQ ID NO: 9768 - protein, 106 aa, Zea mays subsp. mays; identical to SEQ ID NO: 4100
  peptide (1)..(106): Ceres Seq. ID no. 12595633
  misc_feature (99)..(99): Xaa is any aa, unknown or other
  misc_feature (105)..(105): Xaa is any aa, unknown or other

SEQ ID NO: 9769 - protein, 102 aa, Zea mays subsp. mays; identical to SEQ ID NO: 4101
  peptide (1)..(102): Ceres Seq. ID no. 12595634
  misc_feature (95)..(95): Xaa is any aa, unknown or other
  misc_feature (101)..(101): Xaa is any aa, unknown or other

SEQ ID NO: 9770 - DNA, 1722 bp, Zea mays subsp. mays
  misc_feature (1)..(1722): Ceres Seq. ID no. 12367714
  misc_feature (1)..(1722): Ortholog of  Ceres SEQ ID NO 15175957 as cited in SEQ ID NO 20615
  misc_feature (1)..(1722): Ortholog of  Ceres SEQ ID NO 14301490 as cited in SEQ ID NO 66234
cgttgtatgatgatgatgacgagggaaccaaaaaagaagaagaaagaattccaaaaccctccctctcctgttctgtatcttctgcggctccgccgtggattcttcgtgcgataaactaagcagggcgctgcacgaggatggggtgcggggcgtcgagccagaaggacgccggggcgccgcggaggcggccggtgagcgtcggcgacgtggtcgtcttcctcccgggcctccgcgtgccgagggccgtcgacttggcccaggcgctcggcggctgcctggccaggagcgccgtggaccggctgtcggctctgcgatcgcgggtcgtcgagatggcaatgcgagagtcggcggcggcgctcaagcccaggcggagggcggcggcacggcacgggtctagtacagccaatcttctacaggccctcgaagactacttgccggctctgctaggactggtaaaagaaggtagcgtcttgaggaacaaagtgcacttcacctggagtaaccaggaggataatgctgaggagacggccatgccagacgcctggtacgaggtgctgtccatgctgcatctgatggccatggtctgcctgctgcaggccaacgccctgcttctcccgaggtcatacggcgatggctatgccccaagggtttctgaagagagtcgacgggccactgttgatgtcttcttgaaggcagctggatacctagactgtgcagttcggcatgtactcccgaagatgccactcgagctaaggagacagcttccagtagacctggctgaaggaaatctcaaagctctaagcctccaagccctgggtcagggggttgacatgcagcttggtttggctattgatagtccaaaggccactttagcagtaaaacggcgcttagcctgtgagatggtcaaatattggcaacaagttcaagagagcattccagagcttcctatctctgatggatggggtaaaaagcaccggctgtttataaagtggaaatatgttgaagctaaggctgcagcatactatttccacggtttgattcttgacgagggaaataccgaaaaatcccatggaatggcaatagctgcactccaagcttcagaggaatttctaaaagaaagcaaaagggtttcagaagccttccatgcaactcctccaacatcgaggagtcccaatccattcggaacagcaaaatatctgtttgacaagatcccaagagatgcttccagcaaggttcgaatcaaccaggacctgtatactcaagaaaaggtcattggagcgccacccccattaccagattttgcattggcgctaacacctgaagaatatgatcttcctccactagatccactttggaacaaagaagacacaagccattaagtgtatatgcagcagaatggttgcttctggcaaaaatattggctctggagagaaaggaaggaccaagatctgccatgtcaagagctgatgtgtaatgaatgaagtgtacaaagtattttcaaacaaaaatacatgttcacaaatttacgcaaggcctgaagacaatctgaagagctttgtacaggcgattcttcttctgacaagggaaatgctatgtcaaagggttccttgatcattgtgcatcttgatgcttgcattttgtcaaaaacagattttcagcaatttatgtagaactgtaaactagcctctgatcgaaagtggcagccttcaaattttttttttc

SEQ ID NO: 9771 - protein, 413 aa, Zea mays subsp. mays
  peptide (1)..(413): Ceres Seq. ID no. 12367715
MGCGASSQKDAGAPRRRPVSVGDVVVFLPGLRVPRAVDLAQALGGCLARSAVDRLSALRSRVVEMAMRESAAALKPRRRAAARHGSSTANLLQALEDYLPALLGLVKEGSVLRNKVHFTWSNQEDNAEETAMPDAWYEVLSMLHLMAMVCLLQANALLLPRSYGDGYAPRVSEESRRATVDVFLKAAGYLDCAVRHVLPKMPLELRRQLPVDLAEGNLKALSLQALGQGVDMQLGLAIDSPKATLAVKRRLACEMVKYWQQVQESIPELPISDGWGKKHRLFIKWKYVEAKAAAYYFHGLILDEGNTEKSHGMAIAALQASEEFLKESKRVSEAFHATPPTSRSPNPFGTAKYLFDKIPRDASSKVRINQDLYTQEKVIGAPPPLPDFALALTPEEYDLPPLDPLWNKEDTSH

SEQ ID NO: 9772 - protein, 349 aa, Zea mays subsp. mays
  peptide (1)..(349): Ceres Seq. ID no. 12367716
MAMRESAAALKPRRRAAARHGSSTANLLQALEDYLPALLGLVKEGSVLRNKVHFTWSNQEDNAEETAMPDAWYEVLSMLHLMAMVCLLQANALLLPRSYGDGYAPRVSEESRRATVDVFLKAAGYLDCAVRHVLPKMPLELRRQLPVDLAEGNLKALSLQALGQGVDMQLGLAIDSPKATLAVKRRLACEMVKYWQQVQESIPELPISDGWGKKHRLFIKWKYVEAKAAAYYFHGLILDEGNTEKSHGMAIAALQASEEFLKESKRVSEAFHATPPTSRSPNPFGTAKYLFDKIPRDASSKVRINQDLYTQEKVIGAPPPLPDFALALTPEEYDLPPLDPLWNKEDTSH

SEQ ID NO: 9773 - protein, 347 aa, Zea mays subsp. mays
  peptide (1)..(347): Ceres Seq. ID no. 12367717
MRESAAALKPRRRAAARHGSSTANLLQALEDYLPALLGLVKEGSVLRNKVHFTWSNQEDNAEETAMPDAWYEVLSMLHLMAMVCLLQANALLLPRSYGDGYAPRVSEESRRATVDVFLKAAGYLDCAVRHVLPKMPLELRRQLPVDLAEGNLKALSLQALGQGVDMQLGLAIDSPKATLAVKRRLACEMVKYWQQVQESIPELPISDGWGKKHRLFIKWKYVEAKAAAYYFHGLILDEGNTEKSHGMAIAALQASEEFLKESKRVSEAFHATPPTSRSPNPFGTAKYLFDKIPRDASSKVRINQDLYTQEKVIGAPPPLPDFALALTPEEYDLPPLDPLWNKEDTSH

SEQ ID NO: 9774 - DNA, 1322 bp, Zea mays subsp. mays
  misc_feature (1)..(1322): Ceres Seq. ID no. 12350141
  misc_feature (1)..(1322): Ortholog of  Ceres SEQ ID NO 13594482 as cited in SEQ ID NO 51285
  misc_feature (1)..(1322): Ortholog of  Ceres SEQ ID NO 13655381 as cited in SEQ ID NO 63359
  misc_feature (1)..(1322): Ortholog of  Ceres SEQ ID NO 12617583 as cited in SEQ ID NO 64897
aaaaaatttgcgacaattcacctgcatacaggggcagcatatctagcagctactccgcccccaaatgctcgccggcatatcccgtttcctcactcgccgccgccgcccgccctttccgcttgccgctaccgccgctgcagcagccatgtcgtcgtcgtcgtccacggcagcgaacatctccgagcgtccgatctctccggacaccacccgcgtggcctgggtggggacgggcgtcatgggccagtcaatggccggccacctcctcgccgccggctacgctctcaccgtattcaaccggacggcatccaagacccagggcctcgtctcccgcggcgccagcctcgcggacagcccgcgcgcggccgccgcggctgccgatgtcatcttcctcatggtcggcttcccctccgacgtccgctccaccgccctcgatccatccacaggcgccctctctggcctcaccccaggcggtatcctagtcgacatgaccacctccgaccccaccctcgccgccgagatagccgcggccgcggccgccgccggctgctcggccgtcgacgcccccgtctccggcggtgaccgaggggcccgcaacgccaccctctccatcttcgctggcggcgacgccgccgtcgttgctcgcctggcgccgctcttcaagctcatgggaaacgcgctgtacatgggcgggcccggcgcggggcagcgcgcgaagctgggcaaccagatcgccatcgcatccaccatggtagggctcgtggagggcatggtgtacgcgcacaaggccgggctggacgtggccaagtggctggaggccatctccaccggcgcagccgggtccaagtcgctggaactgtatgggaagcggatcctggagagggatatggcggctggcttctatgtccggcacttcgtcaaggacctcggtatctgcctgttggaatgccaggccatggggctgtcgctgccggggctcgccctcgcgcaacagctgtacgtgtcgctgatcgcgcacggcgagggcgggctcggtacacaggcgcttatactggccgtcgagcggctgaacaacaccagcctcgagaagaaggacgaatgaaaggccccaggctctagctttgatgaacttgtgggaagctttgcttggtgccttggtgcaagtatgcaagatcgaggtgactgttaagttgtctttcagagttctacagttgttcacttttgtagtagtatatatgttatgcacttgtgcaaaaaattgtgctggcttggatgattgcttagctctacctgtttacatccgccaccggttcaaataagatttt

SEQ ID NO: 9775 - protein, 344 aa, Zea mays subsp. mays
  peptide (1)..(344): Ceres Seq. ID no. 12350142
MLAGISRFLTRRRRPPFPLAATAAAAAMSSSSSTAANISERPISPDTTRVAWVGTGVMGQSMAGHLLAAGYALTVFNRTASKTQGLVSRGASLADSPRAAAAAADVIFLMVGFPSDVRSTALDPSTGALSGLTPGGILVDMTTSDPTLAAEIAAAAAAAGCSAVDAPVSGGDRGARNATLSIFAGGDAAVVARLAPLFKLMGNALYMGGPGAGQRAKLGNQIAIASTMVGLVEGMVYAHKAGLDVAKWLEAISTGAAGSKSLELYGKRILERDMAAGFYVRHFVKDLGICLLECQAMGLSLPGLALAQQLYVSLIAHGEGGLGTQALILAVERLNNTSLEKKDE

SEQ ID NO: 9776 - protein, 317 aa, Zea mays subsp. mays
  peptide (1)..(317): Ceres Seq. ID no. 12350143
MSSSSSTAANISERPISPDTTRVAWVGTGVMGQSMAGHLLAAGYALTVFNRTASKTQGLVSRGASLADSPRAAAAAADVIFLMVGFPSDVRSTALDPSTGALSGLTPGGILVDMTTSDPTLAAEIAAAAAAAGCSAVDAPVSGGDRGARNATLSIFAGGDAAVVARLAPLFKLMGNALYMGGPGAGQRAKLGNQIAIASTMVGLVEGMVYAHKAGLDVAKWLEAISTGAAGSKSLELYGKRILERDMAAGFYVRHFVKDLGICLLECQAMGLSLPGLALAQQLYVSLIAHGEGGLGTQALILAVERLNNTSLEKKDE

SEQ ID NO: 9777 - protein, 287 aa, Zea mays subsp. mays
  peptide (1)..(287): Ceres Seq. ID no. 12350144
MGQSMAGHLLAAGYALTVFNRTASKTQGLVSRGASLADSPRAAAAAADVIFLMVGFPSDVRSTALDPSTGALSGLTPGGILVDMTTSDPTLAAEIAAAAAAAGCSAVDAPVSGGDRGARNATLSIFAGGDAAVVARLAPLFKLMGNALYMGGPGAGQRAKLGNQIAIASTMVGLVEGMVYAHKAGLDVAKWLEAISTGAAGSKSLELYGKRILERDMAAGFYVRHFVKDLGICLLECQAMGLSLPGLALAQQLYVSLIAHGEGGLGTQALILAVERLNNTSLEKKDE

SEQ ID NO: 9778 - DNA, 1217 bp, Zea mays subsp. mays
  misc_feature (1)..(1217): Ceres Seq. ID no. 13499227
  misc_feature (1)..(1217): Ortholog of  Ceres SEQ ID NO 15176294 as cited in SEQ ID NO 60388
gacaaacggattgacaccgacacataaaaaacacctttttagacatttctcgagaccaccactactcgtgcccgtgcggtggttcgaccagatccatctcacacccttatcctctttacgcctcaccactacagagaaaaagagaaacctgcgagcgacggggactatggccgccacccgcaccgccctggccctgctagggcacgagggcatggaatctgggcccaggccggcggcgccgcgccgcagcaggctacgcgtcgtcgccgtcgcgctgcggaccaggcccaccagcctcgcggccccgggtctcccgcccgcggcgccggagcccgtgctgccgtcgccgcccgtggccgcgggcgccncggcggtgctgctngaggcgggcgtgccgcccgccgacctccggcgcgcggcggggatgtgcccggagctgctgtccgtgtccgcggaggccgtcgaggccgcgctccggttcctcacggaggaggcgggcgtcgccgaggccgacctcccgcgcgtgctccggcggcgcccgcgcctgctcgtctctcccgtgncggcgcggctgcggcccacgctctacttcctgcgcgcgctcggcgtgcccgacctgcaccgccgcgccgacctgctatccttctccgtggagggcaagctgctgccgcggctcgagttcctcgagtcgctgggcctgccggcgcgcgccgcccgctccatggcgcgccgcttccccgcgctnttcggctacggcgtggaggggaacatgcggcccaaggcggactacctcctgggcgccatggcccgccgcgccgacgagctgtacgacttccccgagtacttctcctacgcgctggcnacgcgcatcgtgccgcgttacgaggcctgcgccgcgcgcggggtcagcaggctgccactgcccgccatgtccgccccggggacgccaagttccgcgccactctcgccagctgtgtcgggtccatgctgccccggaggcggtcggcgctgtggcacgccaagtgggtggatgacgacgcggcggcggcggcgaaggagaccacggtgtgacgtgcgcattggtagcgagcgagaggctcttgcctcttggtggtgtaacatatgtccataaggatcggcattggctgcttgtaaagtatgatagccatgatgaattatctagttggtcctcccagtgaacaatggcactgttggct

SEQ ID NO: 9779 - protein, 376 aa, Zea mays subsp. mays
  peptide (1)..(376): Ceres Seq. ID no. 13499228
  misc_feature (123)..(123): Xaa is any aa, unknown or other
  misc_feature (127)..(127): Xaa is any aa, unknown or other
  misc_feature (188)..(188): Xaa is any aa, unknown or other
  misc_feature (248)..(248): Xaa is any aa, unknown or other
  misc_feature (287)..(287): Xaa is any aa, unknown or other
TNGLTPTHKKHLFRHFSRPPLLVPVRWFDQIHLTPLSSLRLTTTEKKRNLRATGTMAATRTALALLGHEGMESGPRPAAPRRSRLRVVAVALRTRPTSLAAPGLPPAAPEPVLPSPPVAAGAXAVLXEAGVPPADLRRAAGMCPELLSVSAEAVEAALRFLTEEAGVAEADLPRVLRRRPRLLVSPVXARLRPTLYFLRALGVPDLHRRADLLSFSVEGKLLPRLEFLESLGLPARAARSMARRFPAXFGYGVEGNMRPKADYLLGAMARRADELYDFPEYFSYALXTRIVPRYEACAARGVSRLPLPAMSAPGTPSSAPLSPAVSGPCCPGGGRRCGTPSGWMTTRRRRRRRPRCDVRIGSEREALASWWCNICP

SEQ ID NO: 9780 - protein, 321 aa, Zea mays subsp. mays
  peptide (1)..(321): Ceres Seq. ID no. 13499229
  misc_feature (68)..(68): Xaa is any aa, unknown or other
  misc_feature (72)..(72): Xaa is any aa, unknown or other
  misc_feature (133)..(133): Xaa is any aa, unknown or other
  misc_feature (193)..(193): Xaa is any aa, unknown or other
  misc_feature (232)..(232): Xaa is any aa, unknown or other
MAATRTALALLGHEGMESGPRPAAPRRSRLRVVAVALRTRPTSLAAPGLPPAAPEPVLPSPPVAAGAXAVLXEAGVPPADLRRAAGMCPELLSVSAEAVEAALRFLTEEAGVAEADLPRVLRRRPRLLVSPVXARLRPTLYFLRALGVPDLHRRADLLSFSVEGKLLPRLEFLESLGLPARAARSMARRFPAXFGYGVEGNMRPKADYLLGAMARRADELYDFPEYFSYALXTRIVPRYEACAARGVSRLPLPAMSAPGTPSSAPLSPAVSGPCCPGGGRRCGTPSGWMTTRRRRRRRPRCDVRIGSEREALASWWCNICP

SEQ ID NO: 9781 - protein, 306 aa, Zea mays subsp. mays
  peptide (1)..(306): Ceres Seq. ID no. 13499230
  misc_feature (53)..(53): Xaa is any aa, unknown or other
  misc_feature (57)..(57): Xaa is any aa, unknown or other
  misc_feature (118)..(118): Xaa is any aa, unknown or other
  misc_feature (178)..(178): Xaa is any aa, unknown or other
  misc_feature (217)..(217): Xaa is any aa, unknown or other
MESGPRPAAPRRSRLRVVAVALRTRPTSLAAPGLPPAAPEPVLPSPPVAAGAXAVLXEAGVPPADLRRAAGMCPELLSVSAEAVEAALRFLTEEAGVAEADLPRVLRRRPRLLVSPVXARLRPTLYFLRALGVPDLHRRADLLSFSVEGKLLPRLEFLESLGLPARAARSMARRFPAXFGYGVEGNMRPKADYLLGAMARRADELYDFPEYFSYALXTRIVPRYEACAARGVSRLPLPAMSAPGTPSSAPLSPAVSGPCCPGGGRRCGTPSGWMTTRRRRRRRPRCDVRIGSEREALASWWCNICP

SEQ ID NO: 9782 - DNA, 1648 bp, Zea mays subsp. mays
  misc_feature (1)..(1648): Ceres Seq. ID no. 12595157
  misc_feature (1)..(1648): Ortholog of  Ceres SEQ ID NO 13582619 as cited in SEQ ID NO 56520
  misc_feature (1)..(1648): Ortholog of  Ceres SEQ ID NO 12611392 as cited in SEQ ID NO 56826
  misc_feature (1)..(1648): Ortholog of  Ceres SEQ ID NO 14315846 as cited in SEQ ID NO 58094
  misc_feature (1)..(1648): Ortholog of  Ceres SEQ ID NO 14314632 as cited in SEQ ID NO 59923
  misc_feature (1)..(1648): Ortholog of  Ceres SEQ ID NO 13660872 as cited in SEQ ID NO 60830
  misc_feature (1)..(1648): Ortholog of  Ceres SEQ ID NO 15226831 as cited in SEQ ID NO 62916
  misc_feature (1)..(1648): Ortholog of  Ceres SEQ ID NO 12616221 as cited in SEQ ID NO 63291
acaaagagcgagcgagagagagagagagagagagcagctctcaaggtcatggtcttatggaggagcatggtggtgctacctagcaagagctccccactataaagcgcccccacacaccataccacagctcagagcttcttttcatcatcttgtagaaaagaaagagtgagagtgagattggcaagggtatagggttcttggtcgatcaaatatctttcccctcttggattctcctcttcctgcttcgttctcgccagatcgatctcactacgtgcctgcgtagctagccactctgtatgcaccatcaccaccaggaccaggccatgggcgacgcgctgtgggacctgctcggggaggagatggcagcggcgggcggggagcacgggctgcccccggggtttcggttccaccccaccgacgaggagctggtcaccttctacctcgccgccaaggtgttcaacggcgcctgctgtggcatcgacatcgccgaggtggacctcaaccggtgcgagccgtgggagctccccgacgcggcgcgtatgggggagcgcgagtggtacttcttcagcctccgcgaccgcaagtaccccacgggcctccgtaccaaccgcgccaccggcgccgggtactggaaggccaccgggaaggaccgcgaggtgctcaacgccgccaccggcgcgctcctcggcatgaagaagacgctcgtcttctacaagggccgggcgccgcgcggcgagaagaccaagtgggtcctgcacgagtatcgcctcgacggcgacttcgccgccgctcgccgcccctgcaaggaggaatgggtcatctgcaggatactgcacaaggcaggcgaccagtatagcaagctgatgatggtgaagagcccctactacctgcccatggcgatggacccttccagcttctgcttccaggaggacccaaccgggcatcccctcccgaaccctagtggctgcacccccttccaccacggncacccccaccacagcatgcagccgcctccattgccgccgagcaaccatgctggcaaggccgtcttcacgggagcagcagcctcctgctgcatgcaacaagagccggcagacggcagcaacagcgccgtgctgcccatgccgccgttccctcccttcaccaccatcgtcgccggcaagccggcggtcccggcgccgccgccccaggttgtcaacgccggtccacaggagccaccgccacctacctggctggaggcctacctgcagcacactggtgggatcctttatgagatgggtgtgggtccaactgcagcgcccaggggcgcgtgatccggaccgtcggttccttagggttacccccctacgtacgtactgaaacactgatgatccatcgatttacctggtctgtaatgtgcggtgaagcttagtatttccaagtgacatatttcgacaagcacttgtagttattaaaaaagagttatcttgtattcggtggcatcattagtcgtcgttgttatgaaatcatgtgtgcttataacatgcatgaatgcatgcatttggatcatcgatcagagctgtcctgagcttgtacgtgctacgtactgtgctcatgcatccatccacatgcaaagtggtgcttgctaaaatgtactatccaaatgtcc

SEQ ID NO: 9783 - protein, 338 aa, Zea mays subsp. mays
  peptide (1)..(338): Ceres Seq. ID no. 12595158
  misc_feature (230)..(230): Xaa is any aa, unknown or other
MHHHHQDQAMGDALWDLLGEEMAAAGGEHGLPPGFRFHPTDEELVTFYLAAKVFNGACCGIDIAEVDLNRCEPWELPDAARMGEREWYFFSLRDRKYPTGLRTNRATGAGYWKATGKDREVLNAATGALLGMKKTLVFYKGRAPRGEKTKWVLHEYRLDGDFAAARRPCKEEWVICRILHKAGDQYSKLMMVKSPYYLPMAMDPSSFCFQEDPTGHPLPNPSGCTPFHHXHPHHSMQPPPLPPSNHAGKAVFTGAAASCCMQQEPADGSNSAVLPMPPFPPFTTIVAGKPAVPAPPPQVVNAGPQEPPPPTWLEAYLQHTGGILYEMGVGPTAAPRGA

SEQ ID NO: 9784 - protein, 329 aa, Zea mays subsp. mays
  peptide (1)..(329): Ceres Seq. ID no. 12595159
  misc_feature (221)..(221): Xaa is any aa, unknown or other
MGDALWDLLGEEMAAAGGEHGLPPGFRFHPTDEELVTFYLAAKVFNGACCGIDIAEVDLNRCEPWELPDAARMGEREWYFFSLRDRKYPTGLRTNRATGAGYWKATGKDREVLNAATGALLGMKKTLVFYKGRAPRGEKTKWVLHEYRLDGDFAAARRPCKEEWVICRILHKAGDQYSKLMMVKSPYYLPMAMDPSSFCFQEDPTGHPLPNPSGCTPFHHXHPHHSMQPPPLPPSNHAGKAVFTGAAASCCMQQEPADGSNSAVLPMPPFPPFTTIVAGKPAVPAPPPQVVNAGPQEPPPPTWLEAYLQHTGGILYEMGVGPTAAPRGA

SEQ ID NO: 9785 - protein, 317 aa, Zea mays subsp. mays
  peptide (1)..(317): Ceres Seq. ID no. 12595160
  misc_feature (209)..(209): Xaa is any aa, unknown or other
MAAAGGEHGLPPGFRFHPTDEELVTFYLAAKVFNGACCGIDIAEVDLNRCEPWELPDAARMGEREWYFFSLRDRKYPTGLRTNRATGAGYWKATGKDREVLNAATGALLGMKKTLVFYKGRAPRGEKTKWVLHEYRLDGDFAAARRPCKEEWVICRILHKAGDQYSKLMMVKSPYYLPMAMDPSSFCFQEDPTGHPLPNPSGCTPFHHXHPHHSMQPPPLPPSNHAGKAVFTGAAASCCMQQEPADGSNSAVLPMPPFPPFTTIVAGKPAVPAPPPQVVNAGPQEPPPPTWLEAYLQHTGGILYEMGVGPTAAPRGA

SEQ ID NO: 9786 - DNA, 1284 bp, Zea mays subsp. mays
  misc_feature (1)..(1284): Ceres Seq. ID no. 13493673
  misc_feature (1)..(1284): Ortholog of  Ceres SEQ ID NO 14303324 as cited in SEQ ID NO 54563
  misc_feature (1)..(1284): Ortholog of  Ceres SEQ ID NO 14316404 as cited in SEQ ID NO 57641
  misc_feature (1)..(1284): Ortholog of  Ceres SEQ ID NO 14308575 as cited in SEQ ID NO 58782
  misc_feature (1)..(1284): Ortholog of  Ceres SEQ ID NO 14313064 as cited in SEQ ID NO 59543
  misc_feature (1)..(1284): Ortholog of  Ceres SEQ ID NO 12611159 as cited in SEQ ID NO 59821
  misc_feature (1)..(1284): Ortholog of  Ceres SEQ ID NO 15178920 as cited in SEQ ID NO 0
  misc_feature (1)..(1284): Ortholog of  Ceres SEQ ID NO 15180029 as cited in SEQ ID NO 0
gtcacttcattcccttgtcactagctagatcgactgactggagaggagctatcgtctactacctctgggcgagctgcgtgtcctgtcgtccttctcgctcctgtggtcgccgcgcgcggcggtgcgatggggcggtcgccgtgctgcgagaaggaggccgggctgaagaaggggccgtggacgtccgaggaggaccagaaactgctggccttcatcgagcagcacggacacggctgctggcgctcgctgccggctaaggccggtctgcggcggtgcggcaagagctgccggctccggtggaccaactacctgcggccggacatcaagcggggcaagttcacgctgcaggaggagcagaccatcatccagctccacgctctcctcggcaacaggtggtcgtcgatcgcgacgcacctgcccaagcgcacggacaacgagatcaagaactactggaacacgcacctcaagaagcggctcgccaagatgggcatcgaccccgtcacgcacaaggcccgcgccgacgtggggggctcctctggcgcaggcaacaactctggagcgcgctacagggcagccgcgcacctcagccacacggcgcagtgggagagcgcgcgcctcgaggccgaggcgcgtctggcgcgcgaggccaggctgcgtgcccttgcctcgccgccgccgccgccagggccagggccgggacccgcgtttagcgggctcgagtcgccgacatcgactntgagcttctccgagagcgtgctgttcgccagtgcggcgcacgacacccacgccctgacgtcacgcgcttacgcagaggcgttcggggcggagcagcaacagcgcttcgctgacactgccgccgccgccgacgccgcgccaggcttccttgcaggcgtccttctcggctgctccgtcgccggcgcggagaaggggttcgcggcctcgtcgacggacgccagcgtctgtgagcagcagcaggaggaagaggacaagggctactggagcagcatactgaacatggtcaactcctccatgtcgtcgtccacgtcctcgctgacttctgatgctgtcacggaccccgccgccgcgtacttgccgccggcgacggcggcggccgagttctgagtgattgtcgtccaataataacgaacctgtgctaatgttaccttgtcatgtgtgttgcttactagtaggtgcgttttggtgctagttagtttatttacgtgctaatgggctgtcgcccacgtgtgcttgtgctttatgatgtgcaataataaacatgtacgt

SEQ ID NO: 9787 - protein, 331 aa, Zea mays subsp. mays
  peptide (1)..(331): Ceres Seq. ID no. 13493674
  misc_feature (204)..(204): Xaa is any aa, unknown or other
MGRSPCCEKEAGLKKGPWTSEEDQKLLAFIEQHGHGCWRSLPAKAGLRRCGKSCRLRWTNYLRPDIKRGKFTLQEEQTIIQLHALLGNRWSSIATHLPKRTDNEIKNYWNTHLKKRLAKMGIDPVTHKARADVGGSSGAGNNSGARYRAAAHLSHTAQWESARLEAEARLAREARLRALASPPPPPGPGPGPAFSGLESPTSTXSFSESVLFASAAHDTHALTSRAYAEAFGAEQQQRFADTAAAADAAPGFLAGVLLGCSVAGAEKGFAASSTDASVCEQQQEEEDKGYWSSILNMVNSSMSSSTSSLTSDAVTDPAAAYLPPATAAAEF

SEQ ID NO: 9788 - protein, 212 aa, Zea mays subsp. mays
  peptide (1)..(212): Ceres Seq. ID no. 13493675
  misc_feature (85)..(85): Xaa is any aa, unknown or other
MGIDPVTHKARADVGGSSGAGNNSGARYRAAAHLSHTAQWESARLEAEARLAREARLRALASPPPPPGPGPGPAFSGLESPTSTXSFSESVLFASAAHDTHALTSRAYAEAFGAEQQQRFADTAAAADAAPGFLAGVLLGCSVAGAEKGFAASSTDASVCEQQQEEEDKGYWSSILNMVNSSMSSSTSSLTSDAVTDPAAAYLPPATAAAEF

SEQ ID NO: 9789 - DNA, 1281 bp, Zea mays subsp. mays
  misc_feature (1)..(1281): Ceres Seq. ID no. 12416646
  misc_feature (1)..(1281): Ortholog of  Ceres SEQ ID NO 13594549 as cited in SEQ ID NO 51707
  misc_feature (1)..(1281): Ortholog of  Ceres SEQ ID NO 13595294 as cited in SEQ ID NO 55998
  misc_feature (1)..(1281): Ortholog of  Ceres SEQ ID NO 14302012 as cited in SEQ ID NO 56618
  misc_feature (1)..(1281): Ortholog of  Ceres SEQ ID NO 12598102 as cited in SEQ ID NO 61029
  misc_feature (1)..(1281): Ortholog of  Ceres SEQ ID NO 12625361 as cited in SEQ ID NO 62928
  misc_feature (1)..(1281): Ortholog of  Ceres SEQ ID NO 13599424 as cited in SEQ ID NO 0
aattggctgttggatctggcgtgtctaggagtgggatttggggagtctatttggtgtgctccttttggggttcccatcgtttctcgttctgtggatgggcgtgtagattcagtgaggcgtttggtactacaggaggcgcgcttgatttggtcgagttcttccatatgtgtggatcgagtggactctaatctgcccagctccagtgtcatgtgggtggggattggttgaccaatattttctgcggttgaatcttaacaagctgcatcgcagtttctaatcgtttggagagcacacaagaatgtcgttcgtgcagctctctggtgctggagtcgctgcagtggccttcacgaacaagagcctagtctctcggcacgcagcgctacgggtctgctcgtcgaggcgctcgatccgtagcctggtcgttaaggctgcaactgtcgtcaccccaaagtacacttcactgaagcctctgggagatagggtgcttgtgaagcttggtgccgcagaggagaagacagttggtggcattttgcttccatctactgcccagactaaaccacaaggaggtgaggttgttgctgttggagcaggaaggaccatcggggacaagaaaatagctgtggatatagagactggagcacaagtagtatactcaaagtatgctgggactgaggttgaattcaatgactcaaagcatcttattctcaaagaagacgatatcattggtattcttgagacagatgatgtgaaggacatgaagcctctcaatgaccgtgttctcatcaaggttgcagaagccgaagacaaaactcctgggggccttatcctcactgaaacaactaaagagaagccgtccataggaacggttgtagctgttggcccgggtcctctggacgaggaaggcaagagacagccactgtcagtgtcggcgggcagcacagtgctgtactccaagtatgcagggagtgagttcaagggcgcggatggcacggcctacattgtgttgagagcgtcggatgtgatggctgtcctgtcttgagcatttcgtttccggctcgttaatgtagtttgcagccaatagttgtcatgtggtatgaaacgatcgctttgtggtggtcatcacaccatgctggtgatcatcacaacatatgctgatactgttccggacaatcggctagaatttgttgtgtggcaggtataaacgtcagcatctgatagtgagagcactcggttacttctacagatggtatttaaggggtgatagtcacgcctctttgctgg

SEQ ID NO: 9790 - protein, 246 aa, Zea mays subsp. mays; identical to SEQ ID NO: 6408
  peptide (1)..(246): Ceres Seq. ID no. 12416647

SEQ ID NO: 9791 - DNA, 1819 bp, Zea mays subsp. mays
  misc_feature (1)..(1819): Ceres Seq. ID no. 12416772
  misc_feature (1)..(1819): Ortholog of  Ceres SEQ ID NO 14304867 as cited in SEQ ID NO 54375
actctgttcaaccaccagccgagttcgcagcggcactccagggtccaggcccagcagcctcttcggctcttcgttgggggtgcgtggacaccggaaattgcctcggggattgcgttcctgatctaagcccggcatgaagggctgctcagagcgtttgctgctcctgctgctgctggcatcgtcgttgttactgtccgtcgtggttgccgcgcagcagacttgccctgccgacctcgacagcaaatgcgacggtggcgcgcctgatgactgggagggggaattcttccccggcgtcccgaaaatcaagtatgagggtccaacaagcaagaaccctcttgcttataagtggtataacaaggaggaagtcattctcggaaagaagatgaaggactggatgcgcttcagtgttgcgttctggcacacgttccgtggtactggtgctgatccttttggtgcgcctacaaaggtttggccttgggaggacggcacaaattcgttggccatggctaagagaagaatgagagctcactttgagttcatggagaagctgggggttgacaaatggtgcttccatgatagggatattgcccctgatgggaaaactctcgaagaaacaaatgctaacttggatgagatagttgagctggcaaagcagctccagggtgagaccaatataaagccattgtggggtactgcacagctctttatgcatcctcgttacatgcacggagctgctactagcccagaggttaaagtatatgcatatgcggctgcacaagttaagaaagctttggaggtcactcactacctaggtggtgaaaactatgtgttttggggtggaagagagggttaccaaactcttctgaacactgatcttaagagagaacttgaccatttggctaactttcttcaagctgctgttgactacaagaagaagattggattcaacggaacactgttgatagagcctaaaccacaggaacctacaaaacaccagtatgactgggatgttgcaactacgtttgcttttctacagaagtatggtcttaccggagagttcaagattaatgttgagtgcaaccatgctactctatctggacatagctgccatcatgaactggagactgcacgcattaatgggctgcttgggaacattgatgcaaacactggtgatcctcaagttggctgggacacggatcagttcatgacagacattgcagaggctactttggttatgtcaactgtggttaagaatggtggacttgcacctggtggcttcaactttgacgccaaattgcggagggaaagcactgatgttgaggacttgtttcttgctcatatctccggaatggacaccctggcccgtggcctccgcaacgccgccaagctgatcgaggatggttccctagatgctctcgtccgcaagcggtaccagagctttgatagtgagattggtgccttgatcgaggctgggaaaggagactttgaggcgctagagaagaaggtccttgagtggggtgagcccactgttccgtccggcaaacaggaactggcggagattctgttccactctgctctatagatggcgccatgtccgtagcggtagctcctggaataagcaagcactgagcctgcgccctcccaacgcgcgcggtcgtcctcaccagtcaccaccaagggaatgtttctggttgcgcgcgatgaaccatgtacaatacaccgtggaactgaaataaattgaaatagctagtcagaatttttagaactgttgcctctttgtttggaacggaatgaaactgaacttggttagtttgagctc

SEQ ID NO: 9792 - protein, 482 aa, Zea mays subsp. mays
  peptide (1)..(482): Ceres Seq. ID no. 12416773
MKGCSERLLLLLLLASSLLLSVVVAAQQTCPADLDSKCDGGAPDDWEGEFFPGVPKIKYEGPTSKNPLAYKWYNKEEVILGKKMKDWMRFSVAFWHTFRGTGADPFGAPTKVWPWEDGTNSLAMAKRRMRAHFEFMEKLGVDKWCFHDRDIAPDGKTLEETNANLDEIVELAKQLQGETNIKPLWGTAQLFMHPRYMHGAATSPEVKVYAYAAAQVKKALEVTHYLGGENYVFWGGREGYQTLLNTDLKRELDHLANFLQAAVDYKKKIGFNGTLLIEPKPQEPTKHQYDWDVATTFAFLQKYGLTGEFKINVECNHATLSGHSCHHELETARINGLLGNIDANTGDPQVGWDTDQFMTDIAEATLVMSTVVKNGGLAPGGFNFDAKLRRESTDVEDLFLAHISGMDTLARGLRNAAKLIEDGSLDALVRKRYQSFDSEIGALIEAGKGDFEALEKKVLEWGEPTVPSGKQELAEILFHSAL

SEQ ID NO: 9793 - protein, 399 aa, Zea mays subsp. mays
  peptide (1)..(399): Ceres Seq. ID no. 12416774
MKDWMRFSVAFWHTFRGTGADPFGAPTKVWPWEDGTNSLAMAKRRMRAHFEFMEKLGVDKWCFHDRDIAPDGKTLEETNANLDEIVELAKQLQGETNIKPLWGTAQLFMHPRYMHGAATSPEVKVYAYAAAQVKKALEVTHYLGGENYVFWGGREGYQTLLNTDLKRELDHLANFLQAAVDYKKKIGFNGTLLIEPKPQEPTKHQYDWDVATTFAFLQKYGLTGEFKINVECNHATLSGHSCHHELETARINGLLGNIDANTGDPQVGWDTDQFMTDIAEATLVMSTVVKNGGLAPGGFNFDAKLRRESTDVEDLFLAHISGMDTLARGLRNAAKLIEDGSLDALVRKRYQSFDSEIGALIEAGKGDFEALEKKVLEWGEPTVPSGKQELAEILFHSAL

SEQ ID NO: 9794 - protein, 395 aa, Zea mays subsp. mays
  peptide (1)..(395): Ceres Seq. ID no. 12416775
MRFSVAFWHTFRGTGADPFGAPTKVWPWEDGTNSLAMAKRRMRAHFEFMEKLGVDKWCFHDRDIAPDGKTLEETNANLDEIVELAKQLQGETNIKPLWGTAQLFMHPRYMHGAATSPEVKVYAYAAAQVKKALEVTHYLGGENYVFWGGREGYQTLLNTDLKRELDHLANFLQAAVDYKKKIGFNGTLLIEPKPQEPTKHQYDWDVATTFAFLQKYGLTGEFKINVECNHATLSGHSCHHELETARINGLLGNIDANTGDPQVGWDTDQFMTDIAEATLVMSTVVKNGGLAPGGFNFDAKLRRESTDVEDLFLAHISGMDTLARGLRNAAKLIEDGSLDALVRKRYQSFDSEIGALIEAGKGDFEALEKKVLEWGEPTVPSGKQELAEILFHSAL

SEQ ID NO: 9795 - DNA, 1792 bp, Zea mays subsp. mays
  misc_feature (1)..(1792): Ceres Seq. ID no. 12358858
  misc_feature (1)..(1792): Ortholog of  Ceres SEQ ID NO 14302943 as cited in SEQ ID NO 20446
atctagttagttctcgatagcctctctctccctgcctccccgctgttgtggttgcggtgcttctgctgatctgctccgtcttctcctcccggcaatggcctgcttggaggcgcccccgcgcgtcgagctctgcccggtctcgtgccagccccgcggcctgcagcttccgccatggcggctcagcctgtcgaggtcctcctcttcatgcagatcttgcacccttgtgtctcgccagcttccaatttgcaatgcacagtcatatgctgatgatttatgggtggctgcgcctcatagccctgcatctgttcgctcaaggttgcttgcagcggaaagagaggaagcaaaggctgtcctgtccctgtttctgaggcagaaaggtctgcgaagcacgctggccgcacggatcgtcaacaaatcggatggcttcatcgagcacctggtctcgaagctccagattgcttacagatctcgatatgctgaaggaagggagctgagcacgcctgaaatcagagacgctctccttccctatctcgaagctctctccaaagaacatggcgacagtttggtcgaggtggtggagaatttccccgacccttttgctatggaaagggaagccttatcttcatcaatggcgtttacacccacgagctcaaacaagcagaaggcgattgctcgaataagcacgcagcctcaggcgccgccctccctgagctggtcccctacctactagaccttggcatggaccacgaggagataaaggacatcgtgcgcaagttcccagcgttcgcgtactacagcgtggatcgcaagatcaagcccctggtggagctcctgcttgagcttggggtgaaaaattccagcataccaggaatcatcaagaagcggccccagctgtgcgggatcagcatgtcagacaatctcaagccgatgatggcttatctggagagcatcggcgtcgacaaggctcagtggagcaaggtgatcacccgcttcccggcgctcctcacgtacagccggaacaaggtgcagacgaccgtgagcttcctcgccgagctaggtgtctccgagaagagcatcggcaagatcctgacgcggtgcccccacatcatgagctacagcgtggacgacaacctcaggccgaccgccgcctacttccggtcgatcggcgcggacgccgcgtcccttatccagaagagcccgcaggccttcggtctgaacgtcgaggccaagctgaggccgaccacggagttcttcctggcgagggggttcagcgtcgaggaggtcggcgtcatggcgaacaggttcgggatcgttcacacgctgagcctggaggagaacctgctccccaagtacgagttcttcctggcgatggagtacccgaggtgcgagctcgtcaagttcccgcagtactttgggtacagcttggaccggcggataaagccacggtacgcgaggatgactgggtgtggggtgaggttgattttgaaccagatgctttcggtctccgatgccaggtttgagaagattctagagaagaagacggctaggctttgataagacagcagtttcagattaggcacagtgttggagttcatttgagaagaactgtcaatgataaaaccatcagttttcagagcacgtagcttattatcgtggccttcatggacgtgcaacgtccagaggcgaactgtttgatgtgctaatctgtagttagcttctgcgaggtattgaaatgcatgcaactttggcaatcagaaatgccagttgcagtgggcgagattgcttggtgctc

SEQ ID NO: 9796 - protein, 271 aa, Zea mays subsp. mays
  peptide (1)..(271): Ceres Seq. ID no. 12358859
MDHEEIKDIVRKFPAFAYYSVDRKIKPLVELLLELGVKNSSIPGIIKKRPQLCGISMSDNLKPMMAYLESIGVDKAQWSKVITRFPALLTYSRNKVQTTVSFLAELGVSEKSIGKILTRCPHIMSYSVDDNLRPTAAYFRSIGADAASLIQKSPQAFGLNVEAKLRPTTEFFLARGFSVEEVGVMANRFGIVHTLSLEENLLPKYEFFLAMEYPRCELVKFPQYFGYSLDRRIKPRYARMTGCGVRLILNQMLSVSDARFEKILEKKTARL

SEQ ID NO: 9797 - protein, 215 aa, Zea mays subsp. mays
  peptide (1)..(215): Ceres Seq. ID no. 12358860
MSDNLKPMMAYLESIGVDKAQWSKVITRFPALLTYSRNKVQTTVSFLAELGVSEKSIGKILTRCPHIMSYSVDDNLRPTAAYFRSIGADAASLIQKSPQAFGLNVEAKLRPTTEFFLARGFSVEEVGVMANRFGIVHTLSLEENLLPKYEFFLAMEYPRCELVKFPQYFGYSLDRRIKPRYARMTGCGVRLILNQMLSVSDARFEKILEKKTARL

SEQ ID NO: 9798 - protein, 211 aa, Zea mays subsp. mays
  peptide (1)..(211): Ceres Seq. ID no. 12358861
MACLEAPPRVELCPVSCQPRGLQLPPWRLSLSRSSSSCRSCTLVSRQLPICNAQSYADDLWVAAPHSPASVRSRLLAAEREEAKAVLSLFLRQKGLRSTLAARIVNKSDGFIEHLVSKLQIAYRSRYAEGRELSTPEIRDALLPYLEALSKEHGDSLVEVVENFPDPFAMEREALSSSMAFTPTSSNKQKAIARISTQPQAPPSLSWSPTY

SEQ ID NO: 9799 - DNA, 1143 bp, Zea mays subsp. mays
  misc_feature (1)..(1143): Ceres Seq. ID no. 12354214
  misc_feature (1)..(1143): Ortholog of  Ceres SEQ ID NO 12635513 as cited in SEQ ID NO 0
tctcctgctccctggctgcaacggacttgaccactgaaagctaagcacacccctcggccatggcgctcgcgtccacctccgccaccgcgcccgctgccgtgctcaagaccccgttcctcggcgccaggcgcgcgctcgccaatgccgccgcgcccaagcccacgtcgcgccgcgcgctcctcgccgtcgccgcggccgccgccaagaagtcgtggatccccgccttcaagagcgacgccgagttcatcaacccgccctagctcgacggatcgctccctggcgacttcggattcgatccgctggggctgggcaaggacccggcgttcctcaagtggtaccgggaggcggagctgatccacgggcggtgggcgatggccgccgtgctgggcatcttcgtgggacaggcctggagcggcatcccgtggttcgaggccggcgccgacccgggcgccatcgcgcccttctccttcggctcgctgctgggcacgcagctgctgctcatggggtgggtggagtcgaagcggtgggtggacttcttcaacccggactcgcagtccgtcgagtgggccacgccctggtcccgcactgccgagaacttcgccaacttcaccggcgaccagggctacccgggcggcaagttcttcgacccgctcggcctcgccggcaccgtcaaggacggcgtctacgtccccgacgtcgagaagctcgagcggcttaagctggccgagatcaaacacgcccgcatcgccatgcttgccatgctcgttttctacttcgaggccggacagggcaagacgccgctcggcgcgcttggcctatgatctgcatgctgccggccacgacgggtgtcgtgtcatcagtcatccctgtgtgcttgtgctcatcggtcgatcgaatccaccgagctggttctcgattgcgagcgtcgtggtacggctgcatcggatcagacgcatgcaacaaaatgggggattttttttcttcttcttccgtgtatgtaccatgtagtgtatagtagtctggtcatggaaccaattaaggcagaatgagtgagcgagggacatttcgttacattaatctctcattccgccttgctgaattgctatcgtctttcagaaacatagcgatattcctccgaagacc

SEQ ID NO: 9800 - protein, 149 aa, Zea mays subsp. mays
  peptide (1)..(149): Ceres Seq. ID no. 12354215
MAAVLGIFVGQAWSGIPWFEAGADPGAIAPFSFGSLLGTQLLLMGWVESKRWVDFFNPDSQSVEWATPWSRTAENFANFTGDQGYPGGKFFDPLGLAGTVKDGVYVPDVEKLERLKLAEIKHARIAMLAMLVFYFEAGQGKTPLGALGL

SEQ ID NO: 9801 - protein, 106 aa, Zea mays subsp. mays
  peptide (1)..(106): Ceres Seq. ID no. 12354216
MGWVESKRWVDFFNPDSQSVEWATPWSRTAENFANFTGDQGYPGGKFFDPLGLAGTVKDGVYVPDVEKLERLKLAEIKHARIAMLAMLVFYFEAGQGKTPLGALGL

SEQ ID NO: 9802 - DNA, 763 bp, Zea mays subsp. mays
  misc_feature (1)..(763): Ceres Seq. ID no. 12367941
  misc_feature (1)..(763): Ortholog of  Ceres SEQ ID NO 12557737 as cited in SEQ ID NO 81
aggccaccgcagccctagcgcgccgccaccatcaccttcgcagccctagccgccgcctccattgctgctatacccgcaaccatgggtcccgtgctgaagcgcccgaccccgggcacggtgcagtgtttcgggcgcaagaagacggccgtggccgtggcctacacgaagccaggccgggggatgatcaaggtgaacggcgtcccgatcgagctgctccgtcccgagatgctgcggctcaaggccatggagcccgtgctgctggcggggcggtccaggttcaaggacatcgacatgcggatccgcgtgcgcggcggcgggaagacgtcgcagatctacgccatccgccaggccgtcgccaagggtctcgtggcatactaccagaagtacgtcgacgaggcggcgaaaaaggagatcaaggacatcttcatgcgctacgagcgcaccctcctcgtcgccgacccccgccgctgcgagcccaagaagttcggcggccgcggcgcccgcgccaggttccagaagtcctaccgctgagcgccagcgcctgccggaccgctgtcgtggctccgtttagctacgactttacttatttctgataataacatggttggcgattcgtaggcttctcaggctttattttattttattttagtttatcctatttaagtgcaagactagttcctcaaatttagtttatagtatacaccgattggtgatttatatttatgcacttcgtatagcgtttttaatttccatgattatcctt

SEQ ID NO: 9803 - protein, 196 aa, Zea mays subsp. mays
  peptide (1)..(196): Ceres Seq. ID no. 12367942
ATAALARRHHHLRSPSRRLHCCYTRNHGSRAEAPDPGHGAVFRAQEDGRGRGLHEARPGDDQGERRPDRAAPSRDAAAQGHGARAAGGAVQVQGHRHADPRARRREDVADLRHPPGRRQGSRGILPEVRRRGGEKGDQGHLHALRAHPPRRRPPPLRAQEVRRPRRPRQVPEVLPLSASACRTAVVAPFSYDFTYF

SEQ ID NO: 9804 - protein, 149 aa, Zea mays subsp. mays
  peptide (1)..(149): Ceres Seq. ID no. 12367943
MGPVLKRPTPGTVQCFGRKKTAVAVAYTKPGRGMIKVNGVPIELLRPEMLRLKAMEPVLLAGRSRFKDIDMRIRVRGGGKTSQIYAIRQAVAKGLVAYYQKYVDEAAKKEIKDIFMRYERTLLVADPRRCEPKKFGGRGARARFQKSYR

SEQ ID NO: 9805 - protein, 116 aa, Zea mays subsp. mays
  peptide (1)..(116): Ceres Seq. ID no. 12367944
MIKVNGVPIELLRPEMLRLKAMEPVLLAGRSRFKDIDMRIRVRGGGKTSQIYAIRQAVAKGLVAYYQKYVDEAAKKEIKDIFMRYERTLLVADPRRCEPKKFGGRGARARFQKSYR

SEQ ID NO: 9806 - DNA, 1436 bp, Zea mays subsp. mays
  misc_feature (1)..(1436): Ceres Seq. ID no. 12360026
  misc_feature (1)..(1436): Ortholog of  Ceres SEQ ID NO 14311882 as cited in SEQ ID NO 51638
  misc_feature (1)..(1436): Ortholog of  Ceres SEQ ID NO 14314567 as cited in SEQ ID NO 52335
  misc_feature (1)..(1436): Ortholog of  Ceres SEQ ID NO 14308803 as cited in SEQ ID NO 55038
  misc_feature (1)..(1436): Ortholog of  Ceres SEQ ID NO 13595437 as cited in SEQ ID NO 56562
  misc_feature (1)..(1436): Ortholog of  Ceres SEQ ID NO 14315985 as cited in SEQ ID NO 57720
aaccaggtgtctgttcagttcgtgtccgccgtcctctgttcaagtgcaagcgagcgaagaaacgaagcaccaggaggcgggaacaagaaggaatttgcgcagcaagcaaaggtcccgagttgcaaacttgcaacccaagaagagcgttggacatgcagatggaggggagggagggtatcgcggtggtggccgcaggcggcggccatggatccgggcagcacggcatgttcggagcggcagacatcgccatggcagaggcgcaggaggcagcggctaaggggtaccagtaccagtcctccccctcgtcgccgtnngacgtccctcacgccgtcgccgccgccggctgcggctggcnnctgnnggggangccaccgcggcgccacttgcctggagcctgggcggcgggatgccgagcgaggccgcgggggacagcggcgtgcgggcggccgggcatagccagagcgagcacgccaacaacatgagctccgagcgccgccgcggccgcccgcgcggctccggcaggcgccagatcctggccactctcggtgaatggtacgcgctgtcagccggcgggagcttcacgcctcacgtcatcatcgtgggtactggggaggatgtggcggcgcgcgtcatgtcgttttcgcagaaaggcccacgctcggtctgcatcctctccgccaacgggacaatctctaacgtgacgctgaggcagccgggttcatctggtagcaccttcacctacgagggccgtttcgagatcctgcagctgatgggctcaatcacaatggctgaggaaggtcgtaagaggacaggcggcctcagcgtctctctcgctggcccagacggccgtgtggtcggcggcgtagtggctgggatgctgcgtgccgcaagtcctatacaggtgatcgtgggaagcttcctgcccaacagcctgaagcagcaccagaggcggatgagcgcgcagcagcagctctccccggttccggcactgccagaacctgaggcgcccccacccgtgctcaccgcagccaccccgatctctctggcaggtcctggggacgggttccatgatgcgccgccaccctccgccgcacctccccagccccacgccagcgccatgaacctgaacgcgacgggcttccccgtggctggctggcccgcaagctcgccgcagcccatggtgtacagggcttcccctgacatcaacgtcagcttgactccccaggagtaggatcgttgggctcgtcgtcgtcttcttctcttttctttccgtcgcctctacgctgatacattttgggagagagagaggaagtgagctaggatcatgaacccatgtcgaggataggcaatatactgaatgagaatgaactgatctgtaggtggcgccaaccatgactgtgggctgtggcagttgatttagtcccttctcctttttc

SEQ ID NO: 9807 - protein, 274 aa, Zea mays subsp. mays
  peptide (1)..(274): Ceres Seq. ID no. 12360027
MPSEAAGDSGVRAAGHSQSEHANNMSSERRRGRPRGSGRRQILATLGEWYALSAGGSFTPHVIIVGTGEDVAARVMSFSQKGPRSVCILSANGTISNVTLRQPGSSGSTFTYEGRFEILQLMGSITMAEEGRKRTGGLSVSLAGPDGRVVGGVVAGMLRAASPIQVIVGSFLPNSLKQHQRRMSAQQQLSPVPALPEPEAPPPVLTAATPISLAGPGDGFHDAPPPSAAPPQPHASAMNLNATGFPVAGWPASSPQPMVYRASPDINVSLTPQE

SEQ ID NO: 9808 - protein, 250 aa, Zea mays subsp. mays
  peptide (1)..(250): Ceres Seq. ID no. 12360028
MSSERRRGRPRGSGRRQILATLGEWYALSAGGSFTPHVIIVGTGEDVAARVMSFSQKGPRSVCILSANGTISNVTLRQPGSSGSTFTYEGRFEILQLMGSITMAEEGRKRTGGLSVSLAGPDGRVVGGVVAGMLRAASPIQVIVGSFLPNSLKQHQRRMSAQQQLSPVPALPEPEAPPPVLTAATPISLAGPGDGFHDAPPPSAAPPQPHASAMNLNATGFPVAGWPASSPQPMVYRASPDINVSLTPQE

SEQ ID NO: 9809 - protein, 199 aa, Zea mays subsp. mays
  peptide (1)..(199): Ceres Seq. ID no. 12360029
MSFSQKGPRSVCILSANGTISNVTLRQPGSSGSTFTYEGRFEILQLMGSITMAEEGRKRTGGLSVSLAGPDGRVVGGVVAGMLRAASPIQVIVGSFLPNSLKQHQRRMSAQQQLSPVPALPEPEAPPPVLTAATPISLAGPGDGFHDAPPPSAAPPQPHASAMNLNATGFPVAGWPASSPQPMVYRASPDINVSLTPQE

SEQ ID NO: 9810 - DNA, 1439 bp, Zea mays subsp. mays
  misc_feature (1)..(1439): Ceres Seq. ID no. 12382324
  misc_feature (1)..(1439): Ortholog of  Ceres SEQ ID NO 14304502 as cited in SEQ ID NO 53212
acaacatacagatacagctcggccggagctagagtagcgggcggcggcgagaggagaaaacaaggaagcgaggagatggcgggcgggggcagggatgggccggcggcgcgtcttctccggcgcgtccccgccgccgtgtccgtcctcttgatgctgacgctgtgctcccccgggccgcccggcgcggtggtggtggtgtcggcccggaaggtgggcgagacgtgcgcgctggaccggaactgcgacgccgggctgcactgcgagacgtgtgtggccgacggcaacgtgcggccgcgctgcacccgcgtcgctcccgtcgacccgcagaccaaggcgcgggacctgccgttcaaccgctacgcgtggctgacgacgcacaactcgttcgcgcggctcgggcagcggtcgcagaccggggtcgccatagccacgccgtggaaccagcaggacaccgtcaccgagcagctcaacaacggcgttaggggtctgatgctggacatgtacgacttccgcaacgacgtctggctctgccactcctacggcggcatctgccagaacttcaccgcctttcaaccggcggtgaacgtgctccgcgaggtggagcgcttcctgtcgcggaaccccgccgaggtggtgaccatcttcgtggaggactacgtggagtcgcccatggggctcacccgggtgctcaacgcgtcgggcctcgcgcgctacgtgctccccgcctggcgcatgcccaagagcggcggcgactggccgctgctcagcgacatggtccgcgacaaccaccgcctgctcgtcttcacctccaaggccgctaaggaggccgccgagggcatcgcctacgagtggcgctacgtcgtcgagaaccagtacgggaccaaggggatggtgaaggggacgtgccacaaccgcgccgagtcggccgccatgaacgacctgtcgaggtcgctggtgctcaactacttcagggacctcccgaacctgccggcggcgtgcaaggacaactcggcgcagctgctggacatggtcaccgcctgccacgacaagtccggggaccggtggcccaacttcatcgccgtggacttctacaagaggagcgaccggggcggcgcggcggaggccacggacaaggcgaacggcggcctagtctgcggctgcgggagcatatcggcctgcaacgccaactggacatgcactcccaggcacggcaggacgcccagaggcatcttcaacgcctcatctgacgcagcggcgtggaggccgccgccgccggtgctgcaatggcagaggctcatcctgctgccttttctccttgctcttcttatgggcctgtgagttctacgtattttgttgtatagacgggtacggatcggtttggttgcaggcaccgagcgtattttgttgtgtatatatacacacagatgacagattggtcg

SEQ ID NO: 9811 - protein, 445 aa, Zea mays subsp. mays
  peptide (1)..(445): Ceres Seq. ID no. 12382325
TTYRYSSAGARVAGGGERRKQGSEEMAGGGRDGPAARLLRRVPAAVSVLLMLTLCSPGPPGAVVVVSARKVGETCALDRNCDAGLHCETCVADGNVRPRCTRVAPVDPQTKARDLPFNRYAWLTTHNSFARLGQRSQTGVAIATPWNQQDTVTEQLNNGVRGLMLDMYDFRNDVWLCHSYGGICQNFTAFQPAVNVLREVERFLSRNPAEVVTIFVEDYVESPMGLTRVLNASGLARYVLPAWRMPKSGGDWPLLSDMVRDNHRLLVFTSKAAKEAAEGIAYEWRYVVENQYGTKGMVKGTCHNRAESAAMNDLSRSLVLNYFRDLPNLPAACKDNSAQLLDMVTACHDKSGDRWPNFIAVDFYKRSDRGGAAEATDKANGGLVCGCGSISACNANWTCTPRHGRTPRGIFNASSDAAAWRPPPPVLQWQRLILLPFLLALLMGL

SEQ ID NO: 9812 - protein, 420 aa, Zea mays subsp. mays
  peptide (1)..(420): Ceres Seq. ID no. 12382326
MAGGGRDGPAARLLRRVPAAVSVLLMLTLCSPGPPGAVVVVSARKVGETCALDRNCDAGLHCETCVADGNVRPRCTRVAPVDPQTKARDLPFNRYAWLTTHNSFARLGQRSQTGVAIATPWNQQDTVTEQLNNGVRGLMLDMYDFRNDVWLCHSYGGICQNFTAFQPAVNVLREVERFLSRNPAEVVTIFVEDYVESPMGLTRVLNASGLARYVLPAWRMPKSGGDWPLLSDMVRDNHRLLVFTSKAAKEAAEGIAYEWRYVVENQYGTKGMVKGTCHNRAESAAMNDLSRSLVLNYFRDLPNLPAACKDNSAQLLDMVTACHDKSGDRWPNFIAVDFYKRSDRGGAAEATDKANGGLVCGCGSISACNANWTCTPRHGRTPRGIFNASSDAAAWRPPPPVLQWQRLILLPFLLALLMGL

SEQ ID NO: 9813 - protein, 395 aa, Zea mays subsp. mays
  peptide (1)..(395): Ceres Seq. ID no. 12382327
MLTLCSPGPPGAVVVVSARKVGETCALDRNCDAGLHCETCVADGNVRPRCTRVAPVDPQTKARDLPFNRYAWLTTHNSFARLGQRSQTGVAIATPWNQQDTVTEQLNNGVRGLMLDMYDFRNDVWLCHSYGGICQNFTAFQPAVNVLREVERFLSRNPAEVVTIFVEDYVESPMGLTRVLNASGLARYVLPAWRMPKSGGDWPLLSDMVRDNHRLLVFTSKAAKEAAEGIAYEWRYVVENQYGTKGMVKGTCHNRAESAAMNDLSRSLVLNYFRDLPNLPAACKDNSAQLLDMVTACHDKSGDRWPNFIAVDFYKRSDRGGAAEATDKANGGLVCGCGSISACNANWTCTPRHGRTPRGIFNASSDAAAWRPPPPVLQWQRLILLPFLLALLMGL

SEQ ID NO: 9814 - DNA, 1418 bp, Zea mays subsp. mays
  misc_feature (1)..(1418): Ceres Seq. ID no. 12411535
  misc_feature (1)..(1418): Ortholog of  Ceres SEQ ID NO 13504015 as cited in SEQ ID NO 51020
  misc_feature (1)..(1418): Ortholog of  Ceres SEQ ID NO 13597643 as cited in SEQ ID NO 65208
agtggcactcgcagactcgcttctccccgaaaaacggctgaaccctgaaccctcactacgtcccgccgcctgcttcacagttcaccccggccatggtctccaccgctcgcgccgccctcccgacgccccacctctctctcgcttcctcctcccgccgcaggcccatctgtttttcacgccctcctccgcacctcgcctgcgcggcggcgctgccacctccatcaccgccggcagctccgcctcgccgcagcagcaccaggtcaccacgcgcctgggcgacgtgatagaggcgcagcagttcgatcgggactcgcttaacgagatctttgaggtggcgcgggagatggaggccgtggagcggagctcccacggcgctcccagtcgcgtcctcgaggggtacctcatggccactctcttctacgagccctccacgcgcacgcgcctctccttcgaggccgctatgcggaggctcggcggggaggtgctcaccaccgagaacgcgcgcgagttctcttccgccgccaagggggagacactcaagatacataagaaccgttgagggttattctgatattattgttctgagacattttgaaagtggagctgcaaggagagcagatatactgcgaatattctgttattaatgcaggtgatgggccagggcaacatccaacccaggctttgttggatgtttatacaataaagagagaaattggcacactagatggaataaaacttggtttggttggtgaccttgctaatgggaggacagttcgttctctggcttacttgattgctaagtaccagaacattaagatatactttgtatctccagatgttgttaaaatgaaggatgatatcaaggactacttaaattcccaaggtgttgaatgggaagaatgttcagatttgttggaggtggcatccaagtgtgatgttatttatcaaacacgtattcaaaaagaaagatttggtgagaggattgatctttataaagctgctcgtggtaagtacattgtggataagaaggtcttagatgtgctgccaaagcatgctgtgatcatgcatccccttccaaggcttgatgagatcacggcagaagtcgatagtgatccaagagctgcatattttaggcaggctaagaatggcctctacataaggatggcattgctcaaacttctgcttgttggtcactgacatatctgctagtgtgtgagcttgtgctgcgtcaagggatgaggaaatgtactaataatcagcagctcctgtcaaaattcaacgttcctgcgctgtcagggtaataaaagtctggatccatgctggagtgcagcaaagtttggcatggccatgttaatgtacaaatggtgttcgaaatagagttttgctgttctcatgtgatgtgagaacatggaacgtcg

SEQ ID NO: 9815 - protein, 185 aa, Zea mays subsp. mays
  peptide (1)..(185): Ceres Seq. ID no. 12411536
VALADSLLPEKRLNPEPSLRPAACFTVHPGHGLHRSRRPPDAPPLSRFLLPPQAHLFFTPSSAPRLRGGAATSITAGSSASPQQHQVTTRLGDVIEAQQFDRDSLNEIFEVAREMEAVERSSHGAPSRVLEGYLMATLFYEPSTRTRLSFEAAMRRLGGEVLTTENAREFSSAAKGETLKIHKNR

SEQ ID NO: 9816 - protein, 116 aa, Zea mays subsp. mays
  peptide (1)..(116): Ceres Seq. ID no. 12411537
MKDDIKDYLNSQGVEWEECSDLLEVASKCDVIYQTRIQKERFGERIDLYKAARGKYIVDKKVLDVLPKHAVIMHPLPRLDEITAEVDSDPRAAYFRQAKNGLYIRMALLKLLLVGH

SEQ ID NO: 9817 - DNA, 1569 bp, Zea mays subsp. mays
  misc_feature (1)..(1569): Ceres Seq. ID no. 12349393
  misc_feature (1)..(1569): Ortholog of  Ceres SEQ ID NO 14311981 as cited in SEQ ID NO 55703
  misc_feature (1)..(1569): Ortholog of  Ceres SEQ ID NO 15226227 as cited in SEQ ID NO 63433
  misc_feature (1)..(1569): Ortholog of  Ceres SEQ ID NO 13599003 as cited in SEQ ID NO 0
aagaagagaccaagattagtaccacttgtactgtacactcctcgttccgcgtgcgaagcgaaccctgttccatgttcttgaatctctctgagcccagtccttgtagctagcagatcagatcgctcaggcggaaagatcgagagaaggtcgccccaggatcgagatctagagcgagaaaggtttaagagggaaaggcgcggcaaggagtcgagagaatagaatgttcccttcctccaagaagcaggccagcaccggtgccgcgaacccaaatgatcggcctatgtgcgggcaaggcggcgactccggcggtctcgtcctcaccaccgaccccaagccccgcctccggtggacacccgagctccatgaccgcttcgtcgatgccgtcgcccagctcggaggcccggacaaggcaacgcccaagaccatcatgagggttatgggagtcaagggcctcaccctctaccacctcaagagtcaccttcagaaattcaggctagggaagcagcacaaggagttgggtgaccatacagcaatggagatgcaacgtagcgtggcctcttcttcaggcatgatagcaagaagcatgaacgaccgcagcgtgaatgtgaacgaggccttaaggatccaaatggaagtccaaagaaggctccatggagaactagaggtgcagaagcacctccagatgagggttgaagcccaggggaagtacatgcagtccatcgtggagaaagcataccaagccctcgggtccagcgactgcgccacgtggcccgctgggtacagaactctaggcagccaaggggtccttgacatcggcaccagctccacgagcttctcgtccgtccaggacctgcagtgcttctatggaggaagcagccacatggaccagctcctgcatcagatggagaggccaatggatggcttcctgacgctgggcgagagctgcttcattgggtccgcggacaacaagaaggaccctaataaccattgcagctccagtggcaagagctcgatgatgtgggccagcgaagagcagcaggcaaagagcggcaacgatcagcttcagatggggtcgtcgacaaggatggagggtgcaggcattgatgtcatggatccagtagtcaccgggctgtacgagggcgccgtgtcgggagactccatggacagcaagggttttgagggttcgaactccaggctcgagatgaagccgcctgcacaacaagcacctgtaggaagtcagaggatacgcatatagtcgtccaatatataatggtttggaactcacgtaaagaactgtatactacaatatatggataagcaaggtcaagctaaggtatttaaatgcaagtgtcagttttgttgtgaaccatcaaagttcagacgattagcgtgtgatcggagttgtagtacatgcagtcattagttttgttggatacaagatattatggagatcaattctccatatatatgtttgtttattttgtccctaagattcgccatatatatgctgtattatattggatttgtgtgacacccttgtaacattgatcagagatcttttgtgggtgc

SEQ ID NO: 9818 - protein, 344 aa, Zea mays subsp. mays
  peptide (1)..(344): Ceres Seq. ID no. 12349394
MFPSSKKQASTGAANPNDRPMCGQGGDSGGLVLTTDPKPRLRWTPELHDRFVDAVAQLGGPDKATPKTIMRVMGVKGLTLYHLKSHLQKFRLGKQHKELGDHTAMEMQRSVASSSGMIARSMNDRSVNVNEALRIQMEVQRRLHGELEVQKHLQMRVEAQGKYMQSIVEKAYQALGSSDCATWPAGYRTLGSQGVLDIGTSSTSFSSVQDLQCFYGGSSHMDQLLHQMERPMDGFLTLGESCFIGSADNKKDPNNHCSSSGKSSMMWASEEQQAKSGNDQLQMGSSTRMEGAGIDVMDPVVTGLYEGAVSGDSMDSKGFEGSNSRLEMKPPAQQAPVGSQRIRI

SEQ ID NO: 9819 - protein, 324 aa, Zea mays subsp. mays
  peptide (1)..(324): Ceres Seq. ID no. 12349395
MCGQGGDSGGLVLTTDPKPRLRWTPELHDRFVDAVAQLGGPDKATPKTIMRVMGVKGLTLYHLKSHLQKFRLGKQHKELGDHTAMEMQRSVASSSGMIARSMNDRSVNVNEALRIQMEVQRRLHGELEVQKHLQMRVEAQGKYMQSIVEKAYQALGSSDCATWPAGYRTLGSQGVLDIGTSSTSFSSVQDLQCFYGGSSHMDQLLHQMERPMDGFLTLGESCFIGSADNKKDPNNHCSSSGKSSMMWASEEQQAKSGNDQLQMGSSTRMEGAGIDVMDPVVTGLYEGAVSGDSMDSKGFEGSNSRLEMKPPAQQAPVGSQRIRI

SEQ ID NO: 9820 - protein, 275 aa, Zea mays subsp. mays
  peptide (1)..(275): Ceres Seq. ID no. 12349396
MRVMGVKGLTLYHLKSHLQKFRLGKQHKELGDHTAMEMQRSVASSSGMIARSMNDRSVNVNEALRIQMEVQRRLHGELEVQKHLQMRVEAQGKYMQSIVEKAYQALGSSDCATWPAGYRTLGSQGVLDIGTSSTSFSSVQDLQCFYGGSSHMDQLLHQMERPMDGFLTLGESCFIGSADNKKDPNNHCSSSGKSSMMWASEEQQAKSGNDQLQMGSSTRMEGAGIDVMDPVVTGLYEGAVSGDSMDSKGFEGSNSRLEMKPPAQQAPVGSQRIRI

SEQ ID NO: 9821 - DNA, 1828 bp, Zea mays subsp. mays
  misc_feature (1)..(1828): Ceres Seq. ID no. 12356837
  misc_feature (1)..(1828): Ortholog of  Ceres SEQ ID NO 15176532 as cited in SEQ ID NO 58184
  misc_feature (1)..(1828): Ortholog of  Ceres SEQ ID NO 14303627 as cited in SEQ ID NO 62070
  misc_feature (1)..(1828): Ortholog of  Ceres SEQ ID NO 13597546 as cited in SEQ ID NO 65017
  misc_feature (1)..(1828): Ortholog of  Ceres SEQ ID NO 14308015 as cited in SEQ ID NO 65798
  misc_feature (1)..(1828): Ortholog of  Ceres SEQ ID NO 14307912 as cited in SEQ ID NO 66380
  misc_feature (1)..(1828): Ortholog of  Ceres SEQ ID NO 15176077 as cited in SEQ ID NO 66728
  misc_feature (1)..(1828): Ortholog of  Ceres SEQ ID NO 14307908 as cited in SEQ ID NO 67189
  misc_feature (1)..(1828): Ortholog of  Ceres SEQ ID NO 14308045 as cited in SEQ ID NO 67444
  misc_feature (1)..(1828): Ortholog of  Ceres SEQ ID NO 13654353 as cited in SEQ ID NO 68318
atgcatagtaaagttagcaatgtcgatggattacttggctgctgctgtacccgtgaccttggctctgggagtgggatctatcttgttggtcttacgatggacgtactgccgccgccgaacaagcgccgaagaagtgagactgccgccggggtcaaggggcctcctgttcctgggggagacgctccactacctggcagcgtcctccaccccgggggtattgccaccattcttccagcgacggttggagaggtatggccccatcttccggacgaacctggtcggggaggacctcgtcgtgtcgctggacgcggagctgaacgcgcacgtgctgaagcaggaggagcgcggcttccagatctggtacccgccctccttcatgcgcgtcttcggcgccgacaacatcaccgccaagctcggcgtgctccaccactacatgaggaccctcgtgctccgcctcttcggccaccagaccgtccgctccgtgctgctgcacgacgtgcagcggagcgcgcgcgacgagctgcgctcatggctcggccgcccggacgtcgaggtcaggacggccacctccaggatgatatttggcgtcactgccaagaagctgatcagccatgacgacgcagcatctggagaaacgttgtggagatgcttccacgactggacttcggggctgctctcgtttccggtttccattcccggcacaaccttctacagatgcatgcagggacgtaagaaggttatgacgatgctgaaacagcagctcgtcgagcgtcgacggaacgcagcggagcgcgagacagaggattttcttcgatctcgtgatcgatgaactgaacaagccagaccctatgatggacgagagcaccgcgttggacttgctgttcaccatgttgtttgcgagccatgagacgacgtccatggtattaaccgtcatactcaagtatctgacggacaaccccaaagctttgcaagagctgacagaggagcacgaaagaatcctggaaagtagggccaatccaggctctgacctcacgtgggaggagtacaagtctatgaaattcacatctcatgttgtacatgagtcgctaaggctcgcaaacatcgcactggccatgttcaggaaagcaaatcaggatgtgcacataaatgggtacacaattccaaaaggatcaaagatcatgatgtgtccactagcatcgcacttgaatacggaggtctacgaggacccctcagtgttcaatccatggagatggaaggatattcctgaaccagtaggcacttctaaggacttcatggccttcgggggtggtttgcgcctatgtgctggtgccgacttttccaagatgcagatggctatgttcctccattacttggtcacaaattacaggtggaaacccgtcggcggtgggacaatgctattctatccaggactgcaatttccagaaggcttccacatccagcttcttccaaaaatcccaaacgtggttccataaaccctatgaagaaatatgaatacaaataatttaagcaaatattctaaatgtaccatggggaattgaagttcgataacgatatggtacgggctaatttggtgatccacttgttaccaaatcaaccctaatggtagcaggtcggattgtcagaacaaataatagtttcaccaaacagaaggggagtatgtatgtgtgtaacattttatagttataaataatagtagagtaaattctgctcgttgtgtaacaactatgcaggtgagtaaaaattggttcagcatattgtatacattatgcccagttcaatgaaaaaaaaactttgttgtttggtgcgt

SEQ ID NO: 9822 - protein, 275 aa, Zea mays subsp. mays
  peptide (1)..(275): Ceres Seq. ID no. 12356838
CIVKLAMSMDYLAAAVPVTLALGVGSILLVLRWTYCRRRTSAEEVRLPPGSRGLLFLGETLHYLAASSTPGVLPPFFQRRLERYGPIFRTNLVGEDLVVSLDAELNAHVLKQEERGFQIWYPPSFMRVFGADNITAKLGVLHHYMRTLVLRLFGHQTVRSVLLHDVQRSARDELRSWLGRPDVEVRTATSRMIFGVTAKKLISHDDAASGETLWRCFHDWTSGLLSFPVSIPGTTFYRCMQGRKKVMTMLKQQLVERRRNAAERETEDFLRSRDR

SEQ ID NO: 9823 - protein, 269 aa, Zea mays subsp. mays
  peptide (1)..(269): Ceres Seq. ID no. 12356839
MSMDYLAAAVPVTLALGVGSILLVLRWTYCRRRTSAEEVRLPPGSRGLLFLGETLHYLAASSTPGVLPPFFQRRLERYGPIFRTNLVGEDLVVSLDAELNAHVLKQEERGFQIWYPPSFMRVFGADNITAKLGVLHHYMRTLVLRLFGHQTVRSVLLHDVQRSARDELRSWLGRPDVEVRTATSRMIFGVTAKKLISHDDAASGETLWRCFHDWTSGLLSFPVSIPGTTFYRCMQGRKKVMTMLKQQLVERRRNAAERETEDFLRSRDR

SEQ ID NO: 9824 - protein, 267 aa, Zea mays subsp. mays
  peptide (1)..(267): Ceres Seq. ID no. 12356840
MDYLAAAVPVTLALGVGSILLVLRWTYCRRRTSAEEVRLPPGSRGLLFLGETLHYLAASSTPGVLPPFFQRRLERYGPIFRTNLVGEDLVVSLDAELNAHVLKQEERGFQIWYPPSFMRVFGADNITAKLGVLHHYMRTLVLRLFGHQTVRSVLLHDVQRSARDELRSWLGRPDVEVRTATSRMIFGVTAKKLISHDDAASGETLWRCFHDWTSGLLSFPVSIPGTTFYRCMQGRKKVMTMLKQQLVERRRNAAERETEDFLRSRDR

SEQ ID NO: 9825 - DNA, 2170 bp, Zea mays subsp. mays
  misc_feature (1)..(2170): Ceres Seq. ID no. 12416076
  misc_feature (1)..(2170): Ortholog of  Ceres SEQ ID NO 13583869 as cited in SEQ ID NO 63043
gcacgagaccattacctagaacatcctaatcgaaaagagacaaccggcacccgccgatcgctcgctggtgggatgaagaaatgctccggcgtgctcttcatcctcacactcgccgtcgtgctcttcctcctctcgccgtcgccctcccccactccaccccccaacaccgcacccaatggcccgatcaccgacctcctccccaccctccccggcctttcggacctctaccctcccgctcccaactccactgcacatctctcctggggcctcctccgcccgctcctctgccgctccgacgcgctcccgggaacctctgcaggcgtcctcgaggcagccgaagcctggcggaatctcaccctggctgtcaccgccgcggcaagcgaggaggaggcgcgtctccaaggactccgctgctcatcgtccgtgggaggggatctacgcacgggacgtgccacactcccctgcgggctctcggagggcgcggcattgacggtggtcgggattctcagggagggggcggccaagttctgggtggaaatgctgggtgcgaacggtgaggttgtgctgcacgtcaatgtgagcctgggagccgcgggggtgttggtggagcagaattcctggacgccagaggaggggtggggggagtgggagcggtgcccgcctgttggtgatgtgagcagcagcaatagcagcttgcagctaagtccagtggacggccttgttcattgcaatgagaaagtgggtgcaaggatcgtccaggagagtaataatactgtggtaaatattactgggaaccaacctgaagattggcagagtcaaacaggacatggtcagttaagtggacgtttctcaattgttgaaggagagccttttacagtaacactgtgggctggtgtagaggggttccatatgacagtaaatgggcggcatgagacatcatttgcctatagagagaggtcagagccatggttggtagcagaagtcatgttttctggtgatttggagctcttgtcattcttggctaatgagttaccagtatcagaagatatagacatggaaaatgttgcagttttgaaggccccacctctgccaaagaagcaaacttttctgctggttggtgttttctctactggaaacaacttcaagcggcggatggctttgaggcgaacatggatgcaatatgaggctgttcgctcaggcgatgtagtagtccgttttttcactggtcttcacaagaatgagcaagtcaatatggagttatggagagaggctcaattatatggtgatatccaattgatgcccttcgttgactactatactttgatcactttgaagaccatatcaatttgcattttcggaacaaaaattgttcctgcaaagtacatcatgaaaacggatgacgatgcttttgttaggatcgatgaagtgatctcgagcctaaagaagagaaattccaatggccttctttatggtctcatttctttccaatcttccccccacagagacaagggtagcaaatggttcatcagtcggaaggaatggcccttcgacatgtacccgccatgggctcatggccctggatacgtaatctcacgtgacatcgctaagtttgtagtccaaggccaccaggaactgactcttcagcttttcaaacttgaagacgtggcaatgggtatttggatccaacagtacaagaacagtgggcagcaagtaaacattgtgactgatgaccggttctacaatgaaggatgcgaagctgactacgtccttgcccactaccagaccccgaggcttatgatgtgtctgtgggagaagctgaagacggaatatcatgctatatgctgtgaatagcatccgaattgcaagtaggaggcgatagaggaatggatagatagaggaatggataggttagccttggttttgaagaagacatttgctccgattttgacgctgtgtggaaaattgttgggactatgcgcaaaaagcctgtaacattgggttctcacttctgttctgtggcctgtgggttcatgttctttgtttttgggtagaaaatgttaatccgtgcaacttgatggatgttgtaaaaagagtgttgtaggacatttgagagagtttatctggcacaacctctcaagttattggatccatatacacctgcactcgtcct

SEQ ID NO: 9826 - protein, 616 aa, Zea mays subsp. mays
  peptide (1)..(616): Ceres Seq. ID no. 12416077
ARDHYLEHPNRKETTGTRRSLAGGMKKCSGVLFILTLAVVLFLLSPSPSPTPPPNTAPNGPITDLLPTLPGLSDLYPPAPNSTAHLSWGLLRPLLCRSDALPGTSAGVLEAAEAWRNLTLAVTAAASEEEARLQGLRCSSSVGGDLRTGRATLPCGLSEGAALTVVGILREGAAKFWVEMLGANGEVVLHVNVSLGAAGVLVEQNSWTPEEGWGEWERCPPVGDVSSSNSSLQLSPVDGLVHCNEKVGARIVQESNNTVVNITGNQPEDWQSQTGHGQLSGRFSIVEGEPFTVTLWAGVEGFHMTVNGRHETSFAYRERSEPWLVAEVMFSGDLELLSFLANELPVSEDIDMENVAVLKAPPLPKKQTFLLVGVFSTGNNFKRRMALRRTWMQYEAVRSGDVVVRFFTGLHKNEQVNMELWREAQLYGDIQLMPFVDYYTLITLKTISICIFGTKIVPAKYIMKTDDDAFVRIDEVISSLKKRNSNGLLYGLISFQSSPHRDKGSKWFISRKEWPFDMYPPWAHGPGYVISRDIAKFVVQGHQELTLQLFKLEDVAMGIWIQQYKNSGQQVNIVTDDRFYNEGCEADYVLAHYQTPRLMMCLWEKLKTEYHAICCE

SEQ ID NO: 9827 - protein, 592 aa, Zea mays subsp. mays
  peptide (1)..(592): Ceres Seq. ID no. 12416078
MKKCSGVLFILTLAVVLFLLSPSPSPTPPPNTAPNGPITDLLPTLPGLSDLYPPAPNSTAHLSWGLLRPLLCRSDALPGTSAGVLEAAEAWRNLTLAVTAAASEEEARLQGLRCSSSVGGDLRTGRATLPCGLSEGAALTVVGILREGAAKFWVEMLGANGEVVLHVNVSLGAAGVLVEQNSWTPEEGWGEWERCPPVGDVSSSNSSLQLSPVDGLVHCNEKVGARIVQESNNTVVNITGNQPEDWQSQTGHGQLSGRFSIVEGEPFTVTLWAGVEGFHMTVNGRHETSFAYRERSEPWLVAEVMFSGDLELLSFLANELPVSEDIDMENVAVLKAPPLPKKQTFLLVGVFSTGNNFKRRMALRRTWMQYEAVRSGDVVVRFFTGLHKNEQVNMELWREAQLYGDIQLMPFVDYYTLITLKTISICIFGTKIVPAKYIMKTDDDAFVRIDEVISSLKKRNSNGLLYGLISFQSSPHRDKGSKWFISRKEWPFDMYPPWAHGPGYVISRDIAKFVVQGHQELTLQLFKLEDVAMGIWIQQYKNSGQQVNIVTDDRFYNEGCEADYVLAHYQTPRLMMCLWEKLKTEYHAICCE

SEQ ID NO: 9828 - protein, 437 aa, Zea mays subsp. mays
  peptide (1)..(437): Ceres Seq. ID no. 12416079
MLGANGEVVLHVNVSLGAAGVLVEQNSWTPEEGWGEWERCPPVGDVSSSNSSLQLSPVDGLVHCNEKVGARIVQESNNTVVNITGNQPEDWQSQTGHGQLSGRFSIVEGEPFTVTLWAGVEGFHMTVNGRHETSFAYRERSEPWLVAEVMFSGDLELLSFLANELPVSEDIDMENVAVLKAPPLPKKQTFLLVGVFSTGNNFKRRMALRRTWMQYEAVRSGDVVVRFFTGLHKNEQVNMELWREAQLYGDIQLMPFVDYYTLITLKTISICIFGTKIVPAKYIMKTDDDAFVRIDEVISSLKKRNSNGLLYGLISFQSSPHRDKGSKWFISRKEWPFDMYPPWAHGPGYVISRDIAKFVVQGHQELTLQLFKLEDVAMGIWIQQYKNSGQQVNIVTDDRFYNEGCEADYVLAHYQTPRLMMCLWEKLKTEYHAICCE

SEQ ID NO: 9829 - DNA, 847 bp, Zea mays subsp. mays
  misc_feature (1)..(847): Ceres Seq. ID no. 12416837
  misc_feature (1)..(847): Ortholog of  Ceres SEQ ID NO 13663563 as cited in SEQ ID NO 66853
atactccactccagtccccgcgctgcatccttccgcttcctctcgctccctctgctctctcgcggtcgcagtctcgcagatcccgatcgcgcaaggagccagcgtagagggtgatcgacgatggcgggcagcacgcgcgcagcgcacaaggcgttcctgctctgcaactacacgctgctgggtgcagcatcggcgtgcatcttcctcacgctctcgctccgcctcgccccgtccgcgtgcggcctgctcctcgtcttcctccacgcgctcaccgctgtcttcgccgccgcgggctgctcgggctccttcaccgacggcggcgccggggccggccgcgcgcacgccgcgcacacagcgggggccgtgctcaccgccatcttccagggcgccgccgcgctgctcgccttcacccggaccgccgacttcctagccgagctgcggtcctacgtccgggaggaggacggcgaggtcattctcaagctcatcggcgggctcggcaccgccatcttcgtgctcgagtgggccgcgctagcgctcgcattcgcgctccggcttgacgatgatggcaacgaggagattgacggtgagcactgcaagagctgggcgtcagcgtaccatgtctgattctgctctgttcagacaccggagacgcgagagatacaggcacacaaaccagaaattgggggggggggggattttctcttctattatttacagctgtggatctattccgctgttgttacttgttactgtggtcatgaaccgaagtgcaaaggcaaatgttttgctttgcaatgtattcaattcatctcttagaaattgcaataaagtacattcagtgagccgt

SEQ ID NO: 9830 - protein, 167 aa, Zea mays subsp. mays
  peptide (1)..(167): Ceres Seq. ID no. 12416838
MAGSTRAAHKAFLLCNYTLLGAASACIFLTLSLRLAPSACGLLLVFLHALTAVFAAAGCSGSFTDGGAGAGRAHAAHTAGAVLTAIFQGAAALLAFTRTADFLAELRSYVREEDGEVILKLIGGLGTAIFVLEWAALALAFALRLDDDGNEEIDGEHCKSWASAYHV

SEQ ID NO: 9831 - protein, 142 aa, Zea mays subsp. mays
  peptide (1)..(142): Ceres Seq. ID no. 12416839
YSTPVPALHPSASSRSLCSLAVAVSQIPIAQGASVEGDRRWRAARAQRTRRSCSATTRCWVQHRRASSSRSRSASPRPRAACSSSSSTRSPLSSPPRAARAPSPTAAPGPAARTPRTQRGPCSPPSSRAPPRCSPSPGPPTS

SEQ ID NO: 9832 - protein, 96 aa, Zea mays subsp. mays
  peptide (1)..(96): Ceres Seq. ID no. 12416840
MMATRRLTVSTARAGRQRTMSDSALFRHRRRERYRHTNQKLGGGGIFSSIIYSCGSIPLLLLVTVVMNRSAKANVLLCNVFNSSLRNCNKVHSVSR

SEQ ID NO: 9833 - DNA, 1912 bp, Zea mays subsp. mays
  misc_feature (1)..(1912): Ceres Seq. ID no. 12374982
  misc_feature (1)..(1912): Ortholog of  Ceres SEQ ID NO 13654989 as cited in SEQ ID NO 63117
  misc_feature (1)..(1912): Ortholog of  Ceres SEQ ID NO 13657138 as cited in SEQ ID NO 65923
  misc_feature (1)..(1912): Ortholog of  Ceres SEQ ID NO 13584744 as cited in SEQ ID NO 69137
gagagaaacgcgctgcggccaccgccctccgccctccgcctaccacctcccacctctgacctcgcgtgccgagttcgggacgaagccaacgacgagctcagcggcgccggcgccgcagcgagaacacccgctccgtcgagaatacgtgtaaactaaattcaaaggcaggaatgtggcgcctctgttgctgcaattgccaggtggacgaaatagatcggcgtgagagtggtcatgtcaaggccacaaccaacaccatctgacggggtgacgaaggggttgagggatgatgctccccctatcgatgtacctgttctgtccttggatggtctgataagaaaaactggtgactttggttcaagagccttgataggtgaaggtatttatgggagactgtactatgcaactcttggtaattgaacaaaaatggcagtaaagaaacttcactctactgaaaatgaacccgctgccgagttcttggcccaggtctcgttggtttcaaggctgaaacatgaaaactttgttgacatgttggggtactatatcgagcgtgatcttcacatagtatcctacaaattcgccaccatgggttctctgcatgatcttctacatggaagaaaaggagttcaaggtgctcaagctggcccagtgcttcgttggatgcaacgagtgtgaattgctgttgatgctgcaaaagggctcgaatatcttcacgggaaagttcagccttccattgtccatagggatattagatcaagcaatatcctcttgtttgaagatgataggaatcgggcggattccctgatcgatctcaggttgtagtggtgggtgattggtggccagggtttgaggcgcgatgcacaacggcggggcgccgtgttcaccgcgcgcaagaggagagacgcgaggaaaggggcggctaggtcacagtaatcttccggctctctctggaaagccgaaacaatcttgtttctgcttaatccctatagagtggtgcttacaattatttatactcccttctagttcttatctaatgagataaatcccctattttctctctaacaaattttatctccttaatcttctaatccttatcatcttctaatccttatctgcatgcctatgctgttgcccggcgcctatagtggcggccgatcataacagaagacttcaaggcaaagatagcagacttcagtctctcaaaccagacttcatatatgtctgtccggttgcacattagctcacctcgggcctatggatatcatgccccagagtatgtaatgactggtaaactaacccagaaaagtgacgtatatagctttggaatagttcttttggagcttttgacaggtagaaagccaatagaccatacaatgcctatagatcagcacaacctgagagcttggaccacaccaatgttaactgaagagaaggtgaagcagtgtgtagatccgcgtttgatgggtgtgtatccagcaaaaggagtcgcaaagctcgctgctgtagcggctttgtgtgtgcaatctgatgctaagctccgcccaaatatgagcgttgtggttcacctatcagatttccatcactaactgcatggaggacgtcataactcattagtactgcactaataactttgcatctgcggctccacagcatgtcaacaatgttcatattcatctctcaggaaatgccagtataaggactagtgactaggtgatgaaatattgtcattagcattgagacttattgcaaagatgcggaattgtagaaaccccttcttttggtggcacaaacgctaatggaatcaccaagtggttcatacatgtccaactgttgtaatggtaattcattccgctgtgaatcggaagacaagcaaagcagaaaagcattacaacagttgaatctcaaaagacatgcg

SEQ ID NO: 9834 - protein, 122 aa, Zea mays subsp. mays
  peptide (1)..(122): Ceres Seq. ID no. 12374983
MSVRLHISSPRAYGYHAPEYVMTGKLTQKSDVYSFGIVLLELLTGRKPIDHTMPIDQHNLRAWTTPMLTEEKVKQCVDPRLMGVYPAKGVAKLAAVAALCVQSDAKLRPNMSVVVHLSDFHH

SEQ ID NO: 9835 - protein, 101 aa, Zea mays subsp. mays
  peptide (1)..(101): Ceres Seq. ID no. 12374984
MTGKLTQKSDVYSFGIVLLELLTGRKPIDHTMPIDQHNLRAWTTPMLTEEKVKQCVDPRLMGVYPAKGVAKLAAVAALCVQSDAKLRPNMSVVVHLSDFHH

SEQ ID NO: 9836 - protein, 82 aa, Zea mays subsp. mays
  peptide (1)..(82): Ceres Seq. ID no. 12374985
MAVKKLHSTENEPAAEFLAQVSLVSRLKHENFVDMLGYYIERDLHIVSYKFATMGSLHDLLHGRKGVQGAQAGPVLRWMQRV

SEQ ID NO: 9837 - DNA, 1626 bp, Zea mays subsp. mays
  misc_feature (1)..(1626): Ceres Seq. ID no. 12374930
  misc_feature (1)..(1626): Ortholog of  Ceres SEQ ID NO 14314363 as cited in SEQ ID NO 52272
  misc_feature (1)..(1626): Ortholog of  Ceres SEQ ID NO 12590304 as cited in SEQ ID NO 0
ccttttttcccccaccctccttcttttccatactctactattgcatagtagccttcaacaacggtgctggtgctctgtcggtccgtctgtcgttactcacagcgcttcccggcccgccggctcttgttcttgtctctgtttgccccgtggccagctccgcctcgccgccgcagtacatgacgccggcggcgtcgcccgcgcagttcgcgccggcgcccctcaggatggggtacgggcggccggcgcccgtgacgggcatgtggagcagcgagccgttcaaggtcgacagcggcggccacgccacctgcagcgcgtccaccgtcatggaggcggacaccaagctggagacaagcaggctacaagatgatgttccacaggtagcactcgagccagagaggagtacggatcaggaaacgagcaggccgccagagagggtcatgagaaggctcgcgcagaacagagaggctgctcggaagagtcgcctgcggaaaaaggcctacatccagcagctagagacaagccggatgaagctggcccagctagagctggagcttcaacgggctcgacggcagcagggcgcgtacgcaaatgggagcatgggagactcagctctcggatacacagggtcgatcgatccaggcgtcgccgcgttcgagatcgaatacaggcactgggtggacgagcagaagcggcacacggcggagctgatgtcggcgctccaggggcatcagacgtcgacgacgtcggagctggagctccgcttgctggtggagacggggctcagcaactacgagcacctcttcaggatcaaggcggtggccgccaacgcggacgtgttccacgtcatgtcgggcgtgtggaagacccccgccgagaggttcttcctctggatcggcgggttccgcccgtcggaggtcctaaagatcctgagcccgcagctggagccgttggcggaggcgcagcgcatgctcgtgggcggcctccaggcacacgtcaacgcaggcggaggacgcgctgtcgcagggcatggagaagctacagcagaacctcgccgagatcctgaccgccgaggctgaccccttcggggcccccgacgcctacatgctgcagatggccactgcggtggagaagctgaaagagctcgtcaacttcgtcacccaggcggaccatctccggctgatgacgctgcaacagatgcacaagatcctgacgacgcggcaggcggccaggggcctgctggcgctcggcgactacttccagcgcctccgcacgctgagctcgctgtgggcggcgcgcccgcgggaggcggcgattagctagatgcccgcggtgtgggtgtggccagccaaaggcccaccaaagaacacgacgacgacgaatagtagcagttcgctgtatactttcccaagctgtaaagtccagtggaggacgaagaaatcgacctcacagtcactggggttcggttccgacgaaaggatgcaaggcttttaagtcaatggcggtgcctgcgcctgcgctgcgtttcctcgctcgtctctccgcagcagcagcagcagcagcaagcggtgtgcgtttgtcaagcgaagcgactagagaataaaacggaaatggattgaggccttctcc

SEQ ID NO: 9838 - protein, 357 aa, Zea mays subsp. mays
  peptide (1)..(357): Ceres Seq. ID no. 12374931
FFPPPSFFSILYYCIVAFNNGAGALSVRLSLLTALPGPPALVLVSVCPVASSASPPQYMTPAASPAQFAPAPLRMGYGRPAPVTGMWSSEPFKVDSGGHATCSASTVMEADTKLETSRLQDDVPQVALEPERSTDQETSRPPERVMRRLAQNREAARKSRLRKKAYIQQLETSRMKLAQLELELQRARRQQGAYANGSMGDSALGYTGSIDPGVAAFEIEYRHWVDEQKRHTAELMSALQGHQTSTTSELELRLLVETGLSNYEHLFRIKAVAANADVFHVMSGVWKTPAERFFLWIGGFRPSEVLKILSPQLEPLAEAQRMLVGGLQAHVNAGGGRAVAGHGEATAEPRRDPDRRG

SEQ ID NO: 9839 - protein, 299 aa, Zea mays subsp. mays
  peptide (1)..(299): Ceres Seq. ID no. 12374932
MTPAASPAQFAPAPLRMGYGRPAPVTGMWSSEPFKVDSGGHATCSASTVMEADTKLETSRLQDDVPQVALEPERSTDQETSRPPERVMRRLAQNREAARKSRLRKKAYIQQLETSRMKLAQLELELQRARRQQGAYANGSMGDSALGYTGSIDPGVAAFEIEYRHWVDEQKRHTAELMSALQGHQTSTTSELELRLLVETGLSNYEHLFRIKAVAANADVFHVMSGVWKTPAERFFLWIGGFRPSEVLKILSPQLEPLAEAQRMLVGGLQAHVNAGGGRAVAGHGEATAEPRRDPDRRG

SEQ ID NO: 9840 - protein, 283 aa, Zea mays subsp. mays
  peptide (1)..(283): Ceres Seq. ID no. 12374933
MGYGRPAPVTGMWSSEPFKVDSGGHATCSASTVMEADTKLETSRLQDDVPQVALEPERSTDQETSRPPERVMRRLAQNREAARKSRLRKKAYIQQLETSRMKLAQLELELQRARRQQGAYANGSMGDSALGYTGSIDPGVAAFEIEYRHWVDEQKRHTAELMSALQGHQTSTTSELELRLLVETGLSNYEHLFRIKAVAANADVFHVMSGVWKTPAERFFLWIGGFRPSEVLKILSPQLEPLAEAQRMLVGGLQAHVNAGGGRAVAGHGEATAEPRRDPDRRG

SEQ ID NO: 9841 - DNA, 737 bp, Zea mays subsp. mays
  misc_feature (1)..(737): Ceres Seq. ID no. 12387469
  misc_feature (1)..(737): Ortholog of  Ceres SEQ ID NO 13595763 as cited in SEQ ID NO 57864
  misc_feature (1)..(737): Ortholog of  Ceres SEQ ID NO 13661894 as cited in SEQ ID NO 61265
attttcttgttctctactcgggaaacagacaggacagggacggaggccaaacccaacccaaagcccaagccgaagaggaaaggataggagacggatagggtacccgcgatgaggcccgccgccgccagtaccggcgggttccatctcgtgctccccgcggcgcacaggctgcctcctagtcttcctagcatcagtagccgaagaggtgtaaggatacgagcggcggcggcagcaggcggtggcggcgcgctgctggggcgtcccatggaggacgtgtacaaggtgcgcgtggagcgaggcgaggtggcgcgggcacggatggaggcgctgcgggtcatggagacgtggtcgtcgtggcgcacgggtggccggtgccggatgccgtgggactggcaggtcgaccagctcgtgtacatcgtgtccggggaggtgaaggtcatccccgccggcgctgtccacggcgacgactacatgcacttcgtggccggggatctggtcaggtacccgcgctggttcgaggccgacctctacttcgacggcccgtacgaggagcgctaccggtttctcgcctacggagacgacaactagttagtacatctgcatttcaagcagctttgcctagaccctagagtatccatctaccggcaatgcatgcgttgtaatgttcctctgtaatgtattggtgtggcgtagtcaggcaccgaaataaaccaatcattccaatgtttgcgaatttt

SEQ ID NO: 9842 - protein, 159 aa, Zea mays subsp. mays
  peptide (1)..(159): Ceres Seq. ID no. 12387470
MRPAAASTGGFHLVLPAAHRLPPSLPSISSRRGVRIRAAAAAGGGGALLGRPMEDVYKVRVERGEVARARMEALRVMETWSSWRTGGRCRMPWDWQVDQLVYIVSGEVKVIPAGAVHGDDYMHFVAGDLVRYPRWFEADLYFDGPYEERYRFLAYGDDN

SEQ ID NO: 9843 - protein, 107 aa, Zea mays subsp. mays
  peptide (1)..(107): Ceres Seq. ID no. 12387471
MEDVYKVRVERGEVARARMEALRVMETWSSWRTGGRCRMPWDWQVDQLVYIVSGEVKVIPAGAVHGDDYMHFVAGDLVRYPRWFEADLYFDGPYEERYRFLAYGDDN

SEQ ID NO: 9844 - protein, 89 aa, Zea mays subsp. mays
  peptide (1)..(89): Ceres Seq. ID no. 12387472
MEALRVMETWSSWRTGGRCRMPWDWQVDQLVYIVSGEVKVIPAGAVHGDDYMHFVAGDLVRYPRWFEADLYFDGPYEERYRFLAYGDDN

SEQ ID NO: 9845 - DNA, 1121 bp, Zea mays subsp. mays
  misc_feature (1)..(1121): Ceres Seq. ID no. 12367994
  misc_feature (1)..(1121): Ortholog of  Ceres SEQ ID NO 15177607 as cited in SEQ ID NO 59136
  misc_feature (1)..(1121): Ortholog of  Ceres SEQ ID NO 15179183 as cited in SEQ ID NO 0
gcacgagaccattacctagaacatcctaatcgaaaacctcagtttacgccgcacgaaccgacgcactagaccgacccgcgaatcccccgcgcgcgcgccgtgcggtcaccgtccgaggccacggcaccgccggcccccgcccccgccccggccgccaagagcaaaggcaaggccgacgcttcctcctcgtcgtcctcctcctccactccaccgaggtcgcgccgcgcgcttgccgtcgtgatggccgcgtcgctgctcgtgctcgccgtggcgttcttggttggctctggctccggggggatcgatgggggcgcagcggctcccgtcgaggtggagggcaccgaggtggcctacggtagtgtgatcaagctgatgcacgagaagacgaagcaccgtctgcactcgcacgatgtgccctacggctcaggcagcggtcagcagtctgtcaccgggtttcctgaaggcgatgactcaaatagctactggatcataaggcccactccagattcatcgtctaagcaaggtgatgccatcgaaactggtggcatcatcaggttgcaacacatgaggacacggaggtggttgcacagtcacctgcacgcttcaccgttgtctggtaaccttgaggttagctgtttcggcggggatgaattgtcagatagtggtgaccattggaggctagaaattgaaggaagtggaaaagtatggaaaagagatcaaaaggtgcgacttagacatgttgacaccggaggttatctgcatagtcacaacaagaagtacaatcgccttggcggtgggcagcaagaggtctgcggtgtccgagagaagcgagctgagaacatttggttgacagcagagggtgtttatctcccagttaacgggagcaagtgaaaaagcactttctagcatttactatttttaatgttaatcagtataggatcagatattttgccagctttcattcgtccttgtcttaagaaaaacgaacatgggacctgaccccctagtgatatgtttaagttggaatgtttggatatcgatgatgtcgacaagaccaggacagcgcatgcttgtaattgatatttataatccatatatgaccgtgtagatacccagaggcc

SEQ ID NO: 9846 - protein, 216 aa, Zea mays subsp. mays
  peptide (1)..(216): Ceres Seq. ID no. 12367995
MAASLLVLAVAFLVGSGSGGIDGGAAAPVEVEGTEVAYGSVIKLMHEKTKHRLHSHDVPYGSGSGQQSVTGFPEGDDSNSYWIIRPTPDSSSKQGDAIETGGIIRLQHMRTRRWLHSHLHASPLSGNLEVSCFGGDELSDSGDHWRLEIEGSGKVWKRDQKVRLRHVDTGGYLHSHNKKYNRLGGGQQEVCGVREKRAENIWLTAEGVYLPVNGSK

SEQ ID NO: 9847 - protein, 172 aa, Zea mays subsp. mays
  peptide (1)..(172): Ceres Seq. ID no. 12367996
MHEKTKHRLHSHDVPYGSGSGQQSVTGFPEGDDSNSYWIIRPTPDSSSKQGDAIETGGIIRLQHMRTRRWLHSHLHASPLSGNLEVSCFGGDELSDSGDHWRLEIEGSGKVWKRDQKVRLRHVDTGGYLHSHNKKYNRLGGGQQEVCGVREKRAENIWLTAEGVYLPVNGSK

SEQ ID NO: 9848 - protein, 108 aa, Zea mays subsp. mays
  peptide (1)..(108): Ceres Seq. ID no. 12367997
MRTRRWLHSHLHASPLSGNLEVSCFGGDELSDSGDHWRLEIEGSGKVWKRDQKVRLRHVDTGGYLHSHNKKYNRLGGGQQEVCGVREKRAENIWLTAEGVYLPVNGSK

SEQ ID NO: 9849 - DNA, 1135 bp, Zea mays subsp. mays
  misc_feature (1)..(1135): Ceres Seq. ID no. 13496182
  misc_feature (1)..(1135): Ortholog of  Ceres SEQ ID NO 14310369 as cited in SEQ ID NO 54765
  misc_feature (1)..(1135): Ortholog of  Ceres SEQ ID NO 13638746 as cited in SEQ ID NO 59296
  misc_feature (1)..(1135): Ortholog of  Ceres SEQ ID NO 13596474 as cited in SEQ ID NO 62169
  misc_feature (1)..(1135): Ortholog of  Ceres SEQ ID NO 13598714 as cited in SEQ ID NO 62656
  misc_feature (1)..(1135): Ortholog of  Ceres SEQ ID NO 14302434 as cited in SEQ ID NO 63410
  misc_feature (1)..(1135): Ortholog of  Ceres SEQ ID NO 14302240 as cited in SEQ ID NO 64162
  misc_feature (1)..(1135): Ortholog of  Ceres SEQ ID NO 13584480 as cited in SEQ ID NO 64751
  misc_feature (1)..(1135): Ortholog of  Ceres SEQ ID NO 13597519 as cited in SEQ ID NO 64759
  misc_feature (1)..(1135): Ortholog of  Ceres SEQ ID NO 13656123 as cited in SEQ ID NO 65212
  misc_feature (1)..(1135): Ortholog of  Ceres SEQ ID NO 13587054 as cited in SEQ ID NO 0
gtacgacaggctgtaccgaggttcagttcggtagtgtagttgtaggttgcgatcgcgaggcggctgctggcggcggtcgccatagtagtcgtggccgccgcgctcgcgtgcggcgcgggcgcgcagctctcggcggggttctactcgtcgagctgccccgccgtgcacagcatcgtgcgccaggccatgtcgcaggccgtcacgaacaacacgcgcagcgccgccgccgtgctccgcgtcttcttccacgactgcttcgtcaatggctgcgacgcctcgctgctgctggacgacacgcccacgacgcccggcgagaagggcgccggccccaacgccggcggctccaccgtcggcttcgacctcatcgacaccatcaaggcgcaggtcgaggccgcctgccccgccaccgtctcctgcgccgacatcctggcgctcaccgcgcgcgacggcgtcaacctgctcggcggcccgagctgggccgtgccgctgggccggcgcgacgcgacgttccccaacagcacgggcgcggcgacggacctcccgggcccggactccgacctggccggcctggtggccgggttcgccgccaagggcctgagcccgcgcgacctcgcggcgctgtcgggcgcgcacacggtggggatggcgcgctgcgccagcttccgcacccgcgtctactgcgacgacaacgtgagcccggcgttcgccgcgcagcagcgccaggcctgcccgtcggccgacgccgacgacgcgctcgcgccgctcgactcgctcacccccgaccagttcgacaacggctactaccggagcctcatggccggcgccggcctgctgcactcggaccaggagctcttcagcaacggcgcactcgactcgctcgtgcgcctctacggcaccaacgccgacgccttctcgtcggacttcgccgcgtccatggtcaagctcggcaacatcggcccgctcacgggttccgcgggggaggtcaggctcaactgcaggacggtgaattcgaattcgtgacttcaggacggtgaatgccaccatttttaattctttttccctacaaggagttgtagaatttgcattccttcaacgatttcgaatttcgaatttgctgtgagtcagctgaagtggc

SEQ ID NO: 9850 - protein, 343 aa, Zea mays subsp. mays
  peptide (1)..(343): Ceres Seq. ID no. 13496183
TTGCTEVQFGSVVVGCDREAAAGGGRHSSRGRRARVRRGRAALGGVLLVELPRRAQHRAPGHVAGRHEQHAQRRRRAPRLLPRLLRQWLRRLAAAGRHAHDARREGRRPQRRRLHRRLRPHRHHQGAGRGRLPRHRLLRRHPGAHRARRRQPARRPELGRAAGPARRDVPQQHGRGDGPPGPGLRPGRPGGRVRRQGPEPARPRGAVGRAHGGDGALRQLPHPRLLRRQREPGVRRAAAPGLPVGRRRRRARAARLAHPRPVRQRLLPEPHGRRRPAALGPGALQQRRTRLARAPLRHQRRRLLVGLRRVHGQARQHRPAHGFRGGGQAQLQDGEFEFVTSGR

SEQ ID NO: 9851 - protein, 277 aa, Zea mays subsp. mays
  peptide (1)..(277): Ceres Seq. ID no. 13496184
MSQAVTNNTRSAAAVLRVFFHDCFVNGCDASLLLDDTPTTPGEKGAGPNAGGSTVGFDLIDTIKAQVEAACPATVSCADILALTARDGVNLLGGPSWAVPLGRRDATFPNSTGAATDLPGPDSDLAGLVAGFAAKGLSPRDLAALSGAHTVGMARCASFRTRVYCDDNVSPAFAAQQRQACPSADADDALAPLDSLTPDQFDNGYYRSLMAGAGLLHSDQELFSNGALDSLVRLYGTNADAFSSDFAASMVKLGNIGPLTGSAGEVRLNCRTVNSNS

SEQ ID NO: 9852 - DNA, 1391 bp, Zea mays subsp. mays
  misc_feature (1)..(1391): Ceres Seq. ID no. 13504058
  misc_feature (1)..(1391): Ortholog of  Ceres SEQ ID NO 12781552 as cited in SEQ ID NO 51997
  misc_feature (1)..(1391): Ortholog of  Ceres SEQ ID NO 15176548 as cited in SEQ ID NO 53387
  misc_feature (1)..(1391): Ortholog of  Ceres SEQ ID NO 15169228 as cited in SEQ ID NO 55423
  misc_feature (1)..(1391): Ortholog of  Ceres SEQ ID NO 14312196 as cited in SEQ ID NO 56984
  misc_feature (1)..(1391): Ortholog of  Ceres SEQ ID NO 13597237 as cited in SEQ ID NO 64136
  misc_feature (1)..(1391): Ortholog of  Ceres SEQ ID NO 13598601 as cited in SEQ ID NO 69129
agcgcagggtcaggagaggcagaggcctcagagatacgccgggacgcaacacgtcgtgccgcgcggagggttttgccgagattttccctcaaaagggtattgccacccgcaccgagaaaagaaaacgatacacaccgagataaaaacataccctctccatcctctcctcttcttcctcctcccgtagcggcttcccccgatttgcatccgggcgcggccccatccccacctggccgccgcgcgccgccatggacggcctgcacggtacggacgcatgcttctcccccgcgagggctatctcgccgcaggtgaggccccccgggccgccggacgtaggcagtcagtacctggcggagctgctgcaggagcaccagaagctggggcccttcatgcaggtgctcccaatctgcagcaggctgctgaatcaagaaatagtgcgggtgtcgaatatacggcgccaacatggtgttgctggcgactttgagaggtttccagccgcaagccccaaccagatgcatccggcaccccccatgacaaacttttgtggaaacggttttagtccatggaatgggatgcattcagagagagtaggtgttccgcaaggagctatgggttggcaaggacccccacagagcccctcttcttatattgtcaagaagattttgcggttggaagtaccgacagaagcataccctaatttcaattttatcggccgtcttcttggaccaaggggaaactctttaaagatgattgaagcctccacaggctgtcgtgttttcatcagagggaaaggctcaattaaagattctggcaaggaggaacaactcaagggaagacctggctatgaacacttgagtgaacccctccatatcttgattgaagctgagttacctgctaatgtgattgatgcaagacttgcaaaggcacaagagatccttgaagagctgttgaaaccagtggacgaatcacaagactactacaagagacagcaactgcgagaacttgcaatgctaaattcgccactccgagaggagagtccacatccaggtggtgctcctcctagtcccttcagtaacggcggcatgaaaagagtgaaacaatgacaccgccgaggctcgttcctccatcttgactccccagcaaccccaatgcagtccataccttcacaccctatttttcaatgagcaagctttcatgacggtgttggtagtgtgtgacattcttcactgtactagcaggtgaattttgatctcccatcccatgttacattaaccttgagtgacagatgactatgcgtagtgtatcctctatggcagtataactagaacatttgatttatttgttactggtaatgctgagatatagtactgtgcagattntgagttacggtg

SEQ ID NO: 9853 - protein, 284 aa, Zea mays subsp. mays
  peptide (1)..(284): Ceres Seq. ID no. 13504059
MDGLHGTDACFSPARAISPQVRPPGPPDVGSQYLAELLQEHQKLGPFMQVLPICSRLLNQEIVRVSNIRRQHGVAGDFERFPAASPNQMHPAPPMTNFCGNGFSPWNGMHSERVGVPQGAMGWQGPPQSPSSYIVKKILRLEVPTEAYPNFNFIGRLLGPRGNSLKMIEASTGCRVFIRGKGSIKDSGKEEQLKGRPGYEHLSEPLHILIEAELPANVIDARLAKAQEILEELLKPVDESQDYYKRQQLRELAMLNSPLREESPHPGGAPPSPFSNGGMKRVKQ

SEQ ID NO: 9854 - protein, 237 aa, Zea mays subsp. mays
  peptide (1)..(237): Ceres Seq. ID no. 13504060
MQVLPICSRLLNQEIVRVSNIRRQHGVAGDFERFPAASPNQMHPAPPMTNFCGNGFSPWNGMHSERVGVPQGAMGWQGPPQSPSSYIVKKILRLEVPTEAYPNFNFIGRLLGPRGNSLKMIEASTGCRVFIRGKGSIKDSGKEEQLKGRPGYEHLSEPLHILIEAELPANVIDARLAKAQEILEELLKPVDESQDYYKRQQLRELAMLNSPLREESPHPGGAPPSPFSNGGMKRVKQ

SEQ ID NO: 9855 - protein, 196 aa, Zea mays subsp. mays
  peptide (1)..(196): Ceres Seq. ID no. 13504061
MHPAPPMTNFCGNGFSPWNGMHSERVGVPQGAMGWQGPPQSPSSYIVKKILRLEVPTEAYPNFNFIGRLLGPRGNSLKMIEASTGCRVFIRGKGSIKDSGKEEQLKGRPGYEHLSEPLHILIEAELPANVIDARLAKAQEILEELLKPVDESQDYYKRQQLRELAMLNSPLREESPHPGGAPPSPFSNGGMKRVKQ

SEQ ID NO: 9856 - DNA, 1365 bp, Zea mays subsp. mays
  misc_feature (1)..(1365): Ceres Seq. ID no. 12374978
  misc_feature (1)..(1365): Ortholog of  Ceres SEQ ID NO 12593170 as cited in SEQ ID NO 63263
  misc_feature (1)..(1365): Ortholog of  Ceres SEQ ID NO 14301882 as cited in SEQ ID NO 64381
  misc_feature (1)..(1365): Ortholog of  Ceres SEQ ID NO 13597851 as cited in SEQ ID NO 64869
  misc_feature (1)..(1365): Ortholog of  Ceres SEQ ID NO 13662420 as cited in SEQ ID NO 68680
aacagtggtacttgaagtcgaaggcagcgcagcaggtacgccaggacgccattagcagcggttggccaccacccgacgccggaggcccggaggaggaggcggcgatggcggggaagcacgggcgcaacggcttcgacgacgacaacgtcaaccctttcgcgggaggaagtgttccacctgccaccaattctcgtctctcacctctatcacatgaaccggctgatttctacaatgtggacattcctctcgactcatcaaaggatctgaagaaaaaggagaaagaactccaggctatggaggctgagctaaacaaaagagaacgggaattgaaaaggaaggaagaggcggcatcccgagctggcgttgtgatagaagagaaaaactggcctccctttttccccctcatccaccacgacatttccaatgaaatacctatccatctacaaaggatgcagtaccttgcattctcatcattcttgggattgatagcgtgtctcttttggaatgtcatagcaactacaacagcatggattaaaggggaaggtgttatgatctggctgcttgccattatctacttcatatctggtgcgcctggggcttatgtgctatggtatcgacctctttataatgcaatgagaactgagagcgctttgaagtttgggtggtttttcctattttacatgattcatataatcttctgtgtgtgggcagctgtggctcctccatttcctttcaaaggaaaatctttggctgggattttaccagcaattgatgtcataagcaagaatgctattgttgggatattttacttcgttggatttggcttgttctgccttgaatcacttctgagcatcggtgtcattcagcaagtctacatgtatttccgtggaagtggaaaaagctgcagagatgaaacgtgaggcagcacgtagtgctctaagttcagccttctgatgaacatagggcggtctgattagagcagtagatggataagggaagggaacgagatgtgccaattaagccacgcggtcttgtacatcactgcagtacgtggatttggatcgctgaaagcgtacagctgatcgtctttttgctcttctgtaaaatatgaacaatcatcatatggtccggatgcgtcagggtgttgtttcatttcttgccatggtttagatgtggttgatagggaaaacggtgaagtattttttggagcagctaatataatgtatcttcatcatacttttacatgtgagtgtaatagcttatttcttgtggtaggaatacagctttgctgtgttttcgggaatgacatttgttgtgtaaggctattcacaatggctatttcataatactcttttcaatactgcc

SEQ ID NO: 9857 - protein, 305 aa, Zea mays subsp. mays
  peptide (1)..(305): Ceres Seq. ID no. 12374979
QWYLKSKAAQQVRQDAISSGWPPPDAGGPEEEAAMAGKHGRNGFDDDNVNPFAGGSVPPATNSRLSPLSHEPADFYNVDIPLDSSKDLKKKEKELQAMEAELNKRERELKRKEEAASRAGVVIEEKNWPPFFPLIHHDISNEIPIHLQRMQYLAFSSFLGLIACLFWNVIATTTAWIKGEGVMIWLLAIIYFISGAPGAYVLWYRPLYNAMRTESALKFGWFFLFYMIHIIFCVWAAVAPPFPFKGKSLAGILPAIDVISKNAIVGIFYFVGFGLFCLESLLSIGVIQQVYMYFRGSGKSCRDET

SEQ ID NO: 9858 - protein, 271 aa, Zea mays subsp. mays
  peptide (1)..(271): Ceres Seq. ID no. 12374980
MAGKHGRNGFDDDNVNPFAGGSVPPATNSRLSPLSHEPADFYNVDIPLDSSKDLKKKEKELQAMEAELNKRERELKRKEEAASRAGVVIEEKNWPPFFPLIHHDISNEIPIHLQRMQYLAFSSFLGLIACLFWNVIATTTAWIKGEGVMIWLLAIIYFISGAPGAYVLWYRPLYNAMRTESALKFGWFFLFYMIHIIFCVWAAVAPPFPFKGKSLAGILPAIDVISKNAIVGIFYFVGFGLFCLESLLSIGVIQQVYMYFRGSGKSCRDET

SEQ ID NO: 9859 - protein, 208 aa, Zea mays subsp. mays
  peptide (1)..(208): Ceres Seq. ID no. 12374981
MEAELNKRERELKRKEEAASRAGVVIEEKNWPPFFPLIHHDISNEIPIHLQRMQYLAFSSFLGLIACLFWNVIATTTAWIKGEGVMIWLLAIIYFISGAPGAYVLWYRPLYNAMRTESALKFGWFFLFYMIHIIFCVWAAVAPPFPFKGKSLAGILPAIDVISKNAIVGIFYFVGFGLFCLESLLSIGVIQQVYMYFRGSGKSCRDET

SEQ ID NO: 9860 - DNA, 1628 bp, Zea mays subsp. mays
  misc_feature (1)..(1628): Ceres Seq. ID no. 12416798
  misc_feature (1)..(1628): Ortholog of  Ceres SEQ ID NO 15172495 as cited in SEQ ID NO 60316
gcacgagaccattacctagaacatcctaatcgaaaaattatttttttaataaatcttcccaggcgtccagcgtcctcccggcgacgacgcttcccgagctctctccttcccgcgaccctctcctctgccccgctccgctagggttttgccgcagacctctcgctcgcttccggttccgcgaggcaaccgtccgaccggtcggaatggtggatgtggaggagaccgggaacaagttgcaatcgcagatgcgcctccacgcggagccggaggacgacgccgccgacctccccctcccggccctcttcgatagggcgtcgcggctccacgccctggcctccagctccgccctcgaccaggatgggatccgcacgggggttgacctgctgcggcgctgcgatgacatggtcagcaagctcgggcctcttctcccccaacgagaccaaggaggacgtctccacagcaaacctcaagtacctactggtcccatattaccttgcagaaatgaccgaaaagatagcacaggaggatcggatcccggttcttaagacgtcacaggaccatctgaaggagttcattgctctatgtgaagtactagagcttatcccagaggatgagctagaattgtctaggcagaagcagccagatactctgacaaacagaagagcgcagaaggttgcccggttcaaacgtcaaaaggctgcagaaacgaagctccaagagatcagagagagaaaagaaaggcgtggacgctcattgagagcagctgctttgtctgccccaattgaagctggagaggaagatgacctggagaatgatggggaggaagaaagagaggcttggttagctaccatctcattggctctctgcaaggcatttgatcttctcgacatgctaaagaaggaagaagaaatgcttcaagctgtaaaggaaaggaaggcaaaggatgggaatgcatttgctcgtgaaatgcttgatgaacgaacgaagaaggccgaaacatggcaccataatgctgccaaccgtgtggcatattccaaaccagcggatcctatcacttgtgcaacatttgctcaagatgtcattgaaggtagagcaagcgtttcacaagctcacgagcacaaacaccagcccctgatatttggacctgcaagtattgttggtggtggtctaacaagtgaaagggaaagaatgacagcgcaagtttttcagcctagttacaggatgccaacaatgagcattgaagaagctggtttgcgcgagatgaaaatgatggagaaatggcaagaaaggaccgctgaggtgatgaaagaatcaacctccgcgtggcacaaggatggcagcagctcggcccaagaggatgaggacgccgaggaggaaaaagcaagagcgtgggacgactggaaggatgacaaccctcgtggcgcaggcaacaagaagctcacgccctgtggttaatttgtgaaacacgctgtgtattgatactccacatggaacatgatgctcatgtagacggtaggatgtttaattttatcattgttgccgtgttttttctgtagtgatgttgagtgtatcgtagcctgtttgtgcaagtgcaatatgtcctccctaatacgacacgtttttctggc

SEQ ID NO: 9861 - protein, 414 aa, Zea mays subsp. mays
  peptide (1)..(414): Ceres Seq. ID no. 12416799
MWRRPGTSCNRRCASTRSRRTTPPTSPSRPSSIGRRGSTPWPPAPPSTRMGSARGLTCCGAAMTWSASSGLFSPNETKEDVSTANLKYLLVPYYLAEMTEKIAQEDRIPVLKTSQDHLKEFIALCEVLELIPEDELELSRQKQPDTLTNRRAQKVARFKRQKAAETKLQEIRERKERRGRSLRAAALSAPIEAGEEDDLENDGEEEREAWLATISLALCKAFDLLDMLKKEEEMLQAVKERKAKDGNAFAREMLDERTKKAETWHHNAANRVAYSKPADPITCATFAQDVIEGRASVSQAHEHKHQPLIFGPASIVGGGLTSERERMTAQVFQPSYRMPTMSIEEAGLREMKMMEKWQERTAEVMKESTSAWHKDGSSSAQEDEDAEEEKARAWDDWKDDNPRGAGNKKLTPCG

SEQ ID NO: 9862 - protein, 365 aa, Zea mays subsp. mays
  peptide (1)..(365): Ceres Seq. ID no. 12416800
MGSARGLTCCGAAMTWSASSGLFSPNETKEDVSTANLKYLLVPYYLAEMTEKIAQEDRIPVLKTSQDHLKEFIALCEVLELIPEDELELSRQKQPDTLTNRRAQKVARFKRQKAAETKLQEIRERKERRGRSLRAAALSAPIEAGEEDDLENDGEEEREAWLATISLALCKAFDLLDMLKKEEEMLQAVKERKAKDGNAFAREMLDERTKKAETWHHNAANRVAYSKPADPITCATFAQDVIEGRASVSQAHEHKHQPLIFGPASIVGGGLTSERERMTAQVFQPSYRMPTMSIEEAGLREMKMMEKWQERTAEVMKESTSAWHKDGSSSAQEDEDAEEEKARAWDDWKDDNPRGAGNKKLTPCG

SEQ ID NO: 9863 - protein, 352 aa, Zea mays subsp. mays
  peptide (1)..(352): Ceres Seq. ID no. 12416801
MTWSASSGLFSPNETKEDVSTANLKYLLVPYYLAEMTEKIAQEDRIPVLKTSQDHLKEFIALCEVLELIPEDELELSRQKQPDTLTNRRAQKVARFKRQKAAETKLQEIRERKERRGRSLRAAALSAPIEAGEEDDLENDGEEEREAWLATISLALCKAFDLLDMLKKEEEMLQAVKERKAKDGNAFAREMLDERTKKAETWHHNAANRVAYSKPADPITCATFAQDVIEGRASVSQAHEHKHQPLIFGPASIVGGGLTSERERMTAQVFQPSYRMPTMSIEEAGLREMKMMEKWQERTAEVMKESTSAWHKDGSSSAQEDEDAEEEKARAWDDWKDDNPRGAGNKKLTPCG

SEQ ID NO: 9864 - DNA, 1536 bp, Zea mays subsp. mays
  misc_feature (1)..(1536): Ceres Seq. ID no. 12416469
  misc_feature (1)..(1536): Ortholog of  Ceres SEQ ID NO 13582332 as cited in SEQ ID NO 59890
  misc_feature (1)..(1536): Ortholog of  Ceres SEQ ID NO 13598278 as cited in SEQ ID NO 68456
aatccgctccgggcgtcatcgttgtatccaaagcgccgtgctagattccacacctagacaggacgccgcacacggcagccacccccttgtgtgcgtgactgcgtctcgcgcgggcaagagtgcacgggcagagccatggacgtagaagcgcgcaaggccgacgcgccgctcgcgcaaggcaaggcgatgcaccgctttctcgtagcgctcaactgcgggatgctggcggtgggagccatcggcgggccgctcctgagccggctctacttcagcaagggtgggcaccggcagtggctgtccgcgtggctggagaccggcgggtggccgctgctggtgattcccgtggcggcgtcgntcgtggcccgccgcgcgcgcgacaggggcgccccggttcctgctcgcgccgccgcggatcctgctggccgccgcgggcctcggcgtggccacgggcgcggacgacttcatctacgcctacgggctcgcgtacctcccggtgtccacgtccgcgatcctgatctcgacgcagctggcgttcacggtgttcttcgcgttcctcgtggtgcggcagcgcctgacggccgcgtccgtgaacgccgtggcgctgctgacggtgggcaccgtggtgctgggcctgcacgtctcgtcggaccggcccccgggcgtcaccaggggccagtactggctgggcttcgtgctgacgctcggcgccgcggcgctctacggcctcgtcctgccgctcgtggagctcgcctacaggcgcgccgcgggcgccggcggccgcgccgtnacgtacgcgctggtggtgnagatgcagctggtgatgggcttcttcgccaccgcgttctgcaccgtcggcatggtcgtcaacaaggatttccaggcgatcccgagggaggcgaggcggtacgcgctgggggaggcgcggtactacgcggtgctggcgtggtcggcggtgatgtggcagtgcttcttcctgggcgcggtgggcgtcatcttctgcgtgcacacgctgctggcgggcatcctcatcgcggtgttcatcccggtgacggaggtggcggccgtcatcttcctgcgcgagaggttcagcagcgagaaaggcgtggcgctggtgctctcgctctggggcctcgcgtcctactcctacggcgagtggagcgaggccagggccaagaagaggaagaggacgaggacggaggagggcgccgccgccgcggaggccctgcagcaggcgaacccgtgatgctgctgcggactttggcctggcctcttcgatcttccccgttgtgtgtatatcagtatatgttgtgattgtgatcgctgctgtgtgctacgtggatagcgtcctgaatcgtcgtcacctgcagctgtcgcttctggtgtgggtgctcttctgttcggcggtggacgttggccaatantgtgctgcatggtgtgtagatgtaccttggcagtaccacgttcggttcggacagtaagtntggaccggcgcactttgtgggccgatcccagtacaggactgatctaatntgaacg

SEQ ID NO: 9865 - protein, 391 aa, Zea mays subsp. mays
  peptide (1)..(391): Ceres Seq. ID no. 12416470
  misc_feature (74)..(74): Xaa is any aa, unknown or other
  misc_feature (218)..(218): Xaa is any aa, unknown or other
  misc_feature (224)..(224): Xaa is any aa, unknown or other
MDVEARKADAPLAQGKAMHRFLVALNCGMLAVGAIGGPLLSRLYFSKGGHRQWLSAWLETGGWPLLVIPVAASXVARRARDRGAPVPARAAADPAGRRGPRRGHGRGRLHLRLRARVPPGVHVRDPDLDAAGVHGVLRVPRGAAAPDGRVRERRGAADGGHRGAGPARLVGPAPGRHQGPVLAGLRADARRRGALRPRPAARGARLQARRGRRRPRRXVRAGGXDAAGDGLLRHRVLHRRHGRQQGFPGDPEGGEAVRAGGGAVLRGAGVVGGDVAVLLPGRGGRHLLRAHAAGGHPHRGVHPGDGGGGRHLPAREVQQRERRGAGALALGPRVLLLRRVERGQGQEEEEDEDGGGRRRRGGPAAGEPVMLLRTLAWPLRSSPLCVYQYML

SEQ ID NO: 9866 - protein, 374 aa, Zea mays subsp. mays
  peptide (1)..(374): Ceres Seq. ID no. 12416471
  misc_feature (57)..(57): Xaa is any aa, unknown or other
  misc_feature (201)..(201): Xaa is any aa, unknown or other
  misc_feature (207)..(207): Xaa is any aa, unknown or other
MHRFLVALNCGMLAVGAIGGPLLSRLYFSKGGHRQWLSAWLETGGWPLLVIPVAASXVARRARDRGAPVPARAAADPAGRRGPRRGHGRGRLHLRLRARVPPGVHVRDPDLDAAGVHGVLRVPRGAAAPDGRVRERRGAADGGHRGAGPARLVGPAPGRHQGPVLAGLRADARRRGALRPRPAARGARLQARRGRRRPRRXVRAGGXDAAGDGLLRHRVLHRRHGRQQGFPGDPEGGEAVRAGGGAVLRGAGVVGGDVAVLLPGRGGRHLLRAHAAGGHPHRGVHPGDGGGGRHLPAREVQQRERRGAGALALGPRVLLLRRVERGQGQEEEEDEDGGGRRRRGGPAAGEPVMLLRTLAWPLRSSPLCVYQYML

SEQ ID NO: 9867 - protein, 363 aa, Zea mays subsp. mays
  peptide (1)..(363): Ceres Seq. ID no. 12416472
  misc_feature (46)..(46): Xaa is any aa, unknown or other
  misc_feature (190)..(190): Xaa is any aa, unknown or other
  misc_feature (196)..(196): Xaa is any aa, unknown or other
MLAVGAIGGPLLSRLYFSKGGHRQWLSAWLETGGWPLLVIPVAASXVARRARDRGAPVPARAAADPAGRRGPRRGHGRGRLHLRLRARVPPGVHVRDPDLDAAGVHGVLRVPRGAAAPDGRVRERRGAADGGHRGAGPARLVGPAPGRHQGPVLAGLRADARRRGALRPRPAARGARLQARRGRRRPRRXVRAGGXDAAGDGLLRHRVLHRRHGRQQGFPGDPEGGEAVRAGGGAVLRGAGVVGGDVAVLLPGRGGRHLLRAHAAGGHPHRGVHPGDGGGGRHLPAREVQQRERRGAGALALGPRVLLLRRVERGQGQEEEEDEDGGGRRRRGGPAAGEPVMLLRTLAWPLRSSPLCVYQYML

SEQ ID NO: 9868 - DNA, 1242 bp, Zea mays subsp. mays
  misc_feature (1)..(1242): Ceres Seq. ID no. 12356776
  misc_feature (1)..(1242): Ortholog of  Ceres SEQ ID NO 14313959 as cited in SEQ ID NO 57842
atattgcaactttgccaaacacgcacacagcagatccgtctagtgcactagggctcacaatctcgaaggtagctatatcttctcttagtttgctcgtcaccaccggcaatggctacggcgacgactaagccggcggcggggcgcggcgggaggcgctacgcgctgctgctggcgctctgggactcggagtacgcgaaggaggtgtacggcgggtactacaacgtctttgtcgccgctttcggcgccgacgacgtcgtcgtcggcggtggggagggcccggccggcgataggtggcactgcttccgtgtgatcgccggcgagttccctgcgccggaggacctggcgtcgtacgacggcttcgtggtgagcggcagcccgcaggacgcgcacggcgacgaaacatggatccggcgcctctgcgcgctcatccagaccgtccacgccatgaggaagcgggtgctcggcgtctgcttcggccaccaggttctgtgccgagcactgggcgggagggtcggcagggctaggaacggctgggacgtcggggtgaggaaggtgacgtttgcgcgagaccgcctggagagccttgagttcctcggggacctcgtccaggagcttccccggaggcgcctccctcatcgaggttcaccaggacgaggtgtgggagatcccgcctgcggcgacggtgctggcctactcggagaagacgcgcgtggaggtgttcgcggtcggggagcacgcgctgggcatccagggccacccggagtacaccgtcgacatccttcacaacctcatcgaccgcctcaccaagcagaacgacatccggaggagcgtcggcgaggaggcgcggcggacggtcgccgagaccggcgggccggaccgcgctttctggaccgcgctctgcaaaggttttctcggagggggaggggcgggaggagaccgtccgcagccgtctgctgctctgcctgcggtgcgggagacggcgccgccggaggtgacgactagctgcgccgtcgctggttgcttcgccagcgccgcaggtgcaatggtccagatggcgcgcagcaactagttatggctagggctgcccaaaatcttgagtacctggttcctttttgctgcaggattgcactctgtactgcagttcgattttctgttgacagaaagatgtactctagttctcctctaaattattggtgatgtactatactagctagaaactactgcctttgattgatcagtgcc

SEQ ID NO: 9869 - protein, 297 aa, Zea mays subsp. mays
  peptide (1)..(297): Ceres Seq. ID no. 12356777
MATATTKPAAGRGGRRYALLLALWDSEYAKEVYGGYYNVFVAAFGADDVVVGGGEGPAGDRWHCFRVIAGEFPAPEDLASYDGFVVSGSPQDAHGDETWIRRLCALIQTVHAMRKRVLGVCFGHQVLCRALGGRVGRARNGWDVGVRKVTFARDRLESLEFLGDLVQELPRRRLPHRGSPGRGVGDPACGDGAGLLGEDARGGVRGRGARAGHPGPPGVHRRHPSQPHRPPHQAERHPEERRRGGAADGRRDRRAGPRFLDRALQRFSRRGRGGRRPSAAVCCSACGAGDGAAGGDD

SEQ ID NO: 9870 - protein, 185 aa, Zea mays subsp. mays
  peptide (1)..(185): Ceres Seq. ID no. 12356778
MRKRVLGVCFGHQVLCRALGGRVGRARNGWDVGVRKVTFARDRLESLEFLGDLVQELPRRRLPHRGSPGRGVGDPACGDGAGLLGEDARGGVRGRGARAGHPGPPGVHRRHPSQPHRPPHQAERHPEERRRGGAADGRRDRRAGPRFLDRALQRFSRRGRGGRRPSAAVCCSACGAGDGAAGGDD

SEQ ID NO: 9871 - DNA, 1534 bp, Zea mays subsp. mays
  misc_feature (1)..(1534): Ceres Seq. ID no. 12416465
  misc_feature (1)..(1534): Ortholog of  Ceres SEQ ID NO 13654451 as cited in SEQ ID NO 67881
agaacgccccagccttccacctcgaactccgcggtgcccagcgccctcggtaaccgccctccgccctgccacagagacaggtcgacgagacagacaaaggccggccgccatgggagaggacaagaaggcgggcaacaaggacgccgccggcggcgacaagaagaaggacgccggcgccggggccgcgccgcagcccatcgtgctgaaggtcgacttgcactgcgccggctgcgccaacaaggtccgcaaggccatcaagcacgccccaggtgtggagtcggtgacgccggacatggcggngggtaaggtggtcgtgaccggtccggcggacgcggtggagctcaaggagcgcatcgaggccagggcgaagaagcccgtgcagatcgtctccgccggcgccggcccacccaagtaaggagaaggataagaaagcggacggcggcgagaagaaggcggacaaagagaagggcggcggcggcggagagaagaaggccgacaaggagaagggcggcggagagaagaaggccgacaaggagaagggcggcggagagaagaaggccgacaaggagaagggcggcggcgagaagaaggccgacaaggagaagggtgccgacaagcccaaggaggagaagaagaagcccaaggaggagactgtgacgctgaagatccggctgcactgtgacggctgcatcgagcgcatcaagcgccgcatctccaagatcaaaggcgtgaaggacgtggcgttcgacgccgccaaggacctggtgaaggtgaccggcaccatggacggcgccgctctgccggcgtacctcagggagaagctcagccgggacgtggaagtggtggcgcccggcaagaaggacggcggcggcggcggtggtgacaagaaggacaagggcgcaggagacgggggagagaagaagaaggacggtggcggcggcggcggcggcggcggcgccgaggaaaagaaggacaaggccggggccgcggccgcctccgcgtcggtggcgccgacgcccctggccgacgccggcatgtaccaggtgccgccgcactacgggtacgcgccgtaccaccagccggctccaggcggctactacggtgccgccccaccgcccatccaccacgccggcttctaccccaacggcggcgtccattacccgcccgcgccagcctacgcgtacggccccacccacctccacgcgccccagatgttcagcgacgagaaccccaacgcntgctccgtcatgtgaactcgctcgcttcgccggtttgccgccgccgccgccgccgcgcctaggctcccccttcctccgtgtgagaccaagaaccatgggcttggcctgggattagcggtgtctttagttaaaattatcagtgagtagtagctagcttaagcagtgctccgatccgagatcagttccagcagacctgtgtaaatgagagtcccgccgctccgcgccggcccatcccggtgtaacgaatcgtcatgtgtaaaatgtatccggacccgataaagttttgcccttctgcc

SEQ ID NO: 9872 - protein, 156 aa, Zea mays subsp. mays
  peptide (1)..(156): Ceres Seq. ID no. 12416466
  misc_feature (152)..(152): Xaa is any aa, unknown or other
MDGAALPAYLREKLSRDVEVVAPGKKDGGGGGGDKKDKGAGDGGEKKKDGGGGGGGGGAEEKKDKAGAAAASASVAPTPLADAGMYQVPPHYGYAPYHQPAPGGYYGAAPPPIHHAGFYPNGGVHYPPAPAYAYGPTHLHAPQMFSDENPNXCSVM

SEQ ID NO: 9873 - protein, 137 aa, Zea mays subsp. mays
  peptide (1)..(137): Ceres Seq. ID no. 12416467
  misc_feature (100)..(100): Xaa is any aa, unknown or other
ERPSLPPRTPRCPAPSVTALRPATETGRRDRQRPAAMGEDKKAGNKDAAGGDKKKDAGAGAAPQPIVLKVDLHCAGCANKVRKAIKHAPGVESVTPDMAXGKVVVTGPADAVELKERIEARAKKPVQIVSAGAGPPK

SEQ ID NO: 9874 - protein, 101 aa, Zea mays subsp. mays
  peptide (1)..(101): Ceres Seq. ID no. 12416468
  misc_feature (64)..(64): Xaa is any aa, unknown or other
MGEDKKAGNKDAAGGDKKKDAGAGAAPQPIVLKVDLHCAGCANKVRKAIKHAPGVESVTPDMAXGKVVVTGPADAVELKERIEARAKKPVQIVSAGAGPPK

SEQ ID NO: 9875 - DNA, 1432 bp, Zea mays subsp. mays
  misc_feature (1)..(1432): Ceres Seq. ID no. 12382187
  misc_feature (1)..(1432): Ortholog of  Ceres SEQ ID NO 13655375 as cited in SEQ ID NO 63347
  misc_feature (1)..(1432): Ortholog of  Ceres SEQ ID NO 12626166 as cited in SEQ ID NO 64505
  misc_feature (1)..(1432): Ortholog of  Ceres SEQ ID NO 13654415 as cited in SEQ ID NO 68820
atgacaagtaaattagagattgatgcacgcagtagtaattaagacaggaatcgtaatccccccttgtttttggtttagtagtaaatctgcctgctgctccaagtagtagttaaaaaaacccagagaagcgcggtgggctgcgtataaatagccggccggccggaaagggggaaacgggcaggcaaacaaacaacacacactcgcgaggagcaggagcaggagcgatcaggacaacgctttggactcctggactggacctaccccgatggcgccagcctcctctccgatgagacagtaatccagcgagcgcgagtgagaggcaaccagcaaccatgaggccagacacggcggcctccgcctctccgactccgaagaagaaacccgacagtaaagccgcgctggacctcgcgtcgtggagcttcaacgtcaccacgtccgtcgggctcatcatggtcaacaaggctctaatggcgacgtacgggttcacgttcgccacgacgttaacggggctgcatttcgcgaccaccaccgtgatgaccctcgtgttccggtgggtcggcctgagccagccgtcgcagcttccgttaccggacctagccaagttcgtggtgttctccaacctgtccatcgtggggatgaacgtcagcctgatgtggaactccgtcggcttctaccaggtagccaagctgtgcatgatcccggcgtcgtgcctcctggaggtggtcttggaccgcgtgcactactcccgggacaccaggctcagcatcgcggtcgtgctcgctggagtggcggtgtgcaccgtcactgacgtgagcgtcaacgccagaggcctggtcgcggccgtcgtggctgtctggagcacggctctgcagcagtattatgttcatttcctccagcgcaagcactctctcaactcgttcagcctgctgggccacacggcgccggcgcaggcagggtcgctgctgctggcagggccgttcgttgactacctgctgacagggcaaagggtggaccacttcagcttctcgtctctcgctctgttgttcctcgcgctgtcgtgcttcatcgcgatcggggtcaacctgagccagttcatctgcatcggccgcttctccgccgtgtccttccaggtcctgggccacatgaagaccgtgctcgtcctctccctcggcttcctcttcttcggcaaggaaggcctcagcctccaggtcgtcgtcgggatggccctcgccgtcctcgggatggtgtggtacgggaacgcgtccgctaaaccgggcggcaaggagcgccgcggcaaagacctgccggtgagcctcaaacaagacaaggacgacactgacaaataatcatttgttatagttacaggtatacgtgtaatcgtttaatcacatggtgcaattgtttgccaaatcattgaacaatttcctgtggt

SEQ ID NO: 9876 - protein, 337 aa, Zea mays subsp. mays
  peptide (1)..(337): Ceres Seq. ID no. 12382188
MRPDTAASASPTPKKKPDSKAALDLASWSFNVTTSVGLIMVNKALMATYGFTFATTLTGLHFATTTVMTLVFRWVGLSQPSQLPLPDLAKFVVFSNLSIVGMNVSLMWNSVGFYQVAKLCMIPASCLLEVVLDRVHYSRDTRLSIAVVLAGVAVCTVTDVSVNARGLVAAVVAVWSTALQQYYVHFLQRKHSLNSFSLLGHTAPAQAGSLLLAGPFVDYLLTGQRVDHFSFSSLALLFLALSCFIAIGVNLSQFICIGRFSAVSFQVLGHMKTVLVLSLGFLFFGKEGLSLQVVVGMALAVLGMVWYGNASAKPGGKERRGKDLPVSLKQDKDDTDK

SEQ ID NO: 9877 - protein, 298 aa, Zea mays subsp. mays
  peptide (1)..(298): Ceres Seq. ID no. 12382189
MVNKALMATYGFTFATTLTGLHFATTTVMTLVFRWVGLSQPSQLPLPDLAKFVVFSNLSIVGMNVSLMWNSVGFYQVAKLCMIPASCLLEVVLDRVHYSRDTRLSIAVVLAGVAVCTVTDVSVNARGLVAAVVAVWSTALQQYYVHFLQRKHSLNSFSLLGHTAPAQAGSLLLAGPFVDYLLTGQRVDHFSFSSLALLFLALSCFIAIGVNLSQFICIGRFSAVSFQVLGHMKTVLVLSLGFLFFGKEGLSLQVVVGMALAVLGMVWYGNASAKPGGKERRGKDLPVSLKQDKDDTDK

SEQ ID NO: 9878 - protein, 292 aa, Zea mays subsp. mays
  peptide (1)..(292): Ceres Seq. ID no. 12382190
MATYGFTFATTLTGLHFATTTVMTLVFRWVGLSQPSQLPLPDLAKFVVFSNLSIVGMNVSLMWNSVGFYQVAKLCMIPASCLLEVVLDRVHYSRDTRLSIAVVLAGVAVCTVTDVSVNARGLVAAVVAVWSTALQQYYVHFLQRKHSLNSFSLLGHTAPAQAGSLLLAGPFVDYLLTGQRVDHFSFSSLALLFLALSCFIAIGVNLSQFICIGRFSAVSFQVLGHMKTVLVLSLGFLFFGKEGLSLQVVVGMALAVLGMVWYGNASAKPGGKERRGKDLPVSLKQDKDDTDK

SEQ ID NO: 9879 - DNA, 1499 bp, Zea mays subsp. mays
  misc_feature (1)..(1499): Ceres Seq. ID no. 12356783
  misc_feature (1)..(1499): Ortholog of  Ceres SEQ ID NO 14306059 as cited in SEQ ID NO 52249
  misc_feature (1)..(1499): Ortholog of  Ceres SEQ ID NO 15170479 as cited in SEQ ID NO 52835
  misc_feature (1)..(1499): Ortholog of  Ceres SEQ ID NO 13596087 as cited in SEQ ID NO 68336
agggccagttccgtccgacgcgtcgcaacaacccccagggctcaattgacgcgcgggggcgtttcggtcatccagtcatccccctcccctgccaaaggcgaagagcagaagcagaagcagcagcagcaggcgaagaggcagtggtagacatgccaaggtcatcagccggggcgtcatgcacagcagttgaccattctgagcagagcagaaaggatgatgaatatgagaggctggttacaagagctcaacatgcaacatctgatgttggcacgacaattttatctgagcaaccaaagtcaagatctttcatttggtggatgaaagttctgcttggctgcttccttcttatattagtgggctatgtcttcgtgaaatggggggtcccctttgtctttgagaaggttctcttgccaatcatgcaatgggaagccagtgcttttgggcgtccagtattagctattgttctcgttgcatctttggctctctttccagttattctagttccttctggaccttctatgtggttagcaggaatgatctttggatatggttggggtttcttgattataatggccgggagtactattggcatggtggttccatattggattggttcattgttccgtgaacgtctgcatgtatggctgacaaagtggcctcagcagatagcactaataaaactcgcgggtgaaggaaattggttccagcagtttcgggttgtcgcgcttttcagaatctcaccattcccatatacaatttttaattatgccgtgactgtgacagaaattaagttcaacccttatctatgtggttctgttgctggaatggtacctgaggccttcatttatatctacagtgggcgtttaatacgtacattggctgacatgaagtacggcaactataaaatgacaccagtggaaatagcatacaacgccatttccttcgtcatcgctatcgccctcacggtcgccttcacggtgtacgcgaagagagctctgggtgacataaaaagtccggacgatggcatcggtaaagacgaagaagatcacggcccaaatggctcaggggtgcgtatgaatcgtcgtcaggagcgtgccgacgcacgttacatagaactagatgatatgtgatggtgtgttggcccggatcttgcttggaaggaggcaccagtaggtcattaggtgcacggctacggtaggtagctagctatagtttacaagaggaggctaaaataatccacacccagctgacgtggtttgcgtgattcgtttcgtgtgctttgcccactgcactgccatactgtctgaatctgaaggtgcagggctactcactactgagttactgaccgagcgatgctgctctcaacgatgtttctgtgaccatcagcgtatcatccagtccttgatctgaagcctacactggagcttcatgttgaagcatacattggacttgagtagtacatttgtatataacgtaactgctaatagagttagcatatg

SEQ ID NO: 9880 - protein, 375 aa, Zea mays subsp. mays
  peptide (1)..(375): Ceres Seq. ID no. 12356784
GQFRPTRRNNPQGSIDARGRFGHPVIPLPCQRRRAEAEAAAAGEEAVVDMPRSSAGASCTAVDHSEQSRKDDEYERLVTRAQHATSDVGTTILSEQPKSRSFIWWMKVLLGCFLLILVGYVFVKWGVPFVFEKVLLPIMQWEASAFGRPVLAIVLVASLALFPVILVPSGPSMWLAGMIFGYGWGFLIIMAGSTIGMVVPYWIGSLFRERLHVWLTKWPQQIALIKLAGEGNWFQQFRVVALFRISPFPYTIFNYAVTVTEIKFNPYLCGSVAGMVPEAFIYIYSGRLIRTLADMKYGNYKMTPVEIAYNAISFVIAIALTVAFTVYAKRALGDIKSPDDGIGKDEEDHGPNGSGVRMNRRQERADARYIELDDM

SEQ ID NO: 9881 - protein, 326 aa, Zea mays subsp. mays
  peptide (1)..(326): Ceres Seq. ID no. 12356785
MPRSSAGASCTAVDHSEQSRKDDEYERLVTRAQHATSDVGTTILSEQPKSRSFIWWMKVLLGCFLLILVGYVFVKWGVPFVFEKVLLPIMQWEASAFGRPVLAIVLVASLALFPVILVPSGPSMWLAGMIFGYGWGFLIIMAGSTIGMVVPYWIGSLFRERLHVWLTKWPQQIALIKLAGEGNWFQQFRVVALFRISPFPYTIFNYAVTVTEIKFNPYLCGSVAGMVPEAFIYIYSGRLIRTLADMKYGNYKMTPVEIAYNAISFVIAIALTVAFTVYAKRALGDIKSPDDGIGKDEEDHGPNGSGVRMNRRQERADARYIELDDM

SEQ ID NO: 9882 - protein, 270 aa, Zea mays subsp. mays
  peptide (1)..(270): Ceres Seq. ID no. 12356786
MKVLLGCFLLILVGYVFVKWGVPFVFEKVLLPIMQWEASAFGRPVLAIVLVASLALFPVILVPSGPSMWLAGMIFGYGWGFLIIMAGSTIGMVVPYWIGSLFRERLHVWLTKWPQQIALIKLAGEGNWFQQFRVVALFRISPFPYTIFNYAVTVTEIKFNPYLCGSVAGMVPEAFIYIYSGRLIRTLADMKYGNYKMTPVEIAYNAISFVIAIALTVAFTVYAKRALGDIKSPDDGIGKDEEDHGPNGSGVRMNRRQERADARYIELDDM

SEQ ID NO: 9883 - DNA, 839 bp, Zea mays subsp. mays
  misc_feature (1)..(839): Ceres Seq. ID no. 12354220
  misc_feature (1)..(839): Ortholog of  Ceres SEQ ID NO 13584263 as cited in SEQ ID NO 63700
acagtctcgcagccgccgcgatctgctagcccccgaaccctagctcaatgggaaccgccgcttctccttctccctcactttccctagacacagccgcctcccgtcctgatcctccttccccggaggccaccgctacaccagccaaagaagatcaccagcactccgcctccgacgccgcgaccgccgcagctggcggcggcgcagacgatgcggcggcggctccttctgttggaggcggcgcggaagaggctgctgagacggtggtcatcgatgcctccgcggtggccagcggagcaggggagggggaggaggaggaggagcaaggggagtgcgggttctgtctcttcatgaagggcggcggctgcaaggacgagttcgtcgcgtgggagaagtgcgtggaggagacggatgccgcggatgccagcattgacgtcgtggagcggtgccaagacgtcacggccgcgctgcggaagtgcatggacgcgcacgccgcctactacgagcctatcctccgggccgagcgcgccatggctgcggacctcgaggcctttcaggcccaagaagccgcctccgactccgcggcgtcggaggaaggccagaaggaggcggcagcggcggccgaggcagcgccgcgtccgtcagacgaaggccagaataagcaggtggctgaggcggcagttgcggaggagagcagagatcctgcagcctgattgggcgaaaaaaggcagcggcgtcttcaattttttgtgagggatttgaggatatgaattccgtttgtaccttaggagagcatcaattaacattttgtgagggggatagatttctgtccttttctcttt

SEQ ID NO: 9884 - protein, 220 aa, Zea mays subsp. mays
  peptide (1)..(220): Ceres Seq. ID no. 12354221
MGTAASPSPSLSLDTAASRPDPPSPEATATPAKEDHQHSASDAATAAAGGGADDAAAAPSVGGGAEEAAETVVIDASAVASGAGEGEEEEEQGECGFCLFMKGGGCKDEFVAWEKCVEETDAADASIDVVERCQDVTAALRKCMDAHAAYYEPILRAERAMAADLEAFQAQEAASDSAASEEGQKEAAAAAEAAPRPSDEGQNKQVAEAAVAEESRDPAA

SEQ ID NO: 9885 - protein, 120 aa, Zea mays subsp. mays
  peptide (1)..(120): Ceres Seq. ID no. 12354222
MKGGGCKDEFVAWEKCVEETDAADASIDVVERCQDVTAALRKCMDAHAAYYEPILRAERAMAADLEAFQAQEAASDSAASEEGQKEAAAAAEAAPRPSDEGQNKQVAEAAVAEESRDPAA

SEQ ID NO: 9886 - protein, 113 aa, Zea mays subsp. mays
  peptide (1)..(113): Ceres Seq. ID no. 12354223
MPRMPALTSWSGAKTSRPRCGSAWTRTPPTTSLSSGPSAPWLRTSRPFRPKKPPPTPRRRRKARRRRQRRPRQRRVRQTKARISRWLRRQLRRRAEILQPDWAKKGSGVFNFL

SEQ ID NO: 9887 - DNA, 839 bp, Zea mays subsp. mays
  misc_feature (1)..(839): Ceres Seq. ID no. 12359809
  misc_feature (1)..(839): Ortholog of  Ceres SEQ ID NO 12624105 as cited in SEQ ID NO 61361
  misc_feature (1)..(839): Ortholog of  Ceres SEQ ID NO 14309166 as cited in SEQ ID NO 0
agcctctcgctctcccgccgacgcgcacgtcctccgcgccgagcccagaggcagacagaggacgcggccatggcgtccatcccgtgcaccttccagctgagcacggcggcgtcgaggagggtgtcgccgcgggtggcggcgcaggggagaggccaaggaggagggggagcggtgctgaggacgccgctgctgggcgcggggaggcggggcctggggtggctgcggccgtcgcggttgagccgcgtggtgccggcgagcgagagcgggcgggcgggtcccacctgctggttcaagttcggcaacaaggacgccgagggtgccggcatctacggcagccaggccagggacgacttcgaccgcgacgacgtcgagcagtacttcaactacatggggatgctggcggtggagggcacctacgacaagatggaggcgctgctgaaccaggacatccaccccgtggacatcctcctcatgctggcagcctccgagggcgaccgccccaagatcgaggagctgctccgcgccggcgccaggttcgacgtcaaggacgtcgacggccggacggcgctcgaccgggccaccgacgagaccagagagttcatcctcggcttcgccgccaagaaggcctgaacgaccatgtgcaggtcaatcgtgcccggttcttctggacatttggctgcatgtaactaaattcttcgttttctggaatcggtggagtgttcaaccgggggtgaacaagctgtttgcagaggtagctttccgtagtcagctgtattcttactgaagactgaggggtgtactgcgacctgccaaattgctcaataaggtcatgcttcgtt

SEQ ID NO: 9888 - protein, 227 aa, Zea mays subsp. mays
  peptide (1)..(227): Ceres Seq. ID no. 12359810
PLALPPTRTSSAPSPEADRGRGHGVHPVHLPAEHGGVEEGVAAGGGAGERPRRRGSGAEDAAAGRGEAGPGVAAAVAVEPRGAGERERAGGSHLLVQVRQQGRRGCRHLRQPGQGRLRPRRRRAVLQLHGDAGGGGHLRQDGGAAEPGHPPRGHPPHAGSLRGRPPQDRGAAPRRRQVRRQGRRRPDGARPGHRRDQRVHPRLRRQEGLNDHVQVNRARFFWTFGCM

SEQ ID NO: 9889 - protein, 209 aa, Zea mays subsp. mays
  peptide (1)..(209): Ceres Seq. ID no. 12359811
SLSLSRRRARPPRRAQRQTEDAAMASIPCTFQLSTAASRRVSPRVAAQGRGQGGGGAVLRTPLLGAGRRGLGWLRPSRLSRVVPASESGRAGPTCWFKFGNKDAEGAGIYGSQARDDFDRDDVEQYFNYMGMLAVEGTYDKMEALLNQDIHPVDILLMLAASEGDRPKIEELLRAGARFDVKDVDGRTALDRATDETREFILGFAAKKA

SEQ ID NO: 9890 - protein, 186 aa, Zea mays subsp. mays
  peptide (1)..(186): Ceres Seq. ID no. 12359812
MASIPCTFQLSTAASRRVSPRVAAQGRGQGGGGAVLRTPLLGAGRRGLGWLRPSRLSRVVPASESGRAGPTCWFKFGNKDAEGAGIYGSQARDDFDRDDVEQYFNYMGMLAVEGTYDKMEALLNQDIHPVDILLMLAASEGDRPKIEELLRAGARFDVKDVDGRTALDRATDETREFILGFAAKKA

SEQ ID NO: 9891 - DNA, 896 bp, Zea mays subsp. mays
  misc_feature (1)..(896): Ceres Seq. ID no. 12354413
  misc_feature (1)..(896): Ortholog of  Ceres SEQ ID NO 15178027 as cited in SEQ ID NO 55634
aaagattacgctgtcagggccctggtcaacgctgtcgaccatcttggcacagtggcctacaagctgacagacctatacgaagagcaggcttcagaaataacaaccctcgagttgaaagtagcatgcttgaaccagcaagtccgtacctgccagacatacacggacaaagaaggcctcagacaacagcagatgatgggggctgccagaagacaccataaccattacatcgtaccatatgcgggaaacaaaagaatgcaggccttctctgttacgcaagccgatgctgatttcgacccaacgccaaggcctttctcttcagcaaggacccttgagtggcatttggtttccgagaagaattccaaaaccagtagaccagatcagtctgaaattgccttaggagaaacaaaaactactaaggcttcgtcaagtggtttccgccttctcggcaaggaatcatctgcatctcccttgtccaggaatgtgcagtccaacataaccagtttggatattgtcagtgccggcatgaaggatcagcccacgaccaggcacttgtcatcgttcagttctttggacaaccccaggggccgacaaatccagaaggctccgcttcgcacaaaaagtatgctagccgctttctttgtcaaacacagatcagcaaagatgaaaaacgtctctgtgcgttgatcaactgcaagccaagcctgtattttgctccagccaaaccgacgtggaagtgttaagggcatgagatgtatacatgtttgtatatggtatttgggtcttgtatgctagtgctctagagataaacctttacggatgcctttcaatctagagtctttggcatcttgctcatgaccttaatgtaatgatttatatggatatatattactagtttt

SEQ ID NO: 9892 - protein, 227 aa, Zea mays subsp. mays
  peptide (1)..(227): Ceres Seq. ID no. 12354414
KDYAVRALVNAVDHLGTVAYKLTDLYEEQASEITTLELKVACLNQQVRTCQTYTDKEGLRQQQMMGAARRHHNHYIVPYAGNKRMQAFSVTQADADFDPTPRPFSSARTLEWHLVSEKNSKTSRPDQSEIALGETKTTKASSSGFRLLGKESSASPLSRNVQSNITSLDIVSAGMKDQPTTRHLSSFSSLDNPRGRQIQKAPLRTKSMLAAFFVKHRSAKMKNVSVR

SEQ ID NO: 9893 - protein, 164 aa, Zea mays subsp. mays
  peptide (1)..(164): Ceres Seq. ID no. 12354415
MMGAARRHHNHYIVPYAGNKRMQAFSVTQADADFDPTPRPFSSARTLEWHLVSEKNSKTSRPDQSEIALGETKTTKASSSGFRLLGKESSASPLSRNVQSNITSLDIVSAGMKDQPTTRHLSSFSSLDNPRGRQIQKAPLRTKSMLAAFFVKHRSAKMKNVSVR

SEQ ID NO: 9894 - protein, 163 aa, Zea mays subsp. mays
  peptide (1)..(163): Ceres Seq. ID no. 12354416
MGAARRHHNHYIVPYAGNKRMQAFSVTQADADFDPTPRPFSSARTLEWHLVSEKNSKTSRPDQSEIALGETKTTKASSSGFRLLGKESSASPLSRNVQSNITSLDIVSAGMKDQPTTRHLSSFSSLDNPRGRQIQKAPLRTKSMLAAFFVKHRSAKMKNVSVR

SEQ ID NO: 9895 - DNA, 1209 bp, Zea mays subsp. mays
  misc_feature (1)..(1209): Ceres Seq. ID no. 12374731
  misc_feature (1)..(1209): Ortholog of  Ceres SEQ ID NO 14310616 as cited in SEQ ID NO 55699
  misc_feature (1)..(1209): Ortholog of  Ceres SEQ ID NO 15173907 as cited in SEQ ID NO 62356
  misc_feature (1)..(1209): Ortholog of  Ceres SEQ ID NO 13596519 as cited in SEQ ID NO 62572
  misc_feature (1)..(1209): Ortholog of  Ceres SEQ ID NO 12625108 as cited in SEQ ID NO 68102
ctcactgccaaccacacgttcccaagccagccattggttggtagcaagccaagctaatcaagttagctttagatacccgctcccgctcttcttccctccgacgaaggcagctgacgacacagcaggctagcttcggagttcggagcactcagccatggccattgccggcgctctcctcctcctgctcggactcctcgcgcgggaggccgctgccggcggggtggcagagcgcgcacgccacgttctacggcggcggggacgcgtccggcacaatgggcggcgcttgcgggtacggcaacctgtacagcacggggtacggcacgagcacggcggcgctgagcacggcgctgttcaacgacggcgcggcgtgcgggtcctgctacgagctgcggtgcgacaacgacgggcggtggtgcctgccgggcaccatcaccgtcacggccaccaacttctgcccgcccaactacggcctccccagcgacgacggcggctggtgcaacccgccgcgcccgcacttcgacatggccgagccggccttcctccgcatcgcgcagtaccgcgccggcatcgtgcccgtcgcgttcaggagagtgccgtgcgtgaagaagggcggcatccggttcaccatcaacgggcactcctacttcaacctggtgctggtgaccaacgtggcgggcgccggcgacgtgcgctccgtctccatccggggctcccgcacggggtggcagcccatgtcccggaactggggccagaactggcagagcaactcgtacctggacaggcaggcgctctcgttccaggtcaccgccagcgacggccgcaccgtcaccagcaacggcgccgtccccgctggctggcagttcagccagaccttcgagggcggccagttctgaggatgaacagctagcgcgcgcgcggctagctattggataattaattacggtactgtcgatttggtttttttgccttgttttttttttgcgcgacgacgacgaagaggaggatgaagacgaagatgaagacgaggcctctcttcgggtatattgaaggaaggagaaggcttttgcgcgcgctatgctgaggctgctaatctagcacccgcctagacgtttcccttttctctggtggattacggactggatcggaccaaagatcgatccagctcctagtactaataatatagttgtacttgagaaaatgaataattgc

SEQ ID NO: 9896 - protein, 250 aa, Zea mays subsp. mays
  peptide (1)..(250): Ceres Seq. ID no. 12374732
MAIAGALLLLLGLLAREAAAGGVAERARHVLRRRGRVRHNGRRLRVRQPVQHGVRHEHGGAEHGAVQRRRGVRVLLRAAVRQRRAVVPAGHHHRHGHQLLPAQLRPPQRRRRLVQPAAPALRHGRAGLPPHRAVPRRHRARRVQESAVREEGRHPVHHQRALLLQPGAGDQRGGRRRRALRLHPGLPHGVAAHVPELGPELAEQLVPGQAGALVPGHRQRRPHRHQQRRRPRWLAVQPDLRGRPVLRMNS

SEQ ID NO: 9897 - protein, 206 aa, Zea mays subsp. mays
  peptide (1)..(206): Ceres Seq. ID no. 12374733
MGGACGYGNLYSTGYGTSTAALSTALFNDGAACGSCYELRCDNDGRWCLPGTITVTATNFCPPNYGLPSDDGGWCNPPRPHFDMAEPAFLRIAQYRAGIVPVAFRRVPCVKKGGIRFTINGHSYFNLVLVTNVAGAGDVRSVSIRGSRTGWQPMSRNWGQNWQSNSYLDRQALSFQVTASDGRTVTSNGAVPAGWQFSQTFEGGQF

SEQ ID NO: 9898 - DNA, 1139 bp, Zea mays subsp. mays
  misc_feature (1)..(1139): Ceres Seq. ID no. 12355294
  misc_feature (1)..(1139): Ortholog of  Ceres SEQ ID NO 14305750 as cited in SEQ ID NO 52458
  misc_feature (1)..(1139): Ortholog of  Ceres SEQ ID NO 12608276 as cited in SEQ ID NO 57871
  misc_feature (1)..(1139): Ortholog of  Ceres SEQ ID NO 13598492 as cited in SEQ ID NO 63882
  misc_feature (1)..(1139): Ortholog of  Ceres SEQ ID NO 13657914 as cited in SEQ ID NO 66230
  misc_feature (1)..(1139): Ortholog of  Ceres SEQ ID NO 13595877 as cited in SEQ ID NO 67702
  misc_feature (1)..(1139): Ortholog of  Ceres SEQ ID NO 13622667 as cited in SEQ ID NO 0
aacggctcgaccgcactgccagagcagcgtaaagccagggtagggtaacacaatgtcgagcgtcatgacggccgcgaaagaggacgatatggtcgtgcacgacttcgccccgctactccttgtatacaagagcgggcgcctggaacgcccactggccatgccggcggtctcgtccggccgcgacgtcgacacgggcgtcgtgtccaaggacgtggccctctcgcaggactccttatcggtgcgcctgtacctcccgcccgccgctaccacagcgcccgaaaggaggctcccagtggtcgtgtacttccacggcggtggcttcgtcgtcgggtcggccaggtccgccgtgtaccaccgctgcctgaacgacctcgccgccgcttgccccgctgtggccgtttccgtcgactaccgccttgcaccagagcacccggtgcccgccgcgtacgagggactccctggcggccctcaagtgggcgttggcgccgtcgtccgcgaccgactcgtggcttgcagtgcatggcgaccctgcgcgcgtgttcctcgccggcgacagcgcggggggcaacatctgccaccaccttgccatgcacccagacatccgggacgctggcctcaggggcgtcgtgctcatccacccctggttctggggcagggaccccatccctggggagccaccgctgaaccccgcctcaaagcagcagaagggcctatgggagttcgtgtgccccgaggcggtggacggcgcggacgaccccaggatgaacccgacagcgccgagcgccccagggttggacaacctggcgtgccagaaggtgatggtgtgcgtggccgagggggacatccttcgatggcgcgggaagctgtacgcagaggcggtggcgcgggcgaggggcaccgaaaaggacgtggagctattcgaatccgaaggggtcgggcatgtgttctacctgctggagcccgtgcaggagaaggccaaggagctattggacaagatcgcgacgtttgtcaggacggaatgaggagggatgcattggtggtggtggtccggtggacactgtcacactggacatcatgtatcgttaacgtactactactacatactccatccgttctttttatttatcgttgcttagtcc

SEQ ID NO: 9899 - protein, 362 aa, Zea mays subsp. mays
  peptide (1)..(362): Ceres Seq. ID no. 12355295
MSSVMTAAKEDDMVVHDFAPLLLVYKSGRLERPLAMPAVSSGRDVDTGVVSKDVALSQDSLSVRLYLPPAATTAPERRLPVVVYFHGGGFVVGSARSAVYHRCLNDLAAACPAVAVSVDYRLAPEHPVPAAYEGLPGGPQVGVGAVVRDRLVACSAWRPCARVPRRRQRGGQHLPPPCHAPRHPGRWPQGRRAHPPLVLGQGPHPWGATAEPRLKAAEGPMGVRVPRGGGRRGRPQDEPDSAERPRVGQPGVPEGDGVRGRGGHPSMAREAVRRGGGAGEGHRKGRGAIRIRRGRACVLPAGARAGEGQGAIGQDRDVCQDGMRRDALVVVVRWTLSHWTSCIVNVLLLHTPSVLFIYRCLV

SEQ ID NO: 9900 - protein, 358 aa, Zea mays subsp. mays
  peptide (1)..(358): Ceres Seq. ID no. 12355296
MTAAKEDDMVVHDFAPLLLVYKSGRLERPLAMPAVSSGRDVDTGVVSKDVALSQDSLSVRLYLPPAATTAPERRLPVVVYFHGGGFVVGSARSAVYHRCLNDLAAACPAVAVSVDYRLAPEHPVPAAYEGLPGGPQVGVGAVVRDRLVACSAWRPCARVPRRRQRGGQHLPPPCHAPRHPGRWPQGRRAHPPLVLGQGPHPWGATAEPRLKAAEGPMGVRVPRGGGRRGRPQDEPDSAERPRVGQPGVPEGDGVRGRGGHPSMAREAVRRGGGAGEGHRKGRGAIRIRRGRACVLPAGARAGEGQGAIGQDRDVCQDGMRRDALVVVVRWTLSHWTSCIVNVLLLHTPSVLFIYRCLV

SEQ ID NO: 9901 - protein, 350 aa, Zea mays subsp. mays
  peptide (1)..(350): Ceres Seq. ID no. 12355297
MVVHDFAPLLLVYKSGRLERPLAMPAVSSGRDVDTGVVSKDVALSQDSLSVRLYLPPAATTAPERRLPVVVYFHGGGFVVGSARSAVYHRCLNDLAAACPAVAVSVDYRLAPEHPVPAAYEGLPGGPQVGVGAVVRDRLVACSAWRPCARVPRRRQRGGQHLPPPCHAPRHPGRWPQGRRAHPPLVLGQGPHPWGATAEPRLKAAEGPMGVRVPRGGGRRGRPQDEPDSAERPRVGQPGVPEGDGVRGRGGHPSMAREAVRRGGGAGEGHRKGRGAIRIRRGRACVLPAGARAGEGQGAIGQDRDVCQDGMRRDALVVVVRWTLSHWTSCIVNVLLLHTPSVLFIYRCLV

SEQ ID NO: 9902 - DNA, 1330 bp, Zea mays subsp. mays
  misc_feature (1)..(1330): Ceres Seq. ID no. 12354315
  misc_feature (1)..(1330): Ortholog of  Ceres SEQ ID NO 15168436 as cited in SEQ ID NO 56974
attccgggtgctcaatccactagaaccgaacaggccctaaatagatccgtagccgtagcctggcgcgcacattgcagaaagatcgagcggaaggtcggcagcaggcgcatagatgcaggggtgagggcacgggcggcagcgcttgacgggcgacgagtaaaccctaacgctttgattgcgggcgtcgtcgtctgagccagtcccgagtcgatacgctgtcatgcctgtcaatcctcctccgccacctcctgggtcgtcgtctttggctccggcgggggccagctacttcccgctccctttccacctgcagcagcaccagccgccgccgccgcaggtgccgccgcctatggcggcgagcagctatcagcagtatcagcaacagctgcatcaggcccatcagctcttccagcgggacgcgcagaccataacccccgaagcgctgcagagcgtcaaggctgccctcgccaccagcgacgtcctcgaccccgtcgccgccgccaacgccaggctctccgatccctctaccagcaagaagcccatcccccgtcgcgctgccggacaatcctgggaggatcctaccctcactgaatggcccgaaaacgactaccggctgttctgtggagatctaggcaacgaagttaatgatgatgttctctccaaagcattttcacggtttccatcctttaacatggcaagggttgttagagataagaggactggcaaaactaaaggctatggatttgtgagcttttcaaaccctactgacctggctgcagcaataaaagagatgaatggaaagtatgttgggaaccgccctattaaattgcgtaagagtaactggaaggagaggacagatgttgaggctctggaaagacaaaagaatcatgtcaagaggaagcctaaaattcccaagaagactattcttcacaagtagagatacaaaggccctaccgagggtgaatgccagctcatgtgctgccttgggatgatgctaccttctggaatctctttactctctgcaatgctcggggtggaatcacgcaatgctcggggtggaatcacacgcaagggctgttgtttcatgtaaggtgtagtttggaaacttaaattcttttgggatacctgtcttttatcaggatgagtaacccagggatataatttaaataagacatttagttatttaggagatggtttctctctctggtttgacttccccttccaaactaggtctaaggccatcttcagcagatcgtgtaaatggacgtgtaaagtactgttttgcattgtatattgtaactagttgtgtgcccgtgcgttgcaacaggaacat

SEQ ID NO: 9903 - protein, 237 aa, Zea mays subsp. mays
  peptide (1)..(237): Ceres Seq. ID no. 12354316
MPVNPPPPPPGSSSLAPAGASYFPLPFHLQQHQPPPPQVPPPMAASSYQQYQQQLHQAHQLFQRDAQTITPEALQSVKAALATSDVLDPVAAANARLSDPSTSKKPIPRRAAGQSWEDPTLTEWPENDYRLFCGDLGNEVNDDVLSKAFSRFPSFNMARVVRDKRTGKTKGYGFVSFSNPTDLAAAIKEMNGKYVGNRPIKLRKSNWKERTDVEALERQKNHVKRKPKIPKKTILHK

SEQ ID NO: 9904 - protein, 195 aa, Zea mays subsp. mays
  peptide (1)..(195): Ceres Seq. ID no. 12354317
MAASSYQQYQQQLHQAHQLFQRDAQTITPEALQSVKAALATSDVLDPVAAANARLSDPSTSKKPIPRRAAGQSWEDPTLTEWPENDYRLFCGDLGNEVNDDVLSKAFSRFPSFNMARVVRDKRTGKTKGYGFVSFSNPTDLAAAIKEMNGKYVGNRPIKLRKSNWKERTDVEALERQKNHVKRKPKIPKKTILHK

SEQ ID NO: 9905 - DNA, 1031 bp, Zea mays subsp. mays
  misc_feature (1)..(1031): Ceres Seq. ID no. 12367726
  misc_feature (1)..(1031): Ortholog of  Ceres SEQ ID NO 13595000 as cited in SEQ ID NO 55912
gtcggacgaggtaaccatggccgcggggggcaccgccgacttcttctaccgcgagtcgcagcgtctgggctacgtcgccccgctctgcgtttaagctgatccagatgcagaagcagcacaagctcatcgcgccgggcgccgctgtactcgacctcggctgcgcccccggcgcgtggcttcaggtggcttgtcagaacctgggtcccctcgagaagggtggcatcgtcgtcggcgtcgatgttaagaaggtgaaagtgccctctgcgcactgtgactcacgggtcaggacggtctgtgcagatgtcatgacgctgatgaagcggcaggctcgggcaatgtcgccacaggaacgaggattctctgtgatactgtcagacatgtgccccccagtttcagggatcacgactaaagatggagctatatcttgtgagttgggcatgcacgctctctcgttggcagtagggaagataaagttaaaagattctaattacagtgataccctagagaagtatctgagctccactgagcctgagtctgacgaggatggcgttcttcgacgtggaggcaacctggtagtgaagtttcttgagaatgaggacatatcagggtttggcaaattctgcaaggtgaagttcaagaaagtatcgttgttgagacccaaggcgactcgacctagctcgagggagatctacatgatctgcgaaggtttgcggtagaaaggagggctcttcagaaggcaagcgaagactccaagaagctaggtcagttgagttgccctgaactgggcgctgttagttctagcctgctggtgcaggtgctggctgattggcaatgtgatacagctgtttgatgctgatagcctcccagagcaagttaccacaaagctttgtgtgattgaaccatgctagtagttcgtctagatgttacctgtaataattttgttgaactgtgatactagttcgtctaggagaaacaagcatttgacttgagccctttctgagaacctgaaacacccttgctttttatgttgc

SEQ ID NO: 9906 - protein, 203 aa, Zea mays subsp. mays
  peptide (1)..(203): Ceres Seq. ID no. 12367727
MQKQHKLIAPGAAVLDLGCAPGAWLQVACQNLGPLEKGGIVVGVDVKKVKVPSAHCDSRVRTVCADVMTLMKRQARAMSPQERGFSVILSDMCPPVSGITTKDGAISCELGMHALSLAVGKIKLKDSNYSDTLEKYLSSTEPESDEDGVLRRGGNLVVKFLENEDISGFGKFCKVKFKKVSLLRPKATRPSSREIYMICEGLR

SEQ ID NO: 9907 - protein, 136 aa, Zea mays subsp. mays
  peptide (1)..(136): Ceres Seq. ID no. 12367728
MTLMKRQARAMSPQERGFSVILSDMCPPVSGITTKDGAISCELGMHALSLAVGKIKLKDSNYSDTLEKYLSSTEPESDEDGVLRRGGNLVVKFLENEDISGFGKFCKVKFKKVSLLRPKATRPSSREIYMICEGLR

SEQ ID NO: 9908 - protein, 133 aa, Zea mays subsp. mays
  peptide (1)..(133): Ceres Seq. ID no. 12367729
MKRQARAMSPQERGFSVILSDMCPPVSGITTKDGAISCELGMHALSLAVGKIKLKDSNYSDTLEKYLSSTEPESDEDGVLRRGGNLVVKFLENEDISGFGKFCKVKFKKVSLLRPKATRPSSREIYMICEGLR

SEQ ID NO: 9909 - DNA, 1112 bp, Zea mays subsp. mays
  misc_feature (1)..(1112): Ceres Seq. ID no. 13493585
  misc_feature (1)..(1112): Ortholog of  Ceres SEQ ID NO 15180273 as cited in SEQ ID NO 0
cttccctagaacatcctaatcgaaaaaccagccactagctaggacgtcgctgcttgcttccacgcctccttacggtttatccaagcacagcgagagacctttgcgcgtgtgcgctctcgttcgagctagcagcggcggcatgctgacgaggcggcacggagggttccggctcggccggaagctgctcagcgtctggcgctgggcgctctgccgccgccggcgccgccgcgttcgcggccgcgggtacctccgcctgcagccgtgccaacgaggaggaggcaccaccaaatccccgtccccgtcccccatggcggcgcatgcagtggtaagcatcaagatgatgcagcagcagcagcagaagcacgacgactctgctggctcgccgcggatgctcacgtgggggcggtcgctggcgcggcgggtgaggctcctgcgccggcgcgggggaggaggagggaaggaccggctgctggaggacgccgccgcggatgccaccacgcccaaggggcaggtggccgtgtacgtggtcggcgggggcgagtcgatgcgctacgtggtccccgtggtgtacttcaaccacccgctcttcggggagctgctgcgcgaggccgaggaggagttcggcttccagcaccccggcgggatcaccatcccgtgcgcggcctcgcggttcgagcgcgccgccgccgtggccgccgcaggcggcggcgccgccgccgggaagaaggtgccttctgtctggtggtagcagcacgtggccacacggtggccggtgtacatacatacacacgtgcatgcccatcaggatcaggccgcagccggccctcaggaggatcccgatcgattcccatgggaaatggggactgacgatccttctatatattttttctctccttctcgtttgacttttcctttttgccctcttgcgccgtttgcttgtgtggattgagcatgtgcatgggatgcgaggaggatggatagttgtagtttgtttgagagatgaacaaggcttttttttaatttagggtcagcataaacatgttcccattccccccccaacttgcaaagtccatcatcatatatatccatttattagagagcatctaatatgc

SEQ ID NO: 9910 - protein, 202 aa, Zea mays subsp. mays
  peptide (1)..(202): Ceres Seq. ID no. 13493586
MLTRRHGGFRLGRKLLSVWRWALCRRRRRRVRGRGYLRLQPCQRGGGTTKSPSPSPMAAHAVVSIKMMQQQQQKHDDSAGSPRMLTWGRSLARRVRLLRRRGGGGGKDRLLEDAAADATTPKGQVAVYVVGGGESMRYVVPVVYFNHPLFGELLREAEEEFGFQHPGGITIPCAASRFERAAAVAAAGGGAAAGKKVPSVWW

SEQ ID NO: 9911 - protein, 146 aa, Zea mays subsp. mays
  peptide (1)..(146): Ceres Seq. ID no. 13493587
MAAHAVVSIKMMQQQQQKHDDSAGSPRMLTWGRSLARRVRLLRRRGGGGGKDRLLEDAAADATTPKGQVAVYVVGGGESMRYVVPVVYFNHPLFGELLREAEEEFGFQHPGGITIPCAASRFERAAAVAAAGGGAAAGKKVPSVWW

SEQ ID NO: 9912 - protein, 138 aa, Zea mays subsp. mays
  peptide (1)..(138): Ceres Seq. ID no. 13493588
MPPRPRGRWPCTWSAGASRCATWSPWCTSTTRSSGSCCARPRRSSASSTPAGSPSRARPRGSSAPPPWPPQAAAPPPGRRCLLSGGSSTWPHGGRCTYIHTCMPIRIRPQPALRRIPIDSHGKWGLTILLYIFSLLLV

SEQ ID NO: 9913 - DNA, 1032 bp, Zea mays subsp. mays
  misc_feature (1)..(1032): Ceres Seq. ID no. 12415130
  misc_feature (1)..(1032): Ortholog of  Ceres SEQ ID NO 13594163 as cited in SEQ ID NO 60426
agctagctcgctgtggcaggctggcagcatgttccgatctgccgtggcagcgtctcgtcagggccagcgggaagagtacggccgacccagccgccgccgcgtccgctttcttcctcagtcgcttctccgcggcgggccgggccgccatcgccacagaggctggctggaaaggtagcgctgatcatcggcagggcaactggggcgccacgtcgccgcggagctgagcctgctgggggggcccggcccggcggcggccgtccactacacccgctgcgacgtgaccgacgaggcgcaggtcgcggcggcggtggacctggccgtggagctgcacggccgcctcgacgtgatgctcagcaacgccggcatcagcggcagcctggcgccggcccccgtggcggcgctggacctggccgacttcgaccgcgtcatggccgtgaacgcccgcgccgcggtggcgggcgtcaagcacgcggcgcgcgtcatggtgccccgccgcgccggcagcatcgtgtgcacggccagcgtggccggcgtgctgggcggcgtcgcgctgccgccctacagcgtgtccaaggccgccgtgctgggcctggtgcgcgccgtggccgggcagntcgcgcgntcgggcgtccgcgtcaacgccatntcgcccacctacatccccacgccgctcgtcatgggcgccatggccgagtggttccccggcgccaccgccgaggagcgcaggcggatcgtggagaaggacatgaacgagatggacggccccgtgctccaggtggaggacgtggccagcgccgccctgtacctggcgtccgatgagtccaagtgtgtcaatggccacaacctcgtcgtcgacggcggcttcacggtggggaaggcgcccaatatgccgccgcctggaaactactgagcagctaccacttgccaatctaaaggcacggtggatgactttctattgagcatttctttttcttttgcgattggaaaacttaggtaatatagttaaaagaactcgatcacgcgttttctttc

SEQ ID NO: 9914 - protein, 187 aa, Zea mays subsp. mays
  peptide (1)..(187): Ceres Seq. ID no. 12415131
  misc_feature (90)..(90): Xaa is any aa, unknown or other
  misc_feature (92)..(92): Xaa is any aa, unknown or other
  misc_feature (100)..(100): Xaa is any aa, unknown or other
MLSNAGISGSLAPAPVAALDLADFDRVMAVNARAAVAGVKHAARVMVPRRAGSIVCTASVAGVLGGVALPPYSVSKAAVLGLVRAVAGQXAXSGVRVNAXSPTYIPTPLVMGAMAEWFPGATAEERRRIVEKDMNEMDGPVLQVEDVASAALYLASDESKCVNGHNLVVDGGFTVGKAPNMPPPGNY

SEQ ID NO: 9915 - protein, 160 aa, Zea mays subsp. mays
  peptide (1)..(160): Ceres Seq. ID no. 12415132
  misc_feature (63)..(63): Xaa is any aa, unknown or other
  misc_feature (65)..(65): Xaa is any aa, unknown or other
  misc_feature (73)..(73): Xaa is any aa, unknown or other
MAVNARAAVAGVKHAARVMVPRRAGSIVCTASVAGVLGGVALPPYSVSKAAVLGLVRAVAGQXAXSGVRVNAXSPTYIPTPLVMGAMAEWFPGATAEERRRIVEKDMNEMDGPVLQVEDVASAALYLASDESKCVNGHNLVVDGGFTVGKAPNMPPPGNY

SEQ ID NO: 9916 - protein, 142 aa, Zea mays subsp. mays
  peptide (1)..(142): Ceres Seq. ID no. 12415133
  misc_feature (45)..(45): Xaa is any aa, unknown or other
  misc_feature (47)..(47): Xaa is any aa, unknown or other
  misc_feature (55)..(55): Xaa is any aa, unknown or other
MVPRRAGSIVCTASVAGVLGGVALPPYSVSKAAVLGLVRAVAGQXAXSGVRVNAXSPTYIPTPLVMGAMAEWFPGATAEERRRIVEKDMNEMDGPVLQVEDVASAALYLASDESKCVNGHNLVVDGGFTVGKAPNMPPPGNY

SEQ ID NO: 9917 - DNA, 1180 bp, Zea mays subsp. mays
  misc_feature (1)..(1180): Ceres Seq. ID no. 12357243
  misc_feature (1)..(1180): Ortholog of  Ceres SEQ ID NO 14313959 as cited in SEQ ID NO 57842
attcctctccgccccctcccaccccacccgcttctaggacgcagcagcgcacccccgatcctcgcctgtcgcctccatctccattcgcaggcctgagaccctcgcctgcaccgcgctgccgccagccatgggaatggggcctctgcgagaacgccgcgtcggccgccgctgagtccgcggccttgccggaggccggcgccgcctcggcagcgggctcgtacgcggtgctgcagtgcggcgaggactcggagtacgtgcggcagaagtacggcggctacttcgccgtcttccgcgcgctgctggaggaggacggcgagagctggcgcgtgtaccgcgccgtcggcggggagctccccaccgacgccgaggccggccggcttcgacgggttcgtcatctccgggagctgctccgacgcgcacggcgacgagccctggatcctggacctcgtcggcctcatccgccgcctccacgccgccggcaagcgcatcctcggcgtctgcttcggccaccagatcctgtgccgggcgctgggcgggcgcaccgggcggtcgaccaagggctgggacatcggggtgagctgcatccacccgacggcggcggcggcgcggctgttcgcgccgctgaagctgccggtgcacatgccggtgatcgagttccaccacgacgaggtgtgggagctgcccgccggcgccgaggtgctggcgcggtcggaccagacccgcgtggagatgttccgcctgggggaccgcgccatgggcgtccagggccacccggagtacagcaaggacatcctcatgagcatcgccgaccgcctcctccggcataaccacatcctggactgccaggtggacgtggccaaggcgagcttcgacgtgcggcagccggacaaggagctgtggaagaaggtgtgcaggggcttcctcaaggggaggctgcaggcgctatagcaattccactaaccgctgcagaggaggaaattgggatgtcttaggttaatttttaattcacccttgttttgtgcttcagagctcaagagttgtacataaactactattgtccgaagcattaataaactcaacaacatcgttctcgtactgcctgctgtttctgtgcctcgtcgacagtctcagcatctgtcattggcgtatctggtgaacgatgtcgttggaactgattttc

SEQ ID NO: 9918 - protein, 274 aa, Zea mays subsp. mays
  peptide (1)..(274): Ceres Seq. ID no. 12357244
SSPPPPTPPASRTQQRTPDPRLSPPSPFAGLRPSPAPRCRQPWEWGLCENAASAAAESAALPEAGAASAAGSYAVLQCGEDSEYVRQKYGGYFAVFRALLEEDGESWRVYRAVGGELPTDAEAGRLRRVRHLRELLRRARRRALDPGPRRPHPPPPRRRQAHPRRLLRPPDPVPGAGRAHRAVDQGLGHRGELHPPDGGGGAAVRAAEAAGAHAGDRVPPRRGVGAARRRRGAGAVGPDPRGDVPPGGPRHGRPGPPGVQQGHPHEHRRPPPPA

SEQ ID NO: 9919 - DNA, 901 bp, Zea mays subsp. mays
  misc_feature (1)..(901): Ceres Seq. ID no. 12349401
  misc_feature (1)..(901): Ortholog of  Ceres SEQ ID NO 13597582 as cited in SEQ ID NO 65348
aataaataaggaaaattctgaaggagtaatattgcttggtcatagtactggatgccaggatattgtgcattatatgcgcacaaactttgcctgttcgaaagcggtttctggggtcatcttgcaggccccagtaagtgacagggagtatagagcaactcttccggaaacagctgaaatgatagacctggcagccaaactgattagcgagggtcgtggaatggatttgatgcctagaaaagcaaactcagatgctcctattactgcctacaggtaccactccctttgttcatatatgggtgatgatgacatgttcagttcagatctaagtgaagatcagctgaggcagagacttggtcatatgtcaatcacacagtgccaggttattttttcaatgggggatgaatatgtacctgaatatgttgataagagggctctactagacaggctatgtagggcgctgggaggtgcagagaaagtcgagatagaatggggaaaccatgctctgtccaacagagtgcaagaagcagttgtggccattgtagattttgtcaagagggaggggcccaaaggctgggacgacccatggagctagatacagcagttataatctcatttgtaactagtttgtgcttttcctcttctctcttttctccaattgtaacatctttcttttgcattattattggtccatttttcaatagtgatatgctatttttcttataaccccctcccccaaacatgcatcgcgttctcattctagtatggtgtatcacatatgtaaattgcgttaggaatcttgattatcaggctgtctttggtggatcatgtaaaattggagttgtgggaacaaggagctgttggagacggcatcagatcaacttcgtgcaaacttcagttttgg

SEQ ID NO: 9920 - protein, 196 aa, Zea mays subsp. mays
  peptide (1)..(196): Ceres Seq. ID no. 12349402
INKENSEGVILLGHSTGCQDIVHYMRTNFACSKAVSGVILQAPVSDREYRATLPETAEMIDLAAKLISEGRGMDLMPRKANSDAPITAYRYHSLCSYMGDDDMFSSDLSEDQLRQRLGHMSITQCQVIFSMGDEYVPEYVDKRALLDRLCRALGGAEKVEIEWGNHALSNRVQEAVVAIVDFVKREGPKGWDDPWS

SEQ ID NO: 9921 - protein, 172 aa, Zea mays subsp. mays
  peptide (1)..(172): Ceres Seq. ID no. 12349403
MRTNFACSKAVSGVILQAPVSDREYRATLPETAEMIDLAAKLISEGRGMDLMPRKANSDAPITAYRYHSLCSYMGDDDMFSSDLSEDQLRQRLGHMSITQCQVIFSMGDEYVPEYVDKRALLDRLCRALGGAEKVEIEWGNHALSNRVQEAVVAIVDFVKREGPKGWDDPWS

SEQ ID NO: 9922 - protein, 138 aa, Zea mays subsp. mays
  peptide (1)..(138): Ceres Seq. ID no. 12349404
MIDLAAKLISEGRGMDLMPRKANSDAPITAYRYHSLCSYMGDDDMFSSDLSEDQLRQRLGHMSITQCQVIFSMGDEYVPEYVDKRALLDRLCRALGGAEKVEIEWGNHALSNRVQEAVVAIVDFVKREGPKGWDDPWS

SEQ ID NO: 9923 - DNA, 835 bp, Zea mays subsp. mays
  misc_feature (1)..(835): Ceres Seq. ID no. 12415818
  misc_feature (1)..(835): Ortholog of  Ceres SEQ ID NO 12627215 as cited in SEQ ID NO 60976
  misc_feature (1)..(835): Ortholog of  Ceres SEQ ID NO 15178542 as cited in SEQ ID NO 65410
  misc_feature (1)..(835): Ortholog of  Ceres SEQ ID NO 12635879 as cited in SEQ ID NO 0
  misc_feature (1)..(835): Ortholog of  Ceres SEQ ID NO 13599649 as cited in SEQ ID NO 0
gctctcgggctctcggcttcgaatcccgacaacctccctccccgaagctgcttagccgccggctgggcctcagacctgcgtcaagcttccggcggcagcccttcgagcatcacaatggcgtccggcggagcggccatctcggcggggcctacaccaccgtcggcgacgacggcgtcgtcggttgagtggcaccagcggccgccgaacccgaagaatcccgtggtgttcttcgacgtgaccatcgggtccatcgccgccggccgcatcaagatggagctcttcgccgacatcgcccccaagaccgcggagaacttccggcagttctgcactggggagcatagaaaaaatgctttgccacaaggttataagggctgccaattccatagagtgatcaaagatttcatgattcagggtggtgacttcttgaagaatgatggtactggatgcacatcaatctacggtaccaaatttgatgatgaaaattttatagcaaagcatacagggcctggactgctctcgatggcaaacagtggaattaactctaatggatctcagttctttataacatgtgcaaagtgtgactggcttgacaacaaacatgtggtatttgggagagtgcttggagacggtttgctcgtcgtgaggaagattgaaaatgttgcaactggagcgaataacaaaccaaagcttgcctgcgttataagtgagtgtggtgaaatgtagcttgatccctttgtgtggctaatcgtggactctttacgctgctgatgtagaccctgtttggttgatggaagtacttaagcagtggaaacattgatggaaatgtattgtgtct

SEQ ID NO: 9924 - protein, 240 aa, Zea mays subsp. mays
  peptide (1)..(240): Ceres Seq. ID no. 12415819
ALGLSASNPDNLPPRSCLAAGWASDLRQASGGSPSSITMASGGAAISAGPTPPSATTASSVEWHQRPPNPKNPVVFFDVTIGSIAAGRIKMELFADIAPKTAENFRQFCTGEHRKNALPQGYKGCQFHRVIKDFMIQGGDFLKNDGTGCTSIYGTKFDDENFIAKHTGPGLLSMANSGINSNGSQFFITCAKCDWLDNKHVVFGRVLGDGLLVVRKIENVATGANNKPKLACVISECGEM

SEQ ID NO: 9925 - protein, 202 aa, Zea mays subsp. mays
  peptide (1)..(202): Ceres Seq. ID no. 12415820
MASGGAAISAGPTPPSATTASSVEWHQRPPNPKNPVVFFDVTIGSIAAGRIKMELFADIAPKTAENFRQFCTGEHRKNALPQGYKGCQFHRVIKDFMIQGGDFLKNDGTGCTSIYGTKFDDENFIAKHTGPGLLSMANSGINSNGSQFFITCAKCDWLDNKHVVFGRVLGDGLLVVRKIENVATGANNKPKLACVISECGEM

SEQ ID NO: 9926 - protein, 150 aa, Zea mays subsp. mays; identical to SEQ ID NO: 1911
  peptide (1)..(150): Ceres Seq. ID no. 12415821

SEQ ID NO: 9927 - DNA, 1864 bp, Zea mays subsp. mays
  misc_feature (1)..(1864): Ceres Seq. ID no. 12336605
  misc_feature (1)..(1864): Ortholog of  Ceres SEQ ID NO 14310841 as cited in SEQ ID NO 53666
  misc_feature (1)..(1864): Ortholog of  Ceres SEQ ID NO 15178736 as cited in SEQ ID NO 56439
  misc_feature (1)..(1864): Ortholog of  Ceres SEQ ID NO 14308493 as cited in SEQ ID NO 60320
gaaccctcgcgccgccgcctactccagcctccagcgtgatctgagtcctgaccaagccctaaacgccaccgccctcgcaaatctcctttcccttcgatccatggccgccgccgtcgccgcccccgcgccatcccgcaagacggagacctacaccgacaccaagcgccgcgacgacgtgcgcggcgccaacatcgccgctgcgcgcgccgtcgccgacgccgtgcgcacctcgctgggcccccgtggcatggataagatgatcgcttcgggcgaccaggctcaggaggtcatcatcaccaacgacggtgccaccatcctctcccgcatggcgctcctccagcccggccgcgcgcatgctcgccgagctatcccgctcccaggacgccgccgctggggacggcaccactaccgtcgtcgtcctcgctggatccctcctccgccgcgcccagtcgctcctctccgccggggctcaccccaccgccgctgccgacgccctccaccgtctcgccacgcgcgctgttgagatcctccacgccatggccatccccatcgagctatccgaccgggaatccctcgtcaagtctgcgtccacggctctcaactccaaggtcgtctcccagtactccacccttctctcgcccctcgccgtcgacgccgccctctctgtggtggaccccgctcaccctgaccttctcgacctccgggacatccgcatcgtgaagaagcttggtggcaccgtggacgatactgagctcatccctggcctcatctttgacaagaaggctagccatgctgctgggggcccaactcggatggagaatgctaagatcgctgtcatacagttccaaatctcaccacccaagactgacattgagcagagtgtcattgtatccgactacgcacagatggaccgcatcctacgtgaggagcgcaattatatccttgggatggtaaaaaagatcaaggcggctggatgcaatgtattgctcattcagaagagcatcttgcgtgatgcagtcactgacttgtctctgcactatcttgctaaggcaaagattctggtggtgaaggacgtggagagggatgagatggagttcatcaccaagaccctaaactgccttcccattgccaacattgagcacttccgcacggataagtttgggtatgcagatgttgttgaggaagtctctgttggagagggcaaggttgtgaagatcactggaatcaaggacatggttggaccgcaactgtacttgtcaggggatctaaccaattggttattgatgaagctgaacgcagtctccatgatgcactctgtgtcataaggtgcttggtcagcaagagatttttgattgctggtggtggtgctccagaaatagagatgtcaatgcagctggctgcttgggcaaaggagcttcgagggatggagagttactgcatcaaggagtttgctgaggcgcttgaggtcatcccttacacattggctgagaatgctgggctcaacccaatctccattgtcaccgaactcaggaatcgccatgccagaggtgagaagaacactggcatcaatgtgaggaaagggcagatcacaaacatcctggaggagaatgtcgtgcagccgttgctggtgagcacaagtgccattacgttagcctgcgagtgtgtcagaatgatcttgaagattgatgacattgtcactgttaggtaagagcgtgaagttggggtcatgtcagcctgctctgttctgtctggattgattattagttaggttactgcttaatgtaaaacttggttcatgggcgtgtttctacacttggttttgatgttagtactatccttgacatgaaactactaccagggttgc

SEQ ID NO: 9928 - protein, 323 aa, Zea mays subsp. mays
  peptide (1)..(323): Ceres Seq. ID no. 12336606
MLAELSRSQDAAAGDGTTTVVVLAGSLLRRAQSLLSAGAHPTAAADALHRLATRAVEILHAMAIPIELSDRESLVKSASTALNSKVVSQYSTLLSPLAVDAALSVVDPAHPDLLDLRDIRIVKKLGGTVDDTELIPGLIFDKKASHAAGGPTRMENAKIAVIQFQISPPKTDIEQSVIVSDYAQMDRILREERNYILGMVKKIKAAGCNVLLIQKSILRDAVTDLSLHYLAKAKILVVKDVERDEMEFITKTLNCLPIANIEHFRTDKFGYADVVEEVSVGEGKVVKITGIKDMVGPQLYLSGDLTNWLLMKLNAVSMMHSVS

SEQ ID NO: 9929 - protein, 262 aa, Zea mays subsp. mays
  peptide (1)..(262): Ceres Seq. ID no. 12336607
MAIPIELSDRESLVKSASTALNSKVVSQYSTLLSPLAVDAALSVVDPAHPDLLDLRDIRIVKKLGGTVDDTELIPGLIFDKKASHAAGGPTRMENAKIAVIQFQISPPKTDIEQSVIVSDYAQMDRILREERNYILGMVKKIKAAGCNVLLIQKSILRDAVTDLSLHYLAKAKILVVKDVERDEMEFITKTLNCLPIANIEHFRTDKFGYADVVEEVSVGEGKVVKITGIKDMVGPQLYLSGDLTNWLLMKLNAVSMMHSVS

SEQ ID NO: 9930 - protein, 173 aa, Zea mays subsp. mays
  peptide (1)..(173): Ceres Seq. ID no. 12336608
NPRAAAYSSLQRDLSPDQALNATALANLLSLRSMAAAVAAPAPSRKTETYTDTKRRDDVRGANIAAARAVADAVRTSLGPRGMDKMIASGDQAQEVIITNDGATILSRMALLQPGRAHARRAIPLPGRRRWGRHHYRRRPRWIPPPPRPVAPLRRGSPHRRCRRPPPSRHARC

SEQ ID NO: 9931 - DNA, 1200 bp, Zea mays subsp. mays
  misc_feature (1)..(1200): Ceres Seq. ID no. 12387398
  misc_feature (1)..(1200): Ortholog of  Ceres SEQ ID NO 12420140 as cited in SEQ ID NO 0
acgaagcattcgcctcgccttgatctccaaccccttccttccttgcttaggagaaagagggaggagaggagaggaggaagaagatggagagggcggccccagtgaggagttcccacacctccacggccggcctactcgcgtggcctcaacccgatggcgccgcgtcgcaggcaccacgtcggcctaaccagccgacggaggaattcaggaaggtggtgttcggggggcaggtcaccgaggaggccgacggtctcaacaagacgaagatgaggacgacggcctccgcacccaagtcgaaggagacaacagggatcggcatgtttaaggccgagagcgctgccgccgccgtcacaactgcatcccgtgatcgccaggctagccagatcaccttttctcaggacgggaccattcctcccaggaagccaacttcagttgctggggtggcgaggcagcgcgaacttagccataccgttgagagttcgggggacggtaagatgaagcggcaggtgtccaatgcgaaatccaaggagctcagtggtcacaacatctttgctgatcatgaagatccgagtcccaacaggtcaagcagctctgctgctgctctggcacatgtgaaaaatgcaaatgtgagctccttctcctttggaaaggccgacatggacagcacagtgaaaacagcaaagaagaaagggtccagcaacaagtctactgatctgatgaatggcaaggccatctccgagagggattcagcgcctgcagggaaacagcctctgaaccgcgcgaagccgaaaggattgagtggtagtagcatttttgcagacgggaaggcctcaacaactggtgatcatgcaggccgtcggacccggcagccacctggcggcgatagcagcatcttgctgggctagcgtgcatatggatattgtcctatgccgccacacgggtggttggtccgtccgtgtgcggccatgttttcctgatcaggcgatgagtcccatctcagatgatctggttcacttctggcgtgtgtatgggtttgtgtctgtgttggttgtgacatgtccaatggaacaaccctatccctactgcgtgtggtgccgttttgttgtgtagtagtacaacggatgacatgtggtaccgtttcgttgtgtgtacgtggatatacatatgtgtgtttggttattaaatactccctccgttttt

SEQ ID NO: 9932 - protein, 273 aa, Zea mays subsp. mays
  peptide (1)..(273): Ceres Seq. ID no. 12387399
MERAAPVRSSHTSTAGLLAWPQPDGAASQAPRRPNQPTEEFRKVVFGGQVTEEADGLNKTKMRTTASAPKSKETTGIGMFKAESAAAAVTTASRDRQASQITFSQDGTIPPRKPTSVAGVARQRELSHTVESSGDGKMKRQVSNAKSKELSGHNIFADHEDPSPNRSSSSAAALAHVKNANVSSFSFGKADMDSTVKTAKKKGSSNKSTDLMNGKAISERDSAPAGKQPLNRAKPKGLSGSSIFADGKASTTGDHAGRRTRQPPGGDSSILLG

SEQ ID NO: 9933 - protein, 212 aa, Zea mays subsp. mays
  peptide (1)..(212): Ceres Seq. ID no. 12387400
MRTTASAPKSKETTGIGMFKAESAAAAVTTASRDRQASQITFSQDGTIPPRKPTSVAGVARQRELSHTVESSGDGKMKRQVSNAKSKELSGHNIFADHEDPSPNRSSSSAAALAHVKNANVSSFSFGKADMDSTVKTAKKKGSSNKSTDLMNGKAISERDSAPAGKQPLNRAKPKGLSGSSIFADGKASTTGDHAGRRTRQPPGGDSSILLG

SEQ ID NO: 9934 - protein, 195 aa, Zea mays subsp. mays
  peptide (1)..(195): Ceres Seq. ID no. 12387401
MFKAESAAAAVTTASRDRQASQITFSQDGTIPPRKPTSVAGVARQRELSHTVESSGDGKMKRQVSNAKSKELSGHNIFADHEDPSPNRSSSSAAALAHVKNANVSSFSFGKADMDSTVKTAKKKGSSNKSTDLMNGKAISERDSAPAGKQPLNRAKPKGLSGSSIFADGKASTTGDHAGRRTRQPPGGDSSILLG

SEQ ID NO: 9935 - DNA, 708 bp, Zea mays subsp. mays
  misc_feature (1)..(708): Ceres Seq. ID no. 12355366
  misc_feature (1)..(708): Ortholog of  Ceres SEQ ID NO 15177343 as cited in SEQ ID NO 51182
catggaaggaattgcacaggcgttgctagcattggataggattgaacatgatgttgaattgacttatgagcaactgcttctgctagaaactaatctgctcttaagtggccttgatttgcacgatcaacatgaagatatgagattggatatcgacaatatgtcttatgaggaactgcttgctttggaagagcatattggctcagtgactactgcccttactgaagagcaatttaccaagtgtgtaaaccaaagtgtgtatgaagcaagaaattcttatagagatgtaagcaagatcgcagcagatgatgtgaaatgtagcgtatgtcaggaggaatacgttgatggtgaagagattggtacaatgcaatgtgaacatcagtaccatgtgcgctgcattcacgaatggcttaagcagaagaattggtgtccaatatgcaaagcttcaggctataccttcagagatgaccaagggagacgcatgaatcttggcccaaacttgtaaatagcgtggatttattattagacattgtagatgctgacgcagttcaccccaatatgtggatacgatagtctctcccgaacggtcgaacgcctggaaccttttgttactgcatcttttatcttcttagcacacccttgctgcttgacagcagtacgggtcagaaactcgaaaataaccgtggttctcaagaaatttttccagattcc

SEQ ID NO: 9936 - protein, 166 aa, Zea mays subsp. mays
  peptide (1)..(166): Ceres Seq. ID no. 12355367
MEGIAQALLALDRIEHDVELTYEQLLLLETNLLLSGLDLHDQHEDMRLDIDNMSYEELLALEEHIGSVTTALTEEQFTKCVNQSVYEARNSYRDVSKIAADDVKCSVCQEEYVDGEEIGTMQCEHQYHVRCIHEWLKQKNWCPICKASGYTFRDDQGRRMNLGPNL

SEQ ID NO: 9937 - protein, 121 aa, Zea mays subsp. mays
  peptide (1)..(121): Ceres Seq. ID no. 12355368
MRLDIDNMSYEELLALEEHIGSVTTALTEEQFTKCVNQSVYEARNSYRDVSKIAADDVKCSVCQEEYVDGEEIGTMQCEHQYHVRCIHEWLKQKNWCPICKASGYTFRDDQGRRMNLGPNL

SEQ ID NO: 9938 - protein, 114 aa, Zea mays subsp. mays
  peptide (1)..(114): Ceres Seq. ID no. 12355369
MSYEELLALEEHIGSVTTALTEEQFTKCVNQSVYEARNSYRDVSKIAADDVKCSVCQEEYVDGEEIGTMQCEHQYHVRCIHEWLKQKNWCPICKASGYTFRDDQGRRMNLGPNL

SEQ ID NO: 9939 - DNA, 1081 bp, Zea mays subsp. mays
  misc_feature (1)..(1081): Ceres Seq. ID no. 12415038
  misc_feature (1)..(1081): Ortholog of  Ceres SEQ ID NO 14311493 as cited in SEQ ID NO 51440
  misc_feature (1)..(1081): Ortholog of  Ceres SEQ ID NO 15177312 as cited in SEQ ID NO 52762
ccaattcaaacagtgaggcggaggcagaggcagacaacgccgccatgaacgccttcttcacgtccctggcgcgcgggctggacgacctgggccgtgcaggcgggctgtcgtcgctgccggctctgctgcgggcggcggcgcttctcagggggctgcactcgcagctcacgctcatggtcggccagctccacctgccgccgggcggccgctggctcgacgagtacatggacgagaccgcccgcctctgggacgcctgcctcgccgtcaaactcggccctcgcctccgtcgagcggtattgcgccgcggccctcctgcgccgccgcggcgctggatgactggctccaggatccctcccctctctccagtcgccaggtgatgcgggcgatctccgtgtcgaggagggaggccatggccgcggaggaggagaaccgcgcgctggcggacgcgaggatcgcgccgctctcgctgcagctggacgagcggcttctgctgcgcgcgacggacgcgaggcttacggttacgggcttcaacggcttccgggggctgctgcacgcgctccacaacgcgagctcgctcctcctgctcatcctcgccagcggcgccgtctcgtgcgccgccgcggccggcggcccgtgcggcgcggacgacgccggggccggcttcgtggcgtccatcgtgatgctgcagcagcggatggcggaggaggccgctgacgctgagtccgacgggcctggcgcgcccgggatcgggatgtgcgagttccggtgcgcgcgcgccgccgtggaggcggcgcgggaggaggtggagcgcgccgccgcggcggcggggcgcaagtgcgagggcggcggtgtcgtgaaggacaaggtggaggagctcaaggcgtggctgcatgtgctccggaccggcaccgatagcctggtgtgccagctggacgacttcntggacgacattgtagagggaaggaaggagctctccgacctgtgcagccattgatgtatcgatcacgcctcctgccctgcgcccctgcccccgatcgagcctcggagctccagtgccaggataaagattaccatcgtcatc

SEQ ID NO: 9940 - protein, 205 aa, Zea mays subsp. mays
  peptide (1)..(205): Ceres Seq. ID no. 12415039
  misc_feature (189)..(189): Xaa is any aa, unknown or other
MRAISVSRREAMAAEEENRALADARIAPLSLQLDERLLLRATDARLTVTGFNGFRGLLHALHNASSLLLLILASGAVSCAAAAGGPCGADDAGAGFVASIVMLQQRMAEEAADAESDGPGAPGIGMCEFRCARAAVEAAREEVERAAAAAGRKCEGGGVVKDKVEELKAWLHVLRTGTDSLVCQLDDFXDDIVEGRKELSDLCSH

SEQ ID NO: 9941 - protein, 194 aa, Zea mays subsp. mays
  peptide (1)..(194): Ceres Seq. ID no. 12415040
  misc_feature (178)..(178): Xaa is any aa, unknown or other
MAAEEENRALADARIAPLSLQLDERLLLRATDARLTVTGFNGFRGLLHALHNASSLLLLILASGAVSCAAAAGGPCGADDAGAGFVASIVMLQQRMAEEAADAESDGPGAPGIGMCEFRCARAAVEAAREEVERAAAAAGRKCEGGGVVKDKVEELKAWLHVLRTGTDSLVCQLDDFXDDIVEGRKELSDLCSH

SEQ ID NO: 9942 - protein, 124 aa, Zea mays subsp. mays
  peptide (1)..(124): Ceres Seq. ID no. 12415041
NSNSEAEAEADNAAMNAFFTSLARGLDDLGRAGGLSSLPALLRAAALLRGLHSQLTLMVGQLHLPPGGRWLDEYMDETARLWDACLAVKLGPRLRRAVLRRGPPAPPRRWMTGSRIPPLSPVAR

SEQ ID NO: 9943 - DNA, 1594 bp, Zea mays subsp. mays; identical to SEQ ID NO: 2660
  misc_feature (1)..(1594): Ceres Seq. ID no. 12387222
  misc_feature (1)..(1594): Ortholog of  Ceres SEQ ID NO 13598234 as cited in SEQ ID NO 63461
  misc_feature (1)..(1594): Ortholog of  Ceres SEQ ID NO 13597254 as cited in SEQ ID NO 63858
  misc_feature (1)..(1594): Ortholog of  Ceres SEQ ID NO 12622778 as cited in SEQ ID NO 67562

SEQ ID NO: 9944 - protein, 454 aa, Zea mays subsp. mays; identical to SEQ ID NO: 2661
  peptide (1)..(454): Ceres Seq. ID no. 12387223

SEQ ID NO: 9945 - protein, 350 aa, Zea mays subsp. mays; identical to SEQ ID NO: 2662
  peptide (1)..(350): Ceres Seq. ID no. 12387224

SEQ ID NO: 9946 - protein, 305 aa, Zea mays subsp. mays; identical to SEQ ID NO: 2663
  peptide (1)..(305): Ceres Seq. ID no. 12387225

SEQ ID NO: 9947 - DNA, 748 bp, Zea mays subsp. mays
  misc_feature (1)..(748): Ceres Seq. ID no. 12415163
  misc_feature (1)..(748): Ortholog of  Ceres SEQ ID NO 13582851 as cited in SEQ ID NO 67846
  misc_feature (1)..(748): Ortholog of  Ceres SEQ ID NO 15177923 as cited in SEQ ID NO 0
attccagcgtcttgtctcgctgtaccggccgatctccccattctcccctcttcgccggtcccaccaccgcgccgatcctgatggcctccgccgcctcatcggccgtcggcgctggcaaatcgctgttccaggggctccgcaggttcctcaagaagccgtgggagatcacaggcccctgcgcctctcccgagtaccgcagcgcgctgcctggcgcgctcgagtaccgcgtcaagtgcccggccaccgtgcgcgacgaccgcgacaaggccatcgtgcccacatccgatccggagacagtctacgatatcaagtacttcacccgcgaccgccgccggagccgcccgcccgtgcggcgcaccctactccgcaagcccgatctcgagagctacatggccaccaagcagttcgaccccaccaatgacttccccgtaccatacgtcaacaccaccgtcgaggaggatgacaacactgtcggcggtggctaccagaagtgactcaggaaagcttgctggttaatttggtaggtatcctttgattggacttcatcagaagcggcactattttcattccagctattaaatatccccttttcttttgttcctagtggaagttttttggatgtaaaagatgacggtgtcaaataatatggcacctgtggagctcacaggatgcacatatcttgtaaattgtattctaaaactgtctacctgataccattgttactgtttaatgcaaaatttaaggtttc

SEQ ID NO: 9948 - protein, 163 aa, Zea mays subsp. mays
  peptide (1)..(163): Ceres Seq. ID no. 12415164
SSVLSRCTGRSPHSPLFAGPTTAPILMASAASSAVGAGKSLFQGLRRFLKKPWEITGPCASPEYRSALPGALEYRVKCPATVRDDRDKAIVPTSDPETVYDIKYFTRDRRRSRPPVRRTLLRKPDLESYMATKQFDPTNDFPVPYVNTTVEEDDNTVGGGYQK

SEQ ID NO: 9949 - protein, 139 aa, Zea mays subsp. mays
  peptide (1)..(139): Ceres Seq. ID no. 12415165
FQRLVSLYRPISPFSPLRRSHHRADPDGLRRLIGRRRWQIAVPGAPQVPQEAVGDHRPLRLSRVPQRAAWRARVPRQVPGHRARRPRQGHRAHIRSGDSLRYQVLHPRPPPEPPARAAHPTPQARSRELHGHQAVRPHQ

SEQ ID NO: 9950 - protein, 137 aa, Zea mays subsp. mays
  peptide (1)..(137): Ceres Seq. ID no. 12415166
MASAASSAVGAGKSLFQGLRRFLKKPWEITGPCASPEYRSALPGALEYRVKCPATVRDDRDKAIVPTSDPETVYDIKYFTRDRRRSRPPVRRTLLRKPDLESYMATKQFDPTNDFPVPYVNTTVEEDDNTVGGGYQK

SEQ ID NO: 9951 - DNA, 1027 bp, Zea mays subsp. mays
  misc_feature (1)..(1027): Ceres Seq. ID no. 12360663
  misc_feature (1)..(1027): Ortholog of  Ceres SEQ ID NO 13657000 as cited in SEQ ID NO 65614
aactttggttaaccacccgactccgcctaatatagccttccttttccgtccatggccgcgcaaccctaacggcgcccttcccgtgccgcgcgcatggcggaccccggcggctgcctcgaggtccggctcttctacgtgcgcgtctcgccgcacggcggcgcggcccctcccccgcgcctcgcgctcgacctccgccccgcgggcggcgaggcggcccccgtcccgctgcgcctcgaccgccacgacgccgcctcgggcgaggccacctacgtctccaccgcggccgcgcggctgcccccgccatccgcggccttcgatgtggccgaccaccgcggcgtcgcgctgctccggggctcgcttcggtggtgtcccggcgccaagggcggttcccacgcctgggaaattgattgcgtccccgccgctgcggcggccgcctcggcctcggccttcgaggtgtacgtcgccgggtgctacgccggcgagcccgcggtgctcacgcacgccctgcggctagccaccccggaggaagctgctgctgcgttggttcggcgccgatcgggggcattgccggctgctagggatgaaggcgacaatgatatgaacactggtagcacncaataccctgaaggttggtactcanacgatgacgacgggcagctctcatggttcaacgctggggtcagagttggcgtaggcatcggcctgggagtctgtgttggtgtaggcataggcgtcgggctcctcctgcgctcctaccaagcaacaaccagaagcttgaagaggcggttcttctgacagttgcagctggtgtagctaccaatgatgaccagagcagagttctgcctcacatacttgtatagttcatgtgtttgttgtgcaggagttttgttttgtttttaggggaaagtgtagatgctgtgttaatgtggttgtgtacatggctctcgccgtttcttgtatggcatggcatgcatgtaaactgtgaagttggtcctcggacatgtgaaggaaatggtttctagttttg

SEQ ID NO: 9952 - protein, 233 aa, Zea mays subsp. mays
  peptide (1)..(233): Ceres Seq. ID no. 12360664
  misc_feature (174)..(174): Xaa is any aa, unknown or other
  misc_feature (183)..(183): Xaa is any aa, unknown or other
MADPGGCLEVRLFYVRVSPHGGAAPPPRLALDLRPAGGEAAPVPLRLDRHDAASGEATYVSTAAARLPPPSAAFDVADHRGVALLRGSLRWCPGAKGGSHAWEIDCVPAAAAAASASAFEVYVAGCYAGEPAVLTHALRLATPEEAAAALVRRRSGALPAARDEGDNDMNTGSXQYPEGWYSXDDDGQLSWFNAGVRVGVGIGLGVCVGVGIGVGLLLRSYQATTRSLKRRFF

SEQ ID NO: 9953 - protein, 170 aa, Zea mays subsp. mays
  peptide (1)..(170): Ceres Seq. ID no. 12360665
TLVNHPTPPNIAFLFRPWPRNPNGALPVPRAWRTPAAASRSGSSTCASRRTAARPLPRASRSTSAPRAARRPPSRCASTATTPPRARPPTSPPRPRGCPRHPRPSMWPTTAASRCSGARFGGVPAPRAVPTPGKLIASPPLRRPPRPRPSRCTSPGATPASPRCSRTPCG

SEQ ID NO: 9954 - DNA, 793 bp, Zea mays subsp. mays
  misc_feature (1)..(793): Ceres Seq. ID no. 12347593
  misc_feature (1)..(793): Ortholog of  Ceres SEQ ID NO 15173534 as cited in SEQ ID NO 61793
  misc_feature (1)..(793): Ortholog of  Ceres SEQ ID NO 13663751 as cited in SEQ ID NO 67519
gttgttgttgctgctgctaggtgctagctcacgagtcacggccgccttccactcccacaagcttcaactagccttcttactcccgccgtcgcccccgatccgagagcgagcatggcgcactctctcgccgcctccttctcgccggccgccgcccggcgccagatgacaaatgtgattccaagctggagctcggtttccttccagagccacaggagggcttctgtgtccatccgctcaagaccaaattctcttgggtttaagatttgctgttcggctaagaaagagacagtggacaaggtttgcagtatagtgaaggagcagctggctcttcccgatgggaccgctatcactggcgaatcaaaattcgctgaacttggcgctgattcgctggatacggtcgagattgtgatggggctcgaggaggcgttcaacataacagtggacgaaacaagcgcacaagacatcgcaacggtgcaggacgctgcggaccttatcgagaagctcatgctggaggcacctccaaaggtcgtctagatccagcaaccttgcgatcgacgaccttgcgtttgatctatgttgtgtgttaatttgttcgtgttgccccatttgttttttcttgatgattcaagatgaggttttgtattggtgttgctgaggtgaattagatagccccaaaggccacatgaagcagatgaggacagttcattccactttgaatttgtatgttgtagtgctgctatagagaaaccaatggactgttatgaagagtcaatgcaactgttgcttttcgttt

SEQ ID NO: 9955 - protein, 140 aa, Zea mays subsp. mays
  peptide (1)..(140): Ceres Seq. ID no. 12347594
MAHSLAASFSPAAARRQMTNVIPSWSSVSFQSHRRASVSIRSRPNSLGFKICCSAKKETVDKVCSIVKEQLALPDGTAITGESKFAELGADSLDTVEIVMGLEEAFNITVDETSAQDIATVQDAADLIEKLMLEAPPKVV

SEQ ID NO: 9956 - protein, 123 aa, Zea mays subsp. mays
  peptide (1)..(123): Ceres Seq. ID no. 12347595
MTNVIPSWSSVSFQSHRRASVSIRSRPNSLGFKICCSAKKETVDKVCSIVKEQLALPDGTAITGESKFAELGADSLDTVEIVMGLEEAFNITVDETSAQDIATVQDAADLIEKLMLEAPPKVV

SEQ ID NO: 9957 - DNA, 1126 bp, Zea mays subsp. mays
  misc_feature (1)..(1126): Ceres Seq. ID no. 12374788
  misc_feature (1)..(1126): Ortholog of  Ceres SEQ ID NO 13662799 as cited in SEQ ID NO 65338
atcacaaatctatctcgctcgctctccaggctccagctagactgtcctgctctgcttccgtgctactcactgtgcacagccagccagcttcagcagagtccggctcggctgtcggctgcgagtcctgcagcgcaacaatggacaggcctgcgcaggcgcccacgcagctgccgccggggttccggttccaccctaccgacgaggagctggtcgtgctgtacctccgccggaaggccctggctcgcccgctgccggccgccgtcatccccgtcgtccacgacgtcgccaggctcgatccgtgggacgtccctggggcgagcgaaggggagggctacttcttcagcctgcggcgagcgccggcgaccggccgcaggaggagggctgggagcgggtactggaaggccacggggaaggagaagccggtgttcctgcagtgcggcggcgttggcgccgagcagaggcagctgctcgtgggcgtcaagacggcgctcgccttccaccgccgtgagccgccgccgtcgtcgcggacaggctggatcatgcatgagtaccgcctcgccgtgccccgcggcgtggccgatcagaggaagaagaatgcgagacatggctacgttgctgaaccgggagagtgggtagtgtgccgggtcttcctgaagaacaggccgaaccgggacgccggcagcaaaaatctgcgacacggcgcctccgctcggcggcggcggcggcagcagcagccggaagacgtgagaggacagcagccgttgccattctcggcgccacagccgtcgtcctcgagctgtgttaccgacgtcaccgactgcttgtctgacgaagacgaagccgaagccagcagcggcagcacagcccgagctgcccctcaaagagaggcctaaggatatactccatatagtactccctgtccctgtagcgttttcccctctatcttgccccattgcccgtacttttcctggatcctggcatcagataatcaggtatagggcatgtctagctcaagggtgatccccagatatatcgtgccgaacagatttggcagtcctgaatcaggaacaatacggcatctgtgaagcagcatgcatttcgataatcaggtacagggcattttgcc

SEQ ID NO: 9958 - protein, 296 aa, Zea mays subsp. mays
  peptide (1)..(296): Ceres Seq. ID no. 12374789
HKSISLALQAPARLSCSASVLLTVHSQPASAESGSAVGCESCSATMDRPAQAPTQLPPGFRFHPTDEELVVLYLRRKALARPLPAAVIPVVHDVARLDPWDVPGASEGEGYFFSLRRAPATGRRRRAGSGYWKATGKEKPVFLQCGGVGAEQRQLLVGVKTALAFHRREPPPSSRTGWIMHEYRLAVPRGVADQRKKNARHGYVAEPGEWVVCRVFLKNRPNRDAGSKNLRHGASARRRRRQQQPEDVRGQQPLPFSAPQPSSSSCVTDVTDCLSDEDEAEASSGSTARAAPQREA

SEQ ID NO: 9959 - protein, 251 aa, Zea mays subsp. mays
  peptide (1)..(251): Ceres Seq. ID no. 12374790
MDRPAQAPTQLPPGFRFHPTDEELVVLYLRRKALARPLPAAVIPVVHDVARLDPWDVPGASEGEGYFFSLRRAPATGRRRRAGSGYWKATGKEKPVFLQCGGVGAEQRQLLVGVKTALAFHRREPPPSSRTGWIMHEYRLAVPRGVADQRKKNARHGYVAEPGEWVVCRVFLKNRPNRDAGSKNLRHGASARRRRRQQQPEDVRGQQPLPFSAPQPSSSSCVTDVTDCLSDEDEAEASSGSTARAAPQREA

SEQ ID NO: 9960 - protein, 211 aa, Zea mays subsp. mays
  peptide (1)..(211): Ceres Seq. ID no. 12374791
ITNLSRSLSRLQLDCPALLPCYSLCTASQLQQSPARLSAASPAAQQWTGLRRRPRSCRRGSGSTLPTRSWSCCTSAGRPWLARCRPPSSPSSTTSPGSIRGTSLGRAKGRATSSACGERRRPAAGGGLGAGTGRPRGRRSRCSCSAAALAPSRGSCSWASRRRSPSTAVSRRRRRGQAGSCMSTASPCPAAWPIRGRRMRDMATLLNRESG

SEQ ID NO: 9961 - DNA, 1300 bp, Zea mays subsp. mays
  misc_feature (1)..(1300): Ceres Seq. ID no. 12369263
  misc_feature (1)..(1300): Ortholog of  Ceres SEQ ID NO 13595916 as cited in SEQ ID NO 69273
atggtatttatttctgggaaattagtttctgttcttgacttgttgtaagtcctgaatgcagggagttgtttactggcaacctcccgagtcagctatggataagatcgaaaagatcatcagggaaccaatagtcagtaaatatggttctgatgatgggcttcctgagcttcgagaagcacttctcgaaaagctaagcagagagaacaagcttaccaaatcatcagtcatggtcactgctggtgcaaatcaggcttttgtgaacttggtcctcactctttgtgatgctggtgattccgttgtcatgtttgcaccgtattatttcaatgcctacatgtcattccagatgacaggtgttactgacatattagttggtggctgcgatcccaagacacttcatcctgatgttgattggttggagaaggttctgaaagaaaatgagcctatccctaaacttgtcactgttgtgaatccggggaacccctctggagcttttattccaaggcctatgcttgagagaatttcagatctgtgcaaaaatgctggtgcatggcttgtggttgacaatacctatgagtactttatgtatgatggaatggagcactactgcttagaagatgctcatattgtcaacctcttctcgttctcaaaggcttatggaatgatggggtggcgtgtaggatacattgcatttccaaatgaagctgatggcttccacgatcagctcctcaaagtgcaagacaacataccgatctgcgcctccatcatcgggcagcgcctggcgctctactcgctggaggccggccccgagtggatcaaagaacgggtgaaagacctggtgaaaaaccgagcgctgctggtggaggcgctgtccccgctcggcgaggacaacgtcaagggcggggagggcgccatctacctctgggcaaagctaccggacagctgctcggacgacttcgaggctgtcaggtggctcgcgaacaagcacggcgtcgccgtgatccccgggagcgcagcggaggacccgggtacatccgcgtctccttcggagggctcaaggaagaggacaccaggctggctgctgagaggctcaggcgcggcctgcaggagctggtgaccgatggaatggtaaagtgacggctccatgggtgtaagtaaaagctccagttttccaacggtgtaattccgccgtgattaattcgggagaagaaaaggaacttgttttcaagaatgcactgcgttgctcggacgagagacgggacggaataaaatgcgtctggtctgcagagtcacctatgttatg

SEQ ID NO: 9962 - protein, 352 aa, Zea mays subsp. mays
  peptide (1)..(352): Ceres Seq. ID no. 12369264
MQGVVYWQPPESAMDKIEKIIREPIVSKYGSDDGLPELREALLEKLSRENKLTKSSVMVTAGANQAFVNLVLTLCDAGDSVVMFAPYYFNAYMSFQMTGVTDILVGGCDPKTLHPDVDWLEKVLKENEPIPKLVTVVNPGNPSGAFIPRPMLERISDLCKNAGAWLVVDNTYEYFMYDGMEHYCLEDAHIVNLFSFSKAYGMMGWRVGYIAFPNEADGFHDQLLKVQDNIPICASIIGQRLALYSLEAGPEWIKERVKDLVKNRALLVEALSPLGEDNVKGGEGAIYLWAKLPDSCSDDFEAVRWLANKHGVAVIPGSAAEDPGTSASPSEGSRKRTPGWLLRGSGAACRSW

SEQ ID NO: 9963 - protein, 339 aa, Zea mays subsp. mays
  peptide (1)..(339): Ceres Seq. ID no. 12369265
MDKIEKIIREPIVSKYGSDDGLPELREALLEKLSRENKLTKSSVMVTAGANQAFVNLVLTLCDAGDSVVMFAPYYFNAYMSFQMTGVTDILVGGCDPKTLHPDVDWLEKVLKENEPIPKLVTVVNPGNPSGAFIPRPMLERISDLCKNAGAWLVVDNTYEYFMYDGMEHYCLEDAHIVNLFSFSKAYGMMGWRVGYIAFPNEADGFHDQLLKVQDNIPICASIIGQRLALYSLEAGPEWIKERVKDLVKNRALLVEALSPLGEDNVKGGEGAIYLWAKLPDSCSDDFEAVRWLANKHGVAVIPGSAAEDPGTSASPSEGSRKRTPGWLLRGSGAACRSW

SEQ ID NO: 9964 - protein, 295 aa, Zea mays subsp. mays
  peptide (1)..(295): Ceres Seq. ID no. 12369266
MVTAGANQAFVNLVLTLCDAGDSVVMFAPYYFNAYMSFQMTGVTDILVGGCDPKTLHPDVDWLEKVLKENEPIPKLVTVVNPGNPSGAFIPRPMLERISDLCKNAGAWLVVDNTYEYFMYDGMEHYCLEDAHIVNLFSFSKAYGMMGWRVGYIAFPNEADGFHDQLLKVQDNIPICASIIGQRLALYSLEAGPEWIKERVKDLVKNRALLVEALSPLGEDNVKGGEGAIYLWAKLPDSCSDDFEAVRWLANKHGVAVIPGSAAEDPGTSASPSEGSRKRTPGWLLRGSGAACRSW

SEQ ID NO: 9965 - DNA, 1276 bp, Zea mays subsp. mays
  misc_feature (1)..(1276): Ceres Seq. ID no. 12367734
  misc_feature (1)..(1276): Ortholog of  Ceres SEQ ID NO 13596865 as cited in SEQ ID NO 60644
ccctctactagtcattctcctctctctctctctcacacacacacacggccaaattccgctctctgctttgtttacacaggcgacgcaagccacgcagcgcgccgccaccgcgtctgcactccgcccccgcgaagcttccggggggccctcttccttcctccgccccagccctcgagtcggtctccaccggcggcggcggcaggcttccgcgccggcgccggactgggtcggcccggccgcgaggtgcaccaggtatcactagcaggtccctgacaaggagggcttactatcctgtggttggaagtagcaactcaagcgttgatgccgttccaactatccgtggatcatctggcgcagcaatatttgctaatggtggctatgctcttaatgctgatgctggaactgtttctatctaccctaatccagctcctgctacttcatctggctctataaccatgcccatgcccatgctccatcagatggtcattcagagccatccacctgctacctctgcagcaacctctacatccatgtggatcgctcaaccactacctgccagaactgctgcggcttctagacatgcaagacgcgtatcagcagggcttgccaacaatggaaggtacagaagggctaggagctcttactacagccttcatccactgatgatggtagaggcagagttggtcttttacgaatcaagagcagcagccgctgacccccacagggacatgagactggacatcgacaacatgagctacgaggacctgttggctttgggagaatctatgggcaatgtcaacacaggcttggccgatgagaaaatttcgaagtgcgtgaaagaagtggtctgctgcagttccgaccagacgcaaaccgatcaagatgaccaggatgacggaagctgcgtcatctgcctggagggttacagagacaaggatatgctggggatactgaaatgcaggcacgacttccacgccggctgcatcaagaagtggctgcagacgaagaactcgtgcccggtgtgcaaagccgccgccgcctaggacgacaccagaggagcgagcaactattttgtgctcctcctcgatctattcatttttttaggctcaggtcgaattatatatgtcgttccattcttttgattccagccagtcgtgtaaataaatgccgtgtgttggttattttagttatcacttgggttacattagcccaaattctcctgttgcattgtaaacaatccagtggtgaaggcaattgatcaagtggttgcaagcgc

SEQ ID NO: 9966 - protein, 195 aa, Zea mays subsp. mays
  peptide (1)..(195): Ceres Seq. ID no. 12367735
MPMPMLHQMVIQSHPPATSAATSTSMWIAQPLPARTAAASRHARRVSAGLANNGRYRRARSSYYSLHPLMMVEAELVFYESRAAAADPHRDMRLDIDNMSYEDLLALGESMGNVNTGLADEKISKCVKEVVCCSSDQTQTDQDDQDDGSCVICLEGYRDKDMLGILKCRHDFHAGCIKKWLQTKNSCPVCKAAAA

SEQ ID NO: 9967 - protein, 193 aa, Zea mays subsp. mays
  peptide (1)..(193): Ceres Seq. ID no. 12367736
MPMLHQMVIQSHPPATSAATSTSMWIAQPLPARTAAASRHARRVSAGLANNGRYRRARSSYYSLHPLMMVEAELVFYESRAAAADPHRDMRLDIDNMSYEDLLALGESMGNVNTGLADEKISKCVKEVVCCSSDQTQTDQDDQDDGSCVICLEGYRDKDMLGILKCRHDFHAGCIKKWLQTKNSCPVCKAAAA

SEQ ID NO: 9968 - protein, 191 aa, Zea mays subsp. mays
  peptide (1)..(191): Ceres Seq. ID no. 12367737
MLHQMVIQSHPPATSAATSTSMWIAQPLPARTAAASRHARRVSAGLANNGRYRRARSSYYSLHPLMMVEAELVFYESRAAAADPHRDMRLDIDNMSYEDLLALGESMGNVNTGLADEKISKCVKEVVCCSSDQTQTDQDDQDDGSCVICLEGYRDKDMLGILKCRHDFHAGCIKKWLQTKNSCPVCKAAAA

SEQ ID NO: 9969 - DNA, 1151 bp, Zea mays subsp. mays
  misc_feature (1)..(1151): Ceres Seq. ID no. 12346366
  misc_feature (1)..(1151): Ortholog of  Ceres SEQ ID NO 12636774 as cited in SEQ ID NO 372
  misc_feature (1)..(1151): Ortholog of  Ceres SEQ ID NO 12562215 as cited in SEQ ID NO 20489
  misc_feature (1)..(1151): Ortholog of  Ceres SEQ ID NO 14311866 as cited in SEQ ID NO 51178
  misc_feature (1)..(1151): Ortholog of  Ceres SEQ ID NO 15174842 as cited in SEQ ID NO 53054
  misc_feature (1)..(1151): Ortholog of  Ceres SEQ ID NO 15170037 as cited in SEQ ID NO 55447
  misc_feature (1)..(1151): Ortholog of  Ceres SEQ ID NO 15175492 as cited in SEQ ID NO 56277
  misc_feature (1)..(1151): Ortholog of  Ceres SEQ ID NO 13582350 as cited in SEQ ID NO 56734
  misc_feature (1)..(1151): Ortholog of  Ceres SEQ ID NO 12476493 as cited in SEQ ID NO 58163
  misc_feature (1)..(1151): Ortholog of  Ceres SEQ ID NO 12582113 as cited in SEQ ID NO 58349
  misc_feature (1)..(1151): Ortholog of  Ceres SEQ ID NO 14310807 as cited in SEQ ID NO 58696
  misc_feature (1)..(1151): Ortholog of  Ceres SEQ ID NO 15175861 as cited in SEQ ID NO 59381
  misc_feature (1)..(1151): Ortholog of  Ceres SEQ ID NO 13596470 as cited in SEQ ID NO 62158
  misc_feature (1)..(1151): Ortholog of  Ceres SEQ ID NO 12615466 as cited in SEQ ID NO 62761
  misc_feature (1)..(1151): Ortholog of  Ceres SEQ ID NO 12615907 as cited in SEQ ID NO 62860
  misc_feature (1)..(1151): Ortholog of  Ceres SEQ ID NO 14314080 as cited in SEQ ID NO 63105
  misc_feature (1)..(1151): Ortholog of  Ceres SEQ ID NO 13597295 as cited in SEQ ID NO 63743
  misc_feature (1)..(1151): Ortholog of  Ceres SEQ ID NO 12617090 as cited in SEQ ID NO 64005
  misc_feature (1)..(1151): Ortholog of  Ceres SEQ ID NO 15226458 as cited in SEQ ID NO 64042
  misc_feature (1)..(1151): Ortholog of  Ceres SEQ ID NO 13597439 as cited in SEQ ID NO 64081
  misc_feature (1)..(1151): Ortholog of  Ceres SEQ ID NO 13597233 as cited in SEQ ID NO 64370
  misc_feature (1)..(1151): Ortholog of  Ceres SEQ ID NO 13598327 as cited in SEQ ID NO 68040
  misc_feature (1)..(1151): Ortholog of  Ceres SEQ ID NO 13599438 as cited in SEQ ID NO 0
  misc_feature (1)..(1151): Ortholog of  Ceres SEQ ID NO 13600370 as cited in SEQ ID NO 0
  misc_feature (1)..(1151): Ortholog of  Ceres SEQ ID NO 13623850 as cited in SEQ ID NO 0
  misc_feature (1)..(1151): Ortholog of  Ceres SEQ ID NO 14309162 as cited in SEQ ID NO 0
gaaagccggagcgtctctgccggtgcccaacgtgcaggcactagctcagacttggcatggatcaggcgagccggtgcctttccggtacgtcaggacagaagagatcgtcgccggcgaagtcgtcgccggctgcgccatcccggtcgtggatctcagcaggttgcttgacccgcggtcgtccgaagaggagctcgcaaacctcggctctgcctgtcagcactggggtttctttcagcttatcaaccatggggtgccggacgaggtgatccaggacacgaagaaagacatggtggagttcttcaagctccctgtggaagccaagaaggtgcacgcgcaggtaccgggcggcatcgagggctacggccaggccttcgtcttctccgagacccagaagctggattgggcggacatgatctacctcatgattagccccaaggagtcgcgggacctgaggttctggcccacccggcctccctccttcagggactctatcgaaaggtactcggccgagacggcgaaggtgacggcgtgcctgctgcggttcatggccaaggacttgggcgtggagccggagcgcctcctggaggagttccggggattgccgcagagcatgcggacgacctactacccgccgtgcaggctggccgccgatgtgcttggcctgtcgccgcacaccgacgccaccggcctgacgctgctgctccacgtcaacgacgtgcagggcctgcagatcaggagggacggcaagtggctcgccgttgaccctctggacggtgctttagtcgtcagcatcggcgacatactggagattctaagcaatgggaggtacagaagcattgagcacagagccattgtacacccggacaaagaacgcatctcggcggcgatgttccatcagacatgccccaacacgacggtcggccctctgcaggagctcgtggaaagagacagtggcggggcacggtacagatccatggactacatggatttcatgaagggcttcttcgcggccaagctcgatgggcgaaggagccacatggacgctttgaggatatactagtccaaatgctggatgaatcatgttcctgtcttcataatgaattggacaactagtagtaaaatatctaaggctatccccaatagttcctctc

SEQ ID NO: 9970 - protein, 352 aa, Zea mays subsp. mays
  peptide (1)..(352): Ceres Seq. ID no. 12346367
KAGASLPVPNVQALAQTWHGSGEPVPFRYVRTEEIVAGEVVAGCAIPVVDLSRLLDPRSSEEELANLGSACQHWGFFQLINHGVPDEVIQDTKKDMVEFFKLPVEAKKVHAQVPGGIEGYGQAFVFSETQKLDWADMIYLMISPKESRDLRFWPTRPPSFRDSIERYSAETAKVTACLLRFMAKDLGVEPERLLEEFRGLPQSMRTTYYPPCRLAADVLGLSPHTDATGLTLLLHVNDVQGLQIRRDGKWLAVDPLDGALVVSIGDILEILSNGRYRSIEHRAIVHPDKERISAAMFHQTCPNTTVGPLQELVERDSGGARYRSMDYMDFMKGFFAAKLDGRRSHMDALRIY

SEQ ID NO: 9971 - protein, 257 aa, Zea mays subsp. mays
  peptide (1)..(257): Ceres Seq. ID no. 12346368
MVEFFKLPVEAKKVHAQVPGGIEGYGQAFVFSETQKLDWADMIYLMISPKESRDLRFWPTRPPSFRDSIERYSAETAKVTACLLRFMAKDLGVEPERLLEEFRGLPQSMRTTYYPPCRLAADVLGLSPHTDATGLTLLLHVNDVQGLQIRRDGKWLAVDPLDGALVVSIGDILEILSNGRYRSIEHRAIVHPDKERISAAMFHQTCPNTTVGPLQELVERDSGGARYRSMDYMDFMKGFFAAKLDGRRSHMDALRIY

SEQ ID NO: 9972 - protein, 216 aa, Zea mays subsp. mays
  peptide (1)..(216): Ceres Seq. ID no. 12346369
MIYLMISPKESRDLRFWPTRPPSFRDSIERYSAETAKVTACLLRFMAKDLGVEPERLLEEFRGLPQSMRTTYYPPCRLAADVLGLSPHTDATGLTLLLHVNDVQGLQIRRDGKWLAVDPLDGALVVSIGDILEILSNGRYRSIEHRAIVHPDKERISAAMFHQTCPNTTVGPLQELVERDSGGARYRSMDYMDFMKGFFAAKLDGRRSHMDALRIY

SEQ ID NO: 9973 - DNA, 955 bp, Zea mays subsp. mays
  misc_feature (1)..(955): Ceres Seq. ID no. 12350622
  misc_feature (1)..(955): Ortholog of  Ceres SEQ ID NO 13597142 as cited in SEQ ID NO 63351
  misc_feature (1)..(955): Ortholog of  Ceres SEQ ID NO 13599342 as cited in SEQ ID NO 0
agagtgttcctccggttagtagctgaccggccggcgacgtacgcactgcgctagcaatggcgcctccacggcggccgagcatggggcggcagaaaatcgagatccggcgcatagagagcgacgaggcacggcaggtgtgcttctccaagcggcgcgcggggctgttcaagaaggccagcgagctctccatcctatgcggcgccgacgtggccgccgtcgtcttctcccccgccggcaaggccttctcgttcggccacccctcggtggagtccgtcgtcgaccgcttcctcgcctcgtccaccccctcgcctgccggtgccggtgccggtgccggccactcctccgccggcggcggcgaggaccgcgcggtctccgagctgaaccgccagcacggcgacctgcgcgcgcagctggacgcggagaaggcgaggcaggagcgcgcggacgaggccatccggaaggagcgcgaggccgggagccccgccatggcgtggatcgacgcggacctgggcgccatgggccacgacgacctggtcgcgttctgggccgcgctggccggcgtgcaggccgctgtggccgccagcgccgatcagctgctgcgtgacgcgctgctcgtcgggcgcaggggccgacagcagcagcagccagcggcccagcttggcggtggtggtgtggccttcgacgtcggcgcgtttggcatcggcgtgcaggtgccgccgcctccaggattcgctggcgtcgacctgcaggggttcgggggacaggctgctgccatcctcggcgccggcggcccctcgtgaggtggtggaatggaatgcatgtgcgcgcagttcgcttgagttgttgcattcgcatggaggacgcgtcgtgcctatgttaggtttggttgataacatcgcaaatttgcaaaacagtgttttaaattaaaatttgatgtgtgcttcctgcttctctc

SEQ ID NO: 9974 - protein, 247 aa, Zea mays subsp. mays
  peptide (1)..(247): Ceres Seq. ID no. 12350623
MAPPRRPSMGRQKIEIRRIESDEARQVCFSKRRAGLFKKASELSILCGADVAAVVFSPAGKAFSFGHPSVESVVDRFLASSTPSPAGAGAGAGHSSAGGGEDRAVSELNRQHGDLRAQLDAEKARQERADEAIRKEREAGSPAMAWIDADLGAMGHDDLVAFWAALAGVQAAVAASADQLLRDALLVGRRGRQQQQPAAQLGGGGVAFDVGAFGIGVQVPPPPGFAGVDLQGFGGQAAAILGAGGPS

SEQ ID NO: 9975 - protein, 239 aa, Zea mays subsp. mays
  peptide (1)..(239): Ceres Seq. ID no. 12350624
MGRQKIEIRRIESDEARQVCFSKRRAGLFKKASELSILCGADVAAVVFSPAGKAFSFGHPSVESVVDRFLASSTPSPAGAGAGAGHSSAGGGEDRAVSELNRQHGDLRAQLDAEKARQERADEAIRKEREAGSPAMAWIDADLGAMGHDDLVAFWAALAGVQAAVAASADQLLRDALLVGRRGRQQQQPAAQLGGGGVAFDVGAFGIGVQVPPPPGFAGVDLQGFGGQAAAILGAGGPS

SEQ ID NO: 9976 - protein, 136 aa, Zea mays subsp. mays
  peptide (1)..(136): Ceres Seq. ID no. 12350625
MRRRRGRRRLLPRRQGLLVRPPLGGVRRRPLPRLVHPLACRCRCRCRPLLRRRRRGPRGLRAEPPARRPARAAGRGEGEAGARGRGHPEGARGREPRHGVDRRGPGRHGPRRPGRVLGRAGRRAGRCGRQRRSAAA

SEQ ID NO: 9977 - DNA, 960 bp, Zea mays subsp. mays
  misc_feature (1)..(960): Ceres Seq. ID no. 13493320
  misc_feature (1)..(960): Ortholog of  Ceres SEQ ID NO 13596572 as cited in SEQ ID NO 60618
aaaacaaaatgctgtggccgagcgaatgagaggaagatggctgctaccagcctcagctcctcgttgcccagggccactgcaaaactaacaggagtgccaagatcttcgtcgtactacacccagctgatcttttgctcgaggcatcctttccagaaggcggcggcagctgcagctttccagaagctcccacccgagctcctccggctaagctacccggcgaggaataataagcatgcaagaaccagctggcggcgggccacggacaacgaccaagcggcgccggccgcggcacaaggaactaccagcacccctcctctcccaggctctcccgttccgagcgccgagagatccccggtgacgcccggcaacggccagccgcagcagccggtcgccgacgccaacggcagcgcgccgagcgagccgccgaagcgggcgccgctgacggcgcgggagcggctgcgggcggcgcgcgtgctggggaagtacgcagagccgtcggtgaaagggtcttcgtcgaaaccggccaaaccggagttcgggagcggtgtgctggacgcgctgcgcgaggcggacgcgaagaaggccgggggcgggggcgggggcgggcggcgtgggtcgcgcctacccgaggcgccgggcaacctgttcgacgacagcaagcgcgggatgcccaaggacgggtggacgttcgagctgccgttcggggtggacgtcttcctcgtcctcgtctccttcacgctcatcaccaccatcatgttcggcaccgccttcctcgtgtggaagctcggcgccatacacttcaacgagtactagcctttagactgtctctacttgattggaggataaagggcgattatgcagtgctagacgagagaattgtgtgtattcgtaatgtactgtattgaccacagacactggtctgccgaagattttcgagaaaacatagaaatgtgtgattgc

SEQ ID NO: 9978 - protein, 270 aa, Zea mays subsp. mays
  peptide (1)..(270): Ceres Seq. ID no. 13493321
KTKCCGRANERKMAATSLSSSLPRATAKLTGVPRSSSYYTQLIFCSRHPFQKAAAAAAFQKLPPELLRLSYPARNNKHARTSWRRATDNDQAAPAAAQGTTSTPPLPGSPVPSAERSPVTPGNGQPQQPVADANGSAPSEPPKRAPLTARERLRAARVLGKYAEPSVKGSSSKPAKPEFGSGVLDALREADAKKAGGGGGGGRRGSRLPEAPGNLFDDSKRGMPKDGWTFELPFGVDVFLVLVSFTLITTIMFGTAFLVWKLGAIHFNEY

SEQ ID NO: 9979 - protein, 258 aa, Zea mays subsp. mays
  peptide (1)..(258): Ceres Seq. ID no. 13493322
MAATSLSSSLPRATAKLTGVPRSSSYYTQLIFCSRHPFQKAAAAAAFQKLPPELLRLSYPARNNKHARTSWRRATDNDQAAPAAAQGTTSTPPLPGSPVPSAERSPVTPGNGQPQQPVADANGSAPSEPPKRAPLTARERLRAARVLGKYAEPSVKGSSSKPAKPEFGSGVLDALREADAKKAGGGGGGGRRGSRLPEAPGNLFDDSKRGMPKDGWTFELPFGVDVFLVLVSFTLITTIMFGTAFLVWKLGAIHFNEY

SEQ ID NO: 9980 - DNA, 989 bp, Zea mays subsp. mays
  misc_feature (1)..(989): Ceres Seq. ID no. 14312601
  misc_feature (1)..(989): Ortholog of  Ceres SEQ ID NO 15177463 as cited in SEQ ID NO 0
acgagtacgagctcgtcgtcaccacctactcaggtctgtaccgctaccgcgtgggcgacgtgctgcgcgtggccgggttcaagaaccaggcgcccatgttcaagttcctgcggcggaagaacgtggtgctgagcatcgactccgacaagaccgacgaggcggagcttcacgcggcggtgagcggcgcggtgcagcacctggcgccgttcggcgcgtcgctggtggagtacacgagctacgcggacgcggggaccatcccgggccactacgtgctgttctgggagctgcggctccgcgcgggggacgtgccggtgccggtgccggcgtcggtgttcgaggactgctgcctggccgtggaggaggccctgaacagcgtgtaccggcagggccgcgccgccgaccgctccatcgggccgctggagatccgggtggtgtcggacggcacgttcgacaggctcatggactacgcgctcgcccgcggcgcctccatcaaccagtacaaggtgccgcggtgcgtgcacccgggccccgtggtggagctgctggacgggcgggtgcaggccagctacgtgagccccaagtgccccaagtggagccccggcggcggtaagcagtggagcagcgacgccgccgccaagaagcccgccgccgccgccggcagcaataatggaggaggggcggtcgtcgcctgatcgtcgtccgtcgagatatactagtgaactttaattaattagctggctaattccggaaccgtcgttgttgttcgtgggagagagagactcgatcttgtggtcgatcgattgtgatagctgatctatccgtgtgcatgtatgcatgcatggctacgatcgaatgattatctagctgggtaatcatcgggtgtgtggtagcttattaagtattgtacgcgtcgtgatatcatgtgagctagcttttgtttctttttattttcttttatgtggttttgtaataaagtttgagtacgtagt

SEQ ID NO: 9981 - protein, 229 aa, Zea mays subsp. mays
  peptide (1)..(229): Ceres Seq. ID no. 14312602
EYELVVTTYSGLYRYRVGDVLRVAGFKNQAPMFKFLRRKNVVLSIDSDKTDEAELHAAVSGAVQHLAPFGASLVEYTSYADAGTIPGHYVLFWELRLRAGDVPVPVPASVFEDCCLAVEEALNSVYRQGRAADRSIGPLEIRVVSDGTFDRLMDYALARGASINQYKVPRCVHPGPVVELLDGRVQASYVSPKCPKWSPGGGKQWSSDAAAKKPAAAAGSNNGGGAVVA

SEQ ID NO: 9982 - protein, 202 aa, Zea mays subsp. mays
  peptide (1)..(202): Ceres Seq. ID no. 14312603
RVRARRHHLLRSVPLPRGRRAARGRVQEPGAHVQVPAAEERGAEHRLRQDRRGGASRGGERRGAAPGAVRRVAGGVHELRGRGDHPGPLRAVLGAAAPRGGRAGAGAGVGVRGLLPGRGGGPEQRVPAGPRRRPLHRAAGDPGGVGRHVRQAHGLRARPRRLHQPVQGAAVRAPGPRGGAAGRAGAGQLREPQVPQVEPRRR

SEQ ID NO: 9983 - protein, 198 aa, Zea mays subsp. mays
  peptide (1)..(198): Ceres Seq. ID no. 14312604
MFKFLRRKNVVLSIDSDKTDEAELHAAVSGAVQHLAPFGASLVEYTSYADAGTIPGHYVLFWELRLRAGDVPVPVPASVFEDCCLAVEEALNSVYRQGRAADRSIGPLEIRVVSDGTFDRLMDYALARGASINQYKVPRCVHPGPVVELLDGRVQASYVSPKCPKWSPGGGKQWSSDAAAKKPAAAAGSNNGGGAVVA

SEQ ID NO: 9984 - DNA, 484 bp, Zea mays subsp. mays
  misc_feature (1)..(484): Ceres Seq. ID no. 1552760
  misc_feature (1)..(484): Ortholog of  Ceres SEQ ID NO 13657240 as cited in SEQ ID NO 66177
aatcttctccgtactcatacaactgctgtttccacgagaatgttatacaagcttgctcaggagaaaccttttactccaaagaggtattactccattgatcgtgttttccgcaatgaagctgttgaccggactcatcttgctgaattccaccagatagagggacttatctgtgattatggtttgacacttggtgatctgattggtgtattggaggatttcttctcaagtctaggcatgtccaagctgcgtttcaagcctgcctacaatccatatactgaacccagcatggaaattttcagttaccatgatggtttgaagaaatgggtggaagttggtaattcaggcatgttcaggccagagatgttgcttcccatgggactgccagaaggtgttaatgttattgcatggggtctttcacttgaaaggccaacgatgatcctttatggtatcgacaacataagggacctgtttggaccaaaggttg

SEQ ID NO: 9985 - protein, 161 aa, Zea mays subsp. mays
  peptide (1)..(161): Ceres Seq. ID no. 1552761
NLLRTHTTAVSTRMLYKLAQEKPFTPKRYYSIDRVFRNEAVDRTHLAEFHQIEGLICDYGLTLGDLIGVLEDFFSSLGMSKLRFKPAYNPYTEPSMEIFSYHDGLKKWVEVGNSGMFRPEMLLPMGLPEGVNVIAWGLSLERPTMILYGIDNIRDLFGPKV

SEQ ID NO: 9986 - protein, 148 aa, Zea mays subsp. mays
  peptide (1)..(148): Ceres Seq. ID no. 1552762
MLYKLAQEKPFTPKRYYSIDRVFRNEAVDRTHLAEFHQIEGLICDYGLTLGDLIGVLEDFFSSLGMSKLRFKPAYNPYTEPSMEIFSYHDGLKKWVEVGNSGMFRPEMLLPMGLPEGVNVIAWGLSLERPTMILYGIDNIRDLFGPKV

SEQ ID NO: 9987 - protein, 83 aa, Zea mays subsp. mays
  peptide (1)..(83): Ceres Seq. ID no. 1552763
MSKLRFKPAYNPYTEPSMEIFSYHDGLKKWVEVGNSGMFRPEMLLPMGLPEGVNVIAWGLSLERPTMILYGIDNIRDLFGPKV

SEQ ID NO: 9988 - DNA, 884 bp, Zea mays subsp. mays
  misc_feature (1)..(884): Ceres Seq. ID no. 12360748
  misc_feature (1)..(884): Ortholog of  Ceres SEQ ID NO 12611314 as cited in SEQ ID NO 56535
  misc_feature (1)..(884): Ortholog of  Ceres SEQ ID NO 15178046 as cited in SEQ ID NO 60380
  misc_feature (1)..(884): Ortholog of  Ceres SEQ ID NO 14312016 as cited in SEQ ID NO 60412
  misc_feature (1)..(884): Ortholog of  Ceres SEQ ID NO 13661438 as cited in SEQ ID NO 61414
cacaggagaatatacgacaatcggcctagtatgaattgttctgacgagagcaaaggacctccatgtacagggtgggtagagggcatggcaccagttttttctcgcactgcttggaaatgtgtatggcatctaattcagaatgatcttattcatggatggggtcttgacatgaagcttggatattgcgctcagggtgatcgaacagagaaagttggtgttattgacagtgagtatgtagttcatcaagggataccatcattaggagggccatcacttagcagcaagacacctcgaagatcattggatttgaggacccacatacgaagacaatcatcggctgagctggagaagttcaaggagaggtggaacagggctgtaagggaagatgaaggatggagggatccttttgattcttgattacttggaaagcagagtgtgacacttcataacaaaactggccagtggccacagtcacagcagtagagtttggaagcggagagcatcttctgcttcatgtcaaaaacacttgtttggttataggatgacgagacggttggttggttataggatgatgacttacatacacacacacacatcataactttatccacatgagttaaaagcgggaacattatcgtcaatacaaggagctgatggagaagttgaaactaacaaagtaacagggggtttccgaaagtgctgtaattttccgttggaaatatctgttcgggagagttgtatagtgtcatgatatacacacttgtgcagttatttgatgaggaaacttacatagcctagagcagatgtgtttcctatattattattgccttgtacaatgtaagatgaattccatgagtcagaaatagcatcaggtctctatgctt

SEQ ID NO: 9989 - protein, 138 aa, Zea mays subsp. mays
  peptide (1)..(138): Ceres Seq. ID no. 12360749
HRRIYDNRPSMNCSDESKGPPCTGWVEGMAPVFSRTAWKCVWHLIQNDLIHGWGLDMKLGYCAQGDRTEKVGVIDSEYVVHQGIPSLGGPSLSSKTPRRSLDLRTHIRRQSSAELEKFKERWNRAVREDEGWRDPFDS

SEQ ID NO: 9990 - protein, 128 aa, Zea mays subsp. mays
  peptide (1)..(128): Ceres Seq. ID no. 12360750
MNCSDESKGPPCTGWVEGMAPVFSRTAWKCVWHLIQNDLIHGWGLDMKLGYCAQGDRTEKVGVIDSEYVVHQGIPSLGGPSLSSKTPRRSLDLRTHIRRQSSAELEKFKERWNRAVREDEGWRDPFDS

SEQ ID NO: 9991 - protein, 110 aa, Zea mays subsp. mays
  peptide (1)..(110): Ceres Seq. ID no. 12360751
MAPVFSRTAWKCVWHLIQNDLIHGWGLDMKLGYCAQGDRTEKVGVIDSEYVVHQGIPSLGGPSLSSKTPRRSLDLRTHIRRQSSAELEKFKERWNRAVREDEGWRDPFDS

SEQ ID NO: 9992 - DNA, 950 bp, Zea mays subsp. mays
  misc_feature (1)..(950): Ceres Seq. ID no. 12348141
  misc_feature (1)..(950): Ortholog of  Ceres SEQ ID NO 15178852 as cited in SEQ ID NO 0
gaagtcgagtagacggccgggcctctcccgttctccacggacggctagcgctactggaggcgacgcctggacggcgaccccgcacactcacagccacaccctccacctgtgtgactattcaagggcttaggccgagccgcccggccaatcgccgtccgccggaccgctgaggaatttttctttctcgtcaaaagttactgcattcattttacagtaatggctatggggttgattaatgctaatcctataatccatgagaaaaaagagaggcgtgccagacaggcaccagagaccacagatgaaaatgcagcagagcccatagatcagctggaaatatttgatcacattagagatataaaggatccagagcacccgtactcactggaacagctgaatgtggtgactgaagattcaattgaactcaatgatgaaagtaattatgtcagggttacattcaccccaacagtggagcactgcagtatggcaactattattggcctttgcatacgcgtgaaacttgtacggagtctccctcctcgttacaaggtggacataagggttgcccctggatcacatgcaactgaagctgctgtgaataagcaactgaacgacaaagaacgtgttgcggctgcattggagaacccaaacctactggacatggtcgaagagtgcttatcaccaacatttgattgaggcctgaatatcaatatatcggtgtgacatggtgttgatgttcaggagccacacatgctcattgccaatggagttcactcctgtctttcgagaaccaaaatgccttgggtgttaagtgacgtgttgcatgatttttttcctccgccccgttcagttattatatatgctactatggcgctaccctttttggacgtttttggtgcttgtgacctcactgatcaatgcgagatgtaatcagctcttgtgctgtagctttc

SEQ ID NO: 9993 - protein, 158 aa, Zea mays subsp. mays
  peptide (1)..(158): Ceres Seq. ID no. 12348142
MAMGLINANPIIHEKKERRARQAPETTDENAAEPIDQLEIFDHIRDIKDPEHPYSLEQLNVVTEDSIELNDESNYVRVTFTPTVEHCSMATIIGLCIRVKLVRSLPPRYKVDIRVAPGSHATEAAVNKQLNDKERVAAALENPNLLDMVEECLSPTFD

SEQ ID NO: 9994 - protein, 156 aa, Zea mays subsp. mays
  peptide (1)..(156): Ceres Seq. ID no. 12348143
MGLINANPIIHEKKERRARQAPETTDENAAEPIDQLEIFDHIRDIKDPEHPYSLEQLNVVTEDSIELNDESNYVRVTFTPTVEHCSMATIIGLCIRVKLVRSLPPRYKVDIRVAPGSHATEAAVNKQLNDKERVAAALENPNLLDMVEECLSPTFD

SEQ ID NO: 9995 - DNA, 1918 bp, Zea mays subsp. mays
  misc_feature (1)..(1918): Ceres Seq. ID no. 12356802
  misc_feature (1)..(1918): Ortholog of  Ceres SEQ ID NO 13600220 as cited in SEQ ID NO 0
agattgacctgttgccctgttgagtgtgaaggaggcgcacgcgcttgagctgaagaaactgccgcgctgatctagcccgccgggatgggcgcctcggggcctgcggctccgccggcaacgcatcgccgccgctgcatccagctgctgctgctgctcgccctggccgtcgcgccgcttggcagccgtgggcttcgcgtccgtgccgcgggggcggacacgggagggctgagccgggacgcgttcccgaaggggttcgtcttcgggacggcgacgtccgcgtaccaggtcgagggcgcggcgacgtccggcggccgcgggccctgcatctgggatcccttcgtccacacccccggaaagattgctgaagacgccaacgcagatgttacaacagatgaatatcatcgctacaaggaagatgttgatctcatgaaaagcctaaattttgatgcataccggttttcaatctcctggtccaggatcttcccagatggcgaagggaaaattaatgaagaaggagtacagtattacaacaatcttatagactacatgattaagcaaggccttactccttacgccaaccttaaccactatgatcttccgcttgcgcttcagaagaagtaccaaggctggttaggcccaaaaattgtggacatatttgctgactatgctgatttttgtttcaagacttttggcaatcgagtcaagaactggttcacattaaatgagccaaggatagtagcattccttggttatgataaagggcttaacccccctaaccggtgcacacaatgcactgccggtgggaactcatcgacagaaccttacattgttgttcataacattctcctatctcatgctactgcagttgcaagataccgcaataaataccaggcaactcagaaaggcaaggtcgggatagttcttgacttcaactggtatgaaccttttacaaactcaactgaagatcaaaaagcagcgcaaagggccagggacttccatattggttggtttcttgatccattaataaatgggcaatatccaaagataatgcaagacattgtgaaagaccggctaccaagtttcacacctgaacaggccaagctagtcaagggctcatcagactatttcgggatcaatcaatatactacatactacattgcagatcaacaaactcctccgcagggaccaccgagctactcgtccgactggggcgtccaatattactttcaaaggaatggcgtgcaaattggacagatggcgcactcaatttggctttacatcgtcccatcggggcatgtatggagtcgtgaactacctaaaggaaaagtaccataatccaatcatcatcatatcggaaaacggaatggatcagcctggaaacctcacgcgcgaggagtacgtgcacgacgccgtgaggatcgacttctacaagaactacctgacggagctaaagagagggatcgacggcggcgcgaacgtgatcggctacttcgcgtggtctctcctggacaacttcgagtggctgtcgggctacacgtccaagttcggcatcgtctacgtcgacttcgcgacgctgaagcggtaccccaaggactcggcgtactggttcagagacatgctttcggggacgggctccaaggctgctaccccgcagactggttcaggcggccggccggctggttcggcttcagccacctcgaacggacctgccttgctggtctcccttttggtctccttgggtgttctgcttccatccatcttcatggtttcctcggtctaattagaaatgtattttcatagtacggatttgtagttgtgtggatgacaacatgttccttttaagaatcaggacatgttgcatcgatgcgggacctgttgtaggaatgagaccatgattcagggcttattgttcagagtc

SEQ ID NO: 9996 - protein, 416 aa, Zea mays subsp. mays
  peptide (1)..(416): Ceres Seq. ID no. 12356803
MGASGPAAPPATHRRRCIQLLLLLALAVAPLGSRGLRVRAAGADTGGLSRDAFPKGFVFGTATSAYQVEGAATSGGRGPCIWDPFVHTPGKIAEDANADVTTDEYHRYKEDVDLMKSLNFDAYRFSISWSRIFPDGEGKINEEGVQYYNNLIDYMIKQGLTPYANLNHYDLPLALQKKYQGWLGPKIVDIFADYADFCFKTFGNRVKNWFTLNEPRIVAFLGYDKGLNPPNRCTQCTAGGNSSTEPYIVVHNILLSHATAVARYRNKYQATQKGKVGIVLDFNWYEPFTNSTEDQKAAQRARDFHIGWFLDPLINGQYPKIMQDIVKDRLPSFTPEQAKLVKGSSDYFGINQYTTYYIADQQTPPQGPPSYSSDWGVQYYFQRNGVQIGQMAHSIWLYIVPSGHVWSRELPKGKVP

SEQ ID NO: 9997 - protein, 302 aa, Zea mays subsp. mays
  peptide (1)..(302): Ceres Seq. ID no. 12356804
MKSLNFDAYRFSISWSRIFPDGEGKINEEGVQYYNNLIDYMIKQGLTPYANLNHYDLPLALQKKYQGWLGPKIVDIFADYADFCFKTFGNRVKNWFTLNEPRIVAFLGYDKGLNPPNRCTQCTAGGNSSTEPYIVVHNILLSHATAVARYRNKYQATQKGKVGIVLDFNWYEPFTNSTEDQKAAQRARDFHIGWFLDPLINGQYPKIMQDIVKDRLPSFTPEQAKLVKGSSDYFGINQYTTYYIADQQTPPQGPPSYSSDWGVQYYFQRNGVQIGQMAHSIWLYIVPSGHVWSRELPKGKVP

SEQ ID NO: 9998 - protein, 262 aa, Zea mays subsp. mays
  peptide (1)..(262): Ceres Seq. ID no. 12356805
MIKQGLTPYANLNHYDLPLALQKKYQGWLGPKIVDIFADYADFCFKTFGNRVKNWFTLNEPRIVAFLGYDKGLNPPNRCTQCTAGGNSSTEPYIVVHNILLSHATAVARYRNKYQATQKGKVGIVLDFNWYEPFTNSTEDQKAAQRARDFHIGWFLDPLINGQYPKIMQDIVKDRLPSFTPEQAKLVKGSSDYFGINQYTTYYIADQQTPPQGPPSYSSDWGVQYYFQRNGVQIGQMAHSIWLYIVPSGHVWSRELPKGKVP

SEQ ID NO: 9999 - DNA, 1947 bp, Zea mays subsp. mays
  misc_feature (1)..(1947): Ceres Seq. ID no. 12349697
  misc_feature (1)..(1947): Ortholog of  Ceres SEQ ID NO 14301403 as cited in SEQ ID NO 53105
atcatgctattctctaggaggcctctcgccgccgctttccacctcgcgcccctttcgcctccgctgctcctcttcttcgcatccgcgtcctcgtcctgctcgcccgccgcctccgccgccgccgcgtcggtctccggctccaggggttgcactgctgcaaggatggacagcggtgcggtggagacagcgtccactggggcagtatggtcatcaccttcggcagaaccgagaagcatttctgtcgggaaggaggtattctgcaacaggtcactcaacatgaggaacatcacagcagtgggatttgatatggactacactctggcacagtacaagcctgaaaccttcgagtcccttgcttactatggtacaatagagaagcttgtgaaggatctccgctaccctgaagagctgttgacttgggaatttgattggaaatatatggtcagaggactagttctcgataagaagagaggaaatatcttgaagatggatcgacacaagtatgtaaaagttgcataccatggttttaaggaactatcgaaagaagaaaaagttgctgcttatgggagtacattgataagagattcatttgatgaacctgattatgcccttatagatacacttttctcactgggtgaagcttatctatttgctcagcttgttgatttcatagacaagaatcctggaaaagtacctgcaggcacagactatccacttatgtacagagatgtgaggtctgcggttgacttgtgtcatcgtgatggaactctaaagcggatggttgcgaaggatcctgccaggtacatcaatgaggacttggcaattgtaccaatgcttgaaatgatcaggaaatctggacgctcaacattcttagtgacaaatagtttgtgggactacaccgatgttgtcatgaactacctttgtgggccatacacttcaggtgtaggctctggtctcaatcacaagtggcttcaatattttgatattgtaataacaggcagttcgaagccaagtttcttccatgatgataaccgtgcaggattgtttgaagttgagcctgattctggaaaacttctgaatgctgatattcagatcggaagcccaagatcaagtcatcaacactcaacaccagttcagaaagtttatcaggggggcaatgttggtcatctccacagattactttctgttgcttctagttcacagattctctatgttggtgatcacatatacggagatattctgcggagcaagaaagttctaggctggcggactatgctggtgattccagaactagaacaagagctgaagcttctctcagaatcaaagtctactcgaaaggagcttagacatcttagaatggagcgtgattcgattgaagacaaaatccatcatcttgaatggtctcttaagcttgatgatatctcagaaaaccagaaggagaaattgttctctgaacatgacaatctgctgaaacagagagggcatgttcgtggtcttcatcaagaagctcagaggcaacatcatcagaagtttcataaggtgtggggacagctcatgaagactgggtaccaaaattccagatttgctcatcaggttgagagatttgcttgcttgtacagcagccaggttacaaacttcggtttgtattctcctgacaaatactatcgtccgagcgaagattacatgccccacgagtttgatgtgcttgggctgtaggagcagcccctactgctggtcggagttcctcgttgtaattgatccatagcctaggaggggacatcgtagttgccgtattatataacaggaagcttcacccattgtgaaggagagaaggtttataactatagtagctacatttctacttatcagtaagtttacctgtatataaatatgtacataactgatatatgatgcgtgttatttgtgagcacgcgataagtagtactg

SEQ ID NO: 10000 - protein, 571 aa, Zea mays subsp. mays
  peptide (1)..(571): Ceres Seq. ID no. 12349698
IMLFSRRPLAAAFHLAPLSPPLLLFFASASSSCSPAASAAAASVSGSRGCTAARMDSGAVETASTGAVWSSPSAEPRSISVGKEVFCNRSLNMRNITAVGFDMDYTLAQYKPETFESLAYYGTIEKLVKDLRYPEELLTWEFDWKYMVRGLVLDKKRGNILKMDRHKYVKVAYHGFKELSKEEKVAAYGSTLIRDSFDEPDYALIDTLFSLGEAYLFAQLVDFIDKNPGKVPAGTDYPLMYRDVRSAVDLCHRDGTLKRMVAKDPARYINEDLAIVPMLEMIRKSGRSTFLVTNSLWDYTDVVMNYLCGPYTSGVGSGLNHKWLQYFDIVITGSSKPSFFHDDNRAGLFEVEPDSGKLLNADIQIGSPRSSHQHSTPVQKVYQGGNVGHLHRLLSVASSSQILYVGDHIYGDILRSKKVLGWRTMLVIPELEQELKLLSESKSTRKELRHLRMERDSIEDKIHHLEWSLKLDDISENQKEKLFSEHDNLLKQRGHVRGLHQEAQRQHHQKFHKVWGQLMKTGYQNSRFAHQVERFACLYSSQVTNFGLYSPDKYYRPSEDYMPHEFDVLGL

SEQ ID NO: 10001 - protein, 570 aa, Zea mays subsp. mays
  peptide (1)..(570): Ceres Seq. ID no. 12349699
MLFSRRPLAAAFHLAPLSPPLLLFFASASSSCSPAASAAAASVSGSRGCTAARMDSGAVETASTGAVWSSPSAEPRSISVGKEVFCNRSLNMRNITAVGFDMDYTLAQYKPETFESLAYYGTIEKLVKDLRYPEELLTWEFDWKYMVRGLVLDKKRGNILKMDRHKYVKVAYHGFKELSKEEKVAAYGSTLIRDSFDEPDYALIDTLFSLGEAYLFAQLVDFIDKNPGKVPAGTDYPLMYRDVRSAVDLCHRDGTLKRMVAKDPARYINEDLAIVPMLEMIRKSGRSTFLVTNSLWDYTDVVMNYLCGPYTSGVGSGLNHKWLQYFDIVITGSSKPSFFHDDNRAGLFEVEPDSGKLLNADIQIGSPRSSHQHSTPVQKVYQGGNVGHLHRLLSVASSSQILYVGDHIYGDILRSKKVLGWRTMLVIPELEQELKLLSESKSTRKELRHLRMERDSIEDKIHHLEWSLKLDDISENQKEKLFSEHDNLLKQRGHVRGLHQEAQRQHHQKFHKVWGQLMKTGYQNSRFAHQVERFACLYSSQVTNFGLYSPDKYYRPSEDYMPHEFDVLGL

SEQ ID NO: 10002 - protein, 517 aa, Zea mays subsp. mays
  peptide (1)..(517): Ceres Seq. ID no. 12349700
MDSGAVETASTGAVWSSPSAEPRSISVGKEVFCNRSLNMRNITAVGFDMDYTLAQYKPETFESLAYYGTIEKLVKDLRYPEELLTWEFDWKYMVRGLVLDKKRGNILKMDRHKYVKVAYHGFKELSKEEKVAAYGSTLIRDSFDEPDYALIDTLFSLGEAYLFAQLVDFIDKNPGKVPAGTDYPLMYRDVRSAVDLCHRDGTLKRMVAKDPARYINEDLAIVPMLEMIRKSGRSTFLVTNSLWDYTDVVMNYLCGPYTSGVGSGLNHKWLQYFDIVITGSSKPSFFHDDNRAGLFEVEPDSGKLLNADIQIGSPRSSHQHSTPVQKVYQGGNVGHLHRLLSVASSSQILYVGDHIYGDILRSKKVLGWRTMLVIPELEQELKLLSESKSTRKELRHLRMERDSIEDKIHHLEWSLKLDDISENQKEKLFSEHDNLLKQRGHVRGLHQEAQRQHHQKFHKVWGQLMKTGYQNSRFAHQVERFACLYSSQVTNFGLYSPDKYYRPSEDYMPHEFDVLGL

SEQ ID NO: 10003 - DNA, 819 bp, Zea mays subsp. mays
  misc_feature (1)..(819): Ceres Seq. ID no. 12356960
  misc_feature (1)..(819): Ortholog of  Ceres SEQ ID NO 13583412 as cited in SEQ ID NO 62624
aaggccgagctcatccaatccagtcgcctgattgcattgggatcccatggccaagctcgccgtcctcctcctcctcgccgtggccgcgtccgccacagtgccggcgcacggccgcgataccccgactgagatcaaggccgggacggacgcgaacgtcacgctggagctggccgccgcggacggcaacggcgtggggatctcgaacctgcccgcctggggcgggctcatggggcagggctactcctacttcgagcgcagcaacctggacatcttcagcggccgcgggccctgcatggcgaaggcgccgtgcgtggatgcggctggccaccgacggcaccggcgaccaccacgggtggtactgcaactacgtggaggtcaccaccacgggcccgcacaaggggtgcgggcagcagctgttcaccgtcgagcagtggctcgccaccgacgccccgcccttcaagctcgaggccgttcgcgactactgcagcggcgacgccaagggcgcctcggcggcgtgatgtggccggcggccggtaggaggagagcacagcacacacgcctggactggacctgctgggtggcttggtttggttggttggtgacgagtcgtaataagttgtgggcgcatgggcgccgcgctcgtgagtggcgtgcgccacgatgcatgcgtgtatggtgatgaactgaattggagccgtgcagcaagtcgaataatcgggagccacctcgcgtgatgtgtagtggctagtttttgtacatggacgtgttggatcttgatccatgttttgatctgatctttgagaaatggtaatccgcgtt

SEQ ID NO: 10004 - protein, 210 aa, Zea mays subsp. mays
  peptide (1)..(210): Ceres Seq. ID no. 12356961
MAKLAVLLLLAVAASATVPAHGRDTPTEIKAGTDANVTLELAAADGNGVGISNLPAWGGLMGQGYSYFERSNLDIFSGRGPCMAKAPCVDAAGHRRHRRPPRVVLQLRGGHHHGPAQGVRAAAVHRRAVARHRRPALQARGRSRLLQRRRQGRLGGVMWPAAGRRRAQHTRLDWTCWVAWFGWLVTSRNKLWAHGRRAREWRAPRCMRVW

SEQ ID NO: 10005 - protein, 171 aa, Zea mays subsp. mays
  peptide (1)..(171): Ceres Seq. ID no. 12356962
GRAHPIQSPDCIGIPWPSSPSSSSSPWPRPPQCRRTAAIPRLRSRPGRTRTSRWSWPPRTATAWGSRTCPPGAGSWGRATPTSSAATWTSSAAAGPAWRRRRAWMRLATDGTGDHHGWYCNYVEVTTTGPHKGCGQQLFTVEQWLATDAPPFKLEAVRDYCSGDAKGASAA

SEQ ID NO: 10006 - protein, 150 aa, Zea mays subsp. mays
  peptide (1)..(150): Ceres Seq. ID no. 12356963
MGQGYSYFERSNLDIFSGRGPCMAKAPCVDAAGHRRHRRPPRVVLQLRGGHHHGPAQGVRAAAVHRRAVARHRRPALQARGRSRLLQRRRQGRLGGVMWPAAGRRRAQHTRLDWTCWVAWFGWLVTSRNKLWAHGRRAREWRAPRCMRVW

SEQ ID NO: 10007 - DNA, 1522 bp, Zea mays subsp. mays
  misc_feature (1)..(1522): Ceres Seq. ID no. 12407056
  misc_feature (1)..(1522): Ortholog of  Ceres SEQ ID NO 15171181 as cited in SEQ ID NO 56848
acgcaggaggtagcgttccactcgcttcgcggtggccatggtctcgtctccttcccctcccttgcccaccggtgtaagtgtgcctccctccctccttcctcctgcctcctctcctctgttaccgcggttctgccgtggctgagtatacgagtcgttcactgcacaatggtgcgccgtcaggcctccgagccgaagcagcagcgaggcggcaccaaggcggcgccggagaaggccgacaagaagtacgcgcacgtcccgacgccgctccaccacggtcacggcggtgccagcaacaagacaacaccccgcggggccaaggacgccgccggcccggcggcgtacgtcgcggcggtgtccttctccgactgccgcttcaagcagcgcgccctcgcgccggcgtcgcccggcgccgtcatccgctcgctgttcgtctccctcacccgccgctccaccccgcgctcgtcgccgtcggccacgccggcctcggcaggcgccgacgcgggggacggcgagcagtggcgcctcgccgcggccgacctctcccgcaggctcgccgcggccacgcgcacgcgggacgaggcgctggaggagaccacgcgcctgaagcactccctcgccgagctggagcacaagctcgcgcgcctcgaggcgcgcgtgctcccgacccccgcggccgccttccccgtcgactccttcctccgcgccgtctcgaccgcccgcgccgccgtgcggaacctcgcgcgcgcgctgtctgcccacctccgcagcccctccagccccggcccgagcctcgagagcttcctcaaccgcgcgttccacgccgacttcgagctggacaccgacgccgatgctcacaccacggaccccgcgggccggtgccaggccaacctcgcggcgtaccacgccgtcgcggtgctcacgtgggaggaggtcctcctccacggcaccaagcactacagcgaggggctcagccgcttctgcgacgccaagatgagcgaggtggtgtcctcgctcggctgggcgcgcgcgcggccgtggcctgagccgctgctgcaggccttcttcctcgccgccaagggcgtgtggggcgtccgcctcctggcgcgctccgtccacccgccgctccccgttgtgcgcgccgagcgaggcgcgcgcttcgacccgcggttcatggaggacgccgcggccagccgggcggggacgctggaaccggccagcgtgaagatgatgatggcgccagggttccacgtctacctggccggcgcgggcgtggtgaaatgcagggtcgtctgcttctacaccagcagtaacgcccgcacagacggccacagagatggcgggagcagcgccaacggcagcgtggggttggggagtagctgtagtgacattaatgggagtgctacagatgtggttgatagctgtagagcagtgaagtagggtaaaatgttgcccttgcacaggtagaaagaacacggggattttacttgttcgctaaaaaaacatgatgatctgcgtttaggcg

SEQ ID NO: 10008 - protein, 478 aa, Zea mays subsp. mays
  peptide (1)..(478): Ceres Seq. ID no. 12407057
TQEVAFHSLRGGHGLVSFPSLAHRCKCASLPPSSCLLSSVTAVLPWLSIRVVHCTMVRRQASEPKQQRGGTKAAPEKADKKYAHVPTPLHHGHGGASNKTTPRGAKDAAGPAAYVAAVSFSDCRFKQRALAPASPGAVIRSLFVSLTRRSTPRSSPSATPASAGADAGDGEQWRLAAADLSRRLAAATRTRDEALEETTRLKHSLAELEHKLARLEARVLPTPAAAFPVDSFLRAVSTARAAVRNLARALSAHLRSPSSPGPSLESFLNRAFHADFELDTDADAHTTDPAGRCQANLAAYHAVAVLTWEEVLLHGTKHYSEGLSRFCDAKMSEVVSSLGWARARPWPEPLLQAFFLAAKGVWGVRLLARSVHPPLPVVRAERGARFDPRFMEDAAASRAGTLEPASVKMMMAPGFHVYLAGAGVVKCRVVCFYTSSNARTDGHRDGGSSANGSVGLGSSCSDINGSATDVVDSCRAVK

SEQ ID NO: 10009 - protein, 423 aa, Zea mays subsp. mays
  peptide (1)..(423): Ceres Seq. ID no. 12407058
MVRRQASEPKQQRGGTKAAPEKADKKYAHVPTPLHHGHGGASNKTTPRGAKDAAGPAAYVAAVSFSDCRFKQRALAPASPGAVIRSLFVSLTRRSTPRSSPSATPASAGADAGDGEQWRLAAADLSRRLAAATRTRDEALEETTRLKHSLAELEHKLARLEARVLPTPAAAFPVDSFLRAVSTARAAVRNLARALSAHLRSPSSPGPSLESFLNRAFHADFELDTDADAHTTDPAGRCQANLAAYHAVAVLTWEEVLLHGTKHYSEGLSRFCDAKMSEVVSSLGWARARPWPEPLLQAFFLAAKGVWGVRLLARSVHPPLPVVRAERGARFDPRFMEDAAASRAGTLEPASVKMMMAPGFHVYLAGAGVVKCRVVCFYTSSNARTDGHRDGGSSANGSVGLGSSCSDINGSATDVVDSCRAVK

SEQ ID NO: 10010 - DNA, 1938 bp, Zea mays subsp. mays
  misc_feature (1)..(1938): Ceres Seq. ID no. 12407120
  misc_feature (1)..(1938): Ortholog of  Ceres SEQ ID NO 15226037 as cited in SEQ ID NO 663
aataaagtccacaaccatttcatttcttctttccccaattcccgtccatcagctcgcaccagcgaccagagcagcagaccaagcaagcgcgagggagagaagagacgaagaagaaaagaaaagccggagctctgccgagcttagtccgcggaggcggcgaccggcgacgcgtaaccatggagcgggcggaggaggcgcagcccgccgccgagcggagggcgccctcgacggcgccgtcggcgcgggtgtcgatctgggagtcggtacgcgcgtgcggggtgtgggggaaggagctggacaaggccgagctgtggaggcaggtcgtcatgccacgctacctgcgccgggccgtcgcggccgccgtcaaggccaaggacgaggccgccggcgtggcggtggcggcggcggccgcggaggaccgcgcgggggaggacgccgacggcccggcggtggcgcccgtggtggtgttcgtcaactcgcgcagtggcgggcgccacgggcccgagctcaaggtgcggctgcacgagctcatcaccgaggagcaggtctttgatctttcagttgtgaagccttcagattttgttcaccatggtttgagttgtttggagaggttagctgaccaaggcgataaccgtgcgaaggctgttcgtgagaaaatgaggattgtggttgctgggggtgacggtacagttggttgggtgcttggatgtctctcagatctttataagatgaaaagggaaccggttccacctacaggaatcattccacttggtacaggaaatgatcttgctagatcgtttggatggggtggctcttttccctttggttggcgctcagctgtaaagcgttatctcagcaaagcttccagatctcccatttgccgtcttgacagctggcaaactgtaattcagatgccagaaggagaaatagaagagttgccatatgcacttaagaaagtagaacctggagaccggttggaggtcagccaggagaacggtacagagttatccgaaaaggcttctttctataaaggagtattctacaactaccttagcattgggatggatgctcaggttgcatatggcttccatcatcttcgtgatgaaaagccatatcttgcacaaggaccagttgcaaataagttgatttatgctggatatagctgcactcaggggtggttttgtacaccttgcacagcgagtccacagctaagggggcttaagaacattttgcggctttccattaaaaaggccaattgttcagagtgggagcaagtgaaaatgccttcaagcgttagatccctagttgtgttaaatttatacaattatggcagtggaaggcatccatggggtgatctaagacctgagtatctcgaaaagaaaggctttgttgaagcccattcagatgatggcttgcttgaaatatttggtctgaaggaaggttggcatgcttcatttgtcatggccgagcttatcaaagcaaagcacattgcccaggctgcggctatcaagttcgaaatgaggggtggcgagtggaaccgagcatatgttcagatggacggagagccgtggaaacaaccgctcctacaggagcactcaaccatcgtggaaataaacaaagttccgtaccattctctcatgataaacggggagtaatgagatttttcctctgtcaaccagattgtaccagggctgcattcatagatcgttaggatcgtgtacagttcaggagcagcgggcactagatccttagaactgggtcggacggactgcagcgaggatggcatgcatgttcgttttggccttttgtcgtgctatggtcgaagccatggccggagcgtggtgtggcaccatgcattgttgtattcgtaccataatatgtgcgttgttgtatcctaagttctttttgaaagaaacatgatttatttgtttgtattgc

SEQ ID NO: 10011 - protein, 492 aa, Zea mays subsp. mays
  peptide (1)..(492): Ceres Seq. ID no. 12407121
MERAEEAQPAAERRAPSTAPSARVSIWESVRACGVWGKELDKAELWRQVVMPRYLRRAVAAAVKAKDEAAGVAVAAAAAEDRAGEDADGPAVAPVVVFVNSRSGGRHGPELKVRLHELITEEQVFDLSVVKPSDFVHHGLSCLERLADQGDNRAKAVREKMRIVVAGGDGTVGWVLGCLSDLYKMKREPVPPTGIIPLGTGNDLARSFGWGGSFPFGWRSAVKRYLSKASRSPICRLDSWQTVIQMPEGEIEELPYALKKVEPGDRLEVSQENGTELSEKASFYKGVFYNYLSIGMDAQVAYGFHHLRDEKPYLAQGPVANKLIYAGYSCTQGWFCTPCTASPQLRGLKNILRLSIKKANCSEWEQVKMPSSVRSLVVLNLYNYGSGRHPWGDLRPEYLEKKGFVEAHSDDGLLEIFGLKEGWHASFVMAELIKAKHIAQAAAIKFEMRGGEWNRAYVQMDGEPWKQPLLQEHSTIVEINKVPYHSLMINGE

SEQ ID NO: 10012 - protein, 442 aa, Zea mays subsp. mays
  peptide (1)..(442): Ceres Seq. ID no. 12407122
MPRYLRRAVAAAVKAKDEAAGVAVAAAAAEDRAGEDADGPAVAPVVVFVNSRSGGRHGPELKVRLHELITEEQVFDLSVVKPSDFVHHGLSCLERLADQGDNRAKAVREKMRIVVAGGDGTVGWVLGCLSDLYKMKREPVPPTGIIPLGTGNDLARSFGWGGSFPFGWRSAVKRYLSKASRSPICRLDSWQTVIQMPEGEIEELPYALKKVEPGDRLEVSQENGTELSEKASFYKGVFYNYLSIGMDAQVAYGFHHLRDEKPYLAQGPVANKLIYAGYSCTQGWFCTPCTASPQLRGLKNILRLSIKKANCSEWEQVKMPSSVRSLVVLNLYNYGSGRHPWGDLRPEYLEKKGFVEAHSDDGLLEIFGLKEGWHASFVMAELIKAKHIAQAAAIKFEMRGGEWNRAYVQMDGEPWKQPLLQEHSTIVEINKVPYHSLMINGE

SEQ ID NO: 10013 - protein, 332 aa, Zea mays subsp. mays
  peptide (1)..(332): Ceres Seq. ID no. 12407123
MRIVVAGGDGTVGWVLGCLSDLYKMKREPVPPTGIIPLGTGNDLARSFGWGGSFPFGWRSAVKRYLSKASRSPICRLDSWQTVIQMPEGEIEELPYALKKVEPGDRLEVSQENGTELSEKASFYKGVFYNYLSIGMDAQVAYGFHHLRDEKPYLAQGPVANKLIYAGYSCTQGWFCTPCTASPQLRGLKNILRLSIKKANCSEWEQVKMPSSVRSLVVLNLYNYGSGRHPWGDLRPEYLEKKGFVEAHSDDGLLEIFGLKEGWHASFVMAELIKAKHIAQAAAIKFEMRGGEWNRAYVQMDGEPWKQPLLQEHSTIVEINKVPYHSLMINGE

SEQ ID NO: 10014 - DNA, 1426 bp, Zea mays subsp. mays
  misc_feature (1)..(1426): Ceres Seq. ID no. 12404995
  misc_feature (1)..(1426): Ortholog of  Ceres SEQ ID NO 12587035 as cited in SEQ ID NO 63605
  misc_feature (1)..(1426): Ortholog of  Ceres SEQ ID NO 14302836 as cited in SEQ ID NO 65013
  misc_feature (1)..(1426): Ortholog of  Ceres SEQ ID NO 13599119 as cited in SEQ ID NO 0
aactctcgtatcgccggcgtatttagcttgcttcagggggcacgtggcggtggaagcttccctggcggtggtggtggtgcttggttgatgtcgatggcgcaggtctgctgtgactcggctgtagcggtgacggcggcaccggtggttggtgcggaggcggaggccagggccagggcgcgcgccgagaggcggagccgggccggagagtccggggcgtggaagcacgcggcggccgctggcacggccgatgccacgaggaagcggagtctcgggtcgggggagctgctgctggcgcggaagcacggggcggcgtcggtggccggccgcaggagggagatggaggacgccgtgtccgtgcgtgacgcgttctgcgcggagggcacggccgacggcgggaggcgcgacttctacggagtgttcgacggccacggctgctcgcacgtggccgaggcgtgccgggaccggatgcacgagctggtcgccgaggagctcgccgccaccgccgccgacagctccgtctccgcagcagcggcctggaccgcggcgatggaacgcagcttcgcgcggatggacgccgaggtgacgtcggccggagggcgcgccgccgccgccagaagcagcacctgccgctgcgacgcgcacaggtgcgaccatgtgggctctacggccgtggtggccgtcgtggaggagcacccgccgtccgtggtggccaactgcggcgacagccgcgccgtgctctgccgtggggacggcgcgccgccgctgccgctgtcgtcggaccacaagcccgaccgccccgacgagctggagcgcatcgagtccgccggcgggcgcgtcatcttctgggagggcgcgcgcgttctgggcgtcctcgccatgtcccgcgccgtcggggacggatacctgaagccgtacgtgtcgtccgttcctgaggtgactgtgaccgaccggtccgacggcgacgagtgcctcatcctgggcagcgacgggctctgggacgtggtgagcaacgaggccgcgtgcgaggtggcgcgcgcctgcctccgcaggggccgggccaagtggtgcgccgaggccgccgcgttgctcaccaagctggccctcgcgaggagaagctccgacaacgtctcggtggtcgtcgtcgatctccggaggaggaatcactagttctgtgcagttgtcaactagtactagtacagtaggatggctggtgcgcacaagggatttcgcgggggtgcgctaattgggtttttttttcttgcgttttcattcaaaaagtttttttttttttttgctgtactctccctgaatcaaaaagttcagaggagcccttagattaattattgtggtagagccggaatttggtccggataccattcggagaggtggtcgcgtagaaaaaaactcagaaaggggagacggtctc

SEQ ID NO: 10015 - protein, 388 aa, Zea mays subsp. mays
  peptide (1)..(388): Ceres Seq. ID no. 12404996
NSRIAGVFSLLQGARGGGSFPGGGGGAWLMSMAQVCCDSAVAVTAAPVVGAEAEARARARAERRSRAGESGAWKHAAAAGTADATRKRSLGSGELLLARKHGAASVAGRRREMEDAVSVRDAFCAEGTADGGRRDFYGVFDGHGCSHVAEACRDRMHELVAEELAATAADSSVSAAAAWTAAMERSFARMDAEVTSAGGRAAAARSSTCRCDAHRCDHVGSTAVVAVVEEHPPSVVANCGDSRAVLCRGDGAPPLPLSSDHKPDRPDELERIESAGGRVIFWEGARVLGVLAMSRAVGDGYLKPYVSSVPEVTVTDRSDGDECLILGSDGLWDVVSNEAACEVARACLRRGRAKWCAEAAALLTKLALARRSSDNVSVVVVDLRRRNH

SEQ ID NO: 10016 - protein, 359 aa, Zea mays subsp. mays
  peptide (1)..(359): Ceres Seq. ID no. 12404997
MSMAQVCCDSAVAVTAAPVVGAEAEARARARAERRSRAGESGAWKHAAAAGTADATRKRSLGSGELLLARKHGAASVAGRRREMEDAVSVRDAFCAEGTADGGRRDFYGVFDGHGCSHVAEACRDRMHELVAEELAATAADSSVSAAAAWTAAMERSFARMDAEVTSAGGRAAAARSSTCRCDAHRCDHVGSTAVVAVVEEHPPSVVANCGDSRAVLCRGDGAPPLPLSSDHKPDRPDELERIESAGGRVIFWEGARVLGVLAMSRAVGDGYLKPYVSSVPEVTVTDRSDGDECLILGSDGLWDVVSNEAACEVARACLRRGRAKWCAEAAALLTKLALARRSSDNVSVVVVDLRRRNH

SEQ ID NO: 10017 - protein, 357 aa, Zea mays subsp. mays
  peptide (1)..(357): Ceres Seq. ID no. 12404998
MAQVCCDSAVAVTAAPVVGAEAEARARARAERRSRAGESGAWKHAAAAGTADATRKRSLGSGELLLARKHGAASVAGRRREMEDAVSVRDAFCAEGTADGGRRDFYGVFDGHGCSHVAEACRDRMHELVAEELAATAADSSVSAAAAWTAAMERSFARMDAEVTSAGGRAAAARSSTCRCDAHRCDHVGSTAVVAVVEEHPPSVVANCGDSRAVLCRGDGAPPLPLSSDHKPDRPDELERIESAGGRVIFWEGARVLGVLAMSRAVGDGYLKPYVSSVPEVTVTDRSDGDECLILGSDGLWDVVSNEAACEVARACLRRGRAKWCAEAAALLTKLALARRSSDNVSVVVVDLRRRNH

SEQ ID NO: 10018 - DNA, 1733 bp, Zea mays subsp. mays
  misc_feature (1)..(1733): Ceres Seq. ID no. 12369271
  misc_feature (1)..(1733): Ortholog of  Ceres SEQ ID NO 15177320 as cited in SEQ ID NO 52645
  misc_feature (1)..(1733): Ortholog of  Ceres SEQ ID NO 15171359 as cited in SEQ ID NO 57279
  misc_feature (1)..(1733): Ortholog of  Ceres SEQ ID NO 14313840 as cited in SEQ ID NO 59568
  misc_feature (1)..(1733): Ortholog of  Ceres SEQ ID NO 13662245 as cited in SEQ ID NO 62708
  misc_feature (1)..(1733): Ortholog of  Ceres SEQ ID NO 14314084 as cited in SEQ ID NO 63256
  misc_feature (1)..(1733): Ortholog of  Ceres SEQ ID NO 15169466 as cited in SEQ ID NO 66135
  misc_feature (1)..(1733): Ortholog of  Ceres SEQ ID NO 14303091 as cited in SEQ ID NO 66369
accgagaatctttcaccctcctgacctctctctctcctcttctccctcccgtgagtgagtgagctggagtcaagctagccgagcgagtgatggcatggggagcttgcactgctgcggcagctgctctccttctgctcctcctcctcctcgccgccgccgcagcaggtggtaacggcggcgtgcattgccttgaccttgaccttgaggaggggaggcggcaccacctgagcaggagagccttgcaagggaggcagaggcggcaccacctgaggtcaagggcggtgggtggcgccacggtgctcgagctgaggcaccacagcttcagccctgcaccggccaacagcagggaggaggaggcggacgctctcctgtccgccgacgccgcgcgcgtctcgtcgctgcaagggcgcatagagcactaccggctgacgacgaccagctcgtcggccgaggtggcggtgacggcgtccaaggcgcaggtgcccgtcagctcgggcgcgaggctccggacgctgaactacgtggccaccgtggggctgggcggcggcgaggcgacggtgatcgtggacacggccagcgagctgacgtgggtgcagtgcgcgccgtgcgagtcgtgccacgaccagcagggcccgctgttcgacccgtcctcgtcgccgtcctacgccgcggtgccgtgcgactccccctcctgcgacgcgctgcagcagcagctggccacgggcgcgggcgcgccgccgtgcgacgccgggcggccggcggcctgcagctacgcgctcagctaccgcgacggctcctactcccgcggcgtgctggcgcacgacaggctgagcctggccggggaggtcatcgacggcttcgtgttcgggtgcggcaccagcaaccagggcccgccgttcggcggcacgtcgggcctcatggggctcggccgcagccagctctcgctcgtgtcgcagaccgtggaccagttcggcggcgtgttctcctactgcctcccgctcagcagggagtccgacgcgtcgggctcgctggtgctgggcgacgacccgtcggcgtaccgcaactcgaccccggtcgtgtacacctcgatggtgtccaactccgacccgctgctccaggggcccttctacctggtgaacctgaccgggatcacggtcggcggccaggaggtggagtccacgggcttctcggccagggcgatcgtcgactcgggcaccgtgatcaccagcctcgtgccgtcggtctacaacgccgtcagggccgagttcatgagccagctcgcggagtacccgcaggcgccagggttctccatcctcgacacctgcttcaacatgaccgggctcaaggaagtccaggtgcccagcctgactctcgtgttcgacggcggcgcggaggtggaggtggactccggcggcgtgctctacttcgtcagcagcgactcctcacaggtgtgcctggccgtggcctccctgaaatccgaggacgagacctccatcatcggcaactaccagcagaagaacctgagggtcgtcttcgacacctcggcgtctcaggttggtttcgcgcaggagacgtgtggttatatttgactttgactcggattgggattgggattgggatgcagcgggcggccatgggctctatatatgtgaatacctttatacttacttgcagatttgtttcgagattacccctggtgattggcaaatggtaacaaggtgttcagttgttgg

SEQ ID NO: 10019 - protein, 499 aa, Zea mays subsp. mays
  peptide (1)..(499): Ceres Seq. ID no. 12369272
MAWGACTAAAAALLLLLLLLAAAAAGGNGGVHCLDLDLEEGRRHHLSRRALQGRQRRHHLRSRAVGGATVLELRHHSFSPAPANSREEEADALLSADAARVSSLQGRIEHYRLTTTSSSAEVAVTASKAQVPVSSGARLRTLNYVATVGLGGGEATVIVDTASELTWVQCAPCESCHDQQGPLFDPSSSPSYAAVPCDSPSCDALQQQLATGAGAPPCDAGRPAACSYALSYRDGSYSRGVLAHDRLSLAGEVIDGFVFGCGTSNQGPPFGGTSGLMGLGRSQLSLVSQTVDQFGGVFSYCLPLSRESDASGSLVLGDDPSAYRNSTPVVYTSMVSNSDPLLQGPFYLVNLTGITVGGQEVESTGFSARAIVDSGTVITSLVPSVYNAVRAEFMSQLAEYPQAPGFSILDTCFNMTGLKEVQVPSLTLVFDGGAEVEVDSGGVLYFVSSDSSQVCLAVASLKSEDETSIIGNYQQKNLRVVFDTSASQVGFAQETCGYI

SEQ ID NO: 10020 - DNA, 1931 bp, Zea mays subsp. mays
  misc_feature (1)..(1931): Ceres Seq. ID no. 13636275
  misc_feature (1)..(1931): Ortholog of  Ceres SEQ ID NO 14309934 as cited in SEQ ID NO 20583
  misc_feature (1)..(1931): Ortholog of  Ceres SEQ ID NO 15176941 as cited in SEQ ID NO 55559
  misc_feature (1)..(1931): Ortholog of  Ceres SEQ ID NO 13654989 as cited in SEQ ID NO 63117
  misc_feature (1)..(1931): Ortholog of  Ceres SEQ ID NO 13584744 as cited in SEQ ID NO 69137
actactagtgatcagaccagtgagctagcgactgtaccatgcagcagctgtaggagagcctggtggtaggtaggataggagtagcgccagccgccaagtgcgcgtccgggctggctgcttcgacgagcaggagggagccgcaccgccgggctcccgcaatgtcgcctcctccgcccccgccgctgctgcgcaacgagctgtcgcgcaggacggcggtgctgggcctgcgcctgtgggtgctggtgggcatcgccgtcggggccgccttcgtgctgctcctcgtgctcatctccctccacctcgccgcggcgcggcggaggcggcccaggaagggcgtcgcgcacgcgccggcgggggcgccgccgctgtccccgtccaccatcccgcccgtgtccaaggagatccaggaggtggccgtccacgtcggctcgctccgccactacctggagacggggcacgcgttcctcaaggacggcggcgacggcgacggcgacggcgagtccgtggcgcacgggtcgcagcgcgtccacatcgaggccggcaagggccagcgcatggtcgcggcggcttccgacgcgctgtcggcggccgtgggccccgaggtgtcgcacctcggctggggccactggtacacgctgcgggagctggaggaggccaccgccgcgttcgctcccgagcacgtcgtcggcgagggcgggtacggcatcgtctaccgcggcgtcctcgccgacggctaccaggtcgccgtgaagaacctcctcaacaacaggggacaagccgagcgggagttcagggtggaggtggaggccatcggccgcgtccggcacaagaatctggtccggctactgggctactgcgccgagggcgcccaacggatacttgtgtacgagtacgtggacaacggcaacctcgagcagtggctgcacggcgacgtcggggcagtgagcccgctcacctgggacgtccggatgaacatcgtgctcggcatggccaaagggatcacgtacctgcacgaggggctggaacccaaggtggtgcacagggacatcaagtcgagcaacatcctgctggacaggaggtggaacccgaaggtctcggacttcggcctcgccaagctcctgggggcggacagcaactacgtcaccaccagagtgatgggaacgtttggctacggccccagagtacgctagcaccggcatgctgaacgagaggagcgacgtgtacagcttcgggatcctgatcatggagatcatctccggccgaagccccgtcgactacgccaggcctgccggagaggtaaaccttgtagagtggctcaagaacaaggtgaccaacagggactacgaggccatcgtggacccgaagctgccggagaagccgtcctccaaggcgctcaagaaggcgctcctggtcgcgctgaggtgcgtggatcccgactcgcagaaacggcccaagatggggcacgtaatccacatgctcgaagtcgacgacttcccgtatcgagaggatcgtcgaactcttcggccgggcaacggcagccccctggagaaggcgaggaatccggcggcggggtcatgcgacggcagcagctgctacgggggcgacacgaccaccgcgagcacgccgtccagactagtgcaggacatgtagtagtgatgtgtttgtagccagctgctgctggccttctgagctctgcctgcgggctgcggggcaacatggagatggacatgctgcaactctgctccgtcgttaattaaaggttcccttcctaggtgttgattttggactcaacagtgacttgacgtaagttttgccgcccgatggccaactgtttgtatagggaactgctgctcttcatctcaggccctaagtttgactgttctttgattcgcgtcatgatgtaaaaataaaagcgtgcgtctgtattggtc

SEQ ID NO: 10021 - protein, 343 aa, Zea mays subsp. mays
  peptide (1)..(343): Ceres Seq. ID no. 13636276
MSPPPPPPLLRNELSRRTAVLGLRLWVLVGIAVGAAFVLLLVLISLHLAAARRRRPRKGVAHAPAGAPPLSPSTIPPVSKEIQEVAVHVGSLRHYLETGHAFLKDGGDGDGDGESVAHGSQRVHIEAGKGQRMVAAASDALSAAVGPEVSHLGWGHWYTLRELEEATAAFAPEHVVGEGGYGIVYRGVLADGYQVAVKNLLNNRGQAEREFRVEVEAIGRVRHKNLVRLLGYCAEGAQRILVYEYVDNGNLEQWLHGDVGAVSPLTWDVRMNIVLGMAKGITYLHEGLEPKVVHRDIKSSNILLDRRWNPKVSDFGLAKLLGADSNYVTTRVMGTFGYGPRVR

SEQ ID NO: 10022 - protein, 211 aa, Zea mays subsp. mays
  peptide (1)..(211): Ceres Seq. ID no. 13636277
MVAAASDALSAAVGPEVSHLGWGHWYTLRELEEATAAFAPEHVVGEGGYGIVYRGVLADGYQVAVKNLLNNRGQAEREFRVEVEAIGRVRHKNLVRLLGYCAEGAQRILVYEYVDNGNLEQWLHGDVGAVSPLTWDVRMNIVLGMAKGITYLHEGLEPKVVHRDIKSSNILLDRRWNPKVSDFGLAKLLGADSNYVTTRVMGTFGYGPRVR

SEQ ID NO: 10023 - DNA, 1250 bp, Zea mays subsp. mays
  misc_feature (1)..(1250): Ceres Seq. ID no. 12382282
  misc_feature (1)..(1250): Ortholog of  Ceres SEQ ID NO 15177991 as cited in SEQ ID NO 53915
  misc_feature (1)..(1250): Ortholog of  Ceres SEQ ID NO 15174347 as cited in SEQ ID NO 58577
  misc_feature (1)..(1250): Ortholog of  Ceres SEQ ID NO 13596609 as cited in SEQ ID NO 63070
  misc_feature (1)..(1250): Ortholog of  Ceres SEQ ID NO 12616895 as cited in SEQ ID NO 63909
  misc_feature (1)..(1250): Ortholog of  Ceres SEQ ID NO 14302096 as cited in SEQ ID NO 68356
  misc_feature (1)..(1250): Ortholog of  Ceres SEQ ID NO 13598574 as cited in SEQ ID NO 69083
aagaaaaggagaaccactgctcgcgctttgcaccagaccactagctccgagaagcggcaggcaggcaggcactcgaacaaatcagcagagcagggacacatgatatatataatatataaaccgagagagcacagagcaacccaagagagcaactgagcagccagccgtggaggaagagatgtacccataccgcatgagcaacgtgatgatcgggtacctgaacctggccacgctcctggcctcgctccccatcatcggggcggggctgtggctggcaaggggtagctcctcctcctccaccaccacgtgctcgtcgatcctgcagacgccgctcctcgccgtgggcttcgcggcgctgctggtctcgctcgccggcttcgtgggcgcctgcttccacgtggcctgggcgctgcggctgtacctcgccgccgtcgcgctgctcgtcgccttcctcctcggcctcaccgcgttcggcttcgcggtcaccgcgggcggcggcggcgcgcaggtgtacggccggccgtaccgggagtaccgcgtcacggactactcggcgtggctccagaagcgcatgcaggacgacaggtactggcgccccgccctcgcctgcgtcgtcgggtccaaggcctgccccaagatccagaactggacgcccatggactacctccagcacgatctcacgccaatacagtccggctgctgcaagccgccgacggcgtgccagtacagcggaggcatgccagtcggggcgcaggacgaggactgctaccggtggaacaacgccccggacatcctctgctaccggtgcgactcgtgcagggccggcgtgatggagcaggtgcgccaggactggcacaagatctttgtgctcgacgtcgccgtgctcgccgctctcgtctgcatctgctcatgcgggtgctgcgccttcaggaacgctcgccgctcccggtcccagtacccatacggggtaaaccaaacgtccaagataaacccacgctgggactactggtggcgatgatggggtggtagaagagaacaaatctactaggctagctgtagcttctcaatgcctgtatgatattttgatccaatcttctgtggaaaaaagataaaataacacttgggatctgtatgtgttattagcccctgtggtactatgtttgtttccaggtctgcagagtttagggtttagggtttctgtaaatatttgagttaagaggagactaagccatgaagtaaaagagatgcct

SEQ ID NO: 10024 - protein, 279 aa, Zea mays subsp. mays
  peptide (1)..(279): Ceres Seq. ID no. 12382283
MYPYRMSNVMIGYLNLATLLASLPIIGAGLWLARGSSSSSTTTCSSILQTPLLAVGFAALLVSLAGFVGACFHVAWALRLYLAAVALLVAFLLGLTAFGFAVTAGGGGAQVYGRPYREYRVTDYSAWLQKRMQDDRYWRPALACVVGSKACPKIQNWTPMDYLQHDLTPIQSGCCKPPTACQYSGGMPVGAQDEDCYRWNNAPDILCYRCDSCRAGVMEQVRQDWHKIFVLDVAVLAALVCICSCGCCAFRNARRSRSQYPYGVNQTSKINPRWDYWWR

SEQ ID NO: 10025 - protein, 274 aa, Zea mays subsp. mays
  peptide (1)..(274): Ceres Seq. ID no. 12382284
MSNVMIGYLNLATLLASLPIIGAGLWLARGSSSSSTTTCSSILQTPLLAVGFAALLVSLAGFVGACFHVAWALRLYLAAVALLVAFLLGLTAFGFAVTAGGGGAQVYGRPYREYRVTDYSAWLQKRMQDDRYWRPALACVVGSKACPKIQNWTPMDYLQHDLTPIQSGCCKPPTACQYSGGMPVGAQDEDCYRWNNAPDILCYRCDSCRAGVMEQVRQDWHKIFVLDVAVLAALVCICSCGCCAFRNARRSRSQYPYGVNQTSKINPRWDYWWR

SEQ ID NO: 10026 - protein, 270 aa, Zea mays subsp. mays
  peptide (1)..(270): Ceres Seq. ID no. 12382285
MIGYLNLATLLASLPIIGAGLWLARGSSSSSTTTCSSILQTPLLAVGFAALLVSLAGFVGACFHVAWALRLYLAAVALLVAFLLGLTAFGFAVTAGGGGAQVYGRPYREYRVTDYSAWLQKRMQDDRYWRPALACVVGSKACPKIQNWTPMDYLQHDLTPIQSGCCKPPTACQYSGGMPVGAQDEDCYRWNNAPDILCYRCDSCRAGVMEQVRQDWHKIFVLDVAVLAALVCICSCGCCAFRNARRSRSQYPYGVNQTSKINPRWDYWWR

SEQ ID NO: 10027 - DNA, 1697 bp, Zea mays subsp. mays
  misc_feature (1)..(1697): Ceres Seq. ID no. 12349504
  misc_feature (1)..(1697): Ortholog of  Ceres SEQ ID NO 14310803 as cited in SEQ ID NO 58463
  misc_feature (1)..(1697): Ortholog of  Ceres SEQ ID NO 13663769 as cited in SEQ ID NO 60793
ctactgctactgtcagtgtcggcacgaggaagtgtgctaagagaggagacagcatctggggtgcatggttcttcttcaatcactacttcaagcctgctcttgtggagaagccaaaggggaaggtgacgcgagacgcgtctgggagcatctcgggctttgacaagtccgatctacgccttgatgtcttcctggtgcagcatgacatggagaacatgtacatgtgggttttcaaggagcggcccgacaatgccctcgggaagatgcagctcaggagcttcatgaatgggcattccaagcacggggagccgtctttcccattcagtgctgataagggcttttccaggtcacaccgcatgcagcgaaagcaataccgggggctttcgaacccgcagtgccttcatgggattgagatcgtgggctcaccgaatttgtcagcagttcctgatgcagacttgaagaggtgggctgaacttacaggcagggaacttaatttctcaataccatctgaagccagcgactttgaggcatggaggaatcttcccagcactgattttgaacttgacaggtcacatccaccggcagcaaagagtgccactcatggatctcatagccataagaagggattgaatggttcaggtcttaacctttcaactccaccatcatcagacgatgggatggacctttcaccaaaatgtgccaaacgccgcaagggtttctttggccatggcgtagaggaggactgtgtgatggcaaacaattcttgttctgacagagagcaagaggtagaagctcacgccagcgagccatcatggatgcatgagttcaccggtgttgccaagcacgcaagcgggcctgtcactgctgccaagacaatatacgaggacgaggaagggtacctaatcgtggtgagcatgcttttctccgacccgcatagcgtcaaggtgtcctggaggaacacgctcacgcatggcatcgtgaagataacgtgcgtgagcactgcccggatgccctacatcaagagacacgacaggacgttcaagctgacggacccttcccccgagcactgccctcccggcgagtttgtgagggagatacctctggccacaaggattccagaagacgcgaagatcgaggcgtattacgacgagacgggaactggactggaaatcatggtcccaaagcaccgggttggaccggaggagcatgaagttcgggtgtgcatgaggcccccgcatcttggcgacagcgatcttgtgctatcctagaacgaggaaaacaggtagctttcggattttccagtgccatgtttattgccatgagatactcgaacgtaacaggtggtgccatggatcagtgagagccatcatatttgctgctaaacatgtagcttataagttgagaaattcttttcctccataagtccccgttcggttaggctggaataagactaggaactattccaggtgaccaattgttatactacaaattatacagttatttcagctgggatccttcctggagtagattcctgaataaccgaacgggacctaaaagttctgtggtttaggcgaaagttacctcctacctctgttaattccccccctcccctctgtacctctgttacacaagtacatcactattggcgatcttccttgactatctgaaagctggctagtgttaagattctgtgtatattc

SEQ ID NO: 10028 - protein, 420 aa, Zea mays subsp. mays
  peptide (1)..(420): Ceres Seq. ID no. 12349505
TATVSVGTRKCAKRGDSIWGAWFFFNHYFKPALVEKPKGKVTRDASGSISGFDKSDLRLDVFLVQHDMENMYMWVFKERPDNALGKMQLRSFMNGHSKHGEPSFPFSADKGFSRSHRMQRKQYRGLSNPQCLHGIEIVGSPNLSAVPDADLKRWAELTGRELNFSIPSEASDFEAWRNLPSTDFELDRSHPPAAKSATHGSHSHKKGLNGSGLNLSTPPSSDDGMDLSPKCAKRRKGFFGHGVEEDCVMANNSCSDREQEVEAHASEPSWMHEFTGVAKHASGPVTAAKTIYEDEEGYLIVVSMLFSDPHSVKVSWRNTLTHGIVKITCVSTARMPYIKRHDRTFKLTDPSPEHCPPGEFVREIPLATRIPEDAKIEAYYDETGTGLEIMVPKHRVGPEEHEVRVCMRPPHLGDSDLVLS

SEQ ID NO: 10029 - protein, 353 aa, Zea mays subsp. mays
  peptide (1)..(353): Ceres Seq. ID no. 12349506
MENMYMWVFKERPDNALGKMQLRSFMNGHSKHGEPSFPFSADKGFSRSHRMQRKQYRGLSNPQCLHGIEIVGSPNLSAVPDADLKRWAELTGRELNFSIPSEASDFEAWRNLPSTDFELDRSHPPAAKSATHGSHSHKKGLNGSGLNLSTPPSSDDGMDLSPKCAKRRKGFFGHGVEEDCVMANNSCSDREQEVEAHASEPSWMHEFTGVAKHASGPVTAAKTIYEDEEGYLIVVSMLFSDPHSVKVSWRNTLTHGIVKITCVSTARMPYIKRHDRTFKLTDPSPEHCPPGEFVREIPLATRIPEDAKIEAYYDETGTGLEIMVPKHRVGPEEHEVRVCMRPPHLGDSDLVLS

SEQ ID NO: 10030 - protein, 350 aa, Zea mays subsp. mays
  peptide (1)..(350): Ceres Seq. ID no. 12349507
MYMWVFKERPDNALGKMQLRSFMNGHSKHGEPSFPFSADKGFSRSHRMQRKQYRGLSNPQCLHGIEIVGSPNLSAVPDADLKRWAELTGRELNFSIPSEASDFEAWRNLPSTDFELDRSHPPAAKSATHGSHSHKKGLNGSGLNLSTPPSSDDGMDLSPKCAKRRKGFFGHGVEEDCVMANNSCSDREQEVEAHASEPSWMHEFTGVAKHASGPVTAAKTIYEDEEGYLIVVSMLFSDPHSVKVSWRNTLTHGIVKITCVSTARMPYIKRHDRTFKLTDPSPEHCPPGEFVREIPLATRIPEDAKIEAYYDETGTGLEIMVPKHRVGPEEHEVRVCMRPPHLGDSDLVLS

SEQ ID NO: 10031 - DNA, 1828 bp, Zea mays subsp. mays
  misc_feature (1)..(1828): Ceres Seq. ID no. 12357360
  misc_feature (1)..(1828): Ortholog of  Ceres SEQ ID NO 15179007 as cited in SEQ ID NO 1038
  misc_feature (1)..(1828): Ortholog of  Ceres SEQ ID NO 15226449 as cited in SEQ ID NO 58879
  misc_feature (1)..(1828): Ortholog of  Ceres SEQ ID NO 13597146 as cited in SEQ ID NO 63311
aaaaaaaccagcgactcacacacccgcgcgccgcttctgtagggccccaaccaaccgcgcagggagaaaaccaccacagcacatgcagcgcctcgcctcctcccggaggctcctccaggccgcgctcgcccccgcccgggccaactccagcctctccgcggccgccgtcgccgcgcccgcgccagcgaatggcgccttcccgaagatgccggccttcgactacacgccgccgccgtacgacgggccgcgcgccgaggagatcttccggaagcgcgctcagttcctcagcccatccctttttcatttctacgatcgcccattgaacatagtcgaaggaaagatgcagtacctatttgatgaggatggccgtcgttacctggatgctttcggtggcattgcaacagtttgttgtgggcactgccatccagatgttgttgaagccatagtaaaccaggcaaagcggatccagcactccacagttctatatctcaatcatgcaattgcagattttgccgaggcattggcttccaaaatgcctggtgatctgaaggttgttttcttcacaaattcaggcacggaggcaaatgagcttgcactgatgattgcacggctttacactggttgcaatgacattatctctcttaggaatggataccatgggaatgctgctggaacaatgggtgctactgctcaatccaattggaaattcaatgttgttcagacgggagtacaccatgcgcttaatccagaccccttcagaggtgcttttggttctgacggggagaaatacgccagagatgttcaggaaatggtcgaatttggaactacagggagagttggtgggttcatttcggaagccatacagggggttggtggaatagtggaactggcaccaggatacttgcccgtggcatacagtatggtaaggaaagccggtgggctctgcatcgccgacgaagttcaggcaggagtcgcgagaactggaagccacttctggggattcgaagggcatggtgtcatcccggacatagtcaccatggccaagggtatcgggaatggcatacccataggagctgtagtaacgacgccagagatcgctcaggtgttgacccgcagaagctacttcaatacctttggtggtaaccctgtcagcactgcaggcgggcatgcggtgctcaaagtgctggagaaggagaagctccaggagaatgcgtttgttgtgggctcctacctaaaggaacagcttaacaatctgaaagacaagcatgagatcatcggtgacgttaggggcaaaggcttccttcttggagttgagctggtgacagaccatgaaaagaaaaccccagccaaagctgagatctcacgtgtcatgaaccatatgaaagatatgggagtgttggttggtaagggtggtttctacgggaacgtttttaggataacaccaccgttgtgcttcaccaaagaggattccgacttcttcattgaggtgatggacattgcgctctcgaagctgtgaggcaagcagggcgaagatgatgtgcaaaccctggtccgtcgccatgggatttttgcccatgaataatattaagattaatgagacagcacctcgttgtctcttaatctaagacgatgccatgtcatccggtggcatggtattcctaatcctacctgccaaatcactggtattgctcgctgtctcgtaatcagacccatggagcaatatgattcttgtaaactctagcttcatccaatctgttcctcctgatctaactagtctgaatagcagctgttcgtttgtgaccaatatcaacttcttttcagatgctcc

SEQ ID NO: 10032 - protein, 504 aa, Zea mays subsp. mays
  peptide (1)..(504): Ceres Seq. ID no. 12357361
KKPATHTPARRFCRAPTNRAGRKPPQHMQRLASSRRLLQAALAPARANSSLSAAAVAAPAPANGAFPKMPAFDYTPPPYDGPRAEEIFRKRAQFLSPSLFHFYDRPLNIVEGKMQYLFDEDGRRYLDAFGGIATVCCGHCHPDVVEAIVNQAKRIQHSTVLYLNHAIADFAEALASKMPGDLKVVFFTNSGTEANELALMIARLYTGCNDIISLRNGYHGNAAGTMGATAQSNWKFNVVQTGVHHALNPDPFRGAFGSDGEKYARDVQEMVEFGTTGRVGGFISEAIQGVGGIVELAPGYLPVAYSMVRKAGGLCIADEVQAGVARTGSHFWGFEGHGVIPDIVTMAKGIGNGIPIGAVVTTPEIAQVLTRRSYFNTFGGNPVSTAGGHAVLKVLEKEKLQENAFVVGSYLKEQLNNLKDKHEIIGDVRGKGFLLGVELVTDHEKKTPAKAEISRVMNHMKDMGVLVGKGGFYGNVFRITPPLCFTKEDSDFFIEVMDIALSKL

SEQ ID NO: 10033 - protein, 477 aa, Zea mays subsp. mays
  peptide (1)..(477): Ceres Seq. ID no. 12357362
MQRLASSRRLLQAALAPARANSSLSAAAVAAPAPANGAFPKMPAFDYTPPPYDGPRAEEIFRKRAQFLSPSLFHFYDRPLNIVEGKMQYLFDEDGRRYLDAFGGIATVCCGHCHPDVVEAIVNQAKRIQHSTVLYLNHAIADFAEALASKMPGDLKVVFFTNSGTEANELALMIARLYTGCNDIISLRNGYHGNAAGTMGATAQSNWKFNVVQTGVHHALNPDPFRGAFGSDGEKYARDVQEMVEFGTTGRVGGFISEAIQGVGGIVELAPGYLPVAYSMVRKAGGLCIADEVQAGVARTGSHFWGFEGHGVIPDIVTMAKGIGNGIPIGAVVTTPEIAQVLTRRSYFNTFGGNPVSTAGGHAVLKVLEKEKLQENAFVVGSYLKEQLNNLKDKHEIIGDVRGKGFLLGVELVTDHEKKTPAKAEISRVMNHMKDMGVLVGKGGFYGNVFRITPPLCFTKEDSDFFIEVMDIALSKL

SEQ ID NO: 10034 - protein, 436 aa, Zea mays subsp. mays
  peptide (1)..(436): Ceres Seq. ID no. 12357363
MPAFDYTPPPYDGPRAEEIFRKRAQFLSPSLFHFYDRPLNIVEGKMQYLFDEDGRRYLDAFGGIATVCCGHCHPDVVEAIVNQAKRIQHSTVLYLNHAIADFAEALASKMPGDLKVVFFTNSGTEANELALMIARLYTGCNDIISLRNGYHGNAAGTMGATAQSNWKFNVVQTGVHHALNPDPFRGAFGSDGEKYARDVQEMVEFGTTGRVGGFISEAIQGVGGIVELAPGYLPVAYSMVRKAGGLCIADEVQAGVARTGSHFWGFEGHGVIPDIVTMAKGIGNGIPIGAVVTTPEIAQVLTRRSYFNTFGGNPVSTAGGHAVLKVLEKEKLQENAFVVGSYLKEQLNNLKDKHEIIGDVRGKGFLLGVELVTDHEKKTPAKAEISRVMNHMKDMGVLVGKGGFYGNVFRITPPLCFTKEDSDFFIEVMDIALSKL

SEQ ID NO: 10035 - DNA, 1276 bp, Zea mays subsp. mays
  misc_feature (1)..(1276): Ceres Seq. ID no. 12365996
  misc_feature (1)..(1276): Ortholog of  Ceres SEQ ID NO 13582332 as cited in SEQ ID NO 59890
  misc_feature (1)..(1276): Ortholog of  Ceres SEQ ID NO 13598278 as cited in SEQ ID NO 68456
gtaggattgtgggactcccagctggtggagtggagcttccgagtgtccactccaattctccaacgccagggtgttgcagacttgcaggcagtggaacatggacaaggaaggcgacggccaccaccaccacgccatccgagtcccatccccagataacatagcaatggtggaggagacatcgcagccaaatggcgcaccgtcgctgagacggaaagcaggcgagatgatcgccacctccctggagacgtaccggagcaagcccttctccttctggctactcctgttcctgagcagcggcgccatgctcaccgcgttcccggcgtcgagcctcctgtcgcggctctactacaacgagggcgggcagagcaagtggatcctgtcgtgggcggccgtcgccggctggcccctgcccgcgctgctcctgctgccgctgtatctcctcggcagggcgtcgccgacgccgctgtcgctgtcgctgtgctcctggtacgtgctccttgggctcctcagcgccgccgacaacctcatgtacgcgtgggcctacgcgtacctcccggcgtccacggcctcgctcgtcgccgcgtcgtcgctcgccttctccgcgctcttcggccgcgccatcgccaagaaccggctcaacatgtcctcgctcaacgccgtcgtcgtgatcacggcgggcgtggtgatcgtcgcgctggactccgggtcggacaggccccccggcgtcacgccccgccagtacgcgctcggcttcgtcctggacgtgctcgggtcggcgctccacggcctcatcttcgcgctctccgagctcgtcttcgccagggccctcggtaggcgctcgttccacgtggtgctggagcagcaggcggcggtgtcgctctgcgccttcgccttcacctccgcgggcctcgccgtcgcggagggcttcccggccatgcggcgcgagtcggcacggtttgcgcacggtggccagccggcgtacgcgaacttgatggtgtggacggcactcacgttccagctgggcgtcctcggaggcaccggcgtgctgttcctggcgtccactgtcctcgccggcgtgctgaacgctgtcagggtgcccctgacgagcatcgccgcggtgatctggttccatgaccccatgagtggcttcaagatcttggctctggtcatcacggtgtgggggttcgcgtcctatattcttggacactcctcttttagaaaaacgtaacaaattagatatcatctcattgcaaaaaatgatgaaagattttaattc

SEQ ID NO: 10036 - protein, 376 aa, Zea mays subsp. mays
  peptide (1)..(376): Ceres Seq. ID no. 12365997
MDKEGDGHHHHAIRVPSPDNIAMVEETSQPNGAPSLRRKAGEMIATSLETYRSKPFSFWLLLFLSSGAMLTAFPASSLLSRLYYNEGGQSKWILSWAAVAGWPLPALLLLPLYLLGRASPTPLSLSLCSWYVLLGLLSAADNLMYAWAYAYLPASTASLVAASSLAFSALFGRAIAKNRLNMSSLNAVVVITAGVVIVALDSGSDRPPGVTPRQYALGFVLDVLGSALHGLIFALSELVFARALGRRSFHVVLEQQAAVSLCAFAFTSAGLAVAEGFPAMRRESARFAHGGQPAYANLMVWTALTFQLGVLGGTGVLFLASTVLAGVLNAVRVPLTSIAAVIWFHDPMSGFKILALVITVWGFASYILGHSSFRKT

SEQ ID NO: 10037 - protein, 354 aa, Zea mays subsp. mays
  peptide (1)..(354): Ceres Seq. ID no. 12365998
MVEETSQPNGAPSLRRKAGEMIATSLETYRSKPFSFWLLLFLSSGAMLTAFPASSLLSRLYYNEGGQSKWILSWAAVAGWPLPALLLLPLYLLGRASPTPLSLSLCSWYVLLGLLSAADNLMYAWAYAYLPASTASLVAASSLAFSALFGRAIAKNRLNMSSLNAVVVITAGVVIVALDSGSDRPPGVTPRQYALGFVLDVLGSALHGLIFALSELVFARALGRRSFHVVLEQQAAVSLCAFAFTSAGLAVAEGFPAMRRESARFAHGGQPAYANLMVWTALTFQLGVLGGTGVLFLASTVLAGVLNAVRVPLTSIAAVIWFHDPMSGFKILALVITVWGFASYILGHSSFRKT

SEQ ID NO: 10038 - protein, 334 aa, Zea mays subsp. mays
  peptide (1)..(334): Ceres Seq. ID no. 12365999
MIATSLETYRSKPFSFWLLLFLSSGAMLTAFPASSLLSRLYYNEGGQSKWILSWAAVAGWPLPALLLLPLYLLGRASPTPLSLSLCSWYVLLGLLSAADNLMYAWAYAYLPASTASLVAASSLAFSALFGRAIAKNRLNMSSLNAVVVITAGVVIVALDSGSDRPPGVTPRQYALGFVLDVLGSALHGLIFALSELVFARALGRRSFHVVLEQQAAVSLCAFAFTSAGLAVAEGFPAMRRESARFAHGGQPAYANLMVWTALTFQLGVLGGTGVLFLASTVLAGVLNAVRVPLTSIAAVIWFHDPMSGFKILALVITVWGFASYILGHSSFRKT

SEQ ID NO: 10039 - DNA, 1674 bp, Zea mays subsp. mays
  misc_feature (1)..(1674): Ceres Seq. ID no. 12405979
  misc_feature (1)..(1674): Ortholog of  Ceres SEQ ID NO 14302836 as cited in SEQ ID NO 65013
gcacgagaccattacctagaacatcctaatcgaaaagtttcgcctcgcgcctgccctgctgtcctgctgctgctattttgccattgcatccatttccgggggacggagtggaggagggcgtcgcctgcgctgcgttgcttcgcgtgggaagcgtagcgtgcttcgtttaggcctctcgccaatatccgagtgctaatctagagaggcctttggctttgccagacgcgcctgtacgcgccctttctgggaggcagccgcttgctctcgcctccaatggccgagatctgctgcgaagaagccaagtccacgccggcgaccgccgtggctgcggcttcagtctccgccacggccgctgcggccgccgccgtggcagtggcctcgtcggcgttagagaggaggcgacgcaggttggagatgaggaggttccgcgtcgcgggcgatcccgaggcgccggtcgcggaggacgtccgcgccgccaagcggcagaggctggcgcgcacgctgtccagcacctgccccgacgcgggctcaggctcgggctccggactcggactccgacaggcctgccctaccggagcggttgcccaggtacggggtcacctccgtctgcggccgacgccgcgagatggaggacacggtctccgttaggccggacttcgtgcccggcaccagcaaacaacacttcttcggcgtcttccgacggccacggctgctcccacgtagcaacgatgtgccagaacatgatgcacgaggtggtcgcggacgagcacaggaaggcagattgttctggcgaagagacggcgtggaaggccgtgatggagaggagcttcgcgcgactggacgagcaggccgccagctgggcgaccagccgcagccgcgacgagccctcctgcaggtgcgagcagcagaagcccttgcgttgcgatcacgtggggtccaccgccgtggtcgccgtcgtcagccccacccacgttgtcgtcgccaacgccggcgactcccgcgccgtcctatcccgcgccggcgtccccgttccgctgtccgtcgaccacaagcctgaccggcctgacgagctggcgcgcatcgaggcggcgggcggccgcgtcatttactgggacggtgctcgtgttctcggcgtcctcgccatgtctcgagccataggcgacggatacctgaanccgttcgtgtcgtcggagccggaggtaacggtgacggagcgcaccgacgacgacgagtgcctggtcctggccagcgacggcctgtgggacgtcgtgaccaacgagatggcgtgcgaggtcgtccgcgcgtgcttccacagcaacggtccgccggcgccggccgctcgggcgaacggcgcggccctcccggcagccgagaacggatccgcggtcgccgagggcgtgagcgtggaggattccgacaaggcgtgctccgacgcggccatgctgctggcgaagctggcgttggcccggcggagcgccgataatgttagcgtggtcgtcgtggatctccgccgggggatatgatttgccttcttttttagccctcttggaatccaagctaatttctcccccgttttcttccatacttttagttctgttttgatttagtattaatagtagttaccaatcagacgcttttcttctctcaaacgaggaattaaaagccantnggacc

SEQ ID NO: 10040 - protein, 264 aa, Zea mays subsp. mays
  peptide (1)..(264): Ceres Seq. ID no. 12405980
  misc_feature (149)..(149): Xaa is any aa, unknown or other
MCQNMMHEVVADEHRKADCSGEETAWKAVMERSFARLDEQAASWATSRSRDEPSCRCEQQKPLRCDHVGSTAVVAVVSPTHVVVANAGDSRAVLSRAGVPVPLSVDHKPDRPDELARIEAAGGRVIYWDGARVLGVLAMSRAIGDGYLXPFVSSEPEVTVTERTDDDECLVLASDGLWDVVTNEMACEVVRACFHSNGPPAPAARANGAALPAAENGSAVAEGVSVEDSDKACSDAAMLLAKLALARRSADNVSVVVVDLRRGI

SEQ ID NO: 10041 - protein, 260 aa, Zea mays subsp. mays
  peptide (1)..(260): Ceres Seq. ID no. 12405981
  misc_feature (145)..(145): Xaa is any aa, unknown or other
MMHEVVADEHRKADCSGEETAWKAVMERSFARLDEQAASWATSRSRDEPSCRCEQQKPLRCDHVGSTAVVAVVSPTHVVVANAGDSRAVLSRAGVPVPLSVDHKPDRPDELARIEAAGGRVIYWDGARVLGVLAMSRAIGDGYLXPFVSSEPEVTVTERTDDDECLVLASDGLWDVVTNEMACEVVRACFHSNGPPAPAARANGAALPAAENGSAVAEGVSVEDSDKACSDAAMLLAKLALARRSADNVSVVVVDLRRGI

SEQ ID NO: 10042 - protein, 259 aa, Zea mays subsp. mays
  peptide (1)..(259): Ceres Seq. ID no. 12405982
  misc_feature (144)..(144): Xaa is any aa, unknown or other
MHEVVADEHRKADCSGEETAWKAVMERSFARLDEQAASWATSRSRDEPSCRCEQQKPLRCDHVGSTAVVAVVSPTHVVVANAGDSRAVLSRAGVPVPLSVDHKPDRPDELARIEAAGGRVIYWDGARVLGVLAMSRAIGDGYLXPFVSSEPEVTVTERTDDDECLVLASDGLWDVVTNEMACEVVRACFHSNGPPAPAARANGAALPAAENGSAVAEGVSVEDSDKACSDAAMLLAKLALARRSADNVSVVVVDLRRGI

SEQ ID NO: 10043 - DNA, 1446 bp, Zea mays subsp. mays
  misc_feature (1)..(1446): Ceres Seq. ID no. 12354451
  misc_feature (1)..(1446): Ortholog of  Ceres SEQ ID NO 15175496 as cited in SEQ ID NO 56127
  misc_feature (1)..(1446): Ortholog of  Ceres SEQ ID NO 15175700 as cited in SEQ ID NO 58584
  misc_feature (1)..(1446): Ortholog of  Ceres SEQ ID NO 13596474 as cited in SEQ ID NO 62169
  misc_feature (1)..(1446): Ortholog of  Ceres SEQ ID NO 13596969 as cited in SEQ ID NO 63375
  misc_feature (1)..(1446): Ortholog of  Ceres SEQ ID NO 13597519 as cited in SEQ ID NO 64759
  misc_feature (1)..(1446): Ortholog of  Ceres SEQ ID NO 13597870 as cited in SEQ ID NO 64982
  misc_feature (1)..(1446): Ortholog of  Ceres SEQ ID NO 13595926 as cited in SEQ ID NO 67778
acagctcgcgcgcgcaccagacagacgccttctccctctcccgcagtacagggtacagctcgcgctcacacaagacaccatctccctgcctgcgatccgatgcgtccaacgttttcagccggggtacggtcctaccaccgctgtgcctaataattggcggctagctagctagctagctgcagctgctgcgatcctggatcggcacagccggttcttgatgtggagggagcggcggcgggcgctgctcctgctggtggccggcgcggcgctgggactgatcggtgccgcgctcgcgagcgcgccgccggaggccgcgctgaaggtcgggttctaccatgcgacgtgccccatcgcggaggacgtggtcctcgccgagatgaggctcatcctcatggaggacgccacggtcgcgccgtccctgctccggatgcactaccacgactgcttcgtgcagggctgcgacgggtcgatcatgctccagtcgaggaagaaggggaaggcggagcgggacgcgctgcccaaccgtagcatgcgagggttcgacgccatcgagcggatcaaggcccggctcgagaccgtctgcccgctcaccgtctcctgcgccgacatcatcgccatggcggcgagggacgccgtctacctgagccacgggccgtggtacgacgtggagaccgggcggcgcgacggcaacgtcaccgtggccgagtacgtcgacaacgacctgccgccgccggactccaacattgtcgacgtgaagaccttcttcagcgtcaagtcgcttaactcgaaggacatcgccgtcctcttcgggtgccacagcatcgggacctcccactgcggcccgatccagaagcggctctacaacttcaccggcaacatggacggccaggacccgtcgctggacccggcctacgccgccgagctcaggaagctctgcccgcctcccagacccggcgacgatgctaggaaggtcaaggtgcctttggaccccggcagcaactacaccttcgacctgagctactaccgccacgtgctcgccacgggcgggctgttccagtccgacggcagcctcctgcacgaccccgtcaccagaggctacgtcgagaaggtggccaaggcgtcgtcgcccgacgagtactacgcggacttcgccgcggcgatggtcaagatgggccgcaccgacgtgcttgtcggcgatcatggggagatcaggccaacgtgtggcatttttgttgactaggttcaggattgggttgaagatgcgaagataatctgtacgggtttctgtcaacgtgtactgtgcgtgctgttagatcagaaagagcacggtcgctgttaactgtgtatccgggaatgctgttctgttcacacacggtcgtcactgatctactgaattgtcagccatgatgtaattatttatctacgtattagttgtatattcttctc

SEQ ID NO: 10044 - protein, 340 aa, Zea mays subsp. mays
  peptide (1)..(340): Ceres Seq. ID no. 12354452
MWRERRRALLLLVAGAALGLIGAALASAPPEAALKVGFYHATCPIAEDVVLAEMRLILMEDATVAPSLLRMHYHDCFVQGCDGSIMLQSRKKGKAERDALPNRSMRGFDAIERIKARLETVCPLTVSCADIIAMAARDAVYLSHGPWYDVETGRRDGNVTVAEYVDNDLPPPDSNIVDVKTFFSVKSLNSKDIAVLFGCHSIGTSHCGPIQKRLYNFTGNMDGQDPSLDPAYAAELRKLCPPPRPGDDARKVKVPLDPGSNYTFDLSYYRHVLATGGLFQSDGSLLHDPVTRGYVEKVAKASSPDEYYADFAAAMVKMGRTDVLVGDHGEIRPTCGIFVD

SEQ ID NO: 10045 - protein, 287 aa, Zea mays subsp. mays
  peptide (1)..(287): Ceres Seq. ID no. 12354453
MRLILMEDATVAPSLLRMHYHDCFVQGCDGSIMLQSRKKGKAERDALPNRSMRGFDAIERIKARLETVCPLTVSCADIIAMAARDAVYLSHGPWYDVETGRRDGNVTVAEYVDNDLPPPDSNIVDVKTFFSVKSLNSKDIAVLFGCHSIGTSHCGPIQKRLYNFTGNMDGQDPSLDPAYAAELRKLCPPPRPGDDARKVKVPLDPGSNYTFDLSYYRHVLATGGLFQSDGSLLHDPVTRGYVEKVAKASSPDEYYADFAAAMVKMGRTDVLVGDHGEIRPTCGIFVD

SEQ ID NO: 10046 - protein, 282 aa, Zea mays subsp. mays
  peptide (1)..(282): Ceres Seq. ID no. 12354454
MEDATVAPSLLRMHYHDCFVQGCDGSIMLQSRKKGKAERDALPNRSMRGFDAIERIKARLETVCPLTVSCADIIAMAARDAVYLSHGPWYDVETGRRDGNVTVAEYVDNDLPPPDSNIVDVKTFFSVKSLNSKDIAVLFGCHSIGTSHCGPIQKRLYNFTGNMDGQDPSLDPAYAAELRKLCPPPRPGDDARKVKVPLDPGSNYTFDLSYYRHVLATGGLFQSDGSLLHDPVTRGYVEKVAKASSPDEYYADFAAAMVKMGRTDVLVGDHGEIRPTCGIFVD

SEQ ID NO: 10047 - DNA, 1390 bp, Zea mays subsp. mays
  misc_feature (1)..(1390): Ceres Seq. ID no. 12358650
  misc_feature (1)..(1390): Ortholog of  Ceres SEQ ID NO 14308851 as cited in SEQ ID NO 55618
attcggcctatcacaaccacttactctcgtgcgctctccgtgggagcgaggactcgcggccggcgcagcggcaggttctcctagatctccggtaacaaatggctgacggtgaggacattcagccccttgtttgtgacaatggaactggcatggtcaaggctggttttgctggtgacgatgcgccaagggctgttttcccaagcattgtcggacgcccccgtcacactggtgtgatggttggcatggggcagaaggatgcgtatgttggtgacgaggcccagtccaagaggggtatcctgactttgaagtaccccatcgaacatggtattgttagcaattgggatgacatggagaagatctggcaccacaccttctataatgaactccgtgtggcgcctgaagagcaccctgtgctgctgacggaagccccactcaaaccccaaagctaacagggagaagatgacccaaatcatgtttgagaccttcaatgttcctgccatgtatgtcgccatccaggctgtgctttccctgtacgccagtgggcgtacaactggtattgtgttggactctggtgatggtgtcagccacaccgtgccaatctacgaaggttatgcccttcctcatgccatcctgcgtcttgaccttgctgggcgtgacctgactgacagcctgatgaagatcctcaccgagagaggttactccttcaccaccacggccgaacgggaaatcgtacgggacatcaaggaaaagcttgcatacgtggctcttgactatgatcaggagctggagaacgccaagagcagctcatctgtggagaagagctacgagctgcctgatggccaggtgatcaccattggggcggagaggttccgatgccccgaggtcctcttccagccttccttcattggtatggaagctcctggcatccatgagaccacctacaactccatcatgaaatgcgacgtggatatcaggaaggacttgtatggtaacattgttctcagtggtggcacaaccatgttccctggcatcgctgaccgtatgagcaaggagatcaccgcccttgccccgagcagcatgaaaatcaaggtggtggctccacccgagaggaaatacagtgtctggataggagggtccatccttgcctccctgagcaccttccaacagatgtggatctcaaaggctgagtacgatgagtcaggaccagcgattgttcaccggaagtgcttctaagctcaagggcccccttcgtccccattctatgtattcctttccttgagtgcttttcttataagctactatgtttgagattgccggcctttgagcaggcaatgttgttggatctgtatcttgtggatcactacaatgcatgcgttgctccatcttcttt

SEQ ID NO: 10048 - protein, 257 aa, Zea mays subsp. mays
  peptide (1)..(257): Ceres Seq. ID no. 12358651
MTQIMFETFNVPAMYVAIQAVLSLYASGRTTGIVLDSGDGVSHTVPIYEGYALPHAILRLDLAGRDLTDSLMKILTERGYSFTTTAEREIVRDIKEKLAYVALDYDQELENAKSSSSVEKSYELPDGQVITIGAERFRCPEVLFQPSFIGMEAPGIHETTYNSIMKCDVDIRKDLYGNIVLSGGTTMFPGIADRMSKEITALAPSSMKIKVVAPPERKYSVWIGGSILASLSTFQQMWISKAEYDESGPAIVHRKCF

SEQ ID NO: 10049 - protein, 253 aa, Zea mays subsp. mays
  peptide (1)..(253): Ceres Seq. ID no. 12358652
MFETFNVPAMYVAIQAVLSLYASGRTTGIVLDSGDGVSHTVPIYEGYALPHAILRLDLAGRDLTDSLMKILTERGYSFTTTAEREIVRDIKEKLAYVALDYDQELENAKSSSSVEKSYELPDGQVITIGAERFRCPEVLFQPSFIGMEAPGIHETTYNSIMKCDVDIRKDLYGNIVLSGGTTMFPGIADRMSKEITALAPSSMKIKVVAPPERKYSVWIGGSILASLSTFQQMWISKAEYDESGPAIVHRKCF

SEQ ID NO: 10050 - protein, 244 aa, Zea mays subsp. mays
  peptide (1)..(244): Ceres Seq. ID no. 12358653
MYVAIQAVLSLYASGRTTGIVLDSGDGVSHTVPIYEGYALPHAILRLDLAGRDLTDSLMKILTERGYSFTTTAEREIVRDIKEKLAYVALDYDQELENAKSSSSVEKSYELPDGQVITIGAERFRCPEVLFQPSFIGMEAPGIHETTYNSIMKCDVDIRKDLYGNIVLSGGTTMFPGIADRMSKEITALAPSSMKIKVVAPPERKYSVWIGGSILASLSTFQQMWISKAEYDESGPAIVHRKCF

SEQ ID NO: 10051 - DNA, 1140 bp, Zea mays subsp. mays
  misc_feature (1)..(1140): Ceres Seq. ID no. 12381143
  misc_feature (1)..(1140): Ortholog of  Ceres SEQ ID NO 15170857 as cited in SEQ ID NO 54658
  misc_feature (1)..(1140): Ortholog of  Ceres SEQ ID NO 15180523 as cited in SEQ ID NO 0
accatcggaaaggccacagctagggttcgatacttcgatccccactccatctccaccgaagaccgtcgcgtcgctccgccaccgaagcagctcaaggactggctcgggtggggctgcgactgtcgcgcggttggatccggaggctatggagcagtgagctccgtagttgacggccacctcaatctccttggtgaatctgtatagatttctctataagatgagctggagatttcctctcttcggctctcagcagcagcaagcagatccaagtttccaggacatccctacgcagtcttggtaccctccctcggtggtaggttcctcttcacgtccatccacccctacctcttctagtgctagtctacaccaaagagcttcagatagtccgcagtcttcatcccgtgggcaaccatctcctgctgaggctgcagggataattgcccgtttgaaggataagagtattgaggagttacaaaggctattgaaagacagagaggcatataatgcattctttaactcacttgatcaagtgaaaacccagaacaatgtgcgtgatgagcttaaaaaagagacattgcaacttgcaagggaaaatttagaaaaggagcagcggattttggaacttaggaatcagtgcacaataattagaaccacggaactggctgctgctcaagaccgcctaactgatttggagaggcaaaaggatgatattatgaggtcctattcccctgccgcactgctcaacaagctccaaacatcaatggcaaagttggatgaggagtccgaggagctgcaccagaagttcctggagaaggacatcgaccttccaacctttgtgcagaagtacaagaagctccgcacggcttaccacaagcaggcgttgctccatctcgccggccagacatcactccgctgacatccggccaggcgtcatggcaactttgttgtatttctgctcgcctgttcttgttctacactatgcttggccctgttttacgagtgcagcctcttgtagggatttgccgaacatcagcggatattgcatgtatagttttatgtcttgcaaaaacgtcttatgtactctgtcctggtgtagtggtgtttacgtatctagtgtccaagttgggattcatttgtggt

SEQ ID NO: 10052 - protein, 232 aa, Zea mays subsp. mays
  peptide (1)..(232): Ceres Seq. ID no. 12381144
MSWRFPLFGSQQQQADPSFQDIPTQSWYPPSVVGSSSRPSTPTSSSASLHQRASDSPQSSSRGQPSPAEAAGIIARLKDKSIEELQRLLKDREAYNAFFNSLDQVKTQNNVRDELKKETLQLARENLEKEQRILELRNQCTIIRTTELAAAQDRLTDLERQKDDIMRSYSPAALLNKLQTSMAKLDEESEELHQKFLEKDIDLPTFVQKYKKLRTAYHKQALLHLAGQTSLR

SEQ ID NO: 10053 - protein, 122 aa, Zea mays subsp. mays
  peptide (1)..(122): Ceres Seq. ID no. 12381145
MRSPRSCTRSSWRRTSTFQPLCRSTRSSARLTTSRRCSISPARHHSADIRPGVMATLLYFCSPVLVLHYAWPCFTSAASCRDLPNISGYCMYSFMSCKNVLCTLSWCSGVYVSSVQVGIHLW

SEQ ID NO: 10054 - DNA, 1400 bp, Zea mays subsp. mays
  misc_feature (1)..(1400): Ceres Seq. ID no. 12356826
  misc_feature (1)..(1400): Ortholog of  Ceres SEQ ID NO 14313471 as cited in SEQ ID NO 64513
  misc_feature (1)..(1400): Ortholog of  Ceres SEQ ID NO 13591377 as cited in SEQ ID NO 66534
atcctgaacccgaaagctgaactaccacacacaacaaataactgacgcaggcgatccatcactccacagtgtccacacaccggtcggaaccgaggccaaccgccgccgccgccgccaatgtcgtcccctgcagcgccggtgcagccgccggcgccgcgcgcggtgcgcttcggcgtcctgggatgcgctgacatcgcgcgtaagatctcgcgcgcaatgctgatgctccctccgggcgccgccaccatcgccgccgtaggcagtcgctccgatgacaaggcccgccgcttcatctccgaaatcggcttccccgcggcgcgcgtccacgggtcctacgagtctctcctagaggacccggacgtggaggccgtgtacctcccgctccccactagtctccacgtgccctgggccacagccgtcgctgcgcgtggcaagcacctgctcctcgagaagcccaccgcgctctgcactgccgaactcgacgccatcctcagcgcctgcgacgcctccggggtccagttcatggacaccaccatgtggatccacaacccgcgcactgccaagatgcgggagatcgtcagcgacaaggacgcctttggcgacgtcagagtgataaacagtatgtgcagctttcgggcatccgaggaattcctcaagaatgacatcagggtaaagccagaccttgacgccttgggtgtcctcggtgatgttggatggtactgcatcctctcaatcctgtgggctgttgactatgagctgcctgagaccgtgatcgctcaccgccatcctgtcaagaaccaggctggcgtgctccttgcttgcggtgcgaccttgtactgggcagatggcaagactgcaaacttcaactgctcgtttcttgctaacctcgcctttgacgtgaccgtctatggcacaaacggcactctccatgtcactgacctggtcattccgtacgaagagagctctgcggagttcagtgtggcctcgaagtcaagcttcgtcaaacccaccatcggatgggatccattgccagagaagcatgttgttactactgatctgccacaggaggcactcatgatccaggaattcacaaggcttgtgcagaacgtccgcgccggtggcaggcctgagggtaagtggccggctatcacccggaagacgcaggtggtactggatgccgtgaaagcttctattgacaagggatctgaaccacttgaggttgccagctaaatacaacaaatgccagctccttgtgctaggtttgtacttaatggcttctactcgtatttgctgtcgcgcaaatgaaggtagtaattgtaatactgtcacgtaaattgaaactggtaattgtaataatcttaaggaatctggtcaaattgaggagaacatttttacagttc

SEQ ID NO: 10055 - protein, 370 aa, Zea mays subsp. mays
  peptide (1)..(370): Ceres Seq. ID no. 12356827
MSSPAAPVQPPAPRAVRFGVLGCADIARKISRAMLMLPPGAATIAAVGSRSDDKARRFISEIGFPAARVHGSYESLLEDPDVEAVYLPLPTSLHVPWATAVAARGKHLLLEKPTALCTAELDAILSACDASGVQFMDTTMWIHNPRTAKMREIVSDKDAFGDVRVINSMCSFRASEEFLKNDIRVKPDLDALGVLGDVGWYCILSILWAVDYELPETVIAHRHPVKNQAGVLLACGATLYWADGKTANFNCSFLANLAFDVTVYGTNGTLHVTDLVIPYEESSAEFSVASKSSFVKPTIGWDPLPEKHVVTTDLPQEALMIQEFTRLVQNVRAGGRPEGKWPAITRKTQVVLDAVKASIDKGSEPLEVAS

SEQ ID NO: 10056 - protein, 337 aa, Zea mays subsp. mays
  peptide (1)..(337): Ceres Seq. ID no. 12356828
MLMLPPGAATIAAVGSRSDDKARRFISEIGFPAARVHGSYESLLEDPDVEAVYLPLPTSLHVPWATAVAARGKHLLLEKPTALCTAELDAILSACDASGVQFMDTTMWIHNPRTAKMREIVSDKDAFGDVRVINSMCSFRASEEFLKNDIRVKPDLDALGVLGDVGWYCILSILWAVDYELPETVIAHRHPVKNQAGVLLACGATLYWADGKTANFNCSFLANLAFDVTVYGTNGTLHVTDLVIPYEESSAEFSVASKSSFVKPTIGWDPLPEKHVVTTDLPQEALMIQEFTRLVQNVRAGGRPEGKWPAITRKTQVVLDAVKASIDKGSEPLEVAS

SEQ ID NO: 10057 - protein, 335 aa, Zea mays subsp. mays
  peptide (1)..(335): Ceres Seq. ID no. 12356829
MLPPGAATIAAVGSRSDDKARRFISEIGFPAARVHGSYESLLEDPDVEAVYLPLPTSLHVPWATAVAARGKHLLLEKPTALCTAELDAILSACDASGVQFMDTTMWIHNPRTAKMREIVSDKDAFGDVRVINSMCSFRASEEFLKNDIRVKPDLDALGVLGDVGWYCILSILWAVDYELPETVIAHRHPVKNQAGVLLACGATLYWADGKTANFNCSFLANLAFDVTVYGTNGTLHVTDLVIPYEESSAEFSVASKSSFVKPTIGWDPLPEKHVVTTDLPQEALMIQEFTRLVQNVRAGGRPEGKWPAITRKTQVVLDAVKASIDKGSEPLEVAS

SEQ ID NO: 10058 - DNA, 1015 bp, Zea mays subsp. mays
  misc_feature (1)..(1015): Ceres Seq. ID no. 12354274
  misc_feature (1)..(1015): Ortholog of  Ceres SEQ ID NO 13599568 as cited in SEQ ID NO 509
  misc_feature (1)..(1015): Ortholog of  Ceres SEQ ID NO 15172903 as cited in SEQ ID NO 51839
  misc_feature (1)..(1015): Ortholog of  Ceres SEQ ID NO 15177108 as cited in SEQ ID NO 52015
  misc_feature (1)..(1015): Ortholog of  Ceres SEQ ID NO 13638595 as cited in SEQ ID NO 52050
  misc_feature (1)..(1015): Ortholog of  Ceres SEQ ID NO 13594748 as cited in SEQ ID NO 52114
  misc_feature (1)..(1015): Ortholog of  Ceres SEQ ID NO 15170313 as cited in SEQ ID NO 59293
  misc_feature (1)..(1015): Ortholog of  Ceres SEQ ID NO 12623490 as cited in SEQ ID NO 61136
  misc_feature (1)..(1015): Ortholog of  Ceres SEQ ID NO 14301870 as cited in SEQ ID NO 61501
  misc_feature (1)..(1015): Ortholog of  Ceres SEQ ID NO 15173596 as cited in SEQ ID NO 63267
  misc_feature (1)..(1015): Ortholog of  Ceres SEQ ID NO 12583993 as cited in SEQ ID NO 68098
  misc_feature (1)..(1015): Ortholog of  Ceres SEQ ID NO 13654535 as cited in SEQ ID NO 68227
attggaagccaccagcaagagaccaacagcaagggtgcgaagaaagggtggccccctagctagcctagctagagagagagagagtcatcataatactcagagagaagcacgagcacagctgcactagctagctactgcaaagaagcaagctctcgatcacaatggccgccattccttctctgctgcgtcgtcgactcgccattgtcatcgccaccaccgccatgctcgtcctgcttccctccccgtccgtcgccggcgaccccgacctgctccaggacatctgcgtcgcggacctcacgtccaccgtgaaggtgaacgggtacgcctgcaaggcggcggcggcggtgacggcggacgacttctacttcagcggcctaggcggcgcgggcaacacgagcgccagcgcctacggctccgcggtgacgggcgcgaacgtggagaaggtgccggggctgaacacgctgggcgtgtccatgtcgcgcatcgactacgcgccgggcgggggcctgaacccgccgcacacgcacccgcgcgccaccgagatggtgttcgtgctgcagggcaccctggacgtgggcttcgtcaccgccgccaacaaccgcctggtggcccgcaccctggcgcccggcgacgtgttcgtcttcccgcgcggcctcgtccacttccagcgcaacgccggcgacggccccgccgccgtcttgtccgcgttcaacagccagcttcccggcacgcagtccctcgccgccgcgctgttcgcggcgtcgcccgagctgcccgacgccgtgctcgccaaggcgttccaggtcggcaccaaggaggtggacaagatcaaggctaggctcgcgcccaaaaaggcctgaaggtcgtactgtttacgcggtcatccttgaatattttttttcccagattatgatttatgacttggttgctaccctgctgtacctccactaataagcaactgtctctgctagtctgctgcatgccttttatctgttatgtatgattcttcagctcc

SEQ ID NO: 10059 - protein, 232 aa, Zea mays subsp. mays
  peptide (1)..(232): Ceres Seq. ID no. 12354275
MAAIPSLLRRRLAIVIATTAMLVLLPSPSVAGDPDLLQDICVADLTSTVKVNGYACKAAAAVTADDFYFSGLGGAGNTSASAYGSAVTGANVEKVPGLNTLGVSMSRIDYAPGGGLNPPHTHPRATEMVFVLQGTLDVGFVTAANNRLVARTLAPGDVFVFPRGLVHFQRNAGDGPAAVLSAFNSQLPGTQSLAAALFAASPELPDAVLAKAFQVGTKEVDKIKARLAPKKA

SEQ ID NO: 10060 - protein, 212 aa, Zea mays subsp. mays
  peptide (1)..(212): Ceres Seq. ID no. 12354276
MLVLLPSPSVAGDPDLLQDICVADLTSTVKVNGYACKAAAAVTADDFYFSGLGGAGNTSASAYGSAVTGANVEKVPGLNTLGVSMSRIDYAPGGGLNPPHTHPRATEMVFVLQGTLDVGFVTAANNRLVARTLAPGDVFVFPRGLVHFQRNAGDGPAAVLSAFNSQLPGTQSLAAALFAASPELPDAVLAKAFQVGTKEVDKIKARLAPKKA

SEQ ID NO: 10061 - protein, 128 aa, Zea mays subsp. mays
  peptide (1)..(128): Ceres Seq. ID no. 12354277
MSRIDYAPGGGLNPPHTHPRATEMVFVLQGTLDVGFVTAANNRLVARTLAPGDVFVFPRGLVHFQRNAGDGPAAVLSAFNSQLPGTQSLAAALFAASPELPDAVLAKAFQVGTKEVDKIKARLAPKKA

SEQ ID NO: 10062 - DNA, 1689 bp, Zea mays subsp. mays
  misc_feature (1)..(1689): Ceres Seq. ID no. 12413652
  misc_feature (1)..(1689): Ortholog of  Ceres SEQ ID NO 15168513 as cited in SEQ ID NO 57022
  misc_feature (1)..(1689): Ortholog of  Ceres SEQ ID NO 13657610 as cited in SEQ ID NO 66165
  misc_feature (1)..(1689): Ortholog of  Ceres SEQ ID NO 15179123 as cited in SEQ ID NO 0
atcactgattctgattctgattccagccaccctgaccggcgaagcgcggctgacatttcccccccaccataccgccaccacctgagaagagatcgatccaatcagattaaccaattagcagggagggaggagaggggcaaaggcaatggccgggacggaggtggaggacccgccggcggcggcgttggaggtgcccgcgaaacgcggccttctgcggtacaactcgccgctggcgcaggtgtccctgctgggcctcatctgcttctgctgccccggcatgttcaacgcgctgtcgggcctcggcggcggaggccaggtcgaccccaccatcgccgacaacgccaacaccgcgctctacgcctgcttcgcggtgttcggcgtgctgggcggcgccgcgcacaacctgctgggcccgcgcgcgacgctgctggccggcgcgctcacgtacccgctctacgccggctccttcctctactacaaccaccgcccgggctcgcaggtgttccccgtcacggcgggcgccctgctcggcgccggcgcgggcttcctctgggcggcgcagggcgccgtcatgacgtcgtacccgccgcccaaccgccggggcacctacatctccctcttctggtgcctcttcaacctgggcggcgtcctcggcggcctcctccctttcgccctcaactacaaccgcggggacaagaaagggagcgtcagcgacggcacgtacatcgccttcatggcattcatgctcgtcggcgccgcgctcaccgtgctcgtgctgccgcccgccaggatcgtccgcgacgacggcaccagggccaccagggtcaccttctcctccccggccaccgagggcgccgagatcctcaagctcttcgccaactggaagatgctgctcgcgctgccggccgcctgggccagcaacttcttctacacctaccagttcaacaacgtcaacagcggcctcttcacgctccgcaccaggggcctcaacaacgtcttctactggggcgcgcagatgatcggctccgccggcatcggctacttcctcgacttcggcttcgccagccgccgaaagagggggctgttcggggtcgccgccgtcgccgccgtcggaacggccatctggggaggcggtctggccaaccagctcagctacaaagccgtgccggtggccgaccccatcgatttcaaggacggccaccgctacgccgggcccttcctgctctacttcagctacggactgctggatgccatgttccagagccttatctactggatcatcggcgcactcgccaacgactcccaaatcctcagcaggtacgtcgggttctacaagggagtgcagagtgcaggagcggcggtggcatggcaggtggacaggcgccacacgcccctcatgtcccagctgatcgtcaactgggggctcatgaccatcagctaccccttgcttgcgctgctggtgttcctggccgtgaaggacgagagctactcggtttcgtcggtggaggacggccgggagaaggacagcaagctgtccgcgccgaccagcttccactgatgaagaagaagaaggaggaaggatagaccaagatgcatgtcattgtaacacggtgtttccatccaagtaagttttagtagtagaaatcaagaaacaactggagtacctatacgaagaatatatatataccc

SEQ ID NO: 10063 - protein, 527 aa, Zea mays subsp. mays
  peptide (1)..(527): Ceres Seq. ID no. 12413653
ITDSDSDSSHPDRRSAADISPPPYRHHLRRDRSNQINQLAGREERGKGNGRDGGGGPAGGGVGGARETRPSAVQLAAGAGVPAGPHLLLLPRHVQRAVGPRRRRPGRPHHRRQRQHRALRLLRGVRRAGRRRAQPAGPARDAAGRRAHVPALRRLLPLLQPPPGLAGVPRHGGRPARRRRGLPLGGAGRRHDVVPAAQPPGHLHLPLLVPLQPGRRPRRPPPFRPQLQPRGQERERQRRHVHRLHGIHARRRRAHRARAAARQDRPRRRHQGHQGHLLLPGHRGRRDPQALRQLEDAARAAGRLGQQLLLHLPVQQRQQRPLHAPHQGPQQRLLLGRADDRLRRHRLLPRLRLRQPPKEGAVRGRRRRRRRNGHLGRRSGQPAQLQSRAGGRPHRFQGRPPLRRALPALLQLRTAGCHVPEPYLLDHRRTRQRLPNPQQVRRVLQGSAECRSGGGMAGGQAPHAPHVPADRQLGAHDHQLPLACAAGVPGREGRELLGFVGGGRPGEGQQAVRADQLPLMKKKKEEG

SEQ ID NO: 10064 - protein, 470 aa, Zea mays subsp. mays
  peptide (1)..(470): Ceres Seq. ID no. 12413654
MAGTEVEDPPAAALEVPAKRGLLRYNSPLAQVSLLGLICFCCPGMFNALSGLGGGGQVDPTIADNANTALYACFAVFGVLGGAAHNLLGPRATLLAGALTYPLYAGSFLYYNHRPGSQVFPVTAGALLGAGAGFLWAAQGAVMTSYPPPNRRGTYISLFWCLFNLGGVLGGLLPFALNYNRGDKKGSVSDGTYIAFMAFMLVGAALTVLVLPPARIVRDDGTRATRVTFSSPATEGAEILKLFANWKMLLALPAAWASNFFYTYQFNNVNSGLFTLRTRGLNNVFYWGAQMIGSAGIGYFLDFGFASRRKRGLFGVAAVAAVGTAIWGGGLANQLSYKAVPVADPIDFKDGHRYAGPFLLYFSYGLLDAMFQSLIYWIIGALANDSQILSRYVGFYKGVQSAGAAVAWQVDRRHTPLMSQLIVNWGLMTISYPLLALLVFLAVKDESYSVSSVEDGREKDSKLSAPTSFH

SEQ ID NO: 10065 - protein, 426 aa, Zea mays subsp. mays
  peptide (1)..(426): Ceres Seq. ID no. 12413655
MFNALSGLGGGGQVDPTIADNANTALYACFAVFGVLGGAAHNLLGPRATLLAGALTYPLYAGSFLYYNHRPGSQVFPVTAGALLGAGAGFLWAAQGAVMTSYPPPNRRGTYISLFWCLFNLGGVLGGLLPFALNYNRGDKKGSVSDGTYIAFMAFMLVGAALTVLVLPPARIVRDDGTRATRVTFSSPATEGAEILKLFANWKMLLALPAAWASNFFYTYQFNNVNSGLFTLRTRGLNNVFYWGAQMIGSAGIGYFLDFGFASRRKRGLFGVAAVAAVGTAIWGGGLANQLSYKAVPVADPIDFKDGHRYAGPFLLYFSYGLLDAMFQSLIYWIIGALANDSQILSRYVGFYKGVQSAGAAVAWQVDRRHTPLMSQLIVNWGLMTISYPLLALLVFLAVKDESYSVSSVEDGREKDSKLSAPTSFH

SEQ ID NO: 10066 - DNA, 1326 bp, Zea mays subsp. mays
  misc_feature (1)..(1326): Ceres Seq. ID no. 12566342
  misc_feature (1)..(1326): Ortholog of  Ceres SEQ ID NO 14310748 as cited in SEQ ID NO 53379
  misc_feature (1)..(1326): Ortholog of  Ceres SEQ ID NO 15179906 as cited in SEQ ID NO 67006
gcacgagaccattacctagaacatcctaatcgaaaacttccgttacatcccaccatttgctgttcaccttccctcccgtttgcctcctctcgctgtctcgtagcttctttcctccggcgacggctgggcgagcggccgccagtcgggcccttcgtcggcgacgagcatccacctgcgcggcgccccatcttccgctccttcccttactcgcgctcggcacacaggcgacggcggcggcggcgctcaggatcgggctatcaccgacggggtccggcttctccgcccgcctctcgccactcgccactcgcctcgcgtcctcgcctccggtcctccgcacaccggccggtgatcctgcctctgtaggttttttgtgctatactttttagtggttctggccttcttgacacaatggtgaagctgacaatgatagctcgtgtcactgatggccttccactggcagaagggttggatgatgggcgagatctgaaggatgctgatttctataagcagcaagctaaacttattttcaagaacttgtcaaaagggcatcatgaagcttcacggatgtcaattgagacagggccctactatttccactacattattgagggcagagtatgttatctgactatgtgtgaccgctcttatccgaagaaacttgcattccagtacctagaagatctgaaaaatgaatttgagagggtcaatggcaaccaaattgaaactgctgcaaggccatatgcttttatcaagtttgatacattcatccagaagactaggaaactgtatttggatacaagaactcaaaggaacctcgcaaaactgaatgatgaactctatgaggtgcatcaaattatgactcgcaatgttcaagaggttcttggtgttggtgaaaagctagaccaggtcagtgaaatgtcaagcaggttgacttctgatacaagaatatacgcagataaggctaaggacctcaaccggcaggcgttgattcggaagtatgctcctgtcgccattgtcattggggtagtattgatgttgttttggctcaagaacaagatatggtgattgtacagtacgaaggatactgggccctgttacaacaccggagaagaacagatggagataaaaaccaggtctattctggaacaagatgctttggtgacttgtatcccgtatctgcccattcaagcgattacttaaactgcccttttgctcctccctataagctagtatcaaagtgaattcgttggagtgcagacctgataagagcatctccggaagtctttcaaaattcactctaaattgtcattttgagagtcatttgcc

SEQ ID NO: 10067 - protein, 218 aa, Zea mays subsp. mays
  peptide (1)..(218): Ceres Seq. ID no. 12566343
MVKLTMIARVTDGLPLAEGLDDGRDLKDADFYKQQAKLIFKNLSKGHHEASRMSIETGPYYFHYIIEGRVCYLTMCDRSYPKKLAFQYLEDLKNEFERVNGNQIETAARPYAFIKFDTFIQKTRKLYLDTRTQRNLAKLNDELYEVHQIMTRNVQEVLGVGEKLDQVSEMSSRLTSDTRIYADKAKDLNRQALIRKYAPVAIVIGVVLMLFWLKNKIW

SEQ ID NO: 10068 - protein, 213 aa, Zea mays subsp. mays
  peptide (1)..(213): Ceres Seq. ID no. 12566344
MIARVTDGLPLAEGLDDGRDLKDADFYKQQAKLIFKNLSKGHHEASRMSIETGPYYFHYIIEGRVCYLTMCDRSYPKKLAFQYLEDLKNEFERVNGNQIETAARPYAFIKFDTFIQKTRKLYLDTRTQRNLAKLNDELYEVHQIMTRNVQEVLGVGEKLDQVSEMSSRLTSDTRIYADKAKDLNRQALIRKYAPVAIVIGVVLMLFWLKNKIW

SEQ ID NO: 10069 - protein, 166 aa, Zea mays subsp. mays
  peptide (1)..(166): Ceres Seq. ID no. 12566345
MSIETGPYYFHYIIEGRVCYLTMCDRSYPKKLAFQYLEDLKNEFERVNGNQIETAARPYAFIKFDTFIQKTRKLYLDTRTQRNLAKLNDELYEVHQIMTRNVQEVLGVGEKLDQVSEMSSRLTSDTRIYADKAKDLNRQALIRKYAPVAIVIGVVLMLFWLKNKIW

SEQ ID NO: 10070 - DNA, 1887 bp, Zea mays subsp. mays
  misc_feature (1)..(1887): Ceres Seq. ID no. 12373110
  misc_feature (1)..(1887): Ortholog of  Ceres SEQ ID NO 13659971 as cited in SEQ ID NO 67565
  misc_feature (1)..(1887): Ortholog of  Ceres SEQ ID NO 13500385 as cited in SEQ ID NO 67583
gggccaagtcgcagacgcggagccaccgccattttttttactcccgaaaccaggcaggagggaggaggcgacgacatcgccatcacaccagatcactgaagaagagagaggcgcgtcgagtctccccaaagaacgagctagtacaaagtctcctcttcctttgactccgaatcccctagaccattgatggttgcgggggcaccggaaggagccactgacgatgggcctctgctcctcctccaccgccgcccgggccgcctccgaccccggcgccgcagccgcgggtgatgccgccgcggcaaagaaggggcgcgggatcgtcgcgtgcgggaagcggaccgacttcggatacgacaaggatttcgaggtgcgctactcgcttgggaagcttttgggccacggccagttcggctacacctttgccgccgtcgatcgcgcctccaccgagcgcgtcgccgtcaagcgcatcgacaagaataagatggtccttcctgttgctgttgaagacgtaaagagagaagttaaaatcttaaaggcattacaagggcacgaaaatgttgtacacttttacaatgcattcgaagatgacaactatgtttatatagtcatggaattatgtgagggtggcgagctacttgatcggatattagccaagaaagatagtcgttacagcgagaaagatgctgcagtagttgtccgacagatgctcaaggttgcagctgagtgccacctgcatggtttggttcatcgggacatgaaacctgagaacttcctattcaaatcaaaaaaggaggactcgccccttaaggctacagattttggtctttcagacttcataaaaccagggaggcaattccgtgacattgttggaagtgcctactacgtagcaccagaagtactcaaacgcaggtcagggccagaatccgatgtttggagtataggtgttataacctatattttgctgtgtggaagacgaccattctgggacaaaacagaagatgggatatttaaagaggtcttaaaaaagaagccagatttccgccgcaagccttggtcaaacattacttcgagtgcaaaagattttgtacaaaaattactagttaaggatccccgtgcaagactaactgctgcacaggcattatcacatgattgggtgagagaaggaggaaaggcatctgaaatacccttggatatatcagtattacataatatgcgtcagtttgtgaaatacagtcgtttcaagcaatttgctttaagggcattagcatctacattaaactcagaagagatgtctgatcttcgtgatcaattcaatgccattgatgttgacaaaaatggaacgattagtcttgaggaactgaagcaggctcttgcaaaggatgttccatggagattaaagggtccacgtgttttagagatcattgaagcgattgacagtaatacagatgggctagttgattttgaggagtttgttgctgcaacactacacgtgcatcagctggtggaacatgatactgagaagtggaaatcattgtctcaagctgcatttgataaatttgatgttgacagagatggctacatcacacctgatgaacttagaatgcatacaggaatgaagggttctattgatcccctcctggaggaggctgacattgacaaagatggcaagataagcctagatgaatttcgccggctcttgaagactgcaagcatgagcgcacgcaatgtacaaactcctaggggtgttcgcaagtcatagttttctgttttttgtagttcacataactgaactagagagcagcagcacatgtgattggagaaaggcttttccatgtaaattagacaatcaataatacacatgaatggaggtaatccgtagttgttcct

SEQ ID NO: 10071 - protein, 512 aa, Zea mays subsp. mays
  peptide (1)..(512): Ceres Seq. ID no. 12373111
MGLCSSSTAARAASDPGAAAAGDAAAAKKGRGIVACGKRTDFGYDKDFEVRYSLGKLLGHGQFGYTFAAVDRASTERVAVKRIDKNKMVLPVAVEDVKREVKILKALQGHENVVHFYNAFEDDNYVYIVMELCEGGELLDRILAKKDSRYSEKDAAVVVRQMLKVAAECHLHGLVHRDMKPENFLFKSKKEDSPLKATDFGLSDFIKPGRQFRDIVGSAYYVAPEVLKRRSGPESDVWSIGVITYILLCGRRPFWDKTEDGIFKEVLKKKPDFRRKPWSNITSSAKDFVQKLLVKDPRARLTAAQALSHDWVREGGKASEIPLDISVLHNMRQFVKYSRFKQFALRALASTLNSEEMSDLRDQFNAIDVDKNGTISLEELKQALAKDVPWRLKGPRVLEIIEAIDSNTDGLVDFEEFVAATLHVHQLVEHDTEKWKSLSQAAFDKFDVDRDGYITPDELRMHTGMKGSIDPLLEEADIDKDGKISLDEFRRLLKTASMSARNVQTPRGVRKS

SEQ ID NO: 10072 - protein, 425 aa, Zea mays subsp. mays
  peptide (1)..(425): Ceres Seq. ID no. 12373112
MVLPVAVEDVKREVKILKALQGHENVVHFYNAFEDDNYVYIVMELCEGGELLDRILAKKDSRYSEKDAAVVVRQMLKVAAECHLHGLVHRDMKPENFLFKSKKEDSPLKATDFGLSDFIKPGRQFRDIVGSAYYVAPEVLKRRSGPESDVWSIGVITYILLCGRRPFWDKTEDGIFKEVLKKKPDFRRKPWSNITSSAKDFVQKLLVKDPRARLTAAQALSHDWVREGGKASEIPLDISVLHNMRQFVKYSRFKQFALRALASTLNSEEMSDLRDQFNAIDVDKNGTISLEELKQALAKDVPWRLKGPRVLEIIEAIDSNTDGLVDFEEFVAATLHVHQLVEHDTEKWKSLSQAAFDKFDVDRDGYITPDELRMHTGMKGSIDPLLEEADIDKDGKISLDEFRRLLKTASMSARNVQTPRGVRKS

SEQ ID NO: 10073 - protein, 383 aa, Zea mays subsp. mays
  peptide (1)..(383): Ceres Seq. ID no. 12373113
MELCEGGELLDRILAKKDSRYSEKDAAVVVRQMLKVAAECHLHGLVHRDMKPENFLFKSKKEDSPLKATDFGLSDFIKPGRQFRDIVGSAYYVAPEVLKRRSGPESDVWSIGVITYILLCGRRPFWDKTEDGIFKEVLKKKPDFRRKPWSNITSSAKDFVQKLLVKDPRARLTAAQALSHDWVREGGKASEIPLDISVLHNMRQFVKYSRFKQFALRALASTLNSEEMSDLRDQFNAIDVDKNGTISLEELKQALAKDVPWRLKGPRVLEIIEAIDSNTDGLVDFEEFVAATLHVHQLVEHDTEKWKSLSQAAFDKFDVDRDGYITPDELRMHTGMKGSIDPLLEEADIDKDGKISLDEFRRLLKTASMSARNVQTPRGVRKS

SEQ ID NO: 10074 - DNA, 1458 bp, Zea mays subsp. mays
  misc_feature (1)..(1458): Ceres Seq. ID no. 12349515
  misc_feature (1)..(1458): Ortholog of  Ceres SEQ ID NO 15169515 as cited in SEQ ID NO 60939
  misc_feature (1)..(1458): Ortholog of  Ceres SEQ ID NO 13584665 as cited in SEQ ID NO 65545
  misc_feature (1)..(1458): Ortholog of  Ceres SEQ ID NO 13596190 as cited in SEQ ID NO 68480
agggcaaagaggcgcgtgagaggtcggagcctgcaccgccgccgccatgctccgcctccaaaaacacctctcccttcgcctgcaagaacatctccttcccctgcaccgctccgcctccctcatacagctctccctccagcgctctctcctctccaccggctccgccacatattcctctccgggtcacttcgccgccgatgactacctcgtctccacatgtggcctcacccgggagcaagccgcgaatgccgccaagtgcatctcccactggaagtcgtcctccaacgccgacgccgtgctgtccttcctaaccggcccggcgctcggcctctccaatgctgagatcgcgctgctcgtggccaaagacccgcgcgtcctcagctgcagcgtcgacaacaccctgcgggcccgcttggcccgcttccgcagtcatggcttctccgccgcgcagatcagcgaattcgtccgcgtggccccctgcttctttcgcaaattcaacatcgacgtcaagctcggcttctggatgcccttcctcggctcgcccgacaggttcctccgcctcgtcaagcgtaacttctacctcctcagctccgacctcgacaaggtggtgaagcccaacatccagctgctccaggagtgcggtctatctatccaggagattgggagcctgtgcgtggctaacccgaggctgctcaccagcaagccggacagaatcagggccgtcctcgtgcgtgccggtgagatgggcgtgccccgcaagacgcttttgttcaggcacgctgtgaccgcggtggcgggcctctgtccggagacctttgcatctaagctcaagatgatggccaatattctcgggtgctcagaggctgaggttgccagaatggtgcaaaagaacccgttggtgctgaggcgctccatggagacgattcagcgcgcctgtgagttcctgatcaatgtggtcggtgtcggtaccaacttcattctggacaagcccacaatcctgatgtacagtctggaacgccggctggtgccccggcattacgtgatgaaggtgctccaggacaaaggattgatgcgaaaagatcatagcttctacactttggccgctattagtgctagcgtgttctgctccaggtatgtacatcctcataagaatgttcttcctaatcttgccgctgcatacgcatctggttgcaatgggaaaatagccatctgaggcgcgcgattccagcaaactggctatatgggcagcagctgcagttgtatcttgcatgtcattcttaacacattcagataccctgatgtgtactctgcgaggctgcagctccgtacttggctcatagcttcagaattgcagaaattcagcataacaagtttaagaactcatgaatgaccaaagcacgatgttgtcaatttcatataccttgtttaggattctggcgatgaattttatcgtgtttc

SEQ ID NO: 10075 - protein, 388 aa, Zea mays subsp. mays
  peptide (1)..(388): Ceres Seq. ID no. 12349516
MLRLQKHLSLRLQEHLLPLHRSASLIQLSLQRSLLSTGSATYSSPGHFAADDYLVSTCGLTREQAANAAKCISHWKSSSNADAVLSFLTGPALGLSNAEIALLVAKDPRVLSCSVDNTLRARLARFRSHGFSAAQISEFVRVAPCFFRKFNIDVKLGFWMPFLGSPDRFLRLVKRNFYLLSSDLDKVVKPNIQLLQECGLSIQEIGSLCVANPRLLTSKPDRIRAVLVRAGEMGVPRKTLLFRHAVTAVAGLCPETFASKLKMMANILGCSEAEVARMVQKNPLVLRRSMETIQRACEFLINVVGVGTNFILDKPTILMYSLERRLVPRHYVMKVLQDKGLMRKDHSFYTLAAISASVFCSRYVHPHKNVLPNLAAAYASGCNGKIAI

SEQ ID NO: 10076 - protein, 229 aa, Zea mays subsp. mays
  peptide (1)..(229): Ceres Seq. ID no. 12349517
MPFLGSPDRFLRLVKRNFYLLSSDLDKVVKPNIQLLQECGLSIQEIGSLCVANPRLLTSKPDRIRAVLVRAGEMGVPRKTLLFRHAVTAVAGLCPETFASKLKMMANILGCSEAEVARMVQKNPLVLRRSMETIQRACEFLINVVGVGTNFILDKPTILMYSLERRLVPRHYVMKVLQDKGLMRKDHSFYTLAAISASVFCSRYVHPHKNVLPNLAAAYASGCNGKIAI

SEQ ID NO: 10077 - DNA, 1103 bp, Zea mays subsp. mays; identical to SEQ ID NO: 3216
  misc_feature (1)..(1103): Ceres Seq. ID no. 12349943
  misc_feature (1)..(1103): Ortholog of  Ceres SEQ ID NO 13595881 as cited in SEQ ID NO 67709
  misc_feature (1)..(1103): Ortholog of  Ceres SEQ ID NO 12614145 as cited in SEQ ID NO 67937

SEQ ID NO: 10078 - protein, 296 aa, Zea mays subsp. mays; identical to SEQ ID NO: 3217
  peptide (1)..(296): Ceres Seq. ID no. 12349944

SEQ ID NO: 10079 - protein, 272 aa, Zea mays subsp. mays; identical to SEQ ID NO: 3218
  peptide (1)..(272): Ceres Seq. ID no. 12349945

SEQ ID NO: 10080 - protein, 270 aa, Zea mays subsp. mays; identical to SEQ ID NO: 3219
  peptide (1)..(270): Ceres Seq. ID no. 12349946

SEQ ID NO: 10081 - DNA, 1099 bp, Zea mays subsp. mays; identical to SEQ ID NO: 3493
  misc_feature (1)..(1099): Ceres Seq. ID no. 13577617
  misc_feature (1)..(1099): Ortholog of  Ceres SEQ ID NO 13594544 as cited in SEQ ID NO 51236

SEQ ID NO: 10082 - protein, 296 aa, Zea mays subsp. mays; identical to SEQ ID NO: 3494
  peptide (1)..(296): Ceres Seq. ID no. 13577618

SEQ ID NO: 10083 - protein, 251 aa, Zea mays subsp. mays; identical to SEQ ID NO: 3495
  peptide (1)..(251): Ceres Seq. ID no. 13577619

SEQ ID NO: 10084 - protein, 198 aa, Zea mays subsp. mays; identical to SEQ ID NO: 3496
  peptide (1)..(198): Ceres Seq. ID no. 13577620

SEQ ID NO: 10085 - DNA, 1626 bp, Zea mays subsp. mays
  misc_feature (1)..(1626): Ceres Seq. ID no. 12372619
  misc_feature (1)..(1626): Ortholog of  Ceres SEQ ID NO 14313463 as cited in SEQ ID NO 64209
ctctgattccttcctctcctctcgccccacgcccctctccatctgctcccgctccgcctcgcctagggttttgcccccaaacctagcctcccccgaatctcccacgccatggacgtcgagggcgaggtccccgccgccgccgcggcggcggtggcgaacggcctgggcggcgcgggcgcggaggaggcctctccgtcgccggtctcggctgagcagctcgacgtggaggcgtacgcggcgcagtactcggggcggacccgcctcgtgcgcctcctctttgtcgccgaccggtgcggggtggaggcgatgcagctcgaggcgctgcggatggcttacgacgagatcaagcgcggggaggacgtgcagctccaccgcgacgtcgtcaccaagatcggcggccgcctcggtccgcgctacggcctcgaccaggcgtgggtcttcagcgtctcccgccgcgccgaccagcgcaaggagaagctcgagagcgagctcaatggatacaggactaacttaatcaaagagagcatcagaatgggctacaatgacattggtgatttcttctatgcccatggccaactttcagatgctttcaaaagctacatcaggactcgggactattgcaccacttccaaacatatagttcagatgtgcatgaatgtgattctggttagcattgagctggggcaatatgcacatgtttcaaactatgtcagcaaagcagagcaaacccccgactctctggatcctaccattgttgcaaagctgaaggcagctgcaggattagccaacttggaaacaaagaaatacaaatttgctgctcgtaagtttgttgagacaggaattgaactaggaaacaacttctctgaagtcatagctcctcaagacgtggcagtctatggtgccctttgtgcacttgcttcttttgaccgttcagacctgaagagcaaagtcattgacaatatcaacttccgtaactttctggagctggtgcctgaagtaagggagctggttaatgatttttatgcaagtcgctatggatcttgcttgggtcatcttgagaagctaaagcctaacctgctcctggatatccatttgcatcagcatgtagagactctgtatatggagattcgccacaaagcgatcatacagtacacacttccttttatatctgttgacctcaacacgatggcagccgcctttaagacttcggtctccatgctgcagaaggagctggccgcactgattactgaggacaaaatacaggcccggatagactcccacaacaagatcctttacgcaaggcatgctgaccagagaaatgcaactttccagcgtgtccttcaaaccggcaatgactttgagagagatgtcaagtccatgcttctgcgtgccaacctcctcaagcatgattacattcagaagacaagcggaccaaggaagatgtaaagattgcgggcgtcgctgctaggcaaggcttcctgctgcatgcctctccacttttttttttgaagaattgttctgtgacataaaagggaccgaagtctgtctaaatgccctccccctctttctttttattggttgatgaaagttattgtcgaagtaatgtatggttgagcatctggatgt

SEQ ID NO: 10086 - protein, 445 aa, Zea mays subsp. mays
  peptide (1)..(445): Ceres Seq. ID no. 12372620
MDVEGEVPAAAAAAVANGLGGAGAEEASPSPVSAEQLDVEAYAAQYSGRTRLVRLLFVADRCGVEAMQLEALRMAYDEIKRGEDVQLHRDVVTKIGGRLGPRYGLDQAWVFSVSRRADQRKEKLESELNGYRTNLIKESIRMGYNDIGDFFYAHGQLSDAFKSYIRTRDYCTTSKHIVQMCMNVILVSIELGQYAHVSNYVSKAEQTPDSLDPTIVAKLKAAAGLANLETKKYKFAARKFVETGIELGNNFSEVIAPQDVAVYGALCALASFDRSDLKSKVIDNINFRNFLELVPEVRELVNDFYASRYGSCLGHLEKLKPNLLLDIHLHQHVETLYMEIRHKAIIQYTLPFISVDLNTMAAAFKTSVSMLQKELAALITEDKIQARIDSHNKILYARHADQRNATFQRVLQTGNDFERDVKSMLLRANLLKHDYIQKTSGPRKM

SEQ ID NO: 10087 - protein, 379 aa, Zea mays subsp. mays
  peptide (1)..(379): Ceres Seq. ID no. 12372621
MQLEALRMAYDEIKRGEDVQLHRDVVTKIGGRLGPRYGLDQAWVFSVSRRADQRKEKLESELNGYRTNLIKESIRMGYNDIGDFFYAHGQLSDAFKSYIRTRDYCTTSKHIVQMCMNVILVSIELGQYAHVSNYVSKAEQTPDSLDPTIVAKLKAAAGLANLETKKYKFAARKFVETGIELGNNFSEVIAPQDVAVYGALCALASFDRSDLKSKVIDNINFRNFLELVPEVRELVNDFYASRYGSCLGHLEKLKPNLLLDIHLHQHVETLYMEIRHKAIIQYTLPFISVDLNTMAAAFKTSVSMLQKELAALITEDKIQARIDSHNKILYARHADQRNATFQRVLQTGNDFERDVKSMLLRANLLKHDYIQKTSGPRKM

SEQ ID NO: 10088 - protein, 372 aa, Zea mays subsp. mays
  peptide (1)..(372): Ceres Seq. ID no. 12372622
MAYDEIKRGEDVQLHRDVVTKIGGRLGPRYGLDQAWVFSVSRRADQRKEKLESELNGYRTNLIKESIRMGYNDIGDFFYAHGQLSDAFKSYIRTRDYCTTSKHIVQMCMNVILVSIELGQYAHVSNYVSKAEQTPDSLDPTIVAKLKAAAGLANLETKKYKFAARKFVETGIELGNNFSEVIAPQDVAVYGALCALASFDRSDLKSKVIDNINFRNFLELVPEVRELVNDFYASRYGSCLGHLEKLKPNLLLDIHLHQHVETLYMEIRHKAIIQYTLPFISVDLNTMAAAFKTSVSMLQKELAALITEDKIQARIDSHNKILYARHADQRNATFQRVLQTGNDFERDVKSMLLRANLLKHDYIQKTSGPRKM

SEQ ID NO: 10089 - DNA, 1086 bp, Zea mays subsp. mays
  misc_feature (1)..(1086): Ceres Seq. ID no. 12358654
  misc_feature (1)..(1086): Ortholog of  Ceres SEQ ID NO 15176375 as cited in SEQ ID NO 53238
  misc_feature (1)..(1086): Ortholog of  Ceres SEQ ID NO 15170532 as cited in SEQ ID NO 55671
  misc_feature (1)..(1086): Ortholog of  Ceres SEQ ID NO 14316507 as cited in SEQ ID NO 57397
  misc_feature (1)..(1086): Ortholog of  Ceres SEQ ID NO 13663060 as cited in SEQ ID NO 60964
  misc_feature (1)..(1086): Ortholog of  Ceres SEQ ID NO 13598532 as cited in SEQ ID NO 65204
  misc_feature (1)..(1086): Ortholog of  Ceres SEQ ID NO 13656849 as cited in SEQ ID NO 65764
  misc_feature (1)..(1086): Ortholog of  Ceres SEQ ID NO 13656501 as cited in SEQ ID NO 69206
agtatctggaggaaggacaatgtctaggtcatctgactctgggaaaatgagtaatgatgagaaagaagactttgaagcaaatgaagatgactatatggatgtcgacaagggacatgctagtgacagtgatacagaaaaccgtatgtcagatactgactcagacaatgaaatacacagacctgaaacccctgaaagagagaaggcaccacacaggtgtatcaatatgcttcaagattgcagaagtgttgatgagtttgagaggctcaacaaaattaacgagggcacatatggtgttgtatacagagcaagggataagaagacaagtgagattgttgcattgaagaaggtaaagatggagaaggagcgagaaggtttcccattaacctctcttagggaaataaatatcctcttgtctttccacaatccttcaattgtggatgttaaggaagtagtagttggaagtagtctagatagtatttttatggttatggagtacatggaacatgatcttaaaggtgtcatggagaccatgaaacaaccatatacccaaagcgaggtaaagtgtttgatgcttcagctgctagaaggtgtaaaatatctacatgacaattgggtgcttcatagggatctgaagacctcaaatcttttttgaataaccgtggtgagttaaaaatatgtgattttggactgtctcgtcaatatggaagcccattaaaaccttatactcaactggttgtgactttgtggtacagggccccagaattgttgttaggaacaaaggagtattctactgctattgatatgtggtctgtgggctgtataatggctgagcttcttgccaaagaaccgttattcaatggaaaaacagagtttgaacagctagataagatttttagaacactcggcacacctaatgagaagatttggcctggctatgctaaattaccaggtgtgaaagtaaattttgttaaacaaccgtataatagactaagggataagttcccagccgcttctttttctgggcgaccaatcctgtctgaagctggttttgatctattgaacagactgctgacttatgaccctgat

SEQ ID NO: 10090 - protein, 216 aa, Zea mays subsp. mays
  peptide (1)..(216): Ceres Seq. ID no. 12358655
VSGGRTMSRSSDSGKMSNDEKEDFEANEDDYMDVDKGHASDSDTENRMSDTDSDNEIHRPETPEREKAPHRCINMLQDCRSVDEFERLNKINEGTYGVVYRARDKKTSEIVALKKVKMEKEREGFPLTSLREINILLSFHNPSIVDVKEVVVGSSLDSIFMVMEYMEHDLKGVMETMKQPYTQSEVKCLMLQLLEGVKYLHDNWVLHRDLKTSNLF

SEQ ID NO: 10091 - protein, 210 aa, Zea mays subsp. mays
  peptide (1)..(210): Ceres Seq. ID no. 12358656
MSRSSDSGKMSNDEKEDFEANEDDYMDVDKGHASDSDTENRMSDTDSDNEIHRPETPEREKAPHRCINMLQDCRSVDEFERLNKINEGTYGVVYRARDKKTSEIVALKKVKMEKEREGFPLTSLREINILLSFHNPSIVDVKEVVVGSSLDSIFMVMEYMEHDLKGVMETMKQPYTQSEVKCLMLQLLEGVKYLHDNWVLHRDLKTSNLF

SEQ ID NO: 10092 - protein, 201 aa, Zea mays subsp. mays
  peptide (1)..(201): Ceres Seq. ID no. 12358657
MSNDEKEDFEANEDDYMDVDKGHASDSDTENRMSDTDSDNEIHRPETPEREKAPHRCINMLQDCRSVDEFERLNKINEGTYGVVYRARDKKTSEIVALKKVKMEKEREGFPLTSLREINILLSFHNPSIVDVKEVVVGSSLDSIFMVMEYMEHDLKGVMETMKQPYTQSEVKCLMLQLLEGVKYLHDNWVLHRDLKTSNLF

SEQ ID NO: 10093 - DNA, 2101 bp, Zea mays subsp. mays
  misc_feature (1)..(2101): Ceres Seq. ID no. 12366931
  misc_feature (1)..(2101): Ortholog of  Ceres SEQ ID NO 15171212 as cited in SEQ ID NO 56899
  misc_feature (1)..(2101): Ortholog of  Ceres SEQ ID NO 12613725 as cited in SEQ ID NO 68196
  misc_feature (1)..(2101): Ortholog of  Ceres SEQ ID NO 14301486 as cited in SEQ ID NO 69222
agctggattggatatttggactagtgttcttcttggcttggccacccgcctactccgtcttcttcatacgagacaagccgtgcgcttcttcttggcctagcccttcgagcagggcaggagaggaggccactctgactgtcactctgagcttcgcgtcacctgagtactgacggacgacatgggagaagttgaggacatgtacacccaagacgggaccgtggacatgaaagggaatcccgccgtgaagaagggcaccggcaactggcgcgcctgcccctacatcctcgcgaacgagtgctgcgagaggctggcttactatggcatgagcaccaacctggtgaactacatgaagacccgacttggccaggtgaactccgttgcctccaacaacgtcaccaactggcaagggacgtgctacatcacgccgctcatcggcgccttcttcgccgacgcgtacatggggaggttctggaccatcgccatcttcatgatcatctacattttcggcctggcgctgctgacgatggcttcgtcggtgaaggggctggtgcctacgtcgtgcggcgacaaggatgtgtgccacccgacggacgcgcaggcggcggtggtgttcgtggcgctgtacctcatcgcgctgggcacgggcgggatcaagccgtgcgtgtcctccttcggcgccgaccagttcgacgagaacgacgagcgggagaagaagagcaagagctccttcttcaactggttctacttctccatcaacatcggcgcgctggtggcgtccacagtgctggtgtacgtgcagacgcacgtgggctggggctggggcttcggcatccccgccgtggtcatggccatcgccgtcggcagcttcttcgtgggcacgccgctgtacaggcaccagaagcccgggggcagcccgctgacgcgcatcgcgcaggtgctcgtcgcgtgcgcgcgcaagtggaacgtggccgtgcccgcggacaagtcgcggctgcacgagacggtggacggggagtccggcatcgaggggagccgcaagctggagcactcggagcagctggcgtgcctcgacagggctgccgtggtgacggccgaggacggcgcggaggcgagcccgtggcgcctgtgctcggtgacgcaggtggaggagctcaagagcgtgatccggctgctgcccatctgggccagcgggatcgtgttcgcggcggtgtactcgcagatgagcaccatgttcgtgctgcagggtaacacgctggaccagagcatggggccccggttcaagatcccctcggcgacgctgtccatggtggacaccatcagcgtcatcgtctgggtcccccgtgtacgaccgcgccatcgtgcccctggtgcgctcctacaccgggaggccgcgcgggttcacgcagctgcagcgcatgggcatcggcctcgtcgtctccatcttctccatggtggcggcgggcgtgctggacatcgtgcggctgcgcgccatcgcgcggcacggcctgtacggcgaggacgacatcgtgcccatctccatcttctggcagataccgcagtacttcatcatcgggtgcgcggaggtgttcaccttcgtggggcagctggagttcttctacgaccaggcgcccgacgccatgaggagcatgtgctccgcgctgtcgctcaccaccgtcgcgctcggcaactacctcagcacggtcctggtgaccatcgtcacccacatcaccaccaggcacggccgcatcgggtggatcccggagaacctcaaccgcggccacctcgactacttcttctggctgctcgccgtgctcagccttctcaacttccttgcctacctcgtcatcgccagctggtacaagtacaagaagacggccgatgattaccctggcgccaaaggggagcacggtacagagcactgatgggcgagatggcggaaatggagtgatttctatgtgtggttagctgtctgtcgacttgttttgccacagtttgggtgcttaaacgttaacgtacgtactagttcaatatagtgtctcgggggcgaattggttgtttacatgtcatgtgtttatatatgcgcaatgttcgatctcagtgg

SEQ ID NO: 10094 - protein, 567 aa, Zea mays subsp. mays
  peptide (1)..(567): Ceres Seq. ID no. 12366932
MGEVEDMYTQDGTVDMKGNPAVKKGTGNWRACPYILANECCERLAYYGMSTNLVNYMKTRLGQVNSVASNNVTNWQGTCYITPLIGAFFADAYMGRFWTIAIFMIIYIFGLALLTMASSVKGLVPTSCGDKDVCHPTDAQAAVVFVALYLIALGTGGIKPCVSSFGADQFDENDEREKKSKSSFFNWFYFSINIGALVASTVLVYVQTHVGWGWGFGIPAVVMAIAVGSFFVGTPLYRHQKPGGSPLTRIAQVLVACARKWNVAVPADKSRLHETVDGESGIEGSRKLEHSEQLACLDRAAVVTAEDGAEASPWRLCSVTQVEELKSVIRLLPIWASGIVFAAVYSQMSTMFVLQGNTLDQSMGPRFKIPSATLSMVDTISVIVWVPRVRPRHRAPGALLHREAARVHAAAAHGHRPRRLHLLHGGGGRAGHRAAARHRAARPVRRGRHRAHLHLLADTAVLHHRVRGGVHLRGAAGVLLRPGARRHEEHVLRAVAHHRRARQLPQHGPGDHRHPHHHQARPHRVDPGEPQPRPPRLLLLAARRAQPSQLPCLPRHRQLVQVQEDGR

SEQ ID NO: 10095 - protein, 561 aa, Zea mays subsp. mays
  peptide (1)..(561): Ceres Seq. ID no. 12366933
MYTQDGTVDMKGNPAVKKGTGNWRACPYILANECCERLAYYGMSTNLVNYMKTRLGQVNSVASNNVTNWQGTCYITPLIGAFFADAYMGRFWTIAIFMIIYIFGLALLTMASSVKGLVPTSCGDKDVCHPTDAQAAVVFVALYLIALGTGGIKPCVSSFGADQFDENDEREKKSKSSFFNWFYFSINIGALVASTVLVYVQTHVGWGWGFGIPAVVMAIAVGSFFVGTPLYRHQKPGGSPLTRIAQVLVACARKWNVAVPADKSRLHETVDGESGIEGSRKLEHSEQLACLDRAAVVTAEDGAEASPWRLCSVTQVEELKSVIRLLPIWASGIVFAAVYSQMSTMFVLQGNTLDQSMGPRFKIPSATLSMVDTISVIVWVPRVRPRHRAPGALLHREAARVHAAAAHGHRPRRLHLLHGGGGRAGHRAAARHRAARPVRRGRHRAHLHLLADTAVLHHRVRGGVHLRGAAGVLLRPGARRHEEHVLRAVAHHRRARQLPQHGPGDHRHPHHHQARPHRVDPGEPQPRPPRLLLLAARRAQPSQLPCLPRHRQLVQVQEDGR

SEQ ID NO: 10096 - protein, 552 aa, Zea mays subsp. mays
  peptide (1)..(552): Ceres Seq. ID no. 12366934
MKGNPAVKKGTGNWRACPYILANECCERLAYYGMSTNLVNYMKTRLGQVNSVASNNVTNWQGTCYITPLIGAFFADAYMGRFWTIAIFMIIYIFGLALLTMASSVKGLVPTSCGDKDVCHPTDAQAAVVFVALYLIALGTGGIKPCVSSFGADQFDENDEREKKSKSSFFNWFYFSINIGALVASTVLVYVQTHVGWGWGFGIPAVVMAIAVGSFFVGTPLYRHQKPGGSPLTRIAQVLVACARKWNVAVPADKSRLHETVDGESGIEGSRKLEHSEQLACLDRAAVVTAEDGAEASPWRLCSVTQVEELKSVIRLLPIWASGIVFAAVYSQMSTMFVLQGNTLDQSMGPRFKIPSATLSMVDTISVIVWVPRVRPRHRAPGALLHREAARVHAAAAHGHRPRRLHLLHGGGGRAGHRAAARHRAARPVRRGRHRAHLHLLADTAVLHHRVRGGVHLRGAAGVLLRPGARRHEEHVLRAVAHHRRARQLPQHGPGDHRHPHHHQARPHRVDPGEPQPRPPRLLLLAARRAQPSQLPCLPRHRQLVQVQEDGR

SEQ ID NO: 10097 - DNA, 1461 bp, Zea mays subsp. mays
  misc_feature (1)..(1461): Ceres Seq. ID no. 12353132
  misc_feature (1)..(1461): Ortholog of  Ceres SEQ ID NO 12598859 as cited in SEQ ID NO 62872
  misc_feature (1)..(1461): Ortholog of  Ceres SEQ ID NO 12617350 as cited in SEQ ID NO 63777
  misc_feature (1)..(1461): Ortholog of  Ceres SEQ ID NO 13598749 as cited in SEQ ID NO 64341
  misc_feature (1)..(1461): Ortholog of  Ceres SEQ ID NO 15176153 as cited in SEQ ID NO 0
actagttcagcacttcagccttcactccactccaccacagtccacgcagcccaccgaaatggggaagctgctccctcgccacccttcccccctcctcctcctcgccgcggcgatctgcatctccagcagcagcctcgcggccgtccggggcgcgccggtgtaccgcgcggactacctggtggacgggaaccagctggtggacatgcagtaccacatgggccccgtcgtgtccgggacgccgaccaacctctacctcatctggtacgggcggtgggaggccgcggcgcaggccgtgctccgggacttcctcgcctcgctctcggccccggccccgttcccggccgtctccgactggtgggcgcgcacgccgcggatgtacgcggaccagacgggcgccaacgtgacgggcgccttcgccgtcgccggggagcactccgacgccgggtactcccacggcgcgtcgctccggcgcatcgacgtgcagtccgtgatccggtcggcggtgtacgcgtacccggacccgctgccgctggacccctacagcggggcgtacctggtgctgacgtcccccgacgtgcaggtggacgagttctgccgcgccgtctgcggcttccactacttcaccttcgcgtccgtggtcggggtcacggtgccctacgcctgggtcgggaacagcgccacgcagtgcccgggcaagtgcgcgtacccgttcgccgccgccgccgagtacggcgccgggggagcccagccccaggcggtgctgcggccgcccaacggcgacgctggggtggacgggatggtgatcgtgctggggcacgagctggcggagatgtccacgaacccgctggtgaacgcgtggtacgccggggacacgcccacggcgccgaccgagatcgcggacctgtgcctgggcgtgtacggtgatggcggcggcgcgggcggcctggtcgggaacgtgtcccgcgcgcccgatggcagcgcctacaacgtcaacggcgtcaacggccggcggttcctcgtgcagtggctctggaaccccgtccgcggcgcctgctacggccccaactccagcaactgacccgagtcgtcgctaggggcgagggcggttggaggacgcctcatgccattctgctggattgaatggcattgcagaaatccatggcggtttcaatggatggagacagcgttcgtccacttccctgtccgttcagggaatggtccacaggagacgggacgaggatcagatgatgaagccgacccagtaatttgaagctgcactgcatgagacacatcgtgtggatcctgcctgatctatctgcagttcggtaggaaacaacgagaaaatgccattttgttgttcgttttttttaccttgatttccgggactcgaattttgtttcagctcccgagccagcatctcttgcttgctgaaacaaagtggtcgcctgatcgattgctttc

SEQ ID NO: 10098 - protein, 358 aa, Zea mays subsp. mays
  peptide (1)..(358): Ceres Seq. ID no. 12353133
LVQHFSLHSTPPQSTQPTEMGKLLPRHPSPLLLLAAAICISSSSLAAVRGAPVYRADYLVDGNQLVDMQYHMGPVVSGTPTNLYLIWYGRWEAAAQAVLRDFLASLSAPAPFPAVSDWWARTPRMYADQTGANVTGAFAVAGEHSDAGYSHGASLRRIDVQSVIRSAVYAYPDPLPLDPYSGAYLVLTSPDVQVDEFCRAVCGFHYFTFASVVGVTVPYAWVGNSATQCPGKCAYPFAAAAEYGAGGAQPQAVLRPPNGDAGVDGMVIVLGHELAEMSTNPLVNAWYAGDTPTAPTEIADLCLGVYGDGGGAGGLVGNVSRAPDGSAYNVNGVNGRRFLVQWLWNPVRGACYGPNSSN

SEQ ID NO: 10099 - protein, 339 aa, Zea mays subsp. mays
  peptide (1)..(339): Ceres Seq. ID no. 12353134
MGKLLPRHPSPLLLLAAAICISSSSLAAVRGAPVYRADYLVDGNQLVDMQYHMGPVVSGTPTNLYLIWYGRWEAAAQAVLRDFLASLSAPAPFPAVSDWWARTPRMYADQTGANVTGAFAVAGEHSDAGYSHGASLRRIDVQSVIRSAVYAYPDPLPLDPYSGAYLVLTSPDVQVDEFCRAVCGFHYFTFASVVGVTVPYAWVGNSATQCPGKCAYPFAAAAEYGAGGAQPQAVLRPPNGDAGVDGMVIVLGHELAEMSTNPLVNAWYAGDTPTAPTEIADLCLGVYGDGGGAGGLVGNVSRAPDGSAYNVNGVNGRRFLVQWLWNPVRGACYGPNSSN

SEQ ID NO: 10100 - protein, 307 aa, Zea mays subsp. mays
  peptide (1)..(307): Ceres Seq. ID no. 12353135
TSSALQPSLHSTTVHAAHRNGEAAPSPPFPPPPPRRGDLHLQQQPRGRPGRAGVPRGLPGGREPAGGHAVPHGPRRVRDADQPLPHLVRAVGGRGAGRAPGLPRLALGPGPVPGRLRLVGAHAADVRGPDGRQRDGRLRRRRGALRRRVLPRRVAPAHRRAVRDPVGGVRVPGPAAAGPLQRGVPGADVPRRAGGRVLPRRLRLPLLHLRVRGRGHGALRLGREQRHAVPGQVRVPVRRRRRVRRRGSPAPGGAAAAQRRRWGGRDGDRAGARAGGDVHEPAGERVVRRGHAHGADRDRGPVPGRVR

SEQ ID NO: 10101 - DNA, 1772 bp, Zea mays subsp. mays
  misc_feature (1)..(1772): Ceres Seq. ID no. 13496422
  misc_feature (1)..(1772): Ortholog of  Ceres SEQ ID NO 15170151 as cited in SEQ ID NO 53069
  misc_feature (1)..(1772): Ortholog of  Ceres SEQ ID NO 13594209 as cited in SEQ ID NO 59089
  misc_feature (1)..(1772): Ortholog of  Ceres SEQ ID NO 14313084 as cited in SEQ ID NO 59183
  misc_feature (1)..(1772): Ortholog of  Ceres SEQ ID NO 14306857 as cited in SEQ ID NO 60035
  misc_feature (1)..(1772): Ortholog of  Ceres SEQ ID NO 15227091 as cited in SEQ ID NO 60294
  misc_feature (1)..(1772): Ortholog of  Ceres SEQ ID NO 14316039 as cited in SEQ ID NO 62062
  misc_feature (1)..(1772): Ortholog of  Ceres SEQ ID NO 15176783 as cited in SEQ ID NO 65590
  misc_feature (1)..(1772): Ortholog of  Ceres SEQ ID NO 15176091 as cited in SEQ ID NO 65733
  misc_feature (1)..(1772): Ortholog of  Ceres SEQ ID NO 14308007 as cited in SEQ ID NO 65760
  misc_feature (1)..(1772): Ortholog of  Ceres SEQ ID NO 14308019 as cited in SEQ ID NO 65849
  misc_feature (1)..(1772): Ortholog of  Ceres SEQ ID NO 15169611 as cited in SEQ ID NO 65939
  misc_feature (1)..(1772): Ortholog of  Ceres SEQ ID NO 15169599 as cited in SEQ ID NO 66096
  misc_feature (1)..(1772): Ortholog of  Ceres SEQ ID NO 14307960 as cited in SEQ ID NO 66187
  misc_feature (1)..(1772): Ortholog of  Ceres SEQ ID NO 14307964 as cited in SEQ ID NO 66191
  misc_feature (1)..(1772): Ortholog of  Ceres SEQ ID NO 15170167 as cited in SEQ ID NO 66224
  misc_feature (1)..(1772): Ortholog of  Ceres SEQ ID NO 13502874 as cited in SEQ ID NO 66298
  misc_feature (1)..(1772): Ortholog of  Ceres SEQ ID NO 14307944 as cited in SEQ ID NO 66503
  misc_feature (1)..(1772): Ortholog of  Ceres SEQ ID NO 15169631 as cited in SEQ ID NO 67173
  misc_feature (1)..(1772): Ortholog of  Ceres SEQ ID NO 12614124 as cited in SEQ ID NO 68392
  misc_feature (1)..(1772): Ortholog of  Ceres SEQ ID NO 15176087 as cited in SEQ ID NO 68692
  misc_feature (1)..(1772): Ortholog of  Ceres SEQ ID NO 14307980 as cited in SEQ ID NO 69214
  misc_feature (1)..(1772): Ortholog of  Ceres SEQ ID NO 14308011 as cited in SEQ ID NO 69234
ccattacctagaacatcctaatcgaaaaactactcgatggaaccagcaacatgggccgcgttcctcggcattgccctttgcgcagcggcagcgctcttccttttgcgtggccggcgcccggtctacaaccccccgccgggccccaagccatggccgatcatcggcaaccttaacctcatgggcgagctgccccaccgctccatgaacgagctctccaagcggtacggtccgctcatgcagctctggttcgggtcgttgcctgttgtcgtcggcgcgtccgccgagatggcaaagctcttcctcaagaccaacgacgcggcgttctccgaccggccgaggttcgcagtcggcaagtacaccgcgtacgactgctccggccttctgtgggctccttttgagccgtacctgcgccaggcacgcaggatctgcgccaccgagctcttcagcgccacgcggctcgagtccttcgagcacatccgcgacgaggaggtgcgcgtgatgctccgacagctgcgccaagcggctgggcgcaccgtgcggcttagggactacctgcagatgttggcgctcggcgtgatctcgcgcatagttctgggcaagaagtacgtcatggaggaggcggcggacggtgagggggactcagcgccggcgataacgcctgccgagttcagggagatggtggacgagttcttcgcgcttcacggtgcgtttaacattggtgattatatcccttggctagattggctggacctgcagggctacgttgctaggatgaagagaatgaaggcgaggtttggtcgattcctggaacgagtcttggacgtgcacaacgagcggcgactacgcgagggagggaactttgtggcaaaggatatgttggacgtgctgctgcagctggccgatgacactagtcttgaagtccagctcagcagggacaatgttaaggctatcacacaggacctaatcatcgcaggcacggatagtaatgcaaacacgctggagtgggctgtctcggagctcctcaagaaccctaagatcttagccaaggccatggaggagctgaaccatgtcatagggccggaccgactggtgacggaaagcgacctccctcgcctcccctacatcgaggctgtgctcaaggagaccatgcgcgtgcaccctgccgcgccgatgctggcaccccacgtggcccgcgaggacacatccgtggacggatacgacgtgctcgctggcacggtcttgttcatcaacgtgtgggcaatcggccgcgaccctggactgtgggacgcgccggaggagttccggccggagcggttcgtcgagagcaagatcgacgtgaggggccatgacttccagctgctgccgttcggctctggccggcgaatgtgccccgggatcaacctcgcgctaaaggtgatggctttgagtcttgccaatctgctacacggcttcgagtggaggcttccggacggcgtgacggcagaggagctgagcatggatgaggccttcaagctcgcggtaccgcgtaaattcccgctcatggtcgtggccgagcccaggttgccagctcgcctgtatactggcgcttgatgccagtacgtgtcttcggttgttggcatgcgtggagtatagcacatgattttcagctcttggaactttgttttaataaaacacaaatatatgtgttatgttggttagatgaatgtgaatataaagttgacaacctaggtaattcgaacccctattggtatataattttactttatttttgc

SEQ ID NO: 10102 - protein, 517 aa, Zea mays subsp. mays
  peptide (1)..(517): Ceres Seq. ID no. 13496423
MEPATWAAFLGIALCAAAALFLLRGRRPVYNPPPGPKPWPIIGNLNLMGELPHRSMNELSKRYGPLMQLWFGSLPVVVGASAEMAKLFLKTNDAAFSDRPRFAVGKYTAYDCSGLLWAPFEPYLRQARRICATELFSATRLESFEHIRDEEVRVMLRQLRQAAGRTVRLRDYLQMLALGVISRIVLGKKYVMEEAADGEGDSAPAITPAEFREMVDEFFALHGAFNIGDYIPWLDWLDLQGYVARMKRMKARFGRFLERVLDVHNERRLREGGNFVAKDMLDVLLQLADDTSLEVQLSRDNVKAITQDLIIAGTDSNANTLEWAVSELLKNPKILAKAMEELNHVIGPDRLVTESDLPRLPYIEAVLKETMRVHPAAPMLAPHVAREDTSVDGYDVLAGTVLFINVWAIGRDPGLWDAPEEFRPERFVESKIDVRGHDFQLLPFGSGRRMCPGINLALKVMALSLANLLHGFEWRLPDGVTAEELSMDEAFKLAVPRKFPLMVVAEPRLPARLYTGA

SEQ ID NO: 10103 - protein, 470 aa, Zea mays subsp. mays
  peptide (1)..(470): Ceres Seq. ID no. 13496424
MGELPHRSMNELSKRYGPLMQLWFGSLPVVVGASAEMAKLFLKTNDAAFSDRPRFAVGKYTAYDCSGLLWAPFEPYLRQARRICATELFSATRLESFEHIRDEEVRVMLRQLRQAAGRTVRLRDYLQMLALGVISRIVLGKKYVMEEAADGEGDSAPAITPAEFREMVDEFFALHGAFNIGDYIPWLDWLDLQGYVARMKRMKARFGRFLERVLDVHNERRLREGGNFVAKDMLDVLLQLADDTSLEVQLSRDNVKAITQDLIIAGTDSNANTLEWAVSELLKNPKILAKAMEELNHVIGPDRLVTESDLPRLPYIEAVLKETMRVHPAAPMLAPHVAREDTSVDGYDVLAGTVLFINVWAIGRDPGLWDAPEEFRPERFVESKIDVRGHDFQLLPFGSGRRMCPGINLALKVMALSLANLLHGFEWRLPDGVTAEELSMDEAFKLAVPRKFPLMVVAEPRLPARLYTGA

SEQ ID NO: 10104 - protein, 462 aa, Zea mays subsp. mays
  peptide (1)..(462): Ceres Seq. ID no. 13496425
MNELSKRYGPLMQLWFGSLPVVVGASAEMAKLFLKTNDAAFSDRPRFAVGKYTAYDCSGLLWAPFEPYLRQARRICATELFSATRLESFEHIRDEEVRVMLRQLRQAAGRTVRLRDYLQMLALGVISRIVLGKKYVMEEAADGEGDSAPAITPAEFREMVDEFFALHGAFNIGDYIPWLDWLDLQGYVARMKRMKARFGRFLERVLDVHNERRLREGGNFVAKDMLDVLLQLADDTSLEVQLSRDNVKAITQDLIIAGTDSNANTLEWAVSELLKNPKILAKAMEELNHVIGPDRLVTESDLPRLPYIEAVLKETMRVHPAAPMLAPHVAREDTSVDGYDVLAGTVLFINVWAIGRDPGLWDAPEEFRPERFVESKIDVRGHDFQLLPFGSGRRMCPGINLALKVMALSLANLLHGFEWRLPDGVTAEELSMDEAFKLAVPRKFPLMVVAEPRLPARLYTGA

SEQ ID NO: 10105 - DNA, 1573 bp, Zea mays subsp. mays
  misc_feature (1)..(1573): Ceres Seq. ID no. 12366004
  misc_feature (1)..(1573): Ortholog of  Ceres SEQ ID NO 13654989 as cited in SEQ ID NO 63117
  misc_feature (1)..(1573): Ortholog of  Ceres SEQ ID NO 13657138 as cited in SEQ ID NO 65923
acacgaggctccagggcctccatcgccacaccggtgcgtgcgagcgcgattaccagaggcgggcggcagggacgatgctgctgcaaaggcgcggcggcctcctctgctgcgggtgcggcgccagcgccgtggccgtggccgtcagtggccgcgttccggaagacgacggcggtgccgtcgtcgatggccagccgcctgacgccaagagcgtgtctggtaccagtgtctccgctgccgtgacgaccgcaaacgcgaggcagctctcgtgggcgcaggtggaggccatgacgggaggcttcacgtcagccatcgtcggcgagggcggcttcagcaccgtttacctcgcccgcctcgctggctccctcgccgccgtgaaggtccatcgtagtagcgagcgtcttcatcgcgcgttccgccaggagctcgacgcgctcctccgcgttcgccatccccacatcgtccgcctcctcgccttctgcgaccagcgagacgaaggcgtgctggtgctagagttcgcgccgaacggcagcctgcacgagcagctccacggcggcggcgcgggcgcggcgccgatgccgtgggcgcggcgggtgccggtggcgctgcaggtggcccgcgccctggagtacctccacgagcggtgcgagccgcaggtggtgcacggcgacgtgaaggcgtcgaacgtgctgctggacgcgggcatgggcgccaggctgtgcgacttcgggtcggcgcgcgcggggttctcggcggccgtggccgttgccgctgcaggcccgcgcccgcgcgccgtgttcgggtccccgggctacgtcgacccgcactacctccgctccggcgtggtcaccaagaagagcgacgtgtacagcttcggcgtgctcctgctggagctgctcaccggcgtgcaggcgttccgcgacggccggctcctgacggcgtccgtggcgccgaggctcgccgccgccgcagccggcgacctcgtggaccggaggctggggtgccgatacgacgcccgcgaggcggcggccgtgctggcgctagcggccgcgtgcgtccgggacaaaccgggcctccggccgtcgatggccgacgtggtgcgggccctggagcagctgcagccgcagcacggccggagcttgttgggcgccggagggaagctgtagctgctgtcgtagacacgtggcgcgcattgttgtttgtggtggtcgtggggatgcgactgctcaactgaccacaccctccctctattggaattgggttggtgaggaacaggaggcgttgggatttgcgctttgggggtattggggtggggggtgatttgcttatcatctttagctgggatgatgggtcatcatgtcattagccaccaaatcaaaagtagagcaactgctgagataaaacgaacagcaggaggatggaagtatccgtcattatcaagtgtgtatacagtagtaactaaaatgtaaacagagttgcttctttttcgtctgtgttgcatgtatgatgtacctgtgtgtggtatgcacacatgtttagccaaaagaaaagaactgtgcatatacattatcattct

SEQ ID NO: 10106 - protein, 386 aa, Zea mays subsp. mays
  peptide (1)..(386): Ceres Seq. ID no. 12366005
TRLQGLHRHTGACERDYQRRAAGTMLLQRRGGLLCCGCGASAVAVAVSGRVPEDDGGAVVDGQPPDAKSVSGTSVSAAVTTANARQLSWAQVEAMTGGFTSAIVGEGGFSTVYLARLAGSLAAVKVHRSSERLHRAFRQELDALLRVRHPHIVRLLAFCDQRDEGVLVLEFAPNGSLHEQLHGGGAGAAPMPWARRVPVALQVARALEYLHERCEPQVVHGDVKASNVLLDAGMGARLCDFGSARAGFSAAVAVAAAGPRPRAVFGSPGYVDPHYLRSGVVTKKSDVYSFGVLLLELLTGVQAFRDGRLLTASVAPRLAAAAAGDLVDRRLGCRYDAREAAAVLALAAACVRDKPGLRPSMADVVRALEQLQPQHGRSLLGAGGKL

SEQ ID NO: 10107 - protein, 362 aa, Zea mays subsp. mays
  peptide (1)..(362): Ceres Seq. ID no. 12366006
MLLQRRGGLLCCGCGASAVAVAVSGRVPEDDGGAVVDGQPPDAKSVSGTSVSAAVTTANARQLSWAQVEAMTGGFTSAIVGEGGFSTVYLARLAGSLAAVKVHRSSERLHRAFRQELDALLRVRHPHIVRLLAFCDQRDEGVLVLEFAPNGSLHEQLHGGGAGAAPMPWARRVPVALQVARALEYLHERCEPQVVHGDVKASNVLLDAGMGARLCDFGSARAGFSAAVAVAAAGPRPRAVFGSPGYVDPHYLRSGVVTKKSDVYSFGVLLLELLTGVQAFRDGRLLTASVAPRLAAAAAGDLVDRRLGCRYDAREAAAVLALAAACVRDKPGLRPSMADVVRALEQLQPQHGRSLLGAGGKL

SEQ ID NO: 10108 - protein, 292 aa, Zea mays subsp. mays
  peptide (1)..(292): Ceres Seq. ID no. 12366007
MTGGFTSAIVGEGGFSTVYLARLAGSLAAVKVHRSSERLHRAFRQELDALLRVRHPHIVRLLAFCDQRDEGVLVLEFAPNGSLHEQLHGGGAGAAPMPWARRVPVALQVARALEYLHERCEPQVVHGDVKASNVLLDAGMGARLCDFGSARAGFSAAVAVAAAGPRPRAVFGSPGYVDPHYLRSGVVTKKSDVYSFGVLLLELLTGVQAFRDGRLLTASVAPRLAAAAAGDLVDRRLGCRYDAREAAAVLALAAACVRDKPGLRPSMADVVRALEQLQPQHGRSLLGAGGKL

SEQ ID NO: 10109 - DNA, 1714 bp, Zea mays subsp. mays
  misc_feature (1)..(1714): Ceres Seq. ID no. 12363889
  misc_feature (1)..(1714): Ortholog of  Ceres SEQ ID NO 15170151 as cited in SEQ ID NO 53069
  misc_feature (1)..(1714): Ortholog of  Ceres SEQ ID NO 13594209 as cited in SEQ ID NO 59089
  misc_feature (1)..(1714): Ortholog of  Ceres SEQ ID NO 14313084 as cited in SEQ ID NO 59183
  misc_feature (1)..(1714): Ortholog of  Ceres SEQ ID NO 14308041 as cited in SEQ ID NO 62601
  misc_feature (1)..(1714): Ortholog of  Ceres SEQ ID NO 14303546 as cited in SEQ ID NO 64893
  misc_feature (1)..(1714): Ortholog of  Ceres SEQ ID NO 14308027 as cited in SEQ ID NO 65826
  misc_feature (1)..(1714): Ortholog of  Ceres SEQ ID NO 15169585 as cited in SEQ ID NO 66076
  misc_feature (1)..(1714): Ortholog of  Ceres SEQ ID NO 15170163 as cited in SEQ ID NO 66262
  misc_feature (1)..(1714): Ortholog of  Ceres SEQ ID NO 13502874 as cited in SEQ ID NO 66298
  misc_feature (1)..(1714): Ortholog of  Ceres SEQ ID NO 15169631 as cited in SEQ ID NO 67173
  misc_feature (1)..(1714): Ortholog of  Ceres SEQ ID NO 12614124 as cited in SEQ ID NO 68392
gcacgagaccattacctagaacatcctaatcgaaaagatttgccggaaggcgcctcggcggaagctgctatctagttgaagccagccatggccgccgagcccccggcgtacttgctgctccttcccctcatcgccataccgctcatcgtcttcctcgtcctgtcccgccgaagggatgaccagcggcgcttcccaccggcgccgtgggcgctgccggtcatcggccacctgcaccacctcgccggcgcgccaccgcaccgtgccctgcgggaccttgcgaggcgccacggcccgctcatgacgctccgcttctggcgagctccgggtcgtggtcgcctcgtcgccggacgccgcgcgggagatcttgaggacccacgacgtggacttcgcgtcgcggcccatcgggccgatgctgcagctcgtgttccggggcgccgagggcctcatcttcgcgccctacggcgacgggtggcggcagctccgcaagatctgcaccctcgaactcctcagcgcccgccgcgtccactccttccggcccgtccgcgaggacgaggtcggccgcctcctcggctcggtcgcgtccgccgcggcggcggggttgcccgtgaacctgagtgagaggatcacggcgttcgtcgcggacgcagcggtgcgcgccatcatcggcagccgggagcgagcaccgcgacgagttcttgcgcctgctgatggacgggctcaagataattccgggattgagcctgccggacctcttcccgtcgtcacgcctcgcgatgctcgtcagcagcgttcccggtaaaatcgagcgccgccggaaaggcctccttgacatcgtcgaccccatcattctggagcatcaggagaagagagcggccggtggcatagacgaagatgaggacttgcttgacgtgctcttgagactccagaaagacatggactcccagtaccctctcaccaccgacaacatcaaatccgtcctcatcgacatgtttggagcaagcagcgagacgtcggcgacgacgctgaagtggacaatggccgagctgatgcggaacccggcggtgatgcggaaggcgcaagatgaggtcaggggagcactcgccggccacgacgaggtggcggaggacagcctggtcaatctgcggtacctgcagctagtcataaaggagacgctgcggctgcacccgccggcgccattgctgctgccgcgggagtgccgcagcccgtgccaggtgctcggctacgacgtgcctcgtggcaccatggtgctggtgaacgcgtgggcaataggcagggacccagcgctgtgggacgcgccggaggatttcgtgccggaaaggttcgaggagagtggacgagacttcaagggcatggattttgagttcatcccgttcggtgcgggaaggaggatgtgccccggcatggcgttcgggctggcgcacattgagctcgctctcgcggcgttgctgtttcacttcgactggaagctaccggaaggggtggtcggctggtcgccgaggagatagacatggccgaggcggtcgcgatcacggcccctccgcgatctgatttagtggtgctccctgttactaggctaccggtgtcaatataatgtgcttcggcccaaaagcttattttctttcagtatgctagaaatagaacaacaacttttctttcgctttcggcggttgtgaaggtcgaaaccttttcctcg

SEQ ID NO: 10110 - protein, 272 aa, Zea mays subsp. mays
  peptide (1)..(272): Ceres Seq. ID no. 12363890
MDGLKIIPGLSLPDLFPSSRLAMLVSSVPGKIERRRKGLLDIVDPIILEHQEKRAAGGIDEDEDLLDVLLRLQKDMDSQYPLTTDNIKSVLIDMFGASSETSATTLKWTMAELMRNPAVMRKAQDEVRGALAGHDEVAEDSLVNLRYLQLVIKETLRLHPPAPLLLPRECRSPCQVLGYDVPRGTMVLVNAWAIGRDPALWDAPEDFVPERFEESGRDFKGMDFEFIPFGAGRRMCPGMAFGLAHIELALAALLFHFDWKLPEGVVGWSPRR

SEQ ID NO: 10111 - protein, 250 aa, Zea mays subsp. mays
  peptide (1)..(250): Ceres Seq. ID no. 12363891
MLVSSVPGKIERRRKGLLDIVDPIILEHQEKRAAGGIDEDEDLLDVLLRLQKDMDSQYPLTTDNIKSVLIDMFGASSETSATTLKWTMAELMRNPAVMRKAQDEVRGALAGHDEVAEDSLVNLRYLQLVIKETLRLHPPAPLLLPRECRSPCQVLGYDVPRGTMVLVNAWAIGRDPALWDAPEDFVPERFEESGRDFKGMDFEFIPFGAGRRMCPGMAFGLAHIELALAALLFHFDWKLPEGVVGWSPRR

SEQ ID NO: 10112 - protein, 197 aa, Zea mays subsp. mays
  peptide (1)..(197): Ceres Seq. ID no. 12363892
MDSQYPLTTDNIKSVLIDMFGASSETSATTLKWTMAELMRNPAVMRKAQDEVRGALAGHDEVAEDSLVNLRYLQLVIKETLRLHPPAPLLLPRECRSPCQVLGYDVPRGTMVLVNAWAIGRDPALWDAPEDFVPERFEESGRDFKGMDFEFIPFGAGRRMCPGMAFGLAHIELALAALLFHFDWKLPEGVVGWSPRR

SEQ ID NO: 10113 - DNA, 1627 bp, Zea mays subsp. mays
  misc_feature (1)..(1627): Ceres Seq. ID no. 12350273
  misc_feature (1)..(1627): Ortholog of  Ceres SEQ ID NO 14310748 as cited in SEQ ID NO 53379
  misc_feature (1)..(1627): Ortholog of  Ceres SEQ ID NO 15179906 as cited in SEQ ID NO 67006
attctcttcctcttccggtgctcgtgctcgtgctcgtgctctccgccctccccctccgccacctcgcgcggaacggaacccaggccgccgccgacccagccaccgctaggcgaccgcgcggcatggtggcgcttttacactacctatgctagtttgcctgatgctacatttccacgatggttaagctgactatgatagcgcgtgtcactgatggccttccattgtcggagggattagatgatagtcgggatctgaaagatgctgacttctacaagcagcaagcaaaactgttgttcaagaacttgtccagagggcagcatgaggcgtcaaggatgtcaattgagacaggaccataccttttccagtatcctaagacctttttctcatttgcaaaattctttgttccacaattaatcatttagaaatatatgtgattcttcatcatgatcctaaattagagtttttgtgaactggcaagtttaggcagcctaaccatataccgtaaacttgaccagtattgtgtatatattggattcaatattaagtagttcaagttcctttgacaagcaccagcttatgcatatcatatgattatcgtctgtctccattgatgtgtggattacaccaagtaagcgctatcactaatgacgtatggtatgaaaatgatcattttctgcactaaaatgcttctggtgctctagttgtaccttaattcaataaaacagctacatcatagaaggccgtgtttgctatttgactttgtgtgaccgttcttatcccaagaaacttgcattccagtatctcgaagatctcaaaaatgaatttgagaaagtcaatggcagccaaattgaaacagctgcaaggccatatgcatttattaaatttggtatggttctctgctcatgtcttgtatttttttttcctcattcgcttaatatttctgctaggtgaaagtgtatgtgttcctgtgtacttgttcagatgcattcatacagaagaccaagaaactgtatttggataccagaacacagaggaaccttgctaagctgaatgatgagctctatgaggtgcaccagatcatgactcgcaatgttcaagaagttctcggtgttggtgaaaaactagaccaggtgagtgagatgtcaagtaggttgacttcggatactagaatctatgcagagaaggcgaaagatctcaatcgccaggcattgattcgtaaatatgcccccgttgctattgtgattgggatagtggtgatgctcttctgggtgaagaacaagatatggtgactggtgccatcttgcgatttcacagttatcatgctggaaccagctgagttgtcttgtcttccctcgtgcaaccatatgtttgatcgtggtcccaaaaagaaaagatggctcgatggtttatcccgcatctgccgattcaagcgactactttagctatcaaaagcaaaaccacggtagtagagatagccttggaactgcacatttctattaactggacatgtataaatatagttctcgtgagcgcaccatgtaatcgtcgaaattcatccatgtgttgtgacattttttgagcacagttgaacatgtggtggagcctggaggcaggtcattctcagccc

SEQ ID NO: 10114 - protein, 81 aa, Zea mays subsp. mays
  peptide (1)..(81): Ceres Seq. ID no. 12350274
MVKLTMIARVTDGLPLSEGLDDSRDLKDADFYKQQAKLLFKNLSRGQHEASRMSIETGPYLFQYPKTFFSFAKFFVPQLII

SEQ ID NO: 10115 - protein, 76 aa, Zea mays subsp. mays
  peptide (1)..(76): Ceres Seq. ID no. 12350275
MIARVTDGLPLSEGLDDSRDLKDADFYKQQAKLLFKNLSRGQHEASRMSIETGPYLFQYPKTFFSFAKFFVPQLII

SEQ ID NO: 10116 - protein, 75 aa, Zea mays subsp. mays
  peptide (1)..(75): Ceres Seq. ID no. 12350276
MNLRKSMAAKLKQLQGHMHLLNLVWFSAHVLYFFFLIRLIFLLGESVCVPVYLFRCIHTEDQETVFGYQNTEEPC

SEQ ID NO: 10117 - DNA, 1468 bp, Zea mays subsp. mays
  misc_feature (1)..(1468): Ceres Seq. ID no. 12566388
  misc_feature (1)..(1468): Ortholog of  Ceres SEQ ID NO 15226049 as cited in SEQ ID NO 55683
  misc_feature (1)..(1468): Ortholog of  Ceres SEQ ID NO 12623423 as cited in SEQ ID NO 61219
  misc_feature (1)..(1468): Ortholog of  Ceres SEQ ID NO 13597225 as cited in SEQ ID NO 63994
gcacgagaccattacctagaacatcctaatcgaaaaacctcctcttctcgcctgtgccttttgcccctgtgctcgccacacgcggcgcaaccgcccacccacccagccaggagaagaagatctccgtcgcctgctcttcgcttcgcttcgaatcggaggtgtcgagtagccagtggtgtccctatggattcagcttttagaagagctctcaatgagcctatgtgcttggaagaaaccgtcgtccaacaaggaattgaaaggtgcccattcctgaggaacatcaatgagcctacaagtttttccttctcgtccgtcaacttccctattcccgcaagaggagccaagggaccgattttcgaagatgggcctaattttgacatggcatttcgagttttccatggtagagatggggttgttccactttcagaagggtcattggcccagattgagaagccactgccaaagcccaatcctgagttcaacccattggcagccaaagcagcaaccatcagtctatctgcatttggagggtttttcagctttggtgacttctcaaataagcgcaataagaaaaactccaacaagaagaaccccaacaacctcccccagaataaaggccagcctaacaataacaaccatgaagcactgagcaacgagtggctggagatgggccaatgtccacttgcgaaatcttatagggcattaagtggaattgtgccacttgtcgcaaagatgatgacacccccagctggtatgaaacttaagtgcccacctgccgtggttgctgcccgcgcagcactatcccgcacagcctttgctaaggggcttcgccctcagcccctgccaacaaaaatactggtgattgcattgcttggtatggcagcaaatgttcctctgggcatctggagggagcacacacagaagttttcattgcagtggtttgccgcagtacatgctgcagtgccgttcatagggatgctcaggaaatctgtgctgatgcctaagacagccatggcccttactatagccgcctcgatattgggtcagacaatcgggtcaagagctgaacgtatcagactgaagagggccgcggcagcaaaattagcaagagagagccatggtgacgctgctgactacatcaaagcaccaatgagtctgaaaacagggaaccacactgttcagttttgggatccgctttccctcagagctgaaagcacagtggctgcaggtaccacagcagttcttgtccctgccatttctgctttcaactgatgacaggaatggattcattacgattgtaccagcatcgctggttggtgtattcttttttttctcctattctaaataatctgattgttgtatccattactgtacttttgagcttaagaaagaaatacttcacggcaaactcttcatcctgttttggtggccacatgacagcgaataaattagagaacacgttgagctg

SEQ ID NO: 10118 - protein, 423 aa, Zea mays subsp. mays
  peptide (1)..(423): Ceres Seq. ID no. 12566389
ARDHYLEHPNRKTSSSRLCLLPLCSPHAAQPPTHPARRRRSPSPALRFASNRRCRVASGVPMDSAFRRALNEPMCLEETVVQQGIERCPFLRNINEPTSFSFSSVNFPIPARGAKGPIFEDGPNFDMAFRVFHGRDGVVPLSEGSLAQIEKPLPKPNPEFNPLAAKAATISLSAFGGFFSFGDFSNKRNKKNSNKKNPNNLPQNKGQPNNNNHEALSNEWLEMGQCPLAKSYRALSGIVPLVAKMMTPPAGMKLKCPPAVVAARAALSRTAFAKGLRPQPLPTKILVIALLGMAANVPLGIWREHTQKFSLQWFAAVHAAVPFIGMLRKSVLMPKTAMALTIAASILGQTIGSRAERIRLKRAAAAKLARESHGDAADYIKAPMSLKTGNHTVQFWDPLSLRAESTVAAGTTAVLVPAISAFN

SEQ ID NO: 10119 - protein, 362 aa, Zea mays subsp. mays
  peptide (1)..(362): Ceres Seq. ID no. 12566390
MDSAFRRALNEPMCLEETVVQQGIERCPFLRNINEPTSFSFSSVNFPIPARGAKGPIFEDGPNFDMAFRVFHGRDGVVPLSEGSLAQIEKPLPKPNPEFNPLAAKAATISLSAFGGFFSFGDFSNKRNKKNSNKKNPNNLPQNKGQPNNNNHEALSNEWLEMGQCPLAKSYRALSGIVPLVAKMMTPPAGMKLKCPPAVVAARAALSRTAFAKGLRPQPLPTKILVIALLGMAANVPLGIWREHTQKFSLQWFAAVHAAVPFIGMLRKSVLMPKTAMALTIAASILGQTIGSRAERIRLKRAAAAKLARESHGDAADYIKAPMSLKTGNHTVQFWDPLSLRAESTVAAGTTAVLVPAISAFN

SEQ ID NO: 10120 - protein, 350 aa, Zea mays subsp. mays
  peptide (1)..(350): Ceres Seq. ID no. 12566391
MCLEETVVQQGIERCPFLRNINEPTSFSFSSVNFPIPARGAKGPIFEDGPNFDMAFRVFHGRDGVVPLSEGSLAQIEKPLPKPNPEFNPLAAKAATISLSAFGGFFSFGDFSNKRNKKNSNKKNPNNLPQNKGQPNNNNHEALSNEWLEMGQCPLAKSYRALSGIVPLVAKMMTPPAGMKLKCPPAVVAARAALSRTAFAKGLRPQPLPTKILVIALLGMAANVPLGIWREHTQKFSLQWFAAVHAAVPFIGMLRKSVLMPKTAMALTIAASILGQTIGSRAERIRLKRAAAAKLARESHGDAADYIKAPMSLKTGNHTVQFWDPLSLRAESTVAAGTTAVLVPAISAFN

SEQ ID NO: 10121 - DNA, 1490 bp, Zea mays subsp. mays
  misc_feature (1)..(1490): Ceres Seq. ID no. 12365955
  misc_feature (1)..(1490): Ortholog of  Ceres SEQ ID NO 13656662 as cited in SEQ ID NO 65594
aaggatcacttacgctgacacggttgaggcgacccaccagttcgacgaggagaacgtgctcagccgaggccgccacggcctcgtgttcaaggcttgttacagtgacggcaccgtgctggcgattctgcggctcccgtccaggtctgccgatggcgccgtggtgatcgacgagggatcgttcaggaaggaggccgagtctctcgggaaggtgaagcacaggaacctcacggtgctccgtggctactatgccgggcctccgccggacgtccggctgctggtctatgactacatgcccaacggcaacctcgccacgctgctgcaggaagcgtcacaccgggacggccacattctcaactggccgatgaggcacctcatcgcgctcggcgtctcgcgcggtcttgcgttcctgcaccagtccggggtggtgcacggcgacgtcaagccgcagaacattctcttcgacgccgacttcgagccgcacctgtctgatttcggcctcgagccgatggtggtgactgcggccgccgccgccgcgtcgacatcggctgcaactgcaacaccacccgtgggctccctcggctacgtggcccccgacgcggccgctgccgggcaggccacgagggagggcgacgtgtacagcttcggcatcgtgctgctggagctcctcacgggtcggcgccccggcatgttcgccggggagaaggaggaggaggaggaagaggacatcgtgaagtgggtgaagcggcagctgcagcgcggcgccgtggcggaactgctggagccgggcctgctggagctggacccggagtcgtccgagtgggaggagttcctgctgggcatcaaggtcgggctgctgtgcaccgcgtccgacccgctggaccgcccggccatgggcgacgtggtgttcatgctggagggctgccgcgtcggcccggacatcccgtccccgtcctccgccgaccccacctcccagccgtcgccggcctgatctcccggcggctccggcattgccgcccgccagattcagttcggtagcttgttccatttttttttctgtcgctgattgatttatttaattagttcagattagttttgctcccgtcgacagtcgaactgacacgtgggggccggtaaccgtttcccgccagtagccgttggttaggggaggccagtcagcagcgggcacggcggagcagggagccatgtgcgcactgctgctcaagcgtgtgcgtgtcgtcgtgctgcgcatgtggggtttccctgcccaagcatcggcaacggctactagaggcaggacatgcctgtcgcctcctggccgttgatctcggccgatctgtacctgtactctctaacgattgatttcgtgtagtggcctgcttggcttcctgggatccttgtcttttaatctcgtttcaccaatgcaacaatcggccgttttgtgccacgtgctgtacatttgtctgtattttgttatcctgattgattggccc

SEQ ID NO: 10122 - protein, 328 aa, Zea mays subsp. mays
  peptide (1)..(328): Ceres Seq. ID no. 12365956
RITYADTVEATHQFDEENVLSRGRHGLVFKACYSDGTVLAILRLPSRSADGAVVIDEGSFRKEAESLGKVKHRNLTVLRGYYAGPPPDVRLLVYDYMPNGNLATLLQEASHRDGHILNWPMRHLIALGVSRGLAFLHQSGVVHGDVKPQNILFDADFEPHLSDFGLEPMVVTAAAAAASTSAATATPPVGSLGYVAPDAAAAGQATREGDVYSFGIVLLELLTGRRPGMFAGEKEEEEEEDIVKWVKRQLQRGAVAELLEPGLLELDPESSEWEEFLLGIKVGLLCTASDPLDRPAMGDVVFMLEGCRVGPDIPSPSSADPTSQPSPA

SEQ ID NO: 10123 - protein, 232 aa, Zea mays subsp. mays
  peptide (1)..(232): Ceres Seq. ID no. 12365957
MPNGNLATLLQEASHRDGHILNWPMRHLIALGVSRGLAFLHQSGVVHGDVKPQNILFDADFEPHLSDFGLEPMVVTAAAAAASTSAATATPPVGSLGYVAPDAAAAGQATREGDVYSFGIVLLELLTGRRPGMFAGEKEEEEEEDIVKWVKRQLQRGAVAELLEPGLLELDPESSEWEEFLLGIKVGLLCTASDPLDRPAMGDVVFMLEGCRVGPDIPSPSSADPTSQPSPA

SEQ ID NO: 10124 - protein, 208 aa, Zea mays subsp. mays
  peptide (1)..(208): Ceres Seq. ID no. 12365958
MRHLIALGVSRGLAFLHQSGVVHGDVKPQNILFDADFEPHLSDFGLEPMVVTAAAAAASTSAATATPPVGSLGYVAPDAAAAGQATREGDVYSFGIVLLELLTGRRPGMFAGEKEEEEEEDIVKWVKRQLQRGAVAELLEPGLLELDPESSEWEEFLLGIKVGLLCTASDPLDRPAMGDVVFMLEGCRVGPDIPSPSSADPTSQPSPA

SEQ ID NO: 10125 - DNA, 1425 bp, Zea mays subsp. mays
  misc_feature (1)..(1425): Ceres Seq. ID no. 12391880
  misc_feature (1)..(1425): Ortholog of  Ceres SEQ ID NO 13594176 as cited in SEQ ID NO 59144
aactaaccaacggacggaagtggcgtggcgaggcaaggccgccgcgaagccgagcaaatccaagcctccctcctctacccgttcctctcctgccttctcgggatctgcccgcccgccttgtgtgatcttgccgcctcgccccccgcggttggagctccggctgcacgacaccatgagcccccgcgcgtagaggctgggagagagggagcggggaacaaagttaggcaccaacaaagttaagtggggaggccagagctgcccagctgggtcgctgttctaccagagggatggacgggagcgccggctccttcgtcgccgtccgccggctctccggctccgaccgcgccgccgccttccaccactcctcttcggcggaggtcgtgacggggtcgacggcgtggatcgggagggggctctcctgcgtctgcgcgcagaggagggacagcgatgcgcgcctttccttcgatttgacgcctgtgcaggaagaatgcctacagaggttacaaaaccgtatagaagttcagtatgatagtgcaaacagagagcatcaggaagcactacagtccctttggtgtgcttcttttcctggcaccgagcttcgggggctaatatcagaacagtggaaagagatgggttggcaagggaaagacccatctacagattttagaggtggaggcttcatctccttggagaatctattgtactttgctaggaactatccaaaatctttccaggaactccttcgcaagcagaatggtgaccgtgcaatctgggagtatccatttgctgtcgctggtgtaaatataaccttcatgctcattcagatgcttgatctccaatcagttaaaccgaggtcattgttcggagcagttttcctaaagcttctttcagaaaacgatcaagcttttgacattctctactgcataaccttcaagctgatggatcagcaatggcttgacatgcatgctacttacatggacttcaacacggtcatgaagtctacacggcgtcagctagaaagggagctgttaattgaagatattcagaggattgaggacatgccatcatacaggcttctggcccggtagctagaagaaactgaaaccttaacatggctacatattgcaaggcggcttgagatgctaatggatcgcaacttatgtggacggcgacaatcttgaaatgtagatgacatgtatccttgtgtgttaggtacttgtggtctctggtaacctgatctctgaagattacaagatagggtttttttcctggtgatagaatgccacgtagggtaactgaagtgtctgatcagctcccatggccaaaaaaaaatttgtagggtgtgttattacaatctggtcgttgtccatcataccacgaaaggaagtattcctagggttgttgttgtaaacaggaggatttggg

SEQ ID NO: 10126 - protein, 266 aa, Zea mays subsp. mays
  peptide (1)..(266): Ceres Seq. ID no. 12391881
MDGSAGSFVAVRRLSGSDRAAAFHHSSSAEVVTGSTAWIGRGLSCVCAQRRDSDARLSFDLTPVQEECLQRLQNRIEVQYDSANREHQEALQSLWCASFPGTELRGLISEQWKEMGWQGKDPSTDFRGGGFISLENLLYFARNYPKSFQELLRKQNGDRAIWEYPFAVAGVNITFMLIQMLDLQSVKPRSLFGAVFLKLLSENDQAFDILYCITFKLMDQQWLDMHATYMDFNTVMKSTRRQLERELLIEDIQRIEDMPSYRLLAR

SEQ ID NO: 10127 - protein, 152 aa, Zea mays subsp. mays
  peptide (1)..(152): Ceres Seq. ID no. 12391882
MGWQGKDPSTDFRGGGFISLENLLYFARNYPKSFQELLRKQNGDRAIWEYPFAVAGVNITFMLIQMLDLQSVKPRSLFGAVFLKLLSENDQAFDILYCITFKLMDQQWLDMHATYMDFNTVMKSTRRQLERELLIEDIQRIEDMPSYRLLAR

SEQ ID NO: 10128 - DNA, 1199 bp, Zea mays subsp. mays
  misc_feature (1)..(1199): Ceres Seq. ID no. 12407579
  misc_feature (1)..(1199): Ortholog of  Ceres SEQ ID NO 15224520 as cited in SEQ ID NO 58188
gcaaatcgccccccaaaccaaccgggccggccgacacaagcagcatcccgtcggcggcgatggacctggtgtcgagcgacctcgcggcgctgggcgcggtggagctggtccgcgtctcggcgtcgatcccgcgcgcggctccgcgcaccttcgcgctgctcaccgcctgcctcgtcttcccgctctccttcgccgtgctcgcgcactccctcttcacccaccccatcctgctccgcatccggggcgccgcccactcggggttcgcgccgtggctcggcctcttcgcgtaccagttcatgtacctcatcgtcctcttcaccttctccctcctctccaccgccgccgccgtcttcaccgtcgcctccctctacgccgggaagcccgcgtccgtctcctcctcgctcagcgcgctgcgccccatcctgccccgcctcctccgcaccttcctctgggtctccctcctcatgctcgcctaccacctcgccttcgcgctcgccgtcctcctgctcgtcgtcctcgtcttcctcgggatccacgtctacatctccgcgctgtggcacctcgccagcgtcgtctccgtgctcgagccgctctgcgggctcgccgccatggccaagagcaggcagctgctccagggccgcaccggcaccgcagccacgcttgtcgtctcctacttcgcggtctgcggcgcgacctcgctgctgttccgtgccgctgtcgttaagggacgcaccgaggaggggagcttcggcctggccttgcctggccggctgcttgtcggcgccgtgctggtgtgcgttcttgtctctgtcaatctgctaggactgctcgtgcagagtgtcttctactacgcctgcaaggccttccacagccagcagattgaccgcactgcattgtatgagcaccttggaggctaccttggggagtacgtgccactcaagagcaatatccagatggagaacctttgagagttggagcataggacaagggtaatcttctcacctctcattgctacatactagcagttttctatggatctttctcaaaagatgactatggtttacttggagctatctggtcttgttgtttctagtatcctgtagtagtgtagtttagaatctgtacaagtgaaaatgcgcagtatggaaccaatctatggaatggaacgtagatgcatgaacaaggttgtctttcgtctc

SEQ ID NO: 10129 - protein, 321 aa, Zea mays subsp. mays
  peptide (1)..(321): Ceres Seq. ID no. 12407580
KSPPKPTGPADTSSIPSAAMDLVSSDLAALGAVELVRVSASIPRAAPRTFALLTACLVFPLSFAVLAHSLFTHPILLRIRGAAHSGFAPWLGLFAYQFMYLIVLFTFSLLSTAAAVFTVASLYAGKPASVSSSLSALRPILPRLLRTFLWVSLLMLAYHLAFALAVLLLVVLVFLGIHVYISALWHLASVVSVLEPLCGLAAMAKSRQLLQGRTGTAATLVVSYFAVCGATSLLFRAAVVKGRTEEGSFGLALPGRLLVGAVLVCVLVSVNLLGLLVQSVFYYACKAFHSQQIDRTALYEHLGGYLGEYVPLKSNIQMENL

SEQ ID NO: 10130 - protein, 302 aa, Zea mays subsp. mays
  peptide (1)..(302): Ceres Seq. ID no. 12407581
MDLVSSDLAALGAVELVRVSASIPRAAPRTFALLTACLVFPLSFAVLAHSLFTHPILLRIRGAAHSGFAPWLGLFAYQFMYLIVLFTFSLLSTAAAVFTVASLYAGKPASVSSSLSALRPILPRLLRTFLWVSLLMLAYHLAFALAVLLLVVLVFLGIHVYISALWHLASVVSVLEPLCGLAAMAKSRQLLQGRTGTAATLVVSYFAVCGATSLLFRAAVVKGRTEEGSFGLALPGRLLVGAVLVCVLVSVNLLGLLVQSVFYYACKAFHSQQIDRTALYEHLGGYLGEYVPLKSNIQMENL

SEQ ID NO: 10131 - protein, 273 aa, Zea mays subsp. mays
  peptide (1)..(273): Ceres Seq. ID no. 12407582
ANRPPNQPGRPTQAASRRRRWTWCRATSRRWARWSWSASRRRSRARLRAPSRCSPPASSSRSPSPCSRTPSSPTPSCSASGAPPTRGSRRGSASSRTSSCTSSSSSPSPSSPPPPPSSPSPPSTPGSPRPSPPRSARCAPSCPASSAPSSGSPSSCSPTTSPSRSPSSCSSSSSSSGSTSTSPRCGTSPASSPCSSRSAGSPPWPRAGSCSRAAPAPQPRLSSPTSRSAARPRCCSVPLSLRDAPRRGASAWPCLAGCLSAPCWCAFLSLSIC

SEQ ID NO: 10132 - DNA, 1728 bp, Zea mays subsp. mays
  misc_feature (1)..(1728): Ceres Seq. ID no. 12352730
  misc_feature (1)..(1728): Ortholog of  Ceres SEQ ID NO 15174879 as cited in SEQ ID NO 53786
  misc_feature (1)..(1728): Ortholog of  Ceres SEQ ID NO 14313336 as cited in SEQ ID NO 55501
  misc_feature (1)..(1728): Ortholog of  Ceres SEQ ID NO 15176941 as cited in SEQ ID NO 55559
  misc_feature (1)..(1728): Ortholog of  Ceres SEQ ID NO 12583314 as cited in SEQ ID NO 56435
  misc_feature (1)..(1728): Ortholog of  Ceres SEQ ID NO 15225368 as cited in SEQ ID NO 58345
  misc_feature (1)..(1728): Ortholog of  Ceres SEQ ID NO 13584744 as cited in SEQ ID NO 69137
acatcacactcgcttcaatattgacaccaccaacgcacgcacgacccttcttcctcctcccggcggcggctaggctaccgctattgatttctccttgcatcgcctttattgcgctcacctgctctgccaagtgccaacgtcgtacacttccagcagtggagggagccggagcacgagctgcccgctggacgagccgtcgccgccacagaaatctacatataattgcagccccaaccacctcgttcctcttccccttccccctccccagccaaatccgctttcctagctctaatcgccgccgatctcgccggaggaactgctagctcgctgctcccttcacttctcagattaaaagttgcctcaagaagaagatccctctgcgccgctgcatgttgagcgagcctaccgtagcgacgagcgcggatatgaattggtgttgtgttcctaaggccaagagagaagagaacccttactccaacagcatcggcggcatctactccgagaagaacataaggctcttctcctatgccgagttaagatctgctaccgacaacttcaaccgcaccaacaaagtgggacgaggcggattcgggacagtctataagggaaccatccgaagcgggcgagaggtcgcggtgaaggtcctctccgccgagtccaggcagggcatcagggagttcctgacggagatcgacgtcatcagcaacgtcaagcaccccaacctcgtcgaactcatcggctgctgcgtcgagggaagcaaccggattctggtgtatgagtacctcaagaacagcagccttgaccgtgcgctgctggcttctaacagtgagcctgccgacttcacctggagcgtcaggtctgctatatgcctcggagtcgctcggggccttgcgtacctgcacgaagagatcgcggcgccgatcgtgcacagagacatcaaggccagcaacatactgctcgacaggaactacgtccccaagatcggggatttcggtctggccaagctgtttcctgacaatgtcacccacatcagcacccgcgtcgcgggaacaacaggctaccttgcgcctgagtacgcctggcatggccagctcaccaagaaagcggacatctacagctttggtgtccttgtcctggagatagtgagcggcactagtagctccaggagcatactcatggatgacaagattctcctagagaaggcatgggagctgtacgaagcgaagaggctcaaggaactggtggatccagcccttgtagactgccctgaggaagaagccatcaggtacatcatggtggccctcttctgcctacaggcggccgccgcgcgccggccgacgatgccccaggtcgtcaccatgctgtccaagcccgtccggatcaacgagagcgagctgacggcgccggggtacctccaggagtacagcaggcggagccccttgtccaaggccaccacttccaccgactccaggttcaagaacctggcgtcccaggaggactccaacatgttcagcacggtggtgccacccacggtgaccgagatgagccccaggtgaagcaaccgccatgtaattttgactgattccttccttgcgttttgtcaaccggcgactatatgatgtagtgccaagtgtgttttcctcctgcaaatgcggcaactagatcttgtacatatagattagtgaatccatgccagacccagagcaatgcaagattgctgtttgttgc

SEQ ID NO: 10133 - protein, 388 aa, Zea mays subsp. mays
  peptide (1)..(388): Ceres Seq. ID no. 12352731
MLSEPTVATSADMNWCCVPKAKREENPYSNSIGGIYSEKNIRLFSYAELRSATDNFNRTNKVGRGGFGTVYKGTIRSGREVAVKVLSAESRQGIREFLTEIDVISNVKHPNLVELIGCCVEGSNRILVYEYLKNSSLDRALLASNSEPADFTWSVRSAICLGVARGLAYLHEEIAAPIVHRDIKASNILLDRNYVPKIGDFGLAKLFPDNVTHISTRVAGTTGYLAPEYAWHGQLTKKADIYSFGVLVLEIVSGTSSSRSILMDDKILLEKAWELYEAKRLKELVDPALVDCPEEEAIRYIMVALFCLQAAAARRPTMPQVVTMLSKPVRINESELTAPGYLQEYSRRSPLSKATTSTDSRFKNLASQEDSNMFSTVVPPTVTEMSPR

SEQ ID NO: 10134 - protein, 376 aa, Zea mays subsp. mays
  peptide (1)..(376): Ceres Seq. ID no. 12352732
MNWCCVPKAKREENPYSNSIGGIYSEKNIRLFSYAELRSATDNFNRTNKVGRGGFGTVYKGTIRSGREVAVKVLSAESRQGIREFLTEIDVISNVKHPNLVELIGCCVEGSNRILVYEYLKNSSLDRALLASNSEPADFTWSVRSAICLGVARGLAYLHEEIAAPIVHRDIKASNILLDRNYVPKIGDFGLAKLFPDNVTHISTRVAGTTGYLAPEYAWHGQLTKKADIYSFGVLVLEIVSGTSSSRSILMDDKILLEKAWELYEAKRLKELVDPALVDCPEEEAIRYIMVALFCLQAAAARRPTMPQVVTMLSKPVRINESELTAPGYLQEYSRRSPLSKATTSTDSRFKNLASQEDSNMFSTVVPPTVTEMSPR

SEQ ID NO: 10135 - DNA, 1118 bp, Zea mays subsp. mays
  misc_feature (1)..(1118): Ceres Seq. ID no. 12406447
  misc_feature (1)..(1118): Ortholog of  Ceres SEQ ID NO 15172948 as cited in SEQ ID NO 51777
  misc_feature (1)..(1118): Ortholog of  Ceres SEQ ID NO 12784416 as cited in SEQ ID NO 61324
atccgaccagcgtttactcctaactagtttgccgatcgagcccgggcgacgtgagatacgagcggcgtcgaccggcgccggcgagcctccgcagccgcagccgcccgatctgggttttctttcgtagcggtagcggaagatgagccaggaccaggagaacggaggcaccaacgggcagcacgccgccgacgtgatggaggtggagccgaagcgccgggcgccgcggctgaacgagcgcatcctgtcgtcgctgtcgcggaggtccgtcgccgcgcacccctggcacgacctcgagatcggtcctgaagctccggccgtcttcaacgtcgtcgtggagatcaccaaggggagcaaggtgaagtacgagctggacaagaagacggggctcatcaaggtggaccggatcctctactcgtccgtcgtctaccctcacaactacggcttcgtgccccggacgctctgcgaggacaacgaccccatggacgtcctcgtgctcatgcaggaacccgtccttcccggcgccttcctccgcgccagggccatcggcctcatgcctatgatagatcagggagagaaggacgacaagatcatcgccgtctgcgccgacgaccccgagtaccgccactacaacgacatcagcgagctctcccctcaccgcctccaggagatccgccgcttctttgaagactacaagaagaacgagaacaaggaggtggccgtcaacgacttcctgcccgccgccgctgcccgcgaagccatccagtactccatggacctgtacggccagtacatcatgcagaccctgcggcggtagagcgttcctaccagatcccatgccagctgagctgacgcaagagcacagatcgacagaatccttgtggtctcgtctcatgcatggatagccaggtcacatggcttgtcgacgacgaccatgcatctcttcttcccagcgatatatattttagcctgtatcttcccttatttattatagtcttttgggtttggtggaatctgtccacagtgtggtttgatctatgtattcctcttctacatttctcccagaacgaatcgatgagattaataataatgttactacaaccctgttgttttgtcgaccg

SEQ ID NO: 10136 - protein, 224 aa, Zea mays subsp. mays
  peptide (1)..(224): Ceres Seq. ID no. 12406448
MSQDQENGGTNGQHAADVMEVEPKRRAPRLNERILSSLSRRSVAAHPWHDLEIGPEAPAVFNVVVEITKGSKVKYELDKKTGLIKVDRILYSSVVYPHNYGFVPRTLCEDNDPMDVLVLMQEPVLPGAFLRARAIGLMPMIDQGEKDDKIIAVCADDPEYRHYNDISELSPHRLQEIRRFFEDYKKNENKEVAVNDFLPAAAAREAIQYSMDLYGQYIMQTLRR

SEQ ID NO: 10137 - protein, 206 aa, Zea mays subsp. mays
  peptide (1)..(206): Ceres Seq. ID no. 12406449
MEVEPKRRAPRLNERILSSLSRRSVAAHPWHDLEIGPEAPAVFNVVVEITKGSKVKYELDKKTGLIKVDRILYSSVVYPHNYGFVPRTLCEDNDPMDVLVLMQEPVLPGAFLRARAIGLMPMIDQGEKDDKIIAVCADDPEYRHYNDISELSPHRLQEIRRFFEDYKKNENKEVAVNDFLPAAAAREAIQYSMDLYGQYIMQTLRR

SEQ ID NO: 10138 - DNA, 933 bp, Zea mays subsp. mays
  misc_feature (1)..(933): Ceres Seq. ID no. 12373437
  misc_feature (1)..(933): Ortholog of  Ceres SEQ ID NO 15173858 as cited in SEQ ID NO 61930
atcactcaccaagactccaagcactcacctcctcagctcattgccagccttttggttccttccagctagcaaccggacggccagccagccagcagactagtagtagctcttctcacacctactgtgtctgtgtctgtgtgtgctcgcctttagcggcaagcgacccacccccccttcggtagcgagcgacaatgcagtacgcggcggcggagcaggcgtggtacatgccggcgaccacgacgatgatggcggagagcgcggtggcgcgcgtggagcggctggcgtcggagagcgcggtggtggtgttcagcgtgagcagctgctgcatgtgccacgccgtgaagcggctcttctgcggcatgggcgtgcacccgacggtgcacgagctggacctggacccgcgcggacgagagctggagcacgccctcgcccgcctcatcggctacggccccgccggcgcgcccgtcgtccccgtcgtcttcatcggcgggaagctggtcggcgccatggaccgggtcatggccgcgcatatcaacggctccctcgtcccacttctcaaggaggccggcgcgctctggctctgaactgtaggcaggccggccggcaggccgcgcgccattgctggtgactcgtgtgccaacaggctacgcagcttcttccgttgtctaagttagttccttgttgctgtagaacctgatgtcacttgctgcaagctaatcaaactacgtactaagctacggtgataggaggatacatccatggacagggccggatggtggtagatcagtgatgcatcggattgggcttaatatgtgtgtgcgtgcatgtggtgtttgacgcatgcgctggatttgctttgcttggggtgctacactgttaccaccactgttgtttaatttgatatcctttaattttaataccttggttcctctc

SEQ ID NO: 10139 - protein, 130 aa, Zea mays subsp. mays
  peptide (1)..(130): Ceres Seq. ID no. 12373438
MQYAAAEQAWYMPATTTMMAESAVARVERLASESAVVVFSVSSCCMCHAVKRLFCGMGVHPTVHELDLDPRGRELEHALARLIGYGPAGAPVVPVVFIGGKLVGAMDRVMAAHINGSLVPLLKEAGALWL

SEQ ID NO: 10140 - protein, 119 aa, Zea mays subsp. mays
  peptide (1)..(119): Ceres Seq. ID no. 12373439
MPATTTMMAESAVARVERLASESAVVVFSVSSCCMCHAVKRLFCGMGVHPTVHELDLDPRGRELEHALARLIGYGPAGAPVVPVVFIGGKLVGAMDRVMAAHINGSLVPLLKEAGALWL

SEQ ID NO: 10141 - protein, 113 aa, Zea mays subsp. mays
  peptide (1)..(113): Ceres Seq. ID no. 12373440
MMAESAVARVERLASESAVVVFSVSSCCMCHAVKRLFCGMGVHPTVHELDLDPRGRELEHALARLIGYGPAGAPVVPVVFIGGKLVGAMDRVMAAHINGSLVPLLKEAGALWL

SEQ ID NO: 10142 - DNA, 1764 bp, Zea mays subsp. mays
  misc_feature (1)..(1764): Ceres Seq. ID no. 12350277
  misc_feature (1)..(1764): Ortholog of  Ceres SEQ ID NO 13594604 as cited in SEQ ID NO 52106
agtctctttaaaaggccctcgagaaaaatctccgcgtcaccaccaagcacgtccccgttccattacaacaaaagatcgtgctagtaagcaatacgctcaatttgagtttgaggtcgatttctggagcattcgagttcttttccagtaaacttttcaggtttaagcgcggattgatggcagagctgctgtagatttggagcattttggggttggttttttgcgatttgaggatcgaatcgggctggtacaaccgcgctcacgtgcatatataaggcgaattggcggtttgttggctacaattgttcggttcttatcttgaagggtggtgcgaattggaggattcttcccgaatcgagaaggtgtaggccaaattcgcaaggaagctgcagctatccgcgtgagaaggctgcctctcacaaattctcggtcggtgccatcccggcggtggactgcttttgggcttcttcgaaggttcgtatcttttggctcaggagaaagtggttctgaaggcctcgggcttctcatccccaattcgatccgttcccgagacggtgattgggtcatagatggggacggggtcgagcatcctgggcgcggatggagagtggggggagacgtccctcggcgacatgccggagagctgcgtggcggcggtactcctctacctcgacccgccggagatctgccaggtggcccgtctcaacagcgccttccgcggcgccgcctcggcggactgcgtctgggccgccaagcttcccgccaactaccgttaccttgcggccctagccgcggccgccgatgacgagggctgtggcgatggagatgccagcggcaagcgcttgaccaagaaggagatttacgctcgtctgtgccgatccactttctttgatgccggcagaaagtaattctggattctgaagaacaagggagccctttgcatgagtatatcatcaaaggcaatgactattaccgggatagatgatcggaggtactggagccacctcgctacagaggaatcaagattccatactgttgcctatctccagcagatttggtggctcgaggtagatggggagcttgagttctgctttcctgctggtgcctacagcctttttttcatcttcacctgggtcgaccctataggcgcatgggtcgttggctttgtggaactgagcatgttcatggttgggatgtcacgcccacacggttccagctcacgacctctgatgagcagcaggcgacatccgaatattatctgcatctacatgaacaagggggctggaagctttaccatgttggtgattttgtcatatcaaattccgatgagcccatgaaactcaagttctcaatgatgcagatcgattgcacacatatgaaaggcggcttgtgcgttgactccgtgtttatatatcctaaagggtacaagcctgagaaggcgaacatagtctgcacctagttcggcaaagttggccttgtacctctcctgcatgatgaaacaagaggcaattcaaatgtggatggctagcctttttcctggcgatccttacctgaaagcccattgtacattctttttgttttttcccttcattctggtagttttgcatgaatgtaaggtctttcttgtttttttttgggtagtgttagttaaacaggtggagaatagggaatttagaaacaggtcaagtgaagtaagtcttgagtcattgaggcggtagattgccatacagcaataataatgttcggcgagctggattgatttttttg

SEQ ID NO: 10143 - protein, 131 aa, Zea mays subsp. mays
  peptide (1)..(131): Ceres Seq. ID no. 12350278
MSISSKAMTITGIDDRRYWSHLATEESRFHTVAYLQQIWWLEVDGELEFCFPAGAYSLFFIFTWVDPIGAWVVGFVELSMFMVGMSRPHGSSSRPLMSSRRHPNIICIYMNKGAGSFTMLVILSYQIPMSP

SEQ ID NO: 10144 - protein, 124 aa, Zea mays subsp. mays
  peptide (1)..(124): Ceres Seq. ID no. 12350279
MTITGIDDRRYWSHLATEESRFHTVAYLQQIWWLEVDGELEFCFPAGAYSLFFIFTWVDPIGAWVVGFVELSMFMVGMSRPHGSSSRPLMSSRRHPNIICIYMNKGAGSFTMLVILSYQIPMSP

SEQ ID NO: 10145 - protein, 112 aa, Zea mays subsp. mays
  peptide (1)..(112): Ceres Seq. ID no. 12350280
MGTGSSILGADGEWGETSLGDMPESCVAAVLLYLDPPEICQVARLNSAFRGAASADCVWAAKLPANYRYLAALAAAADDEGCGDGDASGKRLTKKEIYARLCRSTFFDAGRK

SEQ ID NO: 10146 - DNA, 1280 bp, Zea mays subsp. mays
  misc_feature (1)..(1280): Ceres Seq. ID no. 12354459
  misc_feature (1)..(1280): Ortholog of  Ceres SEQ ID NO 15174842 as cited in SEQ ID NO 53054
  misc_feature (1)..(1280): Ortholog of  Ceres SEQ ID NO 14310917 as cited in SEQ ID NO 53231
  misc_feature (1)..(1280): Ortholog of  Ceres SEQ ID NO 15170037 as cited in SEQ ID NO 55447
  misc_feature (1)..(1280): Ortholog of  Ceres SEQ ID NO 13597233 as cited in SEQ ID NO 64370
  misc_feature (1)..(1280): Ortholog of  Ceres SEQ ID NO 13584577 as cited in SEQ ID NO 65298
gacgagcaagcaagcagttgcagttgcagcggcctcctcctctgcttcctccctcctcctcctcaccatggtgctggctgcgcacgatccccctccccttgtgttcgacgctgcccgcctgagcggcctctccgacatcccgcagcagttcatctggccggcggacgagagccccaccccggactccgccgaggagctggccgtgccgctcatcgacctctccggggacgccgccgaggtggtccggcaggtccggcgcgcctgcgacctgcacggcttcttccaggtggtggggcacggcatcgacgcggcgctgacggcggaggcccaccgctgcatggacgccttcttcacgctgccgctcccggacaagcagcgcgcgcagcgccgccagggggacagctgcggctacgccagcagcttcacgggccggttcgcgtccaagctgccctggaaggagacgctgtcgttccgctacaccgacgacgacgacggcgacaagtccaaggacgtcgtggcgtcctacttcgtggacaagctgggcgaggggtaccggcaccacggggaggtgtacgggcgctactgctctgagatgagccgtctgtcgctggagctcatggaggtgctaggcgagagcctgggcgtgggccggcgccacttccggcgcttcttccaggggaacgactccatcatgcgcctcaactactacccgccgtgccagcggccctacgacacgctgggcacggggccgcattgcgaccccacgtcgctcaccatcctgcaccaggacgacgtgggcggactccaggtgttcgacgccgccacgctcgcgtggcgctccatcaggcccccgcccgggcgccttcgtcgtcaacatcggcgacaccttcatggcgctctccaacgggcgctacaggagctgcctccaccgcgccgtcgtcaacagccgggtggcacgccgctcgctcgccttcttcctgtgcccggagatggacaaggtggtcaggccgcccaaggagctggtggacgacgccaacccgagggcgtacccggacttcacgtggaggacgctgctggacttcaccatgaggcactacaggtcggacatgaggacgctcgaggccttctccaactggctcagcaccagtagcaatggcggacagcacctgctggagaagaagtaggcatgctatttgggtatggaagatggtggatgtaagcaaacaaagccaaattaagcagagtaggttaattaaggttggctgatgatccatttaggg

SEQ ID NO: 10147 - protein, 382 aa, Zea mays subsp. mays
  peptide (1)..(382): Ceres Seq. ID no. 12354460
TSKQAVAVAAASSSASSLLLLTMVLAAHDPPPLVFDAARLSGLSDIPQQFIWPADESPTPDSAEELAVPLIDLSGDAAEVVRQVRRACDLHGFFQVVGHGIDAALTAEAHRCMDAFFTLPLPDKQRAQRRQGDSCGYASSFTGRFASKLPWKETLSFRYTDDDDGDKSKDVVASYFVDKLGEGYRHHGEVYGRYCSEMSRLSLELMEVLGESLGVGRRHFRRFFQGNDSIMRLNYYPPCQRPYDTLGTGPHCDPTSLTILHQDDVGGLQVFDAATLAWRSIRPPPGRLRRQHRRHLHGALQRALQELPPPRRRQQPGGTPLARLLPVPGDGQGGQAAQGAGGRRQPEGVPGLHVEDAAGLHHEALQVGHEDARGLLQLAQHQ

SEQ ID NO: 10148 - protein, 360 aa, Zea mays subsp. mays
  peptide (1)..(360): Ceres Seq. ID no. 12354461
MVLAAHDPPPLVFDAARLSGLSDIPQQFIWPADESPTPDSAEELAVPLIDLSGDAAEVVRQVRRACDLHGFFQVVGHGIDAALTAEAHRCMDAFFTLPLPDKQRAQRRQGDSCGYASSFTGRFASKLPWKETLSFRYTDDDDGDKSKDVVASYFVDKLGEGYRHHGEVYGRYCSEMSRLSLELMEVLGESLGVGRRHFRRFFQGNDSIMRLNYYPPCQRPYDTLGTGPHCDPTSLTILHQDDVGGLQVFDAATLAWRSIRPPPGRLRRQHRRHLHGALQRALQELPPPRRRQQPGGTPLARLLPVPGDGQGGQAAQGAGGRRQPEGVPGLHVEDAAGLHHEALQVGHEDARGLLQLAQHQ

SEQ ID NO: 10149 - protein, 270 aa, Zea mays subsp. mays
  peptide (1)..(270): Ceres Seq. ID no. 12354462
MDAFFTLPLPDKQRAQRRQGDSCGYASSFTGRFASKLPWKETLSFRYTDDDDGDKSKDVVASYFVDKLGEGYRHHGEVYGRYCSEMSRLSLELMEVLGESLGVGRRHFRRFFQGNDSIMRLNYYPPCQRPYDTLGTGPHCDPTSLTILHQDDVGGLQVFDAATLAWRSIRPPPGRLRRQHRRHLHGALQRALQELPPPRRRQQPGGTPLARLLPVPGDGQGGQAAQGAGGRRQPEGVPGLHVEDAAGLHHEALQVGHEDARGLLQLAQHQ

SEQ ID NO: 10150 - DNA, 1616 bp, Zea mays subsp. mays
  misc_feature (1)..(1616): Ceres Seq. ID no. 12637795
  misc_feature (1)..(1616): Ortholog of  Ceres SEQ ID NO 14303850 as cited in SEQ ID NO 53464
  misc_feature (1)..(1616): Ortholog of  Ceres SEQ ID NO 14310452 as cited in SEQ ID NO 54426
  misc_feature (1)..(1616): Ortholog of  Ceres SEQ ID NO 15176262 as cited in SEQ ID NO 54751
  misc_feature (1)..(1616): Ortholog of  Ceres SEQ ID NO 15174626 as cited in SEQ ID NO 59393
  misc_feature (1)..(1616): Ortholog of  Ceres SEQ ID NO 15169663 as cited in SEQ ID NO 64659
  misc_feature (1)..(1616): Ortholog of  Ceres SEQ ID NO 13656177 as cited in SEQ ID NO 64997
cttccttcctttccccgctcttctcccacacaaacgccaccgccgcatcgaatccgagacgccgatctcggattcgccgtcaccacacgctgccctcgtcgcgctctcccgccgccgccgctcgtctcgtcagccatggcaggattggcaccagaagggtcgcaatttgatgacaagcagtatgacaagaaaatgcaggagatattaactgaagacttcttcacttcatatgatgatgtttgtgaaagttttgacagcatgggactgcaagagaaccttctgagaggcatctatgcctatggttttgagaagccatcggctattcagcaaaggggaatagttcccttctgcaaggggcttgacgtgattcagcaagctcagtctggaactggaaaaacagctaccttctgttctggaatcttgcagcaacttgattatggattggttgaatgccaggcattggttcttgctccaacccgtgagcttgctcagcaaattgagaaggttatgcgtgctcttggggactatttgggtgtcaaagtgcatgcctgtgttggtggaacatctgttcgtgaggaccaaaggattcttgccagtggtgtgcatgttgttgtgggcacaccaggacgtgtgtttgatatgttgcgcaggcagtctctccgtcccgacaacatcaagatgtttgtgttggatgaggctgatgagatgctctcccgtggattcaaggatcagatctatgatatcttccagcttcttccatccaagattcaggtcggtgtcttctcagctaccatgccccctgaggcccttgagatcacgcgcaagttcatgaacaaacctgtgaggattctcgtcaagagagatgagctcacccttgagggtatcaagcaattctatgtcaatatcgacaaggaagattggaagctcgacactctgtgtgacctgtatgagaccctggcaatcacccagagtgtcatctttgtgaacacacgccgcaaggtggactggctcacggacaagatgaggagcagggaccacaccgtgtcagctacacacggtgatatggaccagaacaccagggacatcatcatgagggagttcaggtccgggtcctctcgtgtgctcatcaccaccgacctgctcgcccgtggtatcgacgtccagcaggtctcacttgtcatcaactacgacctgccgacccagccagagaactacctccaccgcatcggccgtagtggtcggtttggaaggaagggtgttgccatcaacttcgtcacccgcgacgacgagcgaatgctgtttgacatccagaggttctacaacgtgaccgttgaggagctgccggccaatgtcgccgaccttctctagatagtatggctgctaaggtttctggataaaggagtttgtttttgttaaaatacgccaacttttctctgctttggatgagtggtaaggtccggggtctgttcgtattgtggcgaaggatgggttttaagtttattttgtcgtatgcaacgtttcggaatttttgtagcgagtaggctacgtgccgctcctgggctagctgggtgctgagacactactgaagtatttttaccttagctgttgggcttatg

SEQ ID NO: 10151 - protein, 455 aa, Zea mays subsp. mays
  peptide (1)..(455): Ceres Seq. ID no. 12637796
LPSFPRSSPTQTPPPHRIRDADLGFAVTTRCPRRALPPPPLVSSAMAGLAPEGSQFDDKQYDKKMQEILTEDFFTSYDDVCESFDSMGLQENLLRGIYAYGFEKPSAIQQRGIVPFCKGLDVIQQAQSGTGKTATFCSGILQQLDYGLVECQALVLAPTRELAQQIEKVMRALGDYLGVKVHACVGGTSVREDQRILASGVHVVVGTPGRVFDMLRRQSLRPDNIKMFVLDEADEMLSRGFKDQIYDIFQLLPSKIQVGVFSATMPPEALEITRKFMNKPVRILVKRDELTLEGIKQFYVNIDKEDWKLDTLCDLYETLAITQSVIFVNTRRKVDWLTDKMRSRDHTVSATHGDMDQNTRDIIMREFRSGSSRVLITTDLLARGIDVQQVSLVINYDLPTQPENYLHRIGRSGRFGRKGVAINFVTRDDERMLFDIQRFYNVTVEELPANVADLL

SEQ ID NO: 10152 - protein, 410 aa, Zea mays subsp. mays
  peptide (1)..(410): Ceres Seq. ID no. 12637797
MAGLAPEGSQFDDKQYDKKMQEILTEDFFTSYDDVCESFDSMGLQENLLRGIYAYGFEKPSAIQQRGIVPFCKGLDVIQQAQSGTGKTATFCSGILQQLDYGLVECQALVLAPTRELAQQIEKVMRALGDYLGVKVHACVGGTSVREDQRILASGVHVVVGTPGRVFDMLRRQSLRPDNIKMFVLDEADEMLSRGFKDQIYDIFQLLPSKIQVGVFSATMPPEALEITRKFMNKPVRILVKRDELTLEGIKQFYVNIDKEDWKLDTLCDLYETLAITQSVIFVNTRRKVDWLTDKMRSRDHTVSATHGDMDQNTRDIIMREFRSGSSRVLITTDLLARGIDVQQVSLVINYDLPTQPENYLHRIGRSGRFGRKGVAINFVTRDDERMLFDIQRFYNVTVEELPANVADLL

SEQ ID NO: 10153 - protein, 391 aa, Zea mays subsp. mays
  peptide (1)..(391): Ceres Seq. ID no. 12637798
MQEILTEDFFTSYDDVCESFDSMGLQENLLRGIYAYGFEKPSAIQQRGIVPFCKGLDVIQQAQSGTGKTATFCSGILQQLDYGLVECQALVLAPTRELAQQIEKVMRALGDYLGVKVHACVGGTSVREDQRILASGVHVVVGTPGRVFDMLRRQSLRPDNIKMFVLDEADEMLSRGFKDQIYDIFQLLPSKIQVGVFSATMPPEALEITRKFMNKPVRILVKRDELTLEGIKQFYVNIDKEDWKLDTLCDLYETLAITQSVIFVNTRRKVDWLTDKMRSRDHTVSATHGDMDQNTRDIIMREFRSGSSRVLITTDLLARGIDVQQVSLVINYDLPTQPENYLHRIGRSGRFGRKGVAINFVTRDDERMLFDIQRFYNVTVEELPANVADLL

SEQ ID NO: 10154 - DNA, 1051 bp, Zea mays subsp. mays
  misc_feature (1)..(1051): Ceres Seq. ID no. 12544505
  misc_feature (1)..(1051): Ortholog of  Ceres SEQ ID NO 14309627 as cited in SEQ ID NO 493
  misc_feature (1)..(1051): Ortholog of  Ceres SEQ ID NO 14302111 as cited in SEQ ID NO 68773
caatagccattcaatcattcaagcgaagcagccaccactctctccactgtgactccgtgacctgcctgccctgctgcacaagcacagcacacacaccccgcacaccgcaccagctcagctcagctcaccaagacaatcaatcatggctcgtccgcgcagtgtcgctgccgctgcccccctcctcctgctgctcgccgccgccgcagcggggctcgtgtccgccgcgtcgccggcagccagcgacttcgtccgcaagtcgtgccgcacgacgcagtacccttcggtgtgcgagcagagcctggcgtcgtacggcgggtcgccgccgccacggagcccgcgggagctggcgcgcgccgcgctgtcggtgagcgcggaccgcgcgcgcgccgcgtcgacgtacgtgggccgcctgtgcggcgccagcaacggcaaaggcgcgaagaaggggtcgggatcggcgtcggcgtcggcaggtcccgtgcgcgactgcctggacaatctggcggacagcgtgggccacctccgcgacgcggcgcaggagatgggcggcgccgggatgggccgcgcggggacgccggcgttcaggtggcacctcagcaacgtgcagacctggtgcagcgccgcgctcaccgacgaggacacctgcctcgacggcctctcgtcccgcgccgtcgacgccggcacgcgcgccgccatccggggcaaggtcgtcgaggtcgcgcaggtcaccagcaacgcgctcgcgctcgtcaataaggtcgggcctgggtactaacacgggaaggggacccaagatccaggcccaggcccaggcccaggcccagcccagataccacacccgctactagtatagtactaggcgcctccacctccacggcgttgggtgtttctcgtccgttaatagctcggtttgctttgcttgtgtttgtgtaagatatacattagttaagggcaataagcttgtactattatgagtggcggccgaggagtacagtacgttctcctctgtccgatcatgccaccatattaatgtgggagatatcttttgtcc

SEQ ID NO: 10155 - protein, 210 aa, Zea mays subsp. mays
  peptide (1)..(210): Ceres Seq. ID no. 12544506
MARPRSVAAAAPLLLLLAAAAAGLVSAASPAASDFVRKSCRTTQYPSVCEQSLASYGGSPPPRSPRELARAALSVSADRARAASTYVGRLCGASNGKGAKKGSGSASASAGPVRDCLDNLADSVGHLRDAAQEMGGAGMGRAGTPAFRWHLSNVQTWCSAALTDEDTCLDGLSSRAVDAGTRAAIRGKVVEVAQVTSNALALVNKVGPGY

SEQ ID NO: 10156 - protein, 121 aa, Zea mays subsp. mays
  peptide (1)..(121): Ceres Seq. ID no. 12544507
IAIQSFKRSSHHSLHCDSVTCLPCCTSTAHTPRTPHQLSSAHQDNQSWLVRAVSLPLPPSSCCSPPPQRGSCPPRRRQPATSSASRAARRSTLRCASRAWRRTAGRRRHGARGSWRAPRCR

SEQ ID NO: 10157 - DNA, 735 bp, Zea mays subsp. mays
  misc_feature (1)..(735): Ceres Seq. ID no. 12400721
  misc_feature (1)..(735): Ortholog of  Ceres SEQ ID NO 15178329 as cited in SEQ ID NO 52153
aattccacccatcgccgccgaaatcccgttgcgtctctcgcgcgttaccaagctctcaagttttctcgcgccgacggcaatggatgaggtcaccgaggccgtgaacaacctcaacatctcgggcgtaggggccgcgggcgttgccggggcggaagggcacaagaagaatcgcatccaggtctccaacactaagaagcccctcttcttctatgtcaacctcgccaagaggtacatgcagctgcacaacgaagtagagctgtcggccctcggcatggccattgcgacggtggtgacagtagcagaaattctgaaaaataacgggcttgctgtcgcgaagagtatcatgacatctactgttgatatcaaggacgagactaggacccggcctatccagaaggccaagattgaaatattgcttggcaagacggagaagtttgatgagctgatggcagcggctgccgaggagagggaggctaatggggccgaggaacaaagctgagtacctgcaaggaaggaccttgttgtagcttatttactgttttctgctgctagatttgtcttcttcatagtttgtcgagtgggctagagacgattacttgtataatcaattaaaggtgcggcttatttagtgtgcttttacttgattcatttatgttggaatgatacaagttgtgttcaatatggtatactctagattcatcactatcttcaatttagaagatagtgcgttgctcc

SEQ ID NO: 10158 - protein, 165 aa, Zea mays subsp. mays
  peptide (1)..(165): Ceres Seq. ID no. 12400722
IPPIAAEIPLRLSRVTKLSSFLAPTAMDEVTEAVNNLNISGVGAAGVAGAEGHKKNRIQVSNTKKPLFFYVNLAKRYMQLHNEVELSALGMAIATVVTVAEILKNNGLAVAKSIMTSTVDIKDETRTRPIQKAKIEILLGKTEKFDELMAAAAEEREANGAEEQS

SEQ ID NO: 10159 - protein, 139 aa, Zea mays subsp. mays
  peptide (1)..(139): Ceres Seq. ID no. 12400723
MDEVTEAVNNLNISGVGAAGVAGAEGHKKNRIQVSNTKKPLFFYVNLAKRYMQLHNEVELSALGMAIATVVTVAEILKNNGLAVAKSIMTSTVDIKDETRTRPIQKAKIEILLGKTEKFDELMAAAAEEREANGAEEQS

SEQ ID NO: 10160 - protein, 88 aa, Zea mays subsp. mays
  peptide (1)..(88): Ceres Seq. ID no. 12400724
MQLHNEVELSALGMAIATVVTVAEILKNNGLAVAKSIMTSTVDIKDETRTRPIQKAKIEILLGKTEKFDELMAAAAEEREANGAEEQS

SEQ ID NO: 10161 - DNA, 1037 bp, Zea mays subsp. mays
  misc_feature (1)..(1037): Ceres Seq. ID no. 12355548
  misc_feature (1)..(1037): Ortholog of  Ceres SEQ ID NO 13590699 as cited in SEQ ID NO 65085
attcgatccgttcccttgccctaagacccacccctgatttcatttccccaatcatggcggcggctctgtcggggacggcggtgtccacggctgcgcttctagccccaatccgagctccaaccagcgcgtttatccggcgctcccagctcacctgtcatcgcctccactcactaaaatgccgccgcgctgggcccatcgtccccgcggccgctgctgccgcggcgggcagcagctcgccgtcgtcagccgttttccacggcgagtgcttcgtggtgggcgacaatatcgacactgaccagatcatccccgccgagcacctcactctggtgccctccaagccggacgagtaccgcaagctcggttccttcgccttcgcggggctcccatccgcagcctacccgacgccgttcgtcgctccgggtgaggagtcctcccgctacgccatcattgtcggcggagccaacttcgggtgcggttcctctcgcgagcacgcgcccgtcgcgcttggggccgctggcgcacgcgccattgttgcggagggctacgcgcgcatcttttttcgcaactccgtggccactggagaggtgtaccctctggagctcacggacgttggtgcctggaaggagtgcaagacaggggatgtggtcaccgtggaccttgctaactccgtttttattaaccacacctctggcaaggagtacaagctgaaaccaattggtgatgctggccctgtaattgaggcgggagggatctttgcctacgcccggaagacaggaatgattgcgtcgaaagctgctgcatgagggaaagcttaggcagccgagcctctgcggagatgaagtaagctggagttaggaccaagagttgctgcacctacttgatgtcgacggtgtctcgaaataagttgcggcctaccggaattatgatgaatcaatcaatttggcctgtcacagatcgttttttttgttactagtacttgtacaattgtactcctgcctgctactgtccttatctgtttgaataactgctctgttgtc

SEQ ID NO: 10162 - protein, 266 aa, Zea mays subsp. mays
  peptide (1)..(266): Ceres Seq. ID no. 12355549
SIRSLALRPTPDFISPIMAAALSGTAVSTAALLAPIRAPTSAFIRRSQLTCHRLHSLKCRRAGPIVPAAAAAAAGSSSPSSAVFHGECFVVGDNIDTDQIIPAEHLTLVPSKPDEYRKLGSFAFAGLPSAAYPTPFVAPGEESSRYAIIVGGANFGCGSSREHAPVALGAAGARAIVAEGYARIFFRNSVATGEVYPLELTDVGAWKECKTGDVVTVDLANSVFINHTSGKEYKLKPIGDAGPVIEAGGIFAYARKTGMIASKAAA

SEQ ID NO: 10163 - protein, 249 aa, Zea mays subsp. mays
  peptide (1)..(249): Ceres Seq. ID no. 12355550
MAAALSGTAVSTAALLAPIRAPTSAFIRRSQLTCHRLHSLKCRRAGPIVPAAAAAAAGSSSPSSAVFHGECFVVGDNIDTDQIIPAEHLTLVPSKPDEYRKLGSFAFAGLPSAAYPTPFVAPGEESSRYAIIVGGANFGCGSSREHAPVALGAAGARAIVAEGYARIFFRNSVATGEVYPLELTDVGAWKECKTGDVVTVDLANSVFINHTSGKEYKLKPIGDAGPVIEAGGIFAYARKTGMIASKAAA

SEQ ID NO: 10164 - DNA, 2064 bp, Zea mays subsp. mays; identical to SEQ ID NO: 9505
  misc_feature (1)..(2064): Ceres Seq. ID no. 13622175
  misc_feature (1)..(2064): Ortholog of  Ceres SEQ ID NO 14308221 as cited in SEQ ID NO 60363

SEQ ID NO: 10165 - protein, 562 aa, Zea mays subsp. mays; identical to SEQ ID NO: 9506
  peptide (1)..(562): Ceres Seq. ID no. 13622176

SEQ ID NO: 10166 - protein, 510 aa, Zea mays subsp. mays; identical to SEQ ID NO: 9507
  peptide (1)..(510): Ceres Seq. ID no. 13622177

SEQ ID NO: 10167 - protein, 506 aa, Zea mays subsp. mays; identical to SEQ ID NO: 9508
  peptide (1)..(506): Ceres Seq. ID no. 13622178

SEQ ID NO: 10168 - DNA, 1173 bp, Zea mays subsp. mays
  misc_feature (1)..(1173): Ceres Seq. ID no. 12355551
  misc_feature (1)..(1173): Ortholog of  Ceres SEQ ID NO 14316261 as cited in SEQ ID NO 57854
acactacaccgtaaccgtcgccggaatcgatcgacccaaagctccccttagagcccgagctctatccaacccacgaacgggatcccgatgcccatggcggcctcggttcttgtcgccgcaccggcggtctcgcccccgctgacgtggcggagatgggctcctcttctcgccgcgtcacatccacgggcgaacccgcctcccgcactgcgcctgcgggcgcccgctcctcctctccgggcctcctccgttccccgcgattcctgcgccggagccgccgtccggaggacgccgtgtgcggcggcggcggcattaggtggaggtgtgaaggcggagtccacggagcgggaggcgcccgatcgggatgctctgaagcgggtggcgctgctcgcgcttggctgctgcgctgcagccgccgcgctcggctgcggcgcggcgcgggcagcggcggaggactccatcaaggcgtcaggattcgggctacgggtggcggagtcgctgcggaggctcggatggcccgacgacaccgtcgtgttcgcgctcgcgacgctgccggtgatcgagctgcggggggcgatccccgttgggtattggctgcggctccatccagtccgcctcaccatcctatccgttcttgggaacatggtgcctgtaccattcatcatcctctacctgaagaaactcgcaacatttttgtctcagaaaagttcgtccgcgactcgaattatggacctcctctttgagcgggcacggcgcaaggctgctcctgttgaggaattccagtggctcggcttgatgctgtttgttgctgttccattcccaggcacgggagcgtggacaggggccttcattgcatctgtactaggcatgccgttctggtcaggttttacagcaaatttcgtgggagtcgtccttgcagggctgctggtgaacttgctcatgaatcttggcctaaaatacgccattgtcactggagtagttttgttctttgtttcaaccgtcatgtggagtgttcttcgttcccttaagaagtccgttaatgtcaagtgatctagtagtctttatcaaactgttcctaatcccttcagagttcagccttgcgtaggaagcttagttgtgtaattttaagtggagctttcagcttccaggtggatctacaagagagaataacactcc

SEQ ID NO: 10169 - protein, 319 aa, Zea mays subsp. mays
  peptide (1)..(319): Ceres Seq. ID no. 12355552
MPMAASVLVAAPAVSPPLTWRRWAPLLAASHPRANPPPALRLRAPAPPLRASSVPRDSCAGAAVRRTPCAAAAALGGGVKAESTEREAPDRDALKRVALLALGCCAAAAALGCGAARAAAEDSIKASGFGLRVAESLRRLGWPDDTVVFALATLPVIELRGAIPVGYWLRLHPVRLTILSVLGNMVPVPFIILYLKKLATFLSQKSSSATRIMDLLFERARRKAAPVEEFQWLGLMLFVAVPFPGTGAWTGAFIASVLGMPFWSGFTANFVGVVLAGLLVNLLMNLGLKYAIVTGVVLFFVSTVMWSVLRSLKKSVNVK

SEQ ID NO: 10170 - protein, 317 aa, Zea mays subsp. mays
  peptide (1)..(317): Ceres Seq. ID no. 12355553
MAASVLVAAPAVSPPLTWRRWAPLLAASHPRANPPPALRLRAPAPPLRASSVPRDSCAGAAVRRTPCAAAAALGGGVKAESTEREAPDRDALKRVALLALGCCAAAAALGCGAARAAAEDSIKASGFGLRVAESLRRLGWPDDTVVFALATLPVIELRGAIPVGYWLRLHPVRLTILSVLGNMVPVPFIILYLKKLATFLSQKSSSATRIMDLLFERARRKAAPVEEFQWLGLMLFVAVPFPGTGAWTGAFIASVLGMPFWSGFTANFVGVVLAGLLVNLLMNLGLKYAIVTGVVLFFVSTVMWSVLRSLKKSVNVK

SEQ ID NO: 10171 - protein, 195 aa, Zea mays subsp. mays
  peptide (1)..(195): Ceres Seq. ID no. 12355554
MGSSSRRVTSTGEPASRTAPAGARSSSPGLLRSPRFLRRSRRPEDAVCGGGGIRWRCEGGVHGAGGARSGCSEAGGAARAWLLRCSRRARLRRGAGSGGGLHQGVRIRATGGGVAAEARMARRHRRVRARDAAGDRAAGGDPRWVLAAAPSSPPHHPIRSWEHGACTIHHPLPEETRNIFVSEKFVRDSNYGPPL

SEQ ID NO: 10172 - DNA, 789 bp, Zea mays subsp. mays; identical to SEQ ID NO: 1699
  misc_feature (1)..(789): Ceres Seq. ID no. 12355957
  misc_feature (1)..(789): Ortholog of  Ceres SEQ ID NO 13587131 as cited in SEQ ID NO 331
  misc_feature (1)..(789): Ortholog of  Ceres SEQ ID NO 13661176 as cited in SEQ ID NO 61114

SEQ ID NO: 10173 - protein, 161 aa, Zea mays subsp. mays; identical to SEQ ID NO: 1700
  peptide (1)..(161): Ceres Seq. ID no. 12355958

SEQ ID NO: 10174 - protein, 106 aa, Zea mays subsp. mays; identical to SEQ ID NO: 1701
  peptide (1)..(106): Ceres Seq. ID no. 12355959

SEQ ID NO: 10175 - DNA, 695 bp, Zea mays subsp. mays
  misc_feature (1)..(695): Ceres Seq. ID no. 12342067
  misc_feature (1)..(695): Ortholog of  Ceres SEQ ID NO 13596944 as cited in SEQ ID NO 68910
aaaaacctcccacgcacattcttggcagctactctactcaatggcgctgtcctcctccggccacccggcgacgacccgcctgctcttctcgcttctgctcgtgggctcggcggcgggcttgccggagcgggcggccatcgacagggtcaaccggcgaggcccttccctcggcctcgtcatgtcctacgtcgacgaggccaccgcgctgcaggcctccggctacttccagccttggcgtgccctccctttcgttgacctctacggacggcggtatcacatcggcagcattcggggcgtgaacgtgatatacgcactgacagggcaacgcaggctgaacgccgccgtcacagtacagacgctcatcgacgtcttcagcgtgtccggcattgttcactacggcacggcagggagctgcaacgactccatctccttcggcgacgtcagtgtccccaggctcgtcgcctacacgggtgcctggacatggaagaagttcagatcaccgagagagtcatcggcggaattgagcttcggcgaatacaacgtcccagacggaggaggaggggagaatctgctcggatccctcaagtacagaaacgaggagctttactcggccggcaagcccatggaagaggtcttctggctgcctgtgcattcggcatggttcagaactgcagaacagctcacggtggaacttg

SEQ ID NO: 10176 - protein, 231 aa, Zea mays subsp. mays
  peptide (1)..(231): Ceres Seq. ID no. 12342068
KTSHAHSWQLLYSMALSSSGHPATTRLLFSLLLVGSAAGLPERAAIDRVNRRGPSLGLVMSYVDEATALQASGYFQPWRALPFVDLYGRRYHIGSIRGVNVIYALTGQRRLNAAVTVQTLIDVFSVSGIVHYGTAGSCNDSISFGDVSVPRLVAYTGAWTWKKFRSPRESSAELSFGEYNVPDGGGGENLLGSLKYRNEELYSAGKPMEEVFWLPVHSAWFRTAEQLTVEL

SEQ ID NO: 10177 - protein, 218 aa, Zea mays subsp. mays
  peptide (1)..(218): Ceres Seq. ID no. 12342069
MALSSSGHPATTRLLFSLLLVGSAAGLPERAAIDRVNRRGPSLGLVMSYVDEATALQASGYFQPWRALPFVDLYGRRYHIGSIRGVNVIYALTGQRRLNAAVTVQTLIDVFSVSGIVHYGTAGSCNDSISFGDVSVPRLVAYTGAWTWKKFRSPRESSAELSFGEYNVPDGGGGENLLGSLKYRNEELYSAGKPMEEVFWLPVHSAWFRTAEQLTVEL

SEQ ID NO: 10178 - protein, 172 aa, Zea mays subsp. mays
  peptide (1)..(172): Ceres Seq. ID no. 12342070
MSYVDEATALQASGYFQPWRALPFVDLYGRRYHIGSIRGVNVIYALTGQRRLNAAVTVQTLIDVFSVSGIVHYGTAGSCNDSISFGDVSVPRLVAYTGAWTWKKFRSPRESSAELSFGEYNVPDGGGGENLLGSLKYRNEELYSAGKPMEEVFWLPVHSAWFRTAEQLTVEL

SEQ ID NO: 10179 - DNA, 916 bp, Zea mays subsp. mays
  misc_feature (1)..(916): Ceres Seq. ID no. 12372196
  misc_feature (1)..(916): Ortholog of  Ceres SEQ ID NO 15173911 as cited in SEQ ID NO 62346
acctctctgccttcttctcggaggtcggagaagagctctctgcttcattcggccggtccaactccaccgaccgatccaatccaacccactgaccatggggttcccgccggtgtgctgctgcgcccccatccccaagccggtcgtcgccttctgcaacctgctcggcgccatcaaggacgccgtcctgctgacgctcgccgccgtgggcttcccgcacgacgccgcgcgcggctcggcggacgcccaccagcccgaggaggtgaagacccggctccccgccgtggagtacgcccagctcctggccgagcagcagccgtcgcccgccacccacgcggcctgcatcgtttgcctggacacgctggaggcggcggacgaggtgcggcggctgggcaactgcgcgcacgccttccaccgggcctgcatcgaccgttggatcgacctaggccggacgacgtgcccgctgtgccgctccgacctcctgccaagcccctggggccgggccgggctgctcgggctgggccggctcgccagccgtctcacgcgcgttcgcgtttggtgaggaccgtctcggaggccacttttaccttttcggtggccaggccgcggtcgcagcccatcccggtggtgccggaacggcgcggacacgttagcgacggcgaccgggccgccggatggtcttaaatctgctctgccacttgccaaccgctaatcaaccagcgggcttaattagcagcggattggcttggtgtctgacagtcgatattatgacagctaaataagcagttaaatgtttctataggattgagtatacacggcagctaaatgtttcgtatagtagtgctcctaacagccatcttcattgtacatgaatgtcctctatccgatcctttcatatagtataacagttaaattattc

SEQ ID NO: 10180 - protein, 226 aa, Zea mays subsp. mays
  peptide (1)..(226): Ceres Seq. ID no. 12372197
TSLPSSRRSEKSSLLHSAGPTPPTDPIQPTDHGVPAGVLLRPHPQAGRRLLQPARRHQGRRPADARRRGLPARRRARLGGRPPARGGEDPAPRRGVRPAPGRAAAVARHPRGLHRLPGHAGGGGRGAAAGQLRARLPPGLHRPLDRPRPDDVPAVPLRPPAKPLGPGRAARAGPARQPSHARSRLVRTVSEATFTFSVARPRSQPIPVVPERRGHVSDGDRAAGWS

SEQ ID NO: 10181 - protein, 185 aa, Zea mays subsp. mays
  peptide (1)..(185): Ceres Seq. ID no. 12372198
PLCLLLGGRRRALCFIRPVQLHRPIQSNPLTMGFPPVCCCAPIPKPVVAFCNLLGAIKDAVLLTLAAVGFPHDAARGSADAHQPEEVKTRLPAVEYAQLLAEQQPSPATHAACIVCLDTLEAADEVRRLGNCAHAFHRACIDRWIDLGRTTCPLCRSDLLPSPWGRAGLLGLGRLASRLTRVRVW

SEQ ID NO: 10182 - protein, 154 aa, Zea mays subsp. mays
  peptide (1)..(154): Ceres Seq. ID no. 12372199
MGFPPVCCCAPIPKPVVAFCNLLGAIKDAVLLTLAAVGFPHDAARGSADAHQPEEVKTRLPAVEYAQLLAEQQPSPATHAACIVCLDTLEAADEVRRLGNCAHAFHRACIDRWIDLGRTTCPLCRSDLLPSPWGRAGLLGLGRLASRLTRVRVW

SEQ ID NO: 10183 - DNA, 671 bp, Zea mays subsp. mays
  misc_feature (1)..(671): Ceres Seq. ID no. 13564010
  misc_feature (1)..(671): Ortholog of  Ceres SEQ ID NO 13596911 as cited in SEQ ID NO 60640
agcttagtgatccttgtgatcaaattttgattgtggcaaacacacatatttattgggacccacaatggatcgatgtaaagttggctcaggcaaaatatcttctttcgagagtatctcagtttgagcaactcatctcaaataaatataattgtaaaccttcagtgatcattgctggtgacttcaattcgacacctggtgacaaggtatacaattaccttttatctgccaacctaggatctacggacgaagctccaatcaagttacgcagcctttatgctgcgaatggaggggagccagagtacacaaactacactcctggttttaccggaacactggactacatattcttgtcggatggtagttcgataaaacctactagcctacttcgtttgccgcgaggggattctgaggatgtgaaaggaggcttgcccaactttcgacatcctagcgatcatctcccaattggtgctgattttctggtagtcaacatctagtgcaggtgttgattgctttttcaacagaaatagtaaatgccgttgaataatttgtgttgttggctcaagtttcagagtttaaatgtaatatctcaaggaacaagcgtttcttttcttgtagagcaattaacaatgcgaattttattcatcaattttaatataataggagtattgtcc

SEQ ID NO: 10184 - protein, 163 aa, Zea mays subsp. mays
  peptide (1)..(163): Ceres Seq. ID no. 13564011
LSDPCDQILIVANTHIYWDPQWIDVKLAQAKYLLSRVSQFEQLISNKYNCKPSVIIAGDFNSTPGDKVYNYLLSANLGSTDEAPIKLRSLYAANGGEPEYTNYTPGFTGTLDYIFLSDGSSIKPTSLLRLPRGDSEDVKGGLPNFRHPSDHLPIGADFLVVNI

SEQ ID NO: 10185 - DNA, 901 bp, Zea mays subsp. mays
  misc_feature (1)..(901): Ceres Seq. ID no. 12376262
  misc_feature (1)..(901): Ortholog of  Ceres SEQ ID NO 13598102 as cited in SEQ ID NO 61001
  misc_feature (1)..(901): Ortholog of  Ceres SEQ ID NO 13599364 as cited in SEQ ID NO 0
aaaaccccagccaccaggtaccaatggcggccaccgcgatggaccatgacggcggcgacgacgtggtcacaccaggggagcttctcggaaactcattaaccctcgcggccggacgtggcgcctacgccgacggtcgctctgtgcgcgcgtcggtcaccgggcgccgccgcatcgtgccgcccgcacctggctccgacgaccagagatccacggtggaggtggtggggcacaaggcccatggagctgtgccacagccgggaagcgttgtcatcgcccgagtaacaaaggttatggctagaatggcctctgcagacatcatgtgtgttgactcaaaggctatcagagaaaagttcactggcatgataaggcagcaagatgttcgtgcaactgaaattgacaaggtggatatgtaccaatcatatcgtcctggggacattgttaaagctatggttctttctcttggtgatgcaagggcatattacctttccactgcgaaaaatgaacttggagtcgtttcagcacaaagcatagctggtggtacattggttccaatcagttggactgagatgcaatgtgatttgaccggtcaaattgagcaaaggaaagttgcaaaggtggaatagatgtgctggccctcctgataaatgttggtggcggtatacaaattgtggaccagtgataccaggtccttgggcggactgcccaattctgcgacgtccaacttcattacagctgcattgagcatgggtttttaaaaccctggctgaattaactagacatgaatcgtagccatgggtcctgtaacccaaccttgggatctgaatcatagccatgggttctgtaacccagtaaccttgcccttgtgatttgttactctgagctaatgacattgcagttttcc

SEQ ID NO: 10186 - protein, 206 aa, Zea mays subsp. mays
  peptide (1)..(206): Ceres Seq. ID no. 12376263
NPSHQVPMAATAMDHDGGDDVVTPGELLGNSLTLAAGRGAYADGRSVRASVTGRRRIVPPAPGSDDQRSTVEVVGHKAHGAVPQPGSVVIARVTKVMARMASADIMCVDSKAIREKFTGMIRQQDVRATEIDKVDMYQSYRPGDIVKAMVLSLGDARAYYLSTAKNELGVVSAQSIAGGTLVPISWTEMQCDLTGQIEQRKVAKVE

SEQ ID NO: 10187 - protein, 199 aa, Zea mays subsp. mays
  peptide (1)..(199): Ceres Seq. ID no. 12376264
MAATAMDHDGGDDVVTPGELLGNSLTLAAGRGAYADGRSVRASVTGRRRIVPPAPGSDDQRSTVEVVGHKAHGAVPQPGSVVIARVTKVMARMASADIMCVDSKAIREKFTGMIRQQDVRATEIDKVDMYQSYRPGDIVKAMVLSLGDARAYYLSTAKNELGVVSAQSIAGGTLVPISWTEMQCDLTGQIEQRKVAKVE

SEQ ID NO: 10188 - protein, 194 aa, Zea mays subsp. mays
  peptide (1)..(194): Ceres Seq. ID no. 12376265
MDHDGGDDVVTPGELLGNSLTLAAGRGAYADGRSVRASVTGRRRIVPPAPGSDDQRSTVEVVGHKAHGAVPQPGSVVIARVTKVMARMASADIMCVDSKAIREKFTGMIRQQDVRATEIDKVDMYQSYRPGDIVKAMVLSLGDARAYYLSTAKNELGVVSAQSIAGGTLVPISWTEMQCDLTGQIEQRKVAKVE

SEQ ID NO: 10189 - DNA, 892 bp, Zea mays subsp. mays
  misc_feature (1)..(892): Ceres Seq. ID no. 12361752
  misc_feature (1)..(892): Ortholog of  Ceres SEQ ID NO 13495070 as cited in SEQ ID NO 53216
  misc_feature (1)..(892): Ortholog of  Ceres SEQ ID NO 13661333 as cited in SEQ ID NO 61620
  misc_feature (1)..(892): Ortholog of  Ceres SEQ ID NO 13596812 as cited in SEQ ID NO 62283
  misc_feature (1)..(892): Ortholog of  Ceres SEQ ID NO 13623021 as cited in SEQ ID NO 0
  misc_feature (1)..(892): Ortholog of  Ceres SEQ ID NO 14309080 as cited in SEQ ID NO 0
accacaccaaaacccgcatccataaacaagaaaaagaaaagaaaacccccgctgccagcgacagaagaagaaggggtcccttctccttggttgcgttgcgcctccctcctgtctgcgtgcgtgcaatcgacgcagaggcgcgggcgctcgcaccaccacgaccacgacccgatggctttcatgcgctcccgctcaaatgcatcttctggcatgggagttgctcctaacattagggagacattcgttgagcttcaaatgaagaaggcattccgatatgttatcttcaaaatcgaagagaagcaaaagcaggtggttgtggagaagacaggggctactactgaaagctatgatgattttttggcctctctcccagagaatgactgccgatatgcgctgtatgattttgattttgttactggggagaatgtgcagaaaagcaagattttcttcattgcctggtccccatcgacatcccgcatacgtgctaagatgctgtactccacgtcgaaggaccgcatcaagtacgagcttgacgggttccactacgaaatccaggcgaccgacccatcggaggtggacatcgaggttctccgggagcgggctcactgaagctggttctccttttgaagggacctgtggagggccgtgaaccttcagccagatgcaaattcaattgtcaacgatgaagctcccgccgtggtgtttgttaataagttactgtaagcatatcatttagtcgctactcgctatgcatgacactagctggtgaagcgctatctaagctctattggtatgaccgtatgaggtttggttgccgtgttgccgagcctgtaaacgaagcaagatttgcagacttgttatattgtggtattgatgatactggattactggc

SEQ ID NO: 10190 - protein, 202 aa, Zea mays subsp. mays
  peptide (1)..(202): Ceres Seq. ID no. 12361753
TTPKPASINKKKKRKPPLPATEEEGVPSPWLRCASLLSACVQSTQRRGRSHHHDHDPMAFMRSRSNASSGMGVAPNIRETFVELQMKKAFRYVIFKIEEKQKQVVVEKTGATTESYDDFLASLPENDCRYALYDFDFVTGENVQKSKIFFIAWSPSTSRIRAKMLYSTSKDRIKYELDGFHYEIQATDPSEVDIEVLRERAH

SEQ ID NO: 10191 - protein, 145 aa, Zea mays subsp. mays
  peptide (1)..(145): Ceres Seq. ID no. 12361754
MAFMRSRSNASSGMGVAPNIRETFVELQMKKAFRYVIFKIEEKQKQVVVEKTGATTESYDDFLASLPENDCRYALYDFDFVTGENVQKSKIFFIAWSPSTSRIRAKMLYSTSKDRIKYELDGFHYEIQATDPSEVDIEVLRERAH

SEQ ID NO: 10192 - protein, 142 aa, Zea mays subsp. mays
  peptide (1)..(142): Ceres Seq. ID no. 12361755
MRSRSNASSGMGVAPNIRETFVELQMKKAFRYVIFKIEEKQKQVVVEKTGATTESYDDFLASLPENDCRYALYDFDFVTGENVQKSKIFFIAWSPSTSRIRAKMLYSTSKDRIKYELDGFHYEIQATDPSEVDIEVLRERAH

SEQ ID NO: 10193 - DNA, 870 bp, Zea mays subsp. mays
  misc_feature (1)..(870): Ceres Seq. ID no. 12400389
  misc_feature (1)..(870): Ortholog of  Ceres SEQ ID NO 13661565 as cited in SEQ ID NO 60551
  misc_feature (1)..(870): Ortholog of  Ceres SEQ ID NO 12615329 as cited in SEQ ID NO 62561
aatccatcaatcctcatcgccacccaacccgccaagtccccaagcaagttgagcatccatccatccatggcgggaggcaagtccaccggcaatgccgcgcgcagcaggaagcgcgtcgaggcaaccgtcctcaagcgctccagggacgggagcgccttcaccagatgcgaggcctgcaacaaggacgtccccgtcgtcctcatcgacatgcacagctgcagcctcgaggagaagatcaggatgacgctcgaggcgcaggtcgtcgagaagaccgtcgaggtcgccagtgcggaccgcaagaagtcctccgccaagggaggtggtaacaaggacgccaagcgcaagcgctcgcccaccgccttcttcctcttcatggacgacttcaggaaggagttcaaggccacccatcctgacaacaagagtgtcgccaccgttgcaaaggaaggaggggagaggtggaagtccatgacagacgaggagaagaagccttacattgaaaaggccgcggagctcaaggctgaggccgagaatggcgagggcagtggtgagaacaatgttgccactaagaaagccaagacagatgaccaggaggtggatcagccagcaaagaagctcagaaagtgcaaggctcttcacgaggacgaggatgacgatggtgaccaggaagacgaggatgagaagaacgagttggatgacgacatgtagatggcagaggccactctcccatctctgtaaatggatggcagatgtgagcgtctagttagaaatgtcacttgtttcaagctagagggaagaggaagatagtcagtagtgaatatcccccgttatcgttgctacatgaatgaactattctatgatgcagttctgtcc

SEQ ID NO: 10194 - protein, 234 aa, Zea mays subsp. mays
  peptide (1)..(234): Ceres Seq. ID no. 12400390
NPSILIATQPAKSPSKLSIHPSMAGGKSTGNAARSRKRVEATVLKRSRDGSAFTRCEACNKDVPVVLIDMHSCSLEEKIRMTLEAQVVEKTVEVASADRKKSSAKGGGNKDAKRKRSPTAFFLFMDDFRKEFKATHPDNKSVATVAKEGGERWKSMTDEEKKPYIEKAAELKAEAENGEGSGENNVATKKAKTDDQEVDQPAKKLRKCKALHEDEDDDGDQEDEDEKNELDDDM

SEQ ID NO: 10195 - protein, 212 aa, Zea mays subsp. mays
  peptide (1)..(212): Ceres Seq. ID no. 12400391
MAGGKSTGNAARSRKRVEATVLKRSRDGSAFTRCEACNKDVPVVLIDMHSCSLEEKIRMTLEAQVVEKTVEVASADRKKSSAKGGGNKDAKRKRSPTAFFLFMDDFRKEFKATHPDNKSVATVAKEGGERWKSMTDEEKKPYIEKAAELKAEAENGEGSGENNVATKKAKTDDQEVDQPAKKLRKCKALHEDEDDDGDQEDEDEKNELDDDM

SEQ ID NO: 10196 - protein, 165 aa, Zea mays subsp. mays
  peptide (1)..(165): Ceres Seq. ID no. 12400392
MHSCSLEEKIRMTLEAQVVEKTVEVASADRKKSSAKGGGNKDAKRKRSPTAFFLFMDDFRKEFKATHPDNKSVATVAKEGGERWKSMTDEEKKPYIEKAAELKAEAENGEGSGENNVATKKAKTDDQEVDQPAKKLRKCKALHEDEDDDGDQEDEDEKNELDDDM

SEQ ID NO: 10197 - DNA, 1307 bp, Zea mays subsp. mays
  misc_feature (1)..(1307): Ceres Seq. ID no. 12400773
  misc_feature (1)..(1307): Ortholog of  Ceres SEQ ID NO 14302021 as cited in SEQ ID NO 68979
  misc_feature (1)..(1307): Ortholog of  Ceres SEQ ID NO 14309296 as cited in SEQ ID NO 0
ctcgccgcccccgtctcctctcctctcctctcctccgcatccacggccgcaggagncagccagccactcgacgatctagtcgtctctctctccccgctctgccgcctcgctgccgcggcttcccgtcggctggaggatgaaggtcacggtcgtgtcccggagcggccgggaggtcgtcaagggcggcatcgacctcaaggactcggccaaggtcgcggacctgcaggaggccatccatgccaggactaagaagtattatccttctaggcagcggctcaccctcccccttcaacctggaaaaggcgggaagccagttgtcctcagtccaaaggccagcctgctagaatactgctagaagggttctgggtcactgacagtggtcttcaaagatttagggccacaggtctactacagcacactgttcttcttcgagtacctgggtcctctcatcactaccccatgttctactatctgcccgtctacaaatacttcgggtacgagggggagcgggccatgcaccctgtccagacctacgccatgtactactggtgcttccactacttcaagcggatcatggagacgttcttcgtgcaccgcttcagccacgcgacgtcgccgctctcgaacgtcttcaggaactgtgcctactactggaccttcggcgcttacattgcttactactgcaaccacccgctgtacaccccagtgagtgacctgcagatgaagattgggtttggttttggggtcgtctgccaggtcgcgaacttctactgccacatcctgctgcggaacctcaggagcccaagcggcagcggcgggtaccagatcccccgcggtttcttgttcaacatcgtgacctgcgccaattacaccaccgagatctaccagtgggtcggcttcaacatcgccacacagaccgtggcaggttacgtcttccttgtcgtggcggcgggcatcatgaccaactgggcgctcggcaagcacagccgtctgaagaagctgtttgacggcaaggatgggaggcccaagtaccctcgccggtgggtgattctccctccgttcctgtgaagaggcggtggtggtggctcactgttggtggtcggcccattgtgattcgatgtctacagacagttgtactgtactaatcgtgcctgtttagcggttgaacttggattccgttgtccgaagtttctaatccgaaagatggatttcattttcttcttcttcttcttagcattatgtcactgtctcacgtcgtcctgtctcaatacagtctaaggttcatgtgatgttatccccatttgtcc

SEQ ID NO: 10198 - protein, 202 aa, Zea mays subsp. mays; identical to SEQ ID NO: 2383
  peptide (1)..(202): Ceres Seq. ID no. 12400774

SEQ ID NO: 10199 - protein, 184 aa, Zea mays subsp. mays; identical to SEQ ID NO: 2384
  peptide (1)..(184): Ceres Seq. ID no. 12400775

SEQ ID NO: 10200 - protein, 176 aa, Zea mays subsp. mays
  peptide (1)..(176): Ceres Seq. ID no. 12400776
MYYWCFHYFKRIMETFFVHRFSHATSPLSNVFRNCAYYWTFGAYIAYYCNHPLYTPVSDLQMKIGFGFGVVCQVANFYCHILLRNLRSPSGSGGYQIPRGFLFNIVTCANYTTEIYQWVGFNIATQTVAGYVFLVVAAGIMTNWALGKHSRLKKLFDGKDGRPKYPRRWVILPPFL

SEQ ID NO: 10201 - DNA, 1046 bp, Zea mays subsp. mays
  misc_feature (1)..(1046): Ceres Seq. ID no. 12355410
  misc_feature (1)..(1046): Ortholog of  Ceres SEQ ID NO 14301475 as cited in SEQ ID NO 62936
  misc_feature (1)..(1046): Ortholog of  Ceres SEQ ID NO 12619999 as cited in SEQ ID NO 66123
  misc_feature (1)..(1046): Ortholog of  Ceres SEQ ID NO 13656436 as cited in SEQ ID NO 69154
attagctgtcgcgtcagttacgttttgcttgccctgttctcgttcggccttgacaacccggaaatcctccagccctctagtccccaacgacgcaggaagcaggatcgagccgaatcctccggaactcgccgccggggccaaccgacctcacactattgatcgaggatgtcgtacgcctacctcttcaagtacatcatcatcggcgacacaggcgtggggaagtcatgcctgctgctgcagttcacggataagcgcttccagcccgtgcacgatctcaccatcggcgttgaatttggcgcccgcatgatcaccatcgacaacaagcccatcaaactccagatttgggacacggctggccaagaatcattcagatctattactaggtcatactacagaggagctgctggagcccttttggtttatgatatcactaggagggagaccttcaatcatctcgcaagttggctagaagatgccaggcaacatgcaaatgctaacatgacagtgatgctgattggaaataaatgtgacctttctcataggcgtgctgtcagctatgaggaaggcgaacagtttgccaaggagcatggtctggtttttatggaggcatctgctaaaactgcacaaaacgtcgaggaggcattcattaagaccgctggtacaatatacaagaaaatccaagatggcatatttgatgtatcaaatgagtccaacgggatcaaagttggctatgctgttcccaactcatctggaggtggtgctggctcgtcctcacaggctggtggctgctgcagttgagcggtggcagcaagtcatacaattgcaagggttctctctgcagtatcttgatgtttgcctatagctggccccggatgatttgttctttcagccatcacgtttcaatccatgaacaaaccatcttcagtgttagttgtcattcaaacttgtgcgatctttctgtaaagccaatcattcacgattgctaacgtatgtgctttctgtaaccaaattgaaatcagttctatggtattctttgttcaaaatgt

SEQ ID NO: 10202 - protein, 210 aa, Zea mays subsp. mays
  peptide (1)..(210): Ceres Seq. ID no. 12355411
MSYAYLFKYIIIGDTGVGKSCLLLQFTDKRFQPVHDLTIGVEFGARMITIDNKPIKLQIWDTAGQESFRSITRSYYRGAAGALLVYDITRRETFNHLASWLEDARQHANANMTVMLIGNKCDLSHRRAVSYEEGEQFAKEHGLVFMEASAKTAQNVEEAFIKTAGTIYKKIQDGIFDVSNESNGIKVGYAVPNSSGGGAGSSSQAGGCCS

SEQ ID NO: 10203 - protein, 164 aa, Zea mays subsp. mays
  peptide (1)..(164): Ceres Seq. ID no. 12355412
MITIDNKPIKLQIWDTAGQESFRSITRSYYRGAAGALLVYDITRRETFNHLASWLEDARQHANANMTVMLIGNKCDLSHRRAVSYEEGEQFAKEHGLVFMEASAKTAQNVEEAFIKTAGTIYKKIQDGIFDVSNESNGIKVGYAVPNSSGGGAGSSSQAGGCCS

SEQ ID NO: 10204 - DNA, 2012 bp, Zea mays subsp. mays
  misc_feature (1)..(2012): Ceres Seq. ID no. 12386456
  misc_feature (1)..(2012): Ortholog of  Ceres SEQ ID NO 15171446 as cited in SEQ ID NO 51590
  misc_feature (1)..(2012): Ortholog of  Ceres SEQ ID NO 14310907 as cited in SEQ ID NO 54338
agcacacactcgcacgcacgagaaggccggagaggcggcgcacccggagaggcaaggcaagcgatccctctccctccctccctcgtatccaggacaacagcccgtgcgatccgatcccgatggcggcccggccggacgcgcgcagcggctactgcgccgcgacgcgcaccttccgtagcaagcgcgcggacgtcccgctccccgccgacgcggacctggacgtcgtcaggttcctcgcgtcccgccgccacgcgggcgtcgtcgcgctcgtcgacgctgccacgggccaccgggtcacgttccaggaactctggcgcgcggtggaaggggcggccaccgcgctcgccgcgccgccgctgtcgctccgcaagggccagatcgcgcttatcctctccccgaactccgtccacttccccgttgccgccctcgcagccatgtccctcggcgccgtcctcaccaccgccaacccgctcaacacgcccgccgagatcgccaagcaggtcgccgacgcgcgccccgtcgtcgccttcaccacccgcgacctcctccccaagctcccgcgcgccggcgccggcgccggcatccgcgtcgtcctcctcgagcccgaccgcctcccctccgaccctagccccgtcgtcgccaccatcggggagatctccgccacgccgcccgaccccacgcgccgccgggaccgcgtcacgcaggacgacccggccacgctgctctactcctcgggcaccacgggccccagcaagggcgtcgtcgccacgcaccggagcctcatctccatggtgcagatcatcatgtcgcgcttccgcctcgaggcctccaacaggaccgagaccttcctctgcacggtgcccatgttccacgtctacggcctcgtcgccttcgccacggggctgctcggctgcggcgccaccatcgtcgtgctctccaagtacgagctccccgagatgctgcgcgccatcaacgaatacggggtcacctacctcccactcgtgccgcccatcctcgtcgccatgctggcgtaccccaaccgcctgccgcttgggggcctgcgcaaggtgctctccggcggagcgccgctcagcaaggagctgatcgaggggtttaaggagaaatacccgcaggtggagatccttcaggggtacgggctgacagagagcacggctatcggcgcgtccacggactctgccgaggagagcagccggtacggcacggctgggctgctgtcgccaagcaccgaggctaagatcgtcgacccagagaccggcgaggcgctgccggtgaaccgcaccggcgagctctggatccgggggccatacgtcatgaaagggtatttcaagaacgcggaggcaacacaatcaacattgacgcctgatggatggctcaagactggggatctctgctacatagatgaggatggttatctcttcgttgtggatcgtctgaaggagttgatcaaatacaaagggtaccaggtgcctccggcagagttggaagctcttttgctaacacatccagaaatcgaagatgtcaccgttataccgtttcccgaccgtgaggtcggccagttcccaatggcctacgtagtgaggaagaaagggagcaatttgtcagagcgcgaggtgatggagttcgttgcgaaacaggtagcgccttacaagaaggttaggaaggtggcgtttgtggcggagattcccaagaacgcgtccggcaagattctgaggaaggatctcatcaagctcgccacatccaaatccaaactatgaaaattgtttttcgtgtttacagtgctggaatacgcttgtcgtccacgagcggcgagccattctctacgctgccccggtattttggttgtagaatgcttgtacaactgaagatcccgtcggctatgtgcttgcttgtgtacagtgctctgttctcgtacaatacaatattgggagggaatactaggcgtctgtacgtaggcttggatggaaataatatccggtaatttcagtgttggt

SEQ ID NO: 10205 - protein, 590 aa, Zea mays subsp. mays
  peptide (1)..(590): Ceres Seq. ID no. 12386457
HTLARTRRPERRRTRRGKASDPSPSLPRIQDNSPCDPIPMAARPDARSGYCAATRTFRSKRADVPLPADADLDVVRFLASRRHAGVVALVDAATGHRVTFQELWRAVEGAATALAAPPLSLRKGQIALILSPNSVHFPVAALAAMSLGAVLTTANPLNTPAEIAKQVADARPVVAFTTRDLLPKLPRAGAGAGIRVVLLEPDRLPSDPSPVVATIGEISATPPDPTRRRDRVTQDDPATLLYSSGTTGPSKGVVATHRSLISMVQIIMSRFRLEASNRTETFLCTVPMFHVYGLVAFATGLLGCGATIVVLSKYELPEMLRAINEYGVTYLPLVPPILVAMLAYPNRLPLGGLRKVLSGGAPLSKELIEGFKEKYPQVEILQGYGLTESTAIGASTDSAEESSRYGTAGLLSPSTEAKIVDPETGEALPVNRTGELWIRGPYVMKGYFKNAEATQSTLTPDGWLKTGDLCYIDEDGYLFVVDRLKELIKYKGYQVPPAELEALLLTHPEIEDVTVIPFPDREVGQFPMAYVVRKKGSNLSEREVMEFVAKQVAPYKKVRKVAFVAEIPKNASGKILRKDLIKLATSKSKL

SEQ ID NO: 10206 - protein, 551 aa, Zea mays subsp. mays
  peptide (1)..(551): Ceres Seq. ID no. 12386458
MAARPDARSGYCAATRTFRSKRADVPLPADADLDVVRFLASRRHAGVVALVDAATGHRVTFQELWRAVEGAATALAAPPLSLRKGQIALILSPNSVHFPVAALAAMSLGAVLTTANPLNTPAEIAKQVADARPVVAFTTRDLLPKLPRAGAGAGIRVVLLEPDRLPSDPSPVVATIGEISATPPDPTRRRDRVTQDDPATLLYSSGTTGPSKGVVATHRSLISMVQIIMSRFRLEASNRTETFLCTVPMFHVYGLVAFATGLLGCGATIVVLSKYELPEMLRAINEYGVTYLPLVPPILVAMLAYPNRLPLGGLRKVLSGGAPLSKELIEGFKEKYPQVEILQGYGLTESTAIGASTDSAEESSRYGTAGLLSPSTEAKIVDPETGEALPVNRTGELWIRGPYVMKGYFKNAEATQSTLTPDGWLKTGDLCYIDEDGYLFVVDRLKELIKYKGYQVPPAELEALLLTHPEIEDVTVIPFPDREVGQFPMAYVVRKKGSNLSEREVMEFVAKQVAPYKKVRKVAFVAEIPKNASGKILRKDLIKLATSKSKL

SEQ ID NO: 10207 - protein, 446 aa, Zea mays subsp. mays
  peptide (1)..(446): Ceres Seq. ID no. 12386459
MSLGAVLTTANPLNTPAEIAKQVADARPVVAFTTRDLLPKLPRAGAGAGIRVVLLEPDRLPSDPSPVVATIGEISATPPDPTRRRDRVTQDDPATLLYSSGTTGPSKGVVATHRSLISMVQIIMSRFRLEASNRTETFLCTVPMFHVYGLVAFATGLLGCGATIVVLSKYELPEMLRAINEYGVTYLPLVPPILVAMLAYPNRLPLGGLRKVLSGGAPLSKELIEGFKEKYPQVEILQGYGLTESTAIGASTDSAEESSRYGTAGLLSPSTEAKIVDPETGEALPVNRTGELWIRGPYVMKGYFKNAEATQSTLTPDGWLKTGDLCYIDEDGYLFVVDRLKELIKYKGYQVPPAELEALLLTHPEIEDVTVIPFPDREVGQFPMAYVVRKKGSNLSEREVMEFVAKQVAPYKKVRKVAFVAEIPKNASGKILRKDLIKLATSKSKL

SEQ ID NO: 10208 - DNA, 1095 bp, Zea mays subsp. mays
  misc_feature (1)..(1095): Ceres Seq. ID no. 12400739
  misc_feature (1)..(1095): Ortholog of  Ceres SEQ ID NO 13583408 as cited in SEQ ID NO 62616
  misc_feature (1)..(1095): Ortholog of  Ceres SEQ ID NO 15179752 as cited in SEQ ID NO 63074
ccaacacgagcggttagaaaccctagtcaaaaccctcgccctcccaaaaactactcacgtctcgccgccccgccgtatcaccctttctcggcggccggcctcttctcttcacggactcgcaggtcatcgagatgtcgtcggcggaggcgaaggccgcggcgaaggcggtcccggagtctgtgctgcgcaagcgcaagcgggaggagcagtgggcagcggacaagaaggagaaggccctcgcagacaggaaggaggcgcttgacagccgcaagatcatatttgctcgcgccaagcagtacgcccaggagtacgacgcccaggagaaggagcttgtgcagctcaagcgtgaggctcggttgaagggtgggttctatgtgagccccagaggccaagcttctgtttgtggtccgcatccgtggtatcaatgccatgcaccccaagacccgcaagatcttgcagctcctgcgtttgaggcagatcttcaatggtgtctttctcaaggttaacaaggcaactattaacatgctacggagggtggagccatatgttgcgtatggatacccgaacctgaagagtgttagggaattgatctacaaaagaggttatgggaagctgaacaagcagaggattccgcttagcaacaacaatgtcatcgaggagggccttgggaagcataatatcatctgcatcgaggaccttgttcatgagatcatgacggttggcccacacttcaaagaggccaacaacttcctctggccattcaagctgaaagcgccccttggtggcctcaagaagaagaggaaccactatgtggagggtggcgacgctggcaaccgtgagaactacatcaacgagctcatcaagaggatgaactaggctctcttgtatcctgtgagaatgcattcgatgtcggcatggatatgcaattttgttccatggctgtcatacgtcacgacttcaactaggaaatgggtcctgtttatgtttgcagttgcctctgtaggttttaatacatcaagacataaaccaacacgtgccccaagtgtcactcgctagggctaccaagattgttgcaaaaaagatagcactttttcc

SEQ ID NO: 10209 - protein, 148 aa, Zea mays subsp. mays
  peptide (1)..(148): Ceres Seq. ID no. 12400740
MHPKTRKILQLLRLRQIFNGVFLKVNKATINMLRRVEPYVAYGYPNLKSVRELIYKRGYGKLNKQRIPLSNNNVIEEGLGKHNIICIEDLVHEIMTVGPHFKEANNFLWPFKLKAPLGGLKKKRNHYVEGGDAGNRENYINELIKRMN

SEQ ID NO: 10210 - protein, 124 aa, Zea mays subsp. mays
  peptide (1)..(124): Ceres Seq. ID no. 12400741
MSSAEAKAAAKAVPESVLRKRKREEQWAADKKEKALADRKEALDSRKIIFARAKQYAQEYDAQEKELVQLKREARLKGGFYVSPRGQASVCGPHPWYQCHAPQDPQDLAAPAFEADLQWCLSQG

SEQ ID NO: 10211 - protein, 119 aa, Zea mays subsp. mays
  peptide (1)..(119): Ceres Seq. ID no. 12400742
PTRAVRNPSQNPRPPKNYSRLAAPPYHPFSAAGLFSSRTRRSSRCRRRRRRPRRRRSRSLCCASASGRSSGQRTRRRRPSQTGRRRLTAARSYLLAPSSTPRSTTPRRRSLCSSSVRLG

SEQ ID NO: 10212 - DNA, 465 bp, Zea mays subsp. mays
  misc_feature (1)..(465): Ceres Seq. ID no. 12345496
  misc_feature (1)..(465): Ortholog of  Ceres SEQ ID NO 14308880 as cited in SEQ ID NO 58793
  misc_feature (1)..(465): Ortholog of  Ceres SEQ ID NO 13654557 as cited in SEQ ID NO 68444
atgggcaggattatcaactctgacgaggtgcagtctgtggttaagccactcaacaaggaggtgaagcgcagggagaagaggaagaacccgctcacgaacatggctgctgtgctcaagctgaacccctacctcggcactgcccggaagatggccacccttgctgaggctgcccgagtcaaggcccggaaggagaagcttgattccaagaggaccaagcttacctcggaggagactgccaaggtcaaggctgccggcaaggcgtggtacaagaccatgatctcggacagtgactacaccgagtttgagaacttcaccaagtggctcggagtgacgcagtgaagcggcctttgagacctagttaagttttgattagttgtgtcgctgaacttgtattgagacgaaatagtattttatcaatctgtcttatcctgcatcttcacaacaagttacctatctgtggactct

SEQ ID NO: 10213 - protein, 112 aa, Zea mays subsp. mays
  peptide (1)..(112): Ceres Seq. ID no. 12345497
MGRIINSDEVQSVVKPLNKEVKRREKRKNPLTNMAAVLKLNPYLGTARKMATLAEAARVKARKEKLDSKRTKLTSEETAKVKAAGKAWYKTMISDSDYTEFENFTKWLGVTQ

SEQ ID NO: 10214 - protein, 79 aa, Zea mays subsp. mays
  peptide (1)..(79): Ceres Seq. ID no. 12345498
MAAVLKLNPYLGTARKMATLAEAARVKARKEKLDSKRTKLTSEETAKVKAAGKAWYKTMISDSDYTEFENFTKWLGVTQ

SEQ ID NO: 10215 - protein, 63 aa, Zea mays subsp. mays
  peptide (1)..(63): Ceres Seq. ID no. 12345499
MATLAEAARVKARKEKLDSKRTKLTSEETAKVKAAGKAWYKTMISDSDYTEFENFTKWLGVTQ

SEQ ID NO: 10216 - DNA, 763 bp, Zea mays subsp. mays
  misc_feature (1)..(763): Ceres Seq. ID no. 12358030
  misc_feature (1)..(763): Ortholog of  Ceres SEQ ID NO 15227150 as cited in SEQ ID NO 59837
ctagaacgccgccgccagtcctcactcctcaccatttcccaaaccctacccatacccccgccgccgccgccatgccgcccaagctcgacccgtcgcaggtggtggaggtcttcgtccgggtgacgggcggcgaggtcggcgcggcgtcgtccctggcgcccaagatcggcccgctcggtctctccccgaagaagatcggcgaggacattgccaaggagacggccaaggactggaagggcctgcgcgtcaccgtcaagctcactgtccagaaccgcaggccaaggtctccgtcgtcccctccgccgccgcgctcgtcatcaaggcgctcaaggagcccgagagggacaggaagaaggtcaagaacatcaagcacagcggcaacatcggcctcgacgacgtcgtcgaggatcgccaggaccatgaggaacaggtccatggccaaggagttggccggcaccgtcaaggagatcctcggcacctgcgtcagcgtcgggtgcaccgtcgacggcaaggaccccaaggacctgcagcaggagattgatgacggcgaggtcgagatcccgtccgcttgaagactagacatccgaggggacttccattggtgctgctgaagtgttgttgttctgcatgccgtcgatgtacctttttcaagcaacgtgttccatctatttttttgtctagctatgttagtgatatcttgtgagagacctcaatgttaccaccgtatctttgtctttgttggatggagagttttaagcggttc

SEQ ID NO: 10217 - protein, 189 aa, Zea mays subsp. mays
  peptide (1)..(189): Ceres Seq. ID no. 12358031
RTPPPVLTPHHFPNPTHTPAAAAMPPKLDPSQVVEVFVRVTGGEVGAASSLAPKIGPLGLSPKKIGEDIAKETAKDWKGLRVTVKLTVQNRRPRSPSSPPPPRSSSRRSRSPRGTGRRSRTSSTAATSASTTSSRIARTMRNRSMAKELAGTVKEILGTCVSVGCTVDGKDPKDLQQEIDDGEVEIPSA

SEQ ID NO: 10218 - protein, 166 aa, Zea mays subsp. mays
  peptide (1)..(166): Ceres Seq. ID no. 12358032
MPPKLDPSQVVEVFVRVTGGEVGAASSLAPKIGPLGLSPKKIGEDIAKETAKDWKGLRVTVKLTVQNRRPRSPSSPPPPRSSSRRSRSPRGTGRRSRTSSTAATSASTTSSRIARTMRNRSMAKELAGTVKEILGTCVSVGCTVDGKDPKDLQQEIDDGEVEIPSA

SEQ ID NO: 10219 - DNA, 1346 bp, Zea mays subsp. mays; identical to SEQ ID NO: 4989
  misc_feature (1)..(1346): Ceres Seq. ID no. 12379321
  misc_feature (1)..(1346): Ortholog of  Ceres SEQ ID NO 14314174 as cited in SEQ ID NO 54350
  misc_feature (1)..(1346): Ortholog of  Ceres SEQ ID NO 15224566 as cited in SEQ ID NO 55626
  misc_feature (1)..(1346): Ortholog of  Ceres SEQ ID NO 13502979 as cited in SEQ ID NO 69150

SEQ ID NO: 10220 - protein, 222 aa, Zea mays subsp. mays; identical to SEQ ID NO: 4990
  peptide (1)..(222): Ceres Seq. ID no. 12379322

SEQ ID NO: 10221 - protein, 220 aa, Zea mays subsp. mays; identical to SEQ ID NO: 4991
  peptide (1)..(220): Ceres Seq. ID no. 12379323

SEQ ID NO: 10222 - protein, 191 aa, Zea mays subsp. mays; identical to SEQ ID NO: 4992
  peptide (1)..(191): Ceres Seq. ID no. 12379324

SEQ ID NO: 10223 - DNA, 696 bp, Zea mays subsp. mays
  misc_feature (1)..(696): Ceres Seq. ID no. 12400658
  misc_feature (1)..(696): Ortholog of  Ceres SEQ ID NO 12626698 as cited in SEQ ID NO 66911
gcatccacgctcgattcggccgttttccgcatccacggagccaggcgaccgccgccgcttccctactcacccttggccggcgacgacgagcgccaccacggcaggatgacgacgctgaggaacctcaagatcaagacgtcgacgtgcaagaggatcgtgaaggagctgcgctcgtacgagaaggaggtggagaaggaggcggccaagaccgccgacatgaaggagaagggcgctgatccctacgacctcaaacagcaggagaatgttttggctgagtcaaggatgatggtcccagactgccacaaacgacttgaaactgcactggctgacttgaaagcaacactggctgaactgaaggagtcaaatgagcaaggtgccgagattggagaagctgagagtacaatcgcagaagttgaagcagttgtcaagccagcagaagattaaactaaaaaaactcttggtttgctgaactgttagcgcacatcctattttcgcatattgagcccttgtgagcttattacgagatgtttgaggcgtgaaatcctgtaccattatcatcacttctatcttgaaatttgagtttctgttcccaagttctaagcgttactgtttgttgtctgggagagcgcacatccctggcttctccgggaagttgttagtgtaaattgaaattaagaaaaatggacgaatttgaat

SEQ ID NO: 10224 - protein, 147 aa, Zea mays subsp. mays
  peptide (1)..(147): Ceres Seq. ID no. 12400659
ASTLDSAVFRIHGARRPPPLPYSPLAGDDERHHGRMTTLRNLKIKTSTCKRIVKELRSYEKEVEKEAAKTADMKEKGADPYDLKQQENVLAESRMMVPDCHKRLETALADLKATLAELKESNEQGAEIGEAESTIAEVEAVVKPAED

SEQ ID NO: 10225 - protein, 112 aa, Zea mays subsp. mays
  peptide (1)..(112): Ceres Seq. ID no. 12400660
MTTLRNLKIKTSTCKRIVKELRSYEKEVEKEAAKTADMKEKGADPYDLKQQENVLAESRMMVPDCHKRLETALADLKATLAELKESNEQGAEIGEAESTIAEVEAVVKPAED

SEQ ID NO: 10226 - protein, 77 aa, Zea mays subsp. mays
  peptide (1)..(77): Ceres Seq. ID no. 12400661
IHARFGRFPHPRSQATAAASLLTLGRRRRAPPRQDDDAEEPQDQDVDVQEDREGAALVREGGGEGGGQDRRHEGEGR

SEQ ID NO: 10227 - DNA, 717 bp, Zea mays subsp. mays
  misc_feature (1)..(717): Ceres Seq. ID no. 12400650
  misc_feature (1)..(717): Ortholog of  Ceres SEQ ID NO 15174240 as cited in SEQ ID NO 61866
aaccagcctccaccccatcaaccctacctaggcgccgccgccgccgcaggcggcccccgcatcgtcggcaagatgcagatctttgtgaagactctgacggggaagaccatcactttggaggtggagtcctcggacaccatcgacaatgtgaaggccaagatccaggacaaggagggcatccccccggaccagcagcggctcatcttcgccggcaagcagctcgaggacggtcgcaccctcgccgactacaacatccagaaggagtccaccctccacctggtgctccgcctccgcggcggcgccaagaagcgtaagaagaagacgtacaccaagcccaagaagatcaagcacaagcacaagaaggtgaagctctccgtgctgcagttctataaggtggacgacaccactagcaaggtgacccgcctccgcaaggagtgccccaactcagagtgcggcgcgggcgtcttcatggccaaccacttcgaccgccactactgcggcaagtgcggcctcacctatgtctacaaccagaaggcgtaattgcttgccccgatttgctttatccgcctaccctatcgagcatccagctgttggttactcgaactgtatctcatgtagatctgtctgaggttgaaacttaaatggagcagtagtatctgacatattggtacccctgttactgaattgacgtgatgctgagtttaattttgttttcgg

SEQ ID NO: 10228 - protein, 179 aa, Zea mays subsp. mays
  peptide (1)..(179): Ceres Seq. ID no. 12400651
NQPPPHQPYLGAAAAAGGPRIVGKMQIFVKTLTGKTITLEVESSDTIDNVKAKIQDKEGIPPDQQRLIFAGKQLEDGRTLADYNIQKESTLHLVLRLRGGAKKRKKKTYTKPKKIKHKHKKVKLSVLQFYKVDDTTSKVTRLRKECPNSECGAGVFMANHFDRHYCGKCGLTYVYNQKA

SEQ ID NO: 10229 - protein, 155 aa, Zea mays subsp. mays
  peptide (1)..(155): Ceres Seq. ID no. 12400652
MQIFVKTLTGKTITLEVESSDTIDNVKAKIQDKEGIPPDQQRLIFAGKQLEDGRTLADYNIQKESTLHLVLRLRGGAKKRKKKTYTKPKKIKHKHKKVKLSVLQFYKVDDTTSKVTRLRKECPNSECGAGVFMANHFDRHYCGKCGLTYVYNQKA

SEQ ID NO: 10230 - protein, 103 aa, Zea mays subsp. mays
  peptide (1)..(103): Ceres Seq. ID no. 12400653
PASTPSTLPRRRRRRRRPPHRRQDADLCEDSDGEDHHFGGGVLGHHRQCEGQDPGQGGHPPGPAAAHLRRQAARGRSHPRRLQHPEGVHPPPGAPPPRRRQEA

SEQ ID NO: 10231 - DNA, 764 bp, Zea mays subsp. mays
  misc_feature (1)..(764): Ceres Seq. ID no. 12341984
  misc_feature (1)..(764): Ortholog of  Ceres SEQ ID NO 14314331 as cited in SEQ ID NO 57390
taaagttcagcagtgatggcaggcggattctgttaaccactaaagctggacgtgtccatgtgctagattcattccatggcaatagcattgcgtcgtgcaatgtgaagccagtggtaaccaactcaacactggaggcgtcgttcagccctgatggaaaccatatcatatctggctccggtgacggtagtgtttatgcttggaatgttaggagtggaaaggtcgcgcgctggggaagcacagacgacgaaccgccgctggtaaggtgggctccaggatccttgatgttcgtgacaggatcatcagaactgtcatgctgggttccggacctgtctaagctgggatcctttaccattagcaagtaggtgaaaatgataagaggtggactgcccttgcaaaccctgctcgtccctgtatgctctgtcgtgtggctactcatcctttagccaggtggccgtggtaaacttgcaacctgttacaattgaatgactcgtgtagagcatcggcagtggcgatctggcttctgaagccagcggctagacaatgaagatggatccatgctttagttctgtaaaccggagattgtagctgagtattgctgcatctccttgtttctggaaggcatcttggctcgtaaagattctgcaactcagaccagatggctaatatagagagagcaaagaaacaatggatagctgggctgcttgttctgttttcagttggattccttgaactgatgtgtgattccgttgtgcatgcaccgattc

SEQ ID NO: 10232 - protein, 119 aa, Zea mays subsp. mays
  peptide (1)..(119): Ceres Seq. ID no. 12341985
KFSSDGRRILLTTKAGRVHVLDSFHGNSIASCNVKPVVTNSTLEASFSPDGNHIISGSGDGSVYAWNVRSGKVARWGSTDDEPPLVRWAPGSLMFVTGSSELSCWVPDLSKLGSFTISK

SEQ ID NO: 10233 - DNA, 776 bp, Zea mays subsp. mays
  misc_feature (1)..(776): Ceres Seq. ID no. 12400260
  misc_feature (1)..(776): Ortholog of  Ceres SEQ ID NO 13638567 as cited in SEQ ID NO 51303
  misc_feature (1)..(776): Ortholog of  Ceres SEQ ID NO 12610031 as cited in SEQ ID NO 55811
  misc_feature (1)..(776): Ortholog of  Ceres SEQ ID NO 12610896 as cited in SEQ ID NO 55861
  misc_feature (1)..(776): Ortholog of  Ceres SEQ ID NO 12635952 as cited in SEQ ID NO 0
agcaagcaaagattgcgccggtgagggtgttcgggacggcggacttcgtgaacgctgcgagggttatggcttgcctggaggaagttggcgtggagtacgaggtcgtcgaggtcgactacgcggccatggagcacaagggcgcccagcacctcgcaagaaacccgttcggccaaatcccagcgtttcaggacggggacacgatgctctttgaatcccgagcaatcgccaagtacgtgctccgcaaatactccaagtcagctcaagtcgacctgctccgtgagggcaacccggaggaagccgccatggtagacgtgtggacggaggtcgaggcgcacacctacctacccggccatcgcgcccatcttctacgagtacgtggtgtaccccgccgagcatggcaccacgcccaaccaggaggtggtggacgagagtgtggagaggctcaggaaggtcctcgacgtctacgaggcgcacctgtacaagaccaagcagctctatctcgccggggactacttcagcctcgccgatctcaaccacgtcccgtacaccttccacctcatgaggacaccgcacgcgtcgctcttcgaggcgtatcctcacgttaaggcctggtgggagagagttatagcacgcccgtcgctgcagaagctcgccccggatatggtgatcaaagcctgattgcacgtacctttgtatcatcagattcttccttggggtgtatatatgcaaggggtacctttcttgcaaaataaataaagaaataaataaatccgatc

SEQ ID NO: 10234 - protein, 200 aa, Zea mays subsp. mays
  peptide (1)..(200): Ceres Seq. ID no. 12400261
QAKIAPVRVFGTADFVNAARVMACLEEVGVEYEVVEVDYAAMEHKGAQHLARNPFGQIPAFQDGDTMLFESRAIAKYVLRKYSKSAQVDLLREGNPEEAAMVDVWTEVEAHTYLPGHRAHLLRVRGVPRRAWHHAQPGGGGRECGEAQEGPRRLRGAPVQDQAALSRRGLLQPRRSQPRPVHLPPHEDTARVALRGVSSR

SEQ ID NO: 10235 - protein, 179 aa, Zea mays subsp. mays
  peptide (1)..(179): Ceres Seq. ID no. 12400262
MACLEEVGVEYEVVEVDYAAMEHKGAQHLARNPFGQIPAFQDGDTMLFESRAIAKYVLRKYSKSAQVDLLREGNPEEAAMVDVWTEVEAHTYLPGHRAHLLRVRGVPRRAWHHAQPGGGGRECGEAQEGPRRLRGAPVQDQAALSRRGLLQPRRSQPRPVHLPPHEDTARVALRGVSSR

SEQ ID NO: 10236 - protein, 159 aa, Zea mays subsp. mays
  peptide (1)..(159): Ceres Seq. ID no. 12400263
MEHKGAQHLARNPFGQIPAFQDGDTMLFESRAIAKYVLRKYSKSAQVDLLREGNPEEAAMVDVWTEVEAHTYLPGHRAHLLRVRGVPRRAWHHAQPGGGGRECGEAQEGPRRLRGAPVQDQAALSRRGLLQPRRSQPRPVHLPPHEDTARVALRGVSSR

SEQ ID NO: 10237 - DNA, 979 bp, Zea mays subsp. mays
  misc_feature (1)..(979): Ceres Seq. ID no. 12400717
  misc_feature (1)..(979): Ortholog of  Ceres SEQ ID NO 13660094 as cited in SEQ ID NO 60820
  misc_feature (1)..(979): Ortholog of  Ceres SEQ ID NO 13656436 as cited in SEQ ID NO 69154
cgattccgcccgcgtccgcggacccagatctggcgcccgcgcccatggcgacgcgcaggcgaatgctcctcaaggtcatcatcctcggcgacagcggggtcggcaagacctcgctgatgaaccagtacgtcaacaacaggttcagcaaccagtacaaggccaccatcggcgcggatttcctcaccaaggaggtccagatcgacgaccgcctcttcacactgcagatatgggatacggcaggacaggagcggtttcaaagtcttggtgtggcattttataggggagctgactgctgtgttcttgtatatgatgtcaacgtatccaagtcatttgaaaagctcaacaactggcgtgaggaattcctaattcaagccagcccatcagacccagagaatttcccatttgttgtgcttggtaacaagatcgatgttgatggtggtaacagccggactgtttctgagaagaaggctaaagcatggtgtgcttcaaagggaaacatcccctactttgagacgtcggctaaagagggcttcaatgtagaggctgcatttgagtgtatagcgaggaatgctgtaaaaaatgagccagaagaagatatgtatcttcctgatacgattgatgttgggggcgctggaaggcaacaacgttcgtcaggttgtgaatgctagaagatatggagcactgcgatttgctcggttggttggtctgattctctagggcttgtttgggtggcctgtgtcatttcatatatgtatttagtttgcaaaactgctatttgtggacactggatagtttggaagtctgcatgcgggtgcttattgtcgactcccgtgtagatgcagagaactcatttgtaactaccgtttcggtgttgtatcgtatctgcgctagatgctagtgttgtagcgcttttgattgttgatggattgcatatatgtactatatttgtacatgaacagaacgtagtgcccattttcat

SEQ ID NO: 10238 - protein, 221 aa, Zea mays subsp. mays
  peptide (1)..(221): Ceres Seq. ID no. 12400718
IPPASADPDLAPAPMATRRRMLLKVIILGDSGVGKTSLMNQYVNNRFSNQYKATIGADFLTKEVQIDDRLFTLQIWDTAGQERFQSLGVAFYRGADCCVLVYDVNVSKSFEKLNNWREEFLIQASPSDPENFPFVVLGNKIDVDGGNSRTVSEKKAKAWCASKGNIPYFETSAKEGFNVEAAFECIARNAVKNEPEEDMYLPDTIDVGGAGRQQRSSGCEC

SEQ ID NO: 10239 - protein, 207 aa, Zea mays subsp. mays; identical to SEQ ID NO: 5834
  peptide (1)..(207): Ceres Seq. ID no. 12400719

SEQ ID NO: 10240 - protein, 201 aa, Zea mays subsp. mays; identical to SEQ ID NO: 5835
  peptide (1)..(201): Ceres Seq. ID no. 12400720

SEQ ID NO: 10241 - DNA, 1280 bp, Zea mays subsp. mays; identical to SEQ ID NO: 1575
  misc_feature (1)..(1280): Ceres Seq. ID no. 12340706
  misc_feature (1)..(1280): Ortholog of  Ceres SEQ ID NO 13596358 as cited in SEQ ID NO 68333

SEQ ID NO: 10242 - protein, 350 aa, Zea mays subsp. mays; identical to SEQ ID NO: 1576
  peptide (1)..(350): Ceres Seq. ID no. 12340707

SEQ ID NO: 10243 - protein, 298 aa, Zea mays subsp. mays; identical to SEQ ID NO: 1577
  peptide (1)..(298): Ceres Seq. ID no. 12340708

SEQ ID NO: 10244 - DNA, 685 bp, Zea mays subsp. mays
  misc_feature (1)..(685): Ceres Seq. ID no. 13628874
  misc_feature (1)..(685): Ortholog of  Ceres SEQ ID NO 12783998 as cited in SEQ ID NO 61535
  misc_feature (1)..(685): Ortholog of  Ceres SEQ ID NO 15174264 as cited in SEQ ID NO 61877
  misc_feature (1)..(685): Ortholog of  Ceres SEQ ID NO 12616383 as cited in SEQ ID NO 63582
aaacaacagcgaacacatctgcttcgcatttcttcccatcccccttcgcaacccaaaccccaactcgctccgcatcgatggcgcccaaggccgagaagaagcccgcggcgaagaagccggcggaggaggagcccgcggctgagaaggcgcccgccgggaagaagccgaaggcggagaagcgggtccccgctggcaagtccgctgccaaggagggcggcgagggcaagaggggcaggaagaagggcaagaagagcgtggagacctacaagatctacatcttcaaggtgctgaagcaggtgcacccggacattggcatctcctccaaggccatgtcgatcatgaactccttcattaacgatatcttcgagaagctagctgctgaggccgccaagctcgcgcgctataacaagaagccaaccatcacctcccgtgagatacagacttccgtgcgcctcgtccttcccggggagctcgccaagcacgccgtctccgagggcaccaaggccgtcaccaagttcacctcggcctaggctgcgctgccgccgcttgcaggattgtctcctgtgttcacgtgtattgctgtagttaggtgctgctggtttctgtctgttacccatctgtctgtagcaactttgttatctgataggaccgtaatggtgcttatttaacccagctatatgtttct

SEQ ID NO: 10245 - protein, 175 aa, Zea mays subsp. mays
  peptide (1)..(175): Ceres Seq. ID no. 13628875
TTANTSASHFFPSPFATQTPTRSASMAPKAEKKPAAKKPAEEEPAAEKAPAGKKPKAEKRVPAGKSAAKEGGEGKRGRKKGKKSVETYKIYIFKVLKQVHPDIGISSKAMSIMNSFINDIFEKLAAEAAKLARYNKKPTITSREIQTSVRLVLPGELAKHAVSEGTKAVTKFTSA

SEQ ID NO: 10246 - protein, 150 aa, Zea mays subsp. mays
  peptide (1)..(150): Ceres Seq. ID no. 13628876
MAPKAEKKPAAKKPAEEEPAAEKAPAGKKPKAEKRVPAGKSAAKEGGEGKRGRKKGKKSVETYKIYIFKVLKQVHPDIGISSKAMSIMNSFINDIFEKLAAEAAKLARYNKKPTITSREIQTSVRLVLPGELAKHAVSEGTKAVTKFTSA

SEQ ID NO: 10247 - protein, 96 aa, Zea mays subsp. mays
  peptide (1)..(96): Ceres Seq. ID no. 13628877
KQQRTHLLRISSHPPSQPKPQLAPHRWRPRPRRSPRRRSRRRRSPRLRRRPPGRSRRRRSGSPLASPLPRRAARARGAGRRARRAWRPTRSTSSRC

SEQ ID NO: 10248 - DNA, 1710 bp, Zea mays subsp. mays
  misc_feature (1)..(1710): Ceres Seq. ID no. 13491075
  misc_feature (1)..(1710): Ortholog of  Ceres SEQ ID NO 14314363 as cited in SEQ ID NO 52272
gcagaaactctttgcttccgcctggctcgcgatgcttgtttgggtgcgcgggctgcggcgaggtgaggcgacggcggcgccgggcggttgcatggtggccgatggagagtagacggggagggtcgtcggcggcggcggcggaagatgcgggcggggcgatgccgagctttgggccaacgcagcacgccattcgcgcagatgtgaacagcatgcaaccttctcgagttactgactttggggcactggcacagtctgctggattccgaatagaagatcttgctaaccttaatgcaaatgctttgttcaatctgaagccaaattctcatacgattgacaacagtcctctccagtttggaaattacggaaagtctatttcttctcatataaatactacagaagcaacaacagctgcaacaagaattgaccctcagctgtcagcacagcaaacaggagcacaaccaattctggtggcgttaccaactggtaacatggagaattggggagagtcagctatggctgatagccctatgactgacacatctacagatccagacactgatgagaggaaccagatgtttgaacaaggacttgttgctgtccccacagcatctgattctagtgacaaatcaagggacaaactagatcagaagacacttcggcgtcttgcccaaaatcgtgaagctgccaggaaaagccgtttacgaaaaaaggcatacatccaaaaccttgagagtagcagactgaaacttactcagttagagcaagagcttcagcgggctcgtcaacagggtatttttatttcgacatcaggagatcaacctcaatcaacaagtggaaatggagctttggcatttgacatggagtatgcacgctggttggaggagcacaataaacatgtaaatgagttgagggctgcagtcaatgcacatgctggtgataatgatcttcgttgtattgttgatagcattatggtacattacgacgaaattttcaagctcaagggtgtggcagctaaagcagatgtttttcatgtgctgtctgggatgtggaagacccctgctgagagatgtttcatgtggttaggtggcttccggtcatctgagcttcttaagttactggcaggtcacctagagcctcttactgatcagcagcttgttggtatatccaacctgcagcagtcctcccaacaagctgaagatgctctttctcaagggatggaagcattgcaacagtcgcttgcagaaactctagcatctggatccttgggccctgctggaccttctggcaatgttgcaaattacatgggacaaatggcgatggctatgggaaaacttggcactcttgagaactttctacgacaggctgataatctacggctgcaaacacttcaacaaatgcaacgcatcttaactacccgacaatcagcacgagccctactcgcaataagtgactacttctctcggctgcgtgctttgagttctctttggcttgcccgtccaagggaataaattcaattaattcataactaggataatttttttgtactgtttctagtatggccattagtttcttcagaacgctcatgtgtcagtgagatatttggatcatattgtaggccatcatggtttactggacaactttgtaacaattttggagagaaaaaactgagttgtaaatacatctggaataatctaagatcttatgaagggg

SEQ ID NO: 10249 - protein, 501 aa, Zea mays subsp. mays
  peptide (1)..(501): Ceres Seq. ID no. 13491076
RNSLLPPGSRCLFGCAGCGEVRRRRRRAVAWWPMESRRGGSSAAAAEDAGGAMPSFGPTQHAIRADVNSMQPSRVTDFGALAQSAGFRIEDLANLNANALFNLKPNSHTIDNSPLQFGNYGKSISSHINTTEATTAATRIDPQLSAQQTGAQPILVALPTGNMENWGESAMADSPMTDTSTDPDTDERNQMFEQGLVAVPTASDSSDKSRDKLDQKTLRRLAQNREAARKSRLRKKAYIQNLESSRLKLTQLEQELQRARQQGIFISTSGDQPQSTSGNGALAFDMEYARWLEEHNKHVNELRAAVNAHAGDNDLRCIVDSIMVHYDEIFKLKGVAAKADVFHVLSGMWKTPAERCFMWLGGFRSSELLKLLAGHLEPLTDQQLVGISNLQQSSQQAEDALSQGMEALQQSLAETLASGSLGPAGPSGNVANYMGQMAMAMGKLGTLENFLRQADNLRLQTLQQMQRILTTRQSARALLAISDYFSRLRALSSLWLARPRE

SEQ ID NO: 10250 - protein, 468 aa, Zea mays subsp. mays
  peptide (1)..(468): Ceres Seq. ID no. 13491077
MESRRGGSSAAAAEDAGGAMPSFGPTQHAIRADVNSMQPSRVTDFGALAQSAGFRIEDLANLNANALFNLKPNSHTIDNSPLQFGNYGKSISSHINTTEATTAATRIDPQLSAQQTGAQPILVALPTGNMENWGESAMADSPMTDTSTDPDTDERNQMFEQGLVAVPTASDSSDKSRDKLDQKTLRRLAQNREAARKSRLRKKAYIQNLESSRLKLTQLEQELQRARQQGIFISTSGDQPQSTSGNGALAFDMEYARWLEEHNKHVNELRAAVNAHAGDNDLRCIVDSIMVHYDEIFKLKGVAAKADVFHVLSGMWKTPAERCFMWLGGFRSSELLKLLAGHLEPLTDQQLVGISNLQQSSQQAEDALSQGMEALQQSLAETLASGSLGPAGPSGNVANYMGQMAMAMGKLGTLENFLRQADNLRLQTLQQMQRILTTRQSARALLAISDYFSRLRALSSLWLARPRE

SEQ ID NO: 10251 - protein, 449 aa, Zea mays subsp. mays
  peptide (1)..(449): Ceres Seq. ID no. 13491078
MPSFGPTQHAIRADVNSMQPSRVTDFGALAQSAGFRIEDLANLNANALFNLKPNSHTIDNSPLQFGNYGKSISSHINTTEATTAATRIDPQLSAQQTGAQPILVALPTGNMENWGESAMADSPMTDTSTDPDTDERNQMFEQGLVAVPTASDSSDKSRDKLDQKTLRRLAQNREAARKSRLRKKAYIQNLESSRLKLTQLEQELQRARQQGIFISTSGDQPQSTSGNGALAFDMEYARWLEEHNKHVNELRAAVNAHAGDNDLRCIVDSIMVHYDEIFKLKGVAAKADVFHVLSGMWKTPAERCFMWLGGFRSSELLKLLAGHLEPLTDQQLVGISNLQQSSQQAEDALSQGMEALQQSLAETLASGSLGPAGPSGNVANYMGQMAMAMGKLGTLENFLRQADNLRLQTLQQMQRILTTRQSARALLAISDYFSRLRALSSLWLARPRE

SEQ ID NO: 10252 - DNA, 1676 bp, Zea mays subsp. mays
  misc_feature (1)..(1676): Ceres Seq. ID no. 13577775
  misc_feature (1)..(1676): Ortholog of  Ceres SEQ ID NO 12460981 as cited in SEQ ID NO 65146
gctcccatttcaaaacctcttcctcctctcctcgccgcagctcccaccattcccgcagacgccttgtccccttcccagcttcccctcccccaccccgccgcacgtccgcaagccccacgccaccgtcatgtctccgaccaccaccccgccgcccgcgcccgtggcagccccgacctccaagggcgccaagcgcagcctcatgtcctcgctcatggacgccactgcgctgctccgctcctcctctttcaaggaggactcgtacgtcgcggccgcgctcccggcgtccgagctccgcgcgctcgccgacctcaaggcgctgctcgccacccacccggaccccatctccatctggggcgtcccgctgaaccctcgctcccctcccgccgcggcggacgacgccgccccggtcgacgagcgcgccgacgtggtgctcctcaagttcctccgcgcgcgggacttccgcgtccgcgacgcccacgccatggtgctccgctgcgccgcctggcgcgccgagttcggcgccgacgccgtgctggacgaggagctgggcttcaaggacctggagggcatcgtcgcctacatgcacggctgggaccgcgacggccaccccgtctgctacaacgcctacggcgtcttcaaagacagggacatgtacgagcgcgtcttcggcgacggcgaccgcctcgcgcgcttcctccgctggcgcgtccaggtcatggagcgtggcgtgcgcgcgctcaccctgaggcccgggggcgtcaacgccatcatacaggtcaccgacctcaaggacatgccaaagcgggagctcagagccgccagcaaccagatcctctccctcttccaggacaactacccggagatggtagcgcggaaggtgttcattaacgtgccgtggtacttctccgtgctcttctccatgatctcgcccttcctcacggagcgcaccaagagcaagttcgtcatcgcgcgcgagggcaacgtcgccgagacactctacaagttcatccggccggagctggtgcctgtgcagtacggcgggctgagccgcaccggtgacctcgagaacggaccaccgaagccggcgtccgagttcaccatcaagggtggcgagaaggtcttcctggagatcgacggtatcgaggccggtgcaacgataacgtgggatctggtcgtcgggggctgggacctcgagtacggagccgagtacgtgccggcggccgaggacagctacacgctctgcgtggagaagacgaggatggtctcggccaccgccgaggagcccgtgcacaatgccttcacggctagggaagccggcaagatggtgctgtccatagacaattctgggttcccggaagcgcaaggttgccgcctacaggtacttcgtgcgcaagtcgtcggcgtaggcatgctgatgtcttgtggtggtcgtcgcggccggcaccttgccggcaggtagccgcgagggggaggttaacgtggaacaactggtgaagtgtttacttgggcttgtgggatttggtggggagaggtcaagttaggctgtttaattattagtgctataacgacatgcatgtattatgccatatgtagaatataatgtactccgtaagagctgttgcacttttgtcatcaccactgttataaagctaatgatgagttaagttttttgggct

SEQ ID NO: 10253 - protein, 485 aa, Zea mays subsp. mays
  peptide (1)..(485): Ceres Seq. ID no. 13577776
LPFQNLFLLSSPQLPPFPQTPCPLPSFPSPTPPHVRKPHATVMSPTTTPPPAPVAAPTSKGAKRSLMSSLMDATALLRSSSFKEDSYVAAALPASELRALADLKALLATHPDPISIWGVPLNPRSPPAAADDAAPVDERADVVLLKFLRARDFRVRDAHAMVLRCAAWRAEFGADAVLDEELGFKDLEGIVAYMHGWDRDGHPVCYNAYGVFKDRDMYERVFGDGDRLARFLRWRVQVMERGVRALTLRPGGVNAIIQVTDLKDMPKRELRAASNQILSLFQDNYPEMVARKVFINVPWYFSVLFSMISPFLTERTKSKFVIAREGNVAETLYKFIRPELVPVQYGGLSRTGDLENGPPKPASEFTIKGGEKVFLEIDGIEAGATITWDLVVGGWDLEYGAEYVPAAEDSYTLCVEKTRMVSATAEEPVHNAFTAREAGKMVLSIDNSGFPEAQGCRLQVLRAQVVGVGMLMSCGGRRGRHLAGR

SEQ ID NO: 10254 - protein, 443 aa, Zea mays subsp. mays
  peptide (1)..(443): Ceres Seq. ID no. 13577777
MSPTTTPPPAPVAAPTSKGAKRSLMSSLMDATALLRSSSFKEDSYVAAALPASELRALADLKALLATHPDPISIWGVPLNPRSPPAAADDAAPVDERADVVLLKFLRARDFRVRDAHAMVLRCAAWRAEFGADAVLDEELGFKDLEGIVAYMHGWDRDGHPVCYNAYGVFKDRDMYERVFGDGDRLARFLRWRVQVMERGVRALTLRPGGVNAIIQVTDLKDMPKRELRAASNQILSLFQDNYPEMVARKVFINVPWYFSVLFSMISPFLTERTKSKFVIAREGNVAETLYKFIRPELVPVQYGGLSRTGDLENGPPKPASEFTIKGGEKVFLEIDGIEAGATITWDLVVGGWDLEYGAEYVPAAEDSYTLCVEKTRMVSATAEEPVHNAFTAREAGKMVLSIDNSGFPEAQGCRLQVLRAQVVGVGMLMSCGGRRGRHLAGR

SEQ ID NO: 10255 - protein, 419 aa, Zea mays subsp. mays
  peptide (1)..(419): Ceres Seq. ID no. 13577778
MSSLMDATALLRSSSFKEDSYVAAALPASELRALADLKALLATHPDPISIWGVPLNPRSPPAAADDAAPVDERADVVLLKFLRARDFRVRDAHAMVLRCAAWRAEFGADAVLDEELGFKDLEGIVAYMHGWDRDGHPVCYNAYGVFKDRDMYERVFGDGDRLARFLRWRVQVMERGVRALTLRPGGVNAIIQVTDLKDMPKRELRAASNQILSLFQDNYPEMVARKVFINVPWYFSVLFSMISPFLTERTKSKFVIAREGNVAETLYKFIRPELVPVQYGGLSRTGDLENGPPKPASEFTIKGGEKVFLEIDGIEAGATITWDLVVGGWDLEYGAEYVPAAEDSYTLCVEKTRMVSATAEEPVHNAFTAREAGKMVLSIDNSGFPEAQGCRLQVLRAQVVGVGMLMSCGGRRGRHLAGR

SEQ ID NO: 10256 - DNA, 1061 bp, Zea mays subsp. mays
  misc_feature (1)..(1061): Ceres Seq. ID no. 12400713
  misc_feature (1)..(1061): Ortholog of  Ceres SEQ ID NO 14301568 as cited in SEQ ID NO 66744
attccaaacaggacaccgaatgcacgatcgatcccacaagccgcagccgccggaggctggcgagggcgccggcggcgggaacgtggatcgagtgctcttcaagaacctcgtcgagatggtgccgctcgtcgagtcgctcatggaccggagggtcaactcggcctactcgcgacgcacttcggctagtctacacgccggcgccgcccaagaagggcgagcgaattggaaagtgtcaaattgccacagaggcgtatcggccaaaaagcggagagaccctggcgatgtatccaagaagagcacccctgattctaacggcgacaacggcttggttgtgccattgtctctatcgggtgctgaaaataagcccaaggatgatgttgctgggctgcgcgagcagggtcgattacctgcaaaagaaactgctcgagaaggaggaggcgctgaggtccgcggagagcctcgtgactgagatgaacgcggcatatgcaaccatcgatgaactccgacgcctggtgtctgacaaagaagctttgatcagatctaccaattctcagttgcatgatgcaaagattatgcttgcagacaagcaagcatctgtagagaaactggaatgggaggtaaagatgtcaaataaaaaggtcgaagatcttcaaggagatgtgtcaaatatgggattcgagataagctcgttgatggcatttttcgataaaatttcagagaatctttcaggtgactcttatgatgacacagtaccatcatcatatgaattagaggcaattcaatcaacgagtgaaattgacaagatcgaggtcgacaaaatagagcaggagaggattacctatggtgaagctctcgcggcagcgagagagaaccctgacgaggagcacttgaatatagctgccgaggcaaggtcaaggctgcaggtccttgtactatagtggtggcccccttctaattctagtgtatgtatgataatgttgaactgctgatgtaattttaccttgttggcttgagttgaggcgcttgtgaaatcgttccaggggtaatggaacgagcactgc

SEQ ID NO: 10257 - protein, 311 aa, Zea mays subsp. mays
  peptide (1)..(311): Ceres Seq. ID no. 12400714
SKQDTECTIDPTSRSRRRLARAPAAGTWIECSSRTSSRWCRSSSRSWTGGSTRPTRDALRLVYTPAPPKKGERIGKCQIATEAYRPKSGETLAMYPRRAPLILTATTAWLCHCLYRVLKISPRMMLLGCASRVDYLQKKLLEKEEALRSAESLVTEMNAAYATIDELRRLVSDKEALIRSTNSQLHDAKIMLADKQASVEKLEWEVKMSNKKVEDLQGDVSNMGFEISSLMAFFDKISENLSGDSYDDTVPSSYELEAIQSTSEIDKIEVDKIEQERITYGEALAAARENPDEEHLNIAAEARSRLQVLVL

SEQ ID NO: 10258 - protein, 218 aa, Zea mays subsp. mays
  peptide (1)..(218): Ceres Seq. ID no. 12400715
MYPRRAPLILTATTAWLCHCLYRVLKISPRMMLLGCASRVDYLQKKLLEKEEALRSAESLVTEMNAAYATIDELRRLVSDKEALIRSTNSQLHDAKIMLADKQASVEKLEWEVKMSNKKVEDLQGDVSNMGFEISSLMAFFDKISENLSGDSYDDTVPSSYELEAIQSTSEIDKIEVDKIEQERITYGEALAAARENPDEEHLNIAAEARSRLQVLVL

SEQ ID NO: 10259 - protein, 188 aa, Zea mays subsp. mays
  peptide (1)..(188): Ceres Seq. ID no. 12400716
MMLLGCASRVDYLQKKLLEKEEALRSAESLVTEMNAAYATIDELRRLVSDKEALIRSTNSQLHDAKIMLADKQASVEKLEWEVKMSNKKVEDLQGDVSNMGFEISSLMAFFDKISENLSGDSYDDTVPSSYELEAIQSTSEIDKIEVDKIEQERITYGEALAAARENPDEEHLNIAAEARSRLQVLVL

SEQ ID NO: 10260 - DNA, 841 bp, Zea mays subsp. mays
  misc_feature (1)..(841): Ceres Seq. ID no. 13492216
  misc_feature (1)..(841): Ortholog of  Ceres SEQ ID NO 15179455 as cited in SEQ ID NO 0
acatgcgctgacgcgcatcccccccggcgtggcgtgcgctttgatctagctcttcttctcgaatccagcccgaggcctttttcttctgcggtttcatccgtacccatcctgcacacgaagcctagaatagccctcccctgctccgccacctcctcggatcccgaccaccccacccccaccccagacaacaggttgatggaggctaagatgggacgcttcttcgagtccgtgagcaatttcttcaccggaggcgaccacatcccctggtgcgaccgcgacctcatcgccggctgtgaaggagagcttgtcaatgctgcaaatgaggaacagaggaatgaaagccttatgaggttgtcatgggcccttgtgcactccaggcagacagacgatgtaaaccgtggaatcagcatgcttcaagcttctttggataattctgccagtcctctgcagactagggaaaagctgtacttgttggctgttggattctacaggattggcgactactcaaaaagcaggcaacttgcagatcgttgtttggagattcaagcggattggcggcaggccatatcgctgaagaaggcaatagaagataaaattgccaaagatggtctgattggaataggaattgcgacaactgcggtcggacttctggttggtggaattgcagctgctgttgccaggaagaagtgaggtcaatatattggatcggcagctcattgaactaggggagctcccgtctctgtaattccaacttttctgttgttaccttggtgatattacagttgaattgccactctttatatgtacgaagtaatcgtatgataatgataacaccattgtg

SEQ ID NO: 10261 - protein, 229 aa, Zea mays subsp. mays
  peptide (1)..(229): Ceres Seq. ID no. 13492217
TCADAHPPRRGVRFDLALLLESSPRPFSSAVSSVPILHTKPRIALPCSATSSDPDHPTPTPDNRLMEAKMGRFFESVSNFFTGGDHIPWCDRDLIAGCEGELVNAANEEQRNESLMRLSWALVHSRQTDDVNRGISMLQASLDNSASPLQTREKLYLLAVGFYRIGDYSKSRQLADRCLEIQADWRQAISLKKAIEDKIAKDGLIGIGIATTAVGLLVGGIAAAVARKK

SEQ ID NO: 10262 - protein, 164 aa, Zea mays subsp. mays
  peptide (1)..(164): Ceres Seq. ID no. 13492218
MEAKMGRFFESVSNFFTGGDHIPWCDRDLIAGCEGELVNAANEEQRNESLMRLSWALVHSRQTDDVNRGISMLQASLDNSASPLQTREKLYLLAVGFYRIGDYSKSRQLADRCLEIQADWRQAISLKKAIEDKIAKDGLIGIGIATTAVGLLVGGIAAAVARKK

SEQ ID NO: 10263 - protein, 160 aa, Zea mays subsp. mays
  peptide (1)..(160): Ceres Seq. ID no. 13492219
MGRFFESVSNFFTGGDHIPWCDRDLIAGCEGELVNAANEEQRNESLMRLSWALVHSRQTDDVNRGISMLQASLDNSASPLQTREKLYLLAVGFYRIGDYSKSRQLADRCLEIQADWRQAISLKKAIEDKIAKDGLIGIGIATTAVGLLVGGIAAAVARKK

SEQ ID NO: 10264 - DNA, 707 bp, Zea mays subsp. mays
  misc_feature (1)..(707): Ceres Seq. ID no. 12441460
  misc_feature (1)..(707): Ortholog of  Ceres SEQ ID NO 12610267 as cited in SEQ ID NO 51993
  misc_feature (1)..(707): Ortholog of  Ceres SEQ ID NO 13495070 as cited in SEQ ID NO 53216
  misc_feature (1)..(707): Ortholog of  Ceres SEQ ID NO 12598241 as cited in SEQ ID NO 61025
  misc_feature (1)..(707): Ortholog of  Ceres SEQ ID NO 13661333 as cited in SEQ ID NO 61620
  misc_feature (1)..(707): Ortholog of  Ceres SEQ ID NO 15173749 as cited in SEQ ID NO 61775
  misc_feature (1)..(707): Ortholog of  Ceres SEQ ID NO 13596812 as cited in SEQ ID NO 62283
  misc_feature (1)..(707): Ortholog of  Ceres SEQ ID NO 13623021 as cited in SEQ ID NO 0
taatcgaaaaatcaccaccaccccgcggctgcagctcagcagctccagacctcaccagaggcacctaccacaccgcccgccgccgatcccgtcacccgtctcctccccgctgcggagcgtctccagccctgcccggtgcccgcccagatggcaaacgcggcgtcagggatggccgtggacgacgactgcaagcgccggttcctggagctcaaggccaagaggacgcaccgcttcatcatctacaggatcgacgagaagaagaagatggtggtggtggagcaggtgggcaagcccgtgctcggctacgacgacttcgccgccagcctccccgccaacgagtgcaggtacgccatcttcgactacgacttcgtcaccgaggagaactgccagaagagcaagatcttcttcatcgcctggtctcctgacacggcgcgcgtgaggagcaagatgatctacgccagctccaaggagaggttcaagcgggagctggacggcattcaggtggatctccaggccaccgactccgccgaggttggccttgacgtcatccagggccgtgcaagctgaggatgcccagcgatgaactgcccatgccagaggatgtatgagcatcatcagttcagatgagaacttgactgggcgggctatgtaaaaactgcatccaccgcagtgatgaaatcaatctaatcaatctaccacccccttct

SEQ ID NO: 10265 - protein, 145 aa, Zea mays subsp. mays
  peptide (1)..(145): Ceres Seq. ID no. 12441461
NRKITTTPRLQLSSSRPHQRHLPHRPPPIPSPVSSPLRSVSSPARCPPRWQTRRQGWPWTTTASAGSWSSRPRGRTASSSTGSTRRRRWWWWSRWASPCSATTTSPPASPPTSAGTPSSTTTSSPRRTARRARSSSSPGLLTRRA

SEQ ID NO: 10266 - protein, 140 aa, Zea mays subsp. mays
  peptide (1)..(140): Ceres Seq. ID no. 12441462
IEKSPPPRGCSSAAPDLTRGTYHTARRRSRHPSPPRCGASPALPGARPDGKRGVRDGRGRRLQAPVPGAQGQEDAPLHHLQDRREEEDGGGGAGGQARARLRRLRRQPPRQRVQVRHLRLRLRHRGELPEEQDLLHRLVS

SEQ ID NO: 10267 - protein, 139 aa, Zea mays subsp. mays; identical to SEQ ID NO: 4019
  peptide (1)..(139): Ceres Seq. ID no. 12441463

SEQ ID NO: 10268 - DNA, 1919 bp, Zea mays subsp. mays
  misc_feature (1)..(1919): Ceres Seq. ID no. 12386452
  misc_feature (1)..(1919): Ortholog of  Ceres SEQ ID NO 13597446 as cited in SEQ ID NO 64098
  misc_feature (1)..(1919): Ortholog of  Ceres SEQ ID NO 15226246 as cited in SEQ ID NO 68314
gcacgagaccattacctagaacatcctaatcgaaaactgcccaccgggctcgtctcctcccctggtttctttttcatcactcgtcaccggctcaccgctagttcctttagagaaggtgtacccccaatattccattaccggcccactgacgagagagagagagagagattttggcgtgactatccagagtccccaatcttacacctaaaaactcttctcagctaccggtgcggcatatcgcccctatcggcggcgaacatttgagttctcgcgacgtgtcctcgaggattctgtggtggaagatcggatcttttgctgcgggttccagttgccaaccagagatgtcggctctcctcgatctactgatggggatctttcgccagcagaccctcggcggcgccgccctggagctcgccgcgctggcggcgccgctctcgctcgccgccctcgtcggccttctcatcgggtgggcatggcgcccgaggtgggcgggggtcgtcgtcgtcgacaacgcccaacagatggcgcagctccccgcggcggcggcgcctccggaccgcgccaccgccaccaccaccgcggtggtatctcgcaacgaggcggccgccgtcgtaccgagaactgtggtggctcatgcggcggccgaggacgagcagcagcagctggcggtcaacaccggtgacttgatgcacctctggcggctcgtcgacgagaaggacggtggcccgtcgtggattcacatgatggaccgcaccttaccaaccatgaggtaccaagcctggcggagagacccaccgagtggtccaccacagtaccgcagcagcacaatcttggaagatgcgtcaccagaggttgtgagagatttcttctgggacgacgagttccggatgaacaacagctgggacgacatgcttcttcagcacgagacgctggaggagtgcaccgagactggaaccatggttgtccggtgggtcaggaagttcccgttcttctgcagcgacagggagtacatcataggccgcaggatatgggcgtctgggaagacattttactgtgtgaccaagggtgttcctcgtccctccgttccaagacaaaacaaacctcgccgtgtggacttgtactactctagctggtgcatccgtccagttgagtcgagaaaaggcgacggtgcaatgagtgcatgcgaggtgctcttgttccaccacgaggacatggggattccatgggagatcgcgaagcttggcgtccggcaggggatgtggggctgcgtcaagaggatagagcctggccttcgggcgtaccaggttgggaggaccgccggagaggctgtttccaagtgtgctgccatggcacaggtcaccaccaggttcagtgccgacgagctcgtcatcgcagggccggggcaacacggaggccagttcttcttcgtccggcgacggcgcagaggttgacaaggcgacgaagcactgggcgaacagcatacccaaggttctcatggtcggtggcgctgtggccctggcctgctgcaccttcgacggtgggttgttgaccaaggccgtcatcttcggcactgccaggaggtttgcaggagggccaggaaggcggtaggtacggtgtaacggtggacggaaagatccagcggcacaacacaaaacaagtgttgctgcactgcagcccgctgcgggttaataggttagaaatatagcatttgttacgaggaaacatagaagtattatgcaagaaaaccgctgttagataagaaatacactgctgtgtattagtagttaataacaagagttcttggtttttgtatgtaaccatattgtggatcggatccattgttcttccccatggacactactactaccagtctaccagatcgatgttgaccttgtggcagttgctgcagtttttttttc

SEQ ID NO: 10269 - protein, 369 aa, Zea mays subsp. mays
  peptide (1)..(369): Ceres Seq. ID no. 12386453
MSALLDLLMGIFRQQTLGGAALELAALAAPLSLAALVGLLIGWAWRPRWAGVVVVDNAQQMAQLPAAAAPPDRATATTTAVVSRNEAAAVVPRTVVAHAAAEDEQQQLAVNTGDLMHLWRLVDEKDGGPSWIHMMDRTLPTMRYQAWRRDPPSGPPQYRSSTILEDASPEVVRDFFWDDEFRMNNSWDDMLLQHETLEECTETGTMVVRWVRKFPFFCSDREYIIGRRIWASGKTFYCVTKGVPRPSVPRQNKPRRVDLYYSSWCIRPVESRKGDGAMSACEVLLFHHEDMGIPWEIAKLGVRQGMWGCVKRIEPGLRAYQVGRTAGEAVSKCAAMAQVTTRFSADELVIAGPGQHGGQFFFVRRRRRG

SEQ ID NO: 10270 - protein, 361 aa, Zea mays subsp. mays
  peptide (1)..(361): Ceres Seq. ID no. 12386454
MGIFRQQTLGGAALELAALAAPLSLAALVGLLIGWAWRPRWAGVVVVDNAQQMAQLPAAAAPPDRATATTTAVVSRNEAAAVVPRTVVAHAAAEDEQQQLAVNTGDLMHLWRLVDEKDGGPSWIHMMDRTLPTMRYQAWRRDPPSGPPQYRSSTILEDASPEVVRDFFWDDEFRMNNSWDDMLLQHETLEECTETGTMVVRWVRKFPFFCSDREYIIGRRIWASGKTFYCVTKGVPRPSVPRQNKPRRVDLYYSSWCIRPVESRKGDGAMSACEVLLFHHEDMGIPWEIAKLGVRQGMWGCVKRIEPGLRAYQVGRTAGEAVSKCAAMAQVTTRFSADELVIAGPGQHGGQFFFVRRRRRG

SEQ ID NO: 10271 - protein, 309 aa, Zea mays subsp. mays
  peptide (1)..(309): Ceres Seq. ID no. 12386455
MAQLPAAAAPPDRATATTTAVVSRNEAAAVVPRTVVAHAAAEDEQQQLAVNTGDLMHLWRLVDEKDGGPSWIHMMDRTLPTMRYQAWRRDPPSGPPQYRSSTILEDASPEVVRDFFWDDEFRMNNSWDDMLLQHETLEECTETGTMVVRWVRKFPFFCSDREYIIGRRIWASGKTFYCVTKGVPRPSVPRQNKPRRVDLYYSSWCIRPVESRKGDGAMSACEVLLFHHEDMGIPWEIAKLGVRQGMWGCVKRIEPGLRAYQVGRTAGEAVSKCAAMAQVTTRFSADELVIAGPGQHGGQFFFVRRRRRG

SEQ ID NO: 10272 - DNA, 1049 bp, Zea mays subsp. mays
  misc_feature (1)..(1049): Ceres Seq. ID no. 12345528
  misc_feature (1)..(1049): Ortholog of  Ceres SEQ ID NO 13582073 as cited in SEQ ID NO 56218
aaaaacgctccgttgcctttcctttccccacttccccggctcctgcctcccgccgccgacaccaccaaaaaccctagcagctccaccccgccgccgccgccgccgccatggatgaccctcggatgttcccatcaggatccgacgaccgctccgacgccgaacgccggctgtacaacccgtaccaggacctcaacatgccctacagctaccggacgctctacgacctccccacttcgccggagttcctcttccaggaggaggccctggcgcaacgacgctcgtggggtgagaacctcactttctatacgggcgtcgggtacctctccggcgccgttggcggcgccgtcctgggcctccgcgacgccgccaggggcgctgagcccggggagaccgccaagatccgcgccaaccgcgtgctcaacgcctgcggcagctctggccgccgcgtcgggaatacgctgggcgtcattggcctcatgtacgccgggatcgagagcgccatggtcgcggcccgtgaccgcgacgactggatgaacagcgtcgccgctgggcttggcacgggcacgctcttccgcgccgccaacgggccgcgatccgccgccgtcgcaggcgccctcggtgggatcctagccgccgccgccgcggggggcaagcagctagccaagagatacgtgaatgtcatatgatcgtgttttttttgtggtagcaatgatgagcgaacaatgatatcgtctagtgctctagtagggaaggggtttgccttttctgaaaactagctgagggcttgttcggttctaccccaatccatatggattgaggggtcaaaatcacctccaatccatatcaatcccctccaatccatatggattgaaaataaccgaacaagccctgaatgggaaattttgagcttgcattggaattgcaatgcaacatcgtgcttcaagatgctttagttctgctttgtccttatatgttaagggctagatgaaggtatttttatctccttgtttggatgcacatgtattgtcgtcaatccatttcatgttctc

SEQ ID NO: 10273 - protein, 192 aa, Zea mays subsp. mays
  peptide (1)..(192): Ceres Seq. ID no. 12345529
MDDPRMFPSGSDDRSDAERRLYNPYQDLNMPYSYRTLYDLPTSPEFLFQEEALAQRRSWGENLTFYTGVGYLSGAVGGAVLGLRDAARGAEPGETAKIRANRVLNACGSSGRRVGNTLGVIGLMYAGIESAMVAARDRDDWMNSVAAGLGTGTLFRAANGPRSAAVAGALGGILAAAAAGGKQLAKRYVNVI

SEQ ID NO: 10274 - protein, 187 aa, Zea mays subsp. mays
  peptide (1)..(187): Ceres Seq. ID no. 12345530
MFPSGSDDRSDAERRLYNPYQDLNMPYSYRTLYDLPTSPEFLFQEEALAQRRSWGENLTFYTGVGYLSGAVGGAVLGLRDAARGAEPGETAKIRANRVLNACGSSGRRVGNTLGVIGLMYAGIESAMVAARDRDDWMNSVAAGLGTGTLFRAANGPRSAAVAGALGGILAAAAAGGKQLAKRYVNVI

SEQ ID NO: 10275 - protein, 177 aa, Zea mays subsp. mays
  peptide (1)..(177): Ceres Seq. ID no. 12345531
KNAPLPFLSPLPRLLPPAADTTKNPSSSTPPPPPPPWMTLGCSHQDPTTAPTPNAGCTTRTRTSTCPTATGRSTTSPLRRSSSSRRRPWRNDARGVRTSLSIRASGTSPAPLAAPSWASATPPGALSPGRPPRSAPTACSTPAAALAAASGIRWASLASCTPGSRAPWSRPVTATTG

SEQ ID NO: 10276 - DNA, 1049 bp, Zea mays subsp. mays; identical to SEQ ID NO: 10272
  misc_feature (1)..(1049): Ceres Seq. ID no. 12345528
  misc_feature (1)..(1049): Ortholog of  Ceres SEQ ID NO 13582073 as cited in SEQ ID NO 56218

SEQ ID NO: 10277 - protein, 192 aa, Zea mays subsp. mays; identical to SEQ ID NO: 10273
  peptide (1)..(192): Ceres Seq. ID no. 12345529

SEQ ID NO: 10278 - protein, 187 aa, Zea mays subsp. mays; identical to SEQ ID NO: 10274
  peptide (1)..(187): Ceres Seq. ID no. 12345530

SEQ ID NO: 10279 - protein, 177 aa, Zea mays subsp. mays; identical to SEQ ID NO: 10275
  peptide (1)..(177): Ceres Seq. ID no. 12345531

SEQ ID NO: 10280 - DNA, 724 bp, Zea mays subsp. mays
  misc_feature (1)..(724): Ceres Seq. ID no. 12400535
  misc_feature (1)..(724): Ortholog of  Ceres SEQ ID NO 13583388 as cited in SEQ ID NO 62058
aacataccgcctgtccacctgcgctcttcccgttccccaactgcaagtctgcaacatcctctctctctctctacctgccccgttcctcaccaaacttgtcgccctcgtcgacttgtgagtctcttccgccggcgtcgacgagagctgcgctaggtgatctcgactgcttcctcgccccccatggcgacggcgctcaaatcgttcctgaacagccccgtcggccccaagaccacccacttctggggccctgtcgccaactggggcttcgtcatcgcgggtttggttgacatgaacaagcctcctgaaatgatatctggcaatatgacagcagccatgtgtgtgtattctggactctttatgaggtttgcatggatggtacagccccgaaattatttgcttctagcatgccatgcttccaatgaaagcgtccagctctatcagttatctcgctgggctaggtctcaggggtacctggataagaaagagccagaggccaaacagtaaagagggtatccaacactggagtcatttgttcaataaagaaaatatgctgtggaaaacattcattctgttgccaatgcagttttttttgtatgtttgcaaaatatgctgaggaaatttcatgatacctagcgcagttacaagcgtctgcttacttttatgtgcatttgtcaagacacatttgttttttacattgctgccttcctactatttggcactattt

SEQ ID NO: 10281 - protein, 107 aa, Zea mays subsp. mays
  peptide (1)..(107): Ceres Seq. ID no. 12400536
MATALKSFLNSPVGPKTTHFWGPVANWGFVIAGLVDMNKPPEMISGNMTAAMCVYSGLFMRFAWMVQPRNYLLLACHASNESVQLYQLSRWARSQGYLDKKEPEAKQ

SEQ ID NO: 10282 - protein, 94 aa, Zea mays subsp. mays
  peptide (1)..(94): Ceres Seq. ID no. 12400537
HTACPPALFPFPNCKSATSSLSLYLPRSSPNLSPSSTCESLPPASTRAALGDLDCFLAPHGDGAQIVPEQPRRPQDHPLLGPCRQLGLRHRGFG

SEQ ID NO: 10283 - protein, 71 aa, Zea mays subsp. mays
  peptide (1)..(71): Ceres Seq. ID no. 12400538
MNKPPEMISGNMTAAMCVYSGLFMRFAWMVQPRNYLLLACHASNESVQLYQLSRWARSQGYLDKKEPEAKQ

SEQ ID NO: 10284 - DNA, 540 bp, Zea mays subsp. mays
  misc_feature (1)..(540): Ceres Seq. ID no. 12345401
  misc_feature (1)..(540): Ortholog of  Ceres SEQ ID NO 12616093 as cited in SEQ ID NO 63331
cggggacgttcttaaggttaagccattggcagctttagcaatgattgatgagggagagcttgactggaaaattgtggccatttctttggatgacccgaaagcatctcttgtgaacgacgtggatgatgttgagaagcattttccggggacactgactgccatcagagactggttcagagactacaagatacctgatggaaagcctgccaacaaatttggtctcggcaacaagcccgcaagcaaggaatacgccctgaaggtcattcaagagaccaacgaatcatgggagaaattaaagagaaatattcccgctggagagctctcgttggcctgattttggcccatggaagccaccacattcttttgaactgctttcgtgagcatgtcgttttgtatgctgtgaccatgcttcttcgtttgcattccaaaccttttttacgaactgtttaacaaaaatgatcttgtcggataaataatgattctggtgcgagtttaccagaacggcaaggagtttctcaagtaaatgcagcgtatttttct

SEQ ID NO: 10285 - protein, 110 aa, Zea mays subsp. mays
  peptide (1)..(110): Ceres Seq. ID no. 12345402
GDVLKVKPLAALAMIDEGELDWKIVAISLDDPKASLVNDVDDVEKHFPGTLTAIRDWFRDYKIPDGKPANKFGLGNKPASKEYALKVIQETNESWEKLKRNIPAGELSLA

SEQ ID NO: 10286 - protein, 97 aa, Zea mays subsp. mays
  peptide (1)..(97): Ceres Seq. ID no. 12345403
MIDEGELDWKIVAISLDDPKASLVNDVDDVEKHFPGTLTAIRDWFRDYKIPDGKPANKFGLGNKPASKEYALKVIQETNESWEKLKRNIPAGELSLA

SEQ ID NO: 10287 - protein, 55 aa, Zea mays subsp. mays
  peptide (1)..(55): Ceres Seq. ID no. 12345404
MGEIKEKYSRWRALVGLILAHGSHHILLNCFREHVVLYAVTMLLRLHSKPFLRTV

SEQ ID NO: 10288 - DNA, 1205 bp, Zea mays subsp. mays
  misc_feature (1)..(1205): Ceres Seq. ID no. 12379329
  misc_feature (1)..(1205): Ortholog of  Ceres SEQ ID NO 13594809 as cited in SEQ ID NO 51847
  misc_feature (1)..(1205): Ortholog of  Ceres SEQ ID NO 12563124 as cited in SEQ ID NO 57104
  misc_feature (1)..(1205): Ortholog of  Ceres SEQ ID NO 15226273 as cited in SEQ ID NO 64934
  misc_feature (1)..(1205): Ortholog of  Ceres SEQ ID NO 12617639 as cited in SEQ ID NO 65219
  misc_feature (1)..(1205): Ortholog of  Ceres SEQ ID NO 15173998 as cited in SEQ ID NO 0
  misc_feature (1)..(1205): Ortholog of  Ceres SEQ ID NO 15178333 as cited in SEQ ID NO 0
  misc_feature (1)..(1205): Ortholog of  Ceres SEQ ID NO 15179982 as cited in SEQ ID NO 0
agcagacaagggaggggactgagaactgggaagccgacgctccgctcggcaaagcctgaggcggcgacgacgcttgatcgcagcccgactcacaccgtgaggagttcgagggatggctttcgctagtagaattggaaatgcgctcaggagaactttagcgcccacttgctccccactgcttcagccagtaagatgcatgtcctcttccaagctctttgttggaggactttcttttgccaccgacgaaaccactctgaaggatgcattttctgagtttgggaatgtacttgaagctcggatcatcattgatcgggaatcagggaggtcaaggggttttggttttataacttttacatccactgaagaagcctcagctgcaatgacttccatggatggcaaggaacttcaaggacgaaatataagggtgaaccatgccaatgaacgcgctggtgggatacgcgggggtggtggattcggatctggtggtggttatggtggtggaggtggatatcctactggtgggtatggcggtggtggagatagttctggtggtggttatagttctgggggttatgctgccaatggttacggtgttggatctggcagtggcaactacagcaatgcatcaggtggtggatattcaggcagtgatggttacggcaatggagctgccagtggtggttatgctaacaacttgagcagcggatacaacagcaatggtaggtacaataccattggcagttctgatggaaacactggtgggtacaattcgtatcccaacccgtatggtgcaggcaactacaatactggaggttcgagttccagtggtggaaccttaggagagtttggtggtggaggttttggtggcaacaactttgctggaaatgttaccgggggggtttctggcggtggggcaagctatggaggctaacaagccgcaatacaatggcgacgacgacctgctgggcgaaggtttcttcgacaaggaagtggcagagtaaatgagggagcggcgtactcgcacctctcgcactgtgctgcggatctttttttcccccaaactgcatctgatcggtcgtgctaaatggagcaaataaaactttgcttgagctcattaggatatagaacataatcctttgttctttttttattctgtttcagacaaggcacgtatgttattttatccactcagctagcgtagcttt

SEQ ID NO: 10289 - protein, 272 aa, Zea mays subsp. mays
  peptide (1)..(272): Ceres Seq. ID no. 12379330
MAFASRIGNALRRTLAPTCSPLLQPVRCMSSSKLFVGGLSFATDETTLKDAFSEFGNVLEARIIIDRESGRSRGFGFITFTSTEEASAAMTSMDGKELQGRNIRVNHANERAGGIRGGGGFGSGGGYGGGGGYPTGGYGGGGDSSGGGYSSGGYAANGYGVGSGSGNYSNASGGGYSGSDGYGNGAASGGYANNLSSGYNSNGRYNTIGSSDGNTGGYNSYPNPYGAGNYNTGGSSSSGGTLGEFGGGGFGGNNFAGNVTGGVSGGGASYGG

SEQ ID NO: 10290 - protein, 244 aa, Zea mays subsp. mays
  peptide (1)..(244): Ceres Seq. ID no. 12379331
MSSSKLFVGGLSFATDETTLKDAFSEFGNVLEARIIIDRESGRSRGFGFITFTSTEEASAAMTSMDGKELQGRNIRVNHANERAGGIRGGGGFGSGGGYGGGGGYPTGGYGGGGDSSGGGYSSGGYAANGYGVGSGSGNYSNASGGGYSGSDGYGNGAASGGYANNLSSGYNSNGRYNTIGSSDGNTGGYNSYPNPYGAGNYNTGGSSSSGGTLGEFGGGGFGGNNFAGNVTGGVSGGGASYGG

SEQ ID NO: 10291 - protein, 183 aa, Zea mays subsp. mays
  peptide (1)..(183): Ceres Seq. ID no. 12379332
MTSMDGKELQGRNIRVNHANERAGGIRGGGGFGSGGGYGGGGGYPTGGYGGGGDSSGGGYSSGGYAANGYGVGSGSGNYSNASGGGYSGSDGYGNGAASGGYANNLSSGYNSNGRYNTIGSSDGNTGGYNSYPNPYGAGNYNTGGSSSSGGTLGEFGGGGFGGNNFAGNVTGGVSGGGASYGG

SEQ ID NO: 10292 - DNA, 724 bp, Zea mays subsp. mays
  misc_feature (1)..(724): Ceres Seq. ID no. 14308548
  misc_feature (1)..(724): Ortholog of  Ceres SEQ ID NO 14303276 as cited in SEQ ID NO 1264
  misc_feature (1)..(724): Ortholog of  Ceres SEQ ID NO 15170536 as cited in SEQ ID NO 52791
  misc_feature (1)..(724): Ortholog of  Ceres SEQ ID NO 15171813 as cited in SEQ ID NO 57309
  misc_feature (1)..(724): Ortholog of  Ceres SEQ ID NO 14314378 as cited in SEQ ID NO 57601
cgtggtgtgccacagatcaccgtgtgctttgacatcgacgccaacggcatcctgaacgtgtctgccgaggacaagacaacggggcagaagaacaagatcacaatcaccaacgacaagggccgtctctccaaggaggagatcgagaagatggttcaggacgctgagaagtacaagtctgaggatgaggagcacaagaagaaggtggaggccaagaactcgctggagaactactcctacaacatgcgcaacacgatcaaggacgagaagattgcgtccaagctgccggccgatgacaagaagaagatcgaggacgccatcgacgcggccatcagctggctggacgccaaccagctcgccgaggcggacgagttcgaggacaagatgaaggagctggagagcctctgcaaccccatcatcgccaagatgtaccagggcgcgggtgaagacatgggcggcgctggcggcatggacgaggacgcccctgccggcagcggcggccctggccccaagatcgaggaggtggactaagcggtttgttgtcagtcttgagtgtgctgcagttgctggctggcccagttgctgccgagagttatcgtcagttggtgcggtgtgtccgcttaaactttatttgtggttggttggtacttttgtggtggttatttttttggacctcgtgatagtcggtcggttcaatgttatcgcggctactggcaaaccttaagtg

SEQ ID NO: 10293 - protein, 175 aa, Zea mays subsp. mays
  peptide (1)..(175): Ceres Seq. ID no. 14308549
RGVPQITVCFDIDANGILNVSAEDKTTGQKNKITITNDKGRLSKEEIEKMVQDAEKYKSEDEEHKKKVEAKNSLENYSYNMRNTIKDEKIASKLPADDKKKIEDAIDAAISWLDANQLAEADEFEDKMKELESLCNPIIAKMYQGAGEDMGGAGGMDEDAPAGSGGPGPKIEEVD

SEQ ID NO: 10294 - protein, 126 aa, Zea mays subsp. mays; identical to SEQ ID NO: 3128
  peptide (1)..(126): Ceres Seq. ID no. 14308550

SEQ ID NO: 10295 - protein, 95 aa, Zea mays subsp. mays
  peptide (1)..(95): Ceres Seq. ID no. 14308551
MRNTIKDEKIASKLPADDKKKIEDAIDAAISWLDANQLAEADEFEDKMKELESLCNPIIAKMYQGAGEDMGGAGGMDEDAPAGSGGPGPKIEEVD

SEQ ID NO: 10296 - DNA, 1069 bp, Zea mays subsp. mays; identical to SEQ ID NO: 3894
  misc_feature (1)..(1069): Ceres Seq. ID no. 12403740
  misc_feature (1)..(1069): Ortholog of  Ceres SEQ ID NO 15169248 as cited in SEQ ID NO 55022
  misc_feature (1)..(1069): Ortholog of  Ceres SEQ ID NO 14315042 as cited in SEQ ID NO 56959
  misc_feature (1)..(1069): Ortholog of  Ceres SEQ ID NO 12608620 as cited in SEQ ID NO 60192
  misc_feature (1)..(1069): Ortholog of  Ceres SEQ ID NO 15173077 as cited in SEQ ID NO 64566
  misc_feature (1)..(1069): Ortholog of  Ceres SEQ ID NO 13662898 as cited in SEQ ID NO 66199
  misc_feature (1)..(1069): Ortholog of  Ceres SEQ ID NO 14313358 as cited in SEQ ID NO 67347
  misc_feature (1)..(1069): Ortholog of  Ceres SEQ ID NO 13654314 as cited in SEQ ID NO 67914

SEQ ID NO: 10297 - protein, 244 aa, Zea mays subsp. mays; identical to SEQ ID NO: 3895
  peptide (1)..(244): Ceres Seq. ID no. 12403741

SEQ ID NO: 10298 - protein, 201 aa, Zea mays subsp. mays; identical to SEQ ID NO: 3896
  peptide (1)..(201): Ceres Seq. ID no. 12403742

SEQ ID NO: 10299 - protein, 190 aa, Zea mays subsp. mays; identical to SEQ ID NO: 3897
  peptide (1)..(190): Ceres Seq. ID no. 12403743

SEQ ID NO: 10300 - DNA, 1181 bp, Zea mays subsp. mays
  misc_feature (1)..(1181): Ceres Seq. ID no. 12364890
  misc_feature (1)..(1181): Ortholog of  Ceres SEQ ID NO 15176294 as cited in SEQ ID NO 60388
attgttcactgggaggaccaactagataattcatcatggctatcatactttacaagcagccaatgccgatccttatggacatatgttacaccaccaagaggcaagagcctctcgctcgctaccaatgcgcacgtcacaccgtggtctccttcgccgccgccgccgcgtcgtcatccacccacttggcgtgccacagcgccgaccgcctccggggcagcatggacccgacacagctggcgagagtggcgcggaacttggcgtccccggggcggagcatggcgggcagtggcagcctgctgaccccgcgcgcggcgcaggcctcgtaacgcggcacgatgcgcgtggccagcgcgtangagaagtactcggggaagtcgtacagctcgtcggcgcggcgggccatggcgcccaggaggtagtccgcctnnagccggntgtttccctccacgccgtacccgaagagcgcggggaagcggcgcgccatggagcgggcggcgcgcgccggcaggcccagcgactcgaggaactcgagccgcggcagcagcttgccctccacggagaaggatagcaggtcggcgcggcggtgcaggtcgggcacgccgagcgcgcgcaggaagtagagcgtgggccgcagccgcgccgccacgggagagacgagcaggcgcgggcgccgccggagcacgcgcgggaggtcggcctcggcgacgcccgcctcctccgtgaggaaccggagcgcggcctcgacggcctccgcggacacggacagcagctccgggcacatccccgccgcgcgccggaggtcggcgggcggcacgcccgcctcgagcagnncctgcnnnngngcccgcggccacgggcggcgacggcagcacgggctccggcgccgcgggcgggagacccggggccgcgaggctggtgggcctggtccgcagcnngacggcgacgacgcgtagcctgntgcggcgcggcgccgccggcctgggcccagattccatgccctcgtgccctagcagggccagggcggtgcgggtggcggccatagtccccgtcgctcgcaggtttctctttttctctgtagtggtgaggcgtaaagaggataagggtgtgagatggatctggtcgaaccaccgcacgggcacgagtagtggtggtctcgagaaatgtctaaaaaggtgtttttt

SEQ ID NO: 10301 - protein, 161 aa, Zea mays subsp. mays
  peptide (1)..(161): Ceres Seq. ID no. 12364891
  misc_feature (92)..(92): Xaa is any aa, unknown or other
  misc_feature (115)..(115): Xaa is any aa, unknown or other
  misc_feature (116)..(116): Xaa is any aa, unknown or other
  misc_feature (118)..(118): Xaa is any aa, unknown or other
MLHHQEARASRSLPMRTSHRGLLRRRRRVVIHPLGVPQRRPPPGQHGPDTAGESGAELGVPGAEHGGQWQPADPARGAGLVTRHDARGQRVXEVLGEVVQLVGAAGHGAQEVVRXXPXVSLHAVPEERGEAARHGAGGARRQAQRLEELEPRQQLALHGEG

SEQ ID NO: 10302 - protein, 147 aa, Zea mays subsp. mays
  peptide (1)..(147): Ceres Seq. ID no. 12364892
  misc_feature (78)..(78): Xaa is any aa, unknown or other
  misc_feature (101)..(101): Xaa is any aa, unknown or other
  misc_feature (102)..(102): Xaa is any aa, unknown or other
  misc_feature (104)..(104): Xaa is any aa, unknown or other
MRTSHRGLLRRRRRVVIHPLGVPQRRPPPGQHGPDTAGESGAELGVPGAEHGGQWQPADPARGAGLVTRHDARGQRVXEVLGEVVQLVGAAGHGAQEVVRXXPXVSLHAVPEERGEAARHGAGGARRQAQRLEELEPRQQLALHGEG

SEQ ID NO: 10303 - protein, 99 aa, Zea mays subsp. mays
  peptide (1)..(99): Ceres Seq. ID no. 12364893
IVHWEDQLDNSSWLSYFTSSQCRSLWTYVTPPRGKSLSLATNAHVTPWSPSPPPPRRHPPTWRATAPTASGAAWTRHSWREWRGTWRPRGGAWRAVAAC

SEQ ID NO: 10304 - DNA, 1441 bp, Zea mays subsp. mays
  misc_feature (1)..(1441): Ceres Seq. ID no. 12383271
  misc_feature (1)..(1441): Ortholog of  Ceres SEQ ID NO 12614942 as cited in SEQ ID NO 68635
atcccctcagtcctcagtccctcacacactcactatacactgctctgctgcagcaagaaggaagaagctagcgcctccctagctctcgttgtcagcaatggccaccaccgccgcgtccagcctcctcaagtcctccttcgcgggctcccggctcccttcggccacgcgcaccaccaccccgtcgtccgtggccgtggccaccccgcgcgccggcggcggccccatccgcgcgtccatctcctcccccaacccgccctacgacctgacgtccttccggttcagccccatcaaggagtccatcgtgtcccgcgagatgacccggcgctacatgacggacatgatcacccacgccgacaccgacgtggtgatcgtgggcgccgggtccgcgggcctgtcctgcgcgtacgagctgtccaaggaccccaccgtgagcgtcgccatcgtggagcagtccgtgtccccgggcggcggcgcgtggctgggcgggcagctgttctcggccatggtggtgcgcaggccggcgcacctgttcctggacgagctgggcgtgggctacgacgaggccgaggactacgtggtggtcaagcacgcggcgctgttcacgtccaccgtgatgagccggctcctggcgcggcccaacgtgaagctgttcaacgccgtggcggtggaggacctgatcgtgcggcgggggcgcgtcggcggcgtggtcaccaactgggcgctcgtgtccatgaaccacgacacgcagtcgtgcatggaccccaacgtgatggaggccaaggtggtggtcagctcctgcggccacgacgggcccttcggcgccaccggcgtcaagaggctccaggacatcggcatgatcagcgccgtgcccgggatgaaggcgctcgacatgaacgccgccgaggacgagatcgtgcgcctcacgcgcgaggtcgtgcccggcatgatcgtcaccgggatggaggtcgccgagatcgacggcgccccgaggatgggcccgacgttcggcgccatgatgatctccggccagaaggcggcgcacctggcgctgaaggcactgggcaggcccaacgccgtggacgggaccatccccgaggtgtcgccggcgctgcgcgaggagttcgtgattgcatccaaggacgacgaggtcgtggacgcctgagcgagcatccacgcgccagcatgcaagcagcgtcttatctgggccggcgccatcacggggtttcttcttttaatctgggactttgttgttgttggacgaatgaattcccttcgatcggttagctttaatctgtctcgttagtgtgtcgtgttcgtgtagcaccatgccacagctacgccatgccgtgtgctctgtcacgtgggggccactcgtggggtctcctgctgctgtcagaacgaataagagaagatggaattgtggtgaaaaaaaaaaaaaaaa

SEQ ID NO: 10305 - protein, 427 aa, Zea mays subsp. mays
  peptide (1)..(427): Ceres Seq. ID no. 12383272
IPSVLSPSHTHYTLLCCSKKEEASASLALVVSNGHHRRVQPPQVLLRGLPAPFGHAHHHPVVRGRGHPARRRRPHPRVHLLPQPALRPDVLPVQPHQGVHRVPRDDPALHDGHDHPRRHRRGDRGRRVRGPVLRVRAVQGPHRERRHRGAVRVPGRRRVAGRAAVLGHGGAQAGAPVPGRAGRGLRRGRGLRGGQARGAVHVHRDEPAPGAAQREAVQRRGGGGPDRAAGARRRRGHQLGARVHEPRHAVVHGPQRDGGQGGGQLLRPRRALRRHRRQEAPGHRHDQRRARDEGARHERRRGRDRAPHARGRARHDRHRDGGRRDRRRPEDGPDVRRHDDLRPEGGAPGAEGTGQAQRRGRDHPRGVAGAARGVRDCIQGRRGRGRLSEHPRASMQAASYLGRRHHGVSSFNLGLCCCWTNEFPSIG

SEQ ID NO: 10306 - protein, 354 aa, Zea mays subsp. mays
  peptide (1)..(354): Ceres Seq. ID no. 12383273
MATTAASSLLKSSFAGSRLPSATRTTTPSSVAVATPRAGGGPIRASISSPNPPYDLTSFRFSPIKESIVSREMTRRYMTDMITHADTDVVIVGAGSAGLSCAYELSKDPTVSVAIVEQSVSPGGGAWLGGQLFSAMVVRRPAHLFLDELGVGYDEAEDYVVVKHAALFTSTVMSRLLARPNVKLFNAVAVEDLIVRRGRVGGVVTNWALVSMNHDTQSCMDPNVMEAKVVVSSCGHDGPFGATGVKRLQDIGMISAVPGMKALDMNAAEDEIVRLTREVVPGMIVTGMEVAEIDGAPRMGPTFGAMMISGQKAAHLALKALGRPNAVDGTIPEVSPALREEFVIASKDDEVVDA

SEQ ID NO: 10307 - protein, 282 aa, Zea mays subsp. mays
  peptide (1)..(282): Ceres Seq. ID no. 12383274
MTRRYMTDMITHADTDVVIVGAGSAGLSCAYELSKDPTVSVAIVEQSVSPGGGAWLGGQLFSAMVVRRPAHLFLDELGVGYDEAEDYVVVKHAALFTSTVMSRLLARPNVKLFNAVAVEDLIVRRGRVGGVVTNWALVSMNHDTQSCMDPNVMEAKVVVSSCGHDGPFGATGVKRLQDIGMISAVPGMKALDMNAAEDEIVRLTREVVPGMIVTGMEVAEIDGAPRMGPTFGAMMISGQKAAHLALKALGRPNAVDGTIPEVSPALREEFVIASKDDEVVDA

SEQ ID NO: 10308 - DNA, 1687 bp, Zea mays subsp. mays
  misc_feature (1)..(1687): Ceres Seq. ID no. 12345075
  misc_feature (1)..(1687): Ortholog of  Ceres SEQ ID NO 14310419 as cited in SEQ ID NO 55050
  misc_feature (1)..(1687): Ortholog of  Ceres SEQ ID NO 13657789 as cited in SEQ ID NO 66154
gctccacgtcacgacgccgcatctaaccctccggcgactcatcgccggcgagccggtccgccacgccatagcctcgtcctgaagcgcacttaatcctacgtctcgttcctctctcgcccccggtaccctccataggcatgggaatggggtctgcgagagggggcgcagggggatggctccccggcgagcggtggcggcgggtcatcttcctcgctctggcggccgtctcgttcctcatctcactcatactcctcttcctatccgcgccgcgtctccgcctcccaagtgtcgtcctgccttacaccaccgcttccgcttctgccgtccgccgcgggcccggcgagccgccctgcctggtgtacctgctgaccggcgcgcgcggcgacgggcgccgcctcctcaggctcctcctcgcggtttaccacccgcgcaaccggtacgtgctccacctctccgccgacgcgccagacgacgagcgcctgagcctcgccaccggggtcgtcgccgcggcgcccgccgtgggagcattcgagaacgtggttattattggcaatcccaccgccgggacgcccgtggggtcctccggactcgcccggcacgctccgcgctgcggccgtgctgctccggctccacgctgactgggactggttcctcaccctcaatgccgccgactaccccctcgtcacacaggatgacctgattcatgtcctttcttctgtcccaagggatcttaacttcattgaccacaccggtgacgttggatcaaaagaacctgagaaagttcaacaaattatagtcgatgctggaatttacttgtcagggaggaccaacttctttcgaggaacacagaaacgagcagctcctgaggcttttaagttctttacaggttctccatgggtcatattaaaccggcaatttatagagtactgcattcttgcttgggagaatctccctaggattcttctcatgtacttcaacaatgtaatacaacctcaggaagggtatttccagacagtcatctgcaactcactggacttccgtaatttcactgtgaacaatgacttgaggttcatggtgcaagatgattccgctcagaaaaagtcccttttcacgagcagggaacattatggtcacatggtggatagtggggcacccttcgcaaggccgtttcaggagaatgatcctctgctggaccagatcgacggcaatatactcaagcgttggagccatggacagttcctggtgcttggtgcacaggaaggaagaggtggttcagtgatccatgttcccagtggggcgatgtgaatgttttgagaccaggtcctcaagcagtgatgttgcaccaatatgtaaatcggaccttagaagaagcaaagtctagcagcaattcatgcaggcggtagcagcattggcgtctagaacctcatgtcccatggttgaaagctttgagctttttccgcttatccactaagggttctccactctgctgaataaatagctgccacatgtctaagctgaaacaagcactcgtcgcacctggaacaaagccatggagggatgttcttttctgatattttcatgatgactatcatagtcacggatcaggagtttcactttggtctgtgattaatctgtgcaatccccatatttggctcatataacacttccaggcgctgataataggctg

SEQ ID NO: 10309 - protein, 175 aa, Zea mays subsp. mays
  peptide (1)..(175): Ceres Seq. ID no. 12345076
MAPRRAVAAGHLPRSGGRLVPHLTHTPLPIRAASPPPKCRPALHHRFRFCRPPRARRAALPGVPADRRARRRAPPPQAPPRGLPPAQPVRAPPLRRRARRRAPEPRHRGRRRGARRGSIRERGYYWQSHRRDARGVLRTRPARSALRPCCSGSTLTGTGSSPSMPPTTPSSHRMT

SEQ ID NO: 10310 - protein, 166 aa, Zea mays subsp. mays
  peptide (1)..(166): Ceres Seq. ID no. 12345077
MGMGSARGGAGGWLPGERWRRVIFLALAAVSFLISLILLFLSAPRLRLPSVVLPYTTASASAVRRGPGEPPCLVYLLTGARGDGRRLLRLLLAVYHPRNRYVLHLSADAPDDERLSLATGVVAAAPAVGAFENVVIIGNPTAGTPVGSSGLARHAPRCGRAAPAPR

SEQ ID NO: 10311 - protein, 164 aa, Zea mays subsp. mays
  peptide (1)..(164): Ceres Seq. ID no. 12345078
MGSARGGAGGWLPGERWRRVIFLALAAVSFLISLILLFLSAPRLRLPSVVLPYTTASASAVRRGPGEPPCLVYLLTGARGDGRRLLRLLLAVYHPRNRYVLHLSADAPDDERLSLATGVVAAAPAVGAFENVVIIGNPTAGTPVGSSGLARHAPRCGRAAPAPR

SEQ ID NO: 10312 - DNA, 774 bp, Zea mays subsp. mays
  misc_feature (1)..(774): Ceres Seq. ID no. 12367092
  misc_feature (1)..(774): Ortholog of  Ceres SEQ ID NO 14301855 as cited in SEQ ID NO 61528
  misc_feature (1)..(774): Ortholog of  Ceres SEQ ID NO 13584026 as cited in SEQ ID NO 63527
agtcatcatgactcactaagcactgtccttcctgatcccaccgcggtctccttccgcgacacgcgcacacgccacagcgcattcgcgtacgtcaacggacgtcgaacccatcgcccatgggaggagggcacgaggagcaggagggtggcggcgcaaaggccgggggctactcctccggtctcccgccgtcggagccgccgcaggagtacgggtacggcacgttccagggccctcggcatcctcccgtcgggttcccgcagcctgccccgcctcccgggttcggcggcggcggcggctaccacaaccagcaacagccgtacgcgcacgcggagacgtactacgcccaggggtaccaggccgtgccaggctatggtcctgttgctgaaggaagacctgtgagaatgaggcgtctcccatgttgtggcctcggcttaggctggtgcctgttcattgctgggtttttccttgctgccattccatggtacattggggctttcgttctgatatgcgtgcgggtacatgaccaccgagagaaaccaggatatgttgcttgcacaattgctgccgttgttgctgccgttgccatattcctgggggtaactaagggaacacacgtgtggtgaattgcttccagagaaggcaatggatttatacttgtatagtatctgtgtgtattaaaagtgtggagcgacatcgagatgctcttatgacttatgttcatacatattctactttgtaatgaaattttagatgtagtaatgcaccgtctgcttc

SEQ ID NO: 10313 - protein, 168 aa, Zea mays subsp. mays
  peptide (1)..(168): Ceres Seq. ID no. 12367093
MGGGHEEQEGGGAKAGGYSSGLPPSEPPQEYGYGTFQGPRHPPVGFPQPAPPPGFGGGGGYHNQQQPYAHAETYYAQGYQAVPGYGPVAEGRPVRMRRLPCCGLGLGWCLFIAGFFLAAIPWYIGAFVLICVRVHDHREKPGYVACTIAAVVAAVAIFLGVTKGTHVW

SEQ ID NO: 10314 - protein, 132 aa, Zea mays subsp. mays
  peptide (1)..(132): Ceres Seq. ID no. 12367094
SHHDSLSTVLPDPTAVSFRDTRTRHSAFAYVNGRRTHRPWEEGTRSRRVAAQRPGATPPVSRRRSRRRSTGTARSRALGILPSGSRSLPRLPGSAAAAATTTSNSRTRTRRRTTPRGTRPCQAMVLLLKEDL

SEQ ID NO: 10315 - DNA, 1051 bp, Zea mays subsp. mays; identical to SEQ ID NO: 10154
  misc_feature (1)..(1051): Ceres Seq. ID no. 12544505
  misc_feature (1)..(1051): Ortholog of  Ceres SEQ ID NO 14309627 as cited in SEQ ID NO 493
  misc_feature (1)..(1051): Ortholog of  Ceres SEQ ID NO 14302111 as cited in SEQ ID NO 68773

SEQ ID NO: 10316 - protein, 210 aa, Zea mays subsp. mays; identical to SEQ ID NO: 10155
  peptide (1)..(210): Ceres Seq. ID no. 12544506

SEQ ID NO: 10317 - protein, 121 aa, Zea mays subsp. mays; identical to SEQ ID NO: 10156
  peptide (1)..(121): Ceres Seq. ID no. 12544507

SEQ ID NO: 10318 - DNA, 982 bp, Zea mays subsp. mays
  misc_feature (1)..(982): Ceres Seq. ID no. 12594984
  misc_feature (1)..(982): Ortholog of  Ceres SEQ ID NO 13638567 as cited in SEQ ID NO 51303
  misc_feature (1)..(982): Ortholog of  Ceres SEQ ID NO 12610031 as cited in SEQ ID NO 55811
  misc_feature (1)..(982): Ortholog of  Ceres SEQ ID NO 12610896 as cited in SEQ ID NO 55861
  misc_feature (1)..(982): Ortholog of  Ceres SEQ ID NO 12635952 as cited in SEQ ID NO 0
aaaggaaactcactcccactttactcctatccactgcggcctggacgcgtgcgagaggcttgaccaagcagcagcagcagcagcagcgatggcgcctctgaagctgtacgggatgccgctgtcccccaacgtggtgcgcgtggccaccgtgctcaacgagaagggcctcgacttcgagatcgtccccgtcgacctcaccaccggcgcccacaagcagcccgacttcctcaccctcaaccctttcggccagatcccggctctcgtcgacggagacgaagtcctcttcgagtcccgcgcgatcaaccggtacatcgccagcaagtacgcgtcagggcacggacctgctccccgcgacggcgtcggcggcgaagctggaggtgtggctggaggtggagtcgcaccacttctacccgaacgcatcgccgctggtgttccagctgctcgtgaggccgctcctgggcggcgcccccgacgcggcggtggtggagaagcacgcggagcagctcgccaaggtgctcgacgtgtacgaggcgcacctggcccgcaacaagtaccctcgccggggacaagttcacgctcgccgacgccaaccacgcgtcctacctgctctacctcagcaagacccccaaggccgggctcgtcgccgcccgcccccacgtcaaggcctggtgggaggccatcgccgcccgccccgcgttccagaagaccgtcgccgccatccccttgcccccgccgccctcctcctcggcttgacctcgccttgcgctgcctgggtcgcggatgcgtcggagccccgagtcgaataaaagaggccgcatcctgtcttgcatttgctgctgcgccatgtgctataacagcctgtgtaataaacactgttgctttcgtgtgtgttcattgccttttggttggttggtccttgcatatcctactagtgctgatctttttgtgaagcttggattggatggacgcgttttcttcgccg

SEQ ID NO: 10319 - protein, 315 aa, Zea mays subsp. mays
  peptide (1)..(315): Ceres Seq. ID no. 12594985
KETHSHFTPIHCGLDACERLDQAAAAAAAMAPLKLYGMPLSPNVVRVATVLNEKGLDFEIVPVDLTTGAHKQPDFLTLNPFGQIPALVDGDEVLFESRAINRYIASKYASGHGPAPRDGVGGEAGGVAGGGVAPLLPERIAAGVPAAREAAPGRRPRRGGGGEARGAARQGARRVRGAPGPQQVPSPGTSSRSPTPTTRPTCSTSARPPRPGSSPPAPTSRPGGRPSPPAPRSRRPSPPSPCPRRPPPRLDLALRCLGRGCVGAPSRIKEAASCLAFAAAPCAITACVINTVAFVCVHCLLVGWSLHILLVLIFL

SEQ ID NO: 10320 - protein, 286 aa, Zea mays subsp. mays
  peptide (1)..(286): Ceres Seq. ID no. 12594986
MAPLKLYGMPLSPNVVRVATVLNEKGLDFEIVPVDLTTGAHKQPDFLTLNPFGQIPALVDGDEVLFESRAINRYIASKYASGHGPAPRDGVGGEAGGVAGGGVAPLLPERIAAGVPAAREAAPGRRPRRGGGGEARGAARQGARRVRGAPGPQQVPSPGTSSRSPTPTTRPTCSTSARPPRPGSSPPAPTSRPGGRPSPPAPRSRRPSPPSPCPRRPPPRLDLALRCLGRGCVGAPSRIKEAASCLAFAAAPCAITACVINTVAFVCVHCLLVGWSLHILLVLIFL

SEQ ID NO: 10321 - protein, 278 aa, Zea mays subsp. mays
  peptide (1)..(278): Ceres Seq. ID no. 12594987
MPLSPNVVRVATVLNEKGLDFEIVPVDLTTGAHKQPDFLTLNPFGQIPALVDGDEVLFESRAINRYIASKYASGHGPAPRDGVGGEAGGVAGGGVAPLLPERIAAGVPAAREAAPGRRPRRGGGGEARGAARQGARRVRGAPGPQQVPSPGTSSRSPTPTTRPTCSTSARPPRPGSSPPAPTSRPGGRPSPPAPRSRRPSPPSPCPRRPPPRLDLALRCLGRGCVGAPSRIKEAASCLAFAAAPCAITACVINTVAFVCVHCLLVGWSLHILLVLIFL

SEQ ID NO: 10322 - DNA, 1175 bp, Zea mays subsp. mays
  misc_feature (1)..(1175): Ceres Seq. ID no. 12350898
  misc_feature (1)..(1175): Ortholog of  Ceres SEQ ID NO 14314442 as cited in SEQ ID NO 52358
  misc_feature (1)..(1175): Ortholog of  Ceres SEQ ID NO 12610442 as cited in SEQ ID NO 56281
  misc_feature (1)..(1175): Ortholog of  Ceres SEQ ID NO 12610713 as cited in SEQ ID NO 56591
  misc_feature (1)..(1175): Ortholog of  Ceres SEQ ID NO 12587345 as cited in SEQ ID NO 62844
  misc_feature (1)..(1175): Ortholog of  Ceres SEQ ID NO 13597357 as cited in SEQ ID NO 68961
  misc_feature (1)..(1175): Ortholog of  Ceres SEQ ID NO 13587656 as cited in SEQ ID NO 0
  misc_feature (1)..(1175): Ortholog of  Ceres SEQ ID NO 14309353 as cited in SEQ ID NO 0
  misc_feature (1)..(1175): Ortholog of  Ceres SEQ ID NO 15177686 as cited in SEQ ID NO 0
cattcccatcccattccccactctactcattcagcagatcccgtcactcgctctccacaagcagagcaccgcagcagaacgaggaaggatgctggccatcttccagaagcaggtggcgcacgcgccgcaggagctcaacagcccccgcgccggcgcgtcgcccagcaagccccggaaccccgacgagatcctgcgcgacttccacgccgcgcacccggccgccgccttctccgcctccttcggcggcggcgccgcgctcgcctgcgtcggcccctcctcctccgccaccgccaccggcaccgccacctaccagcggatgttctgcggcctggaccacatctactgcgtcttcctgggccgcctcgacaacctcagcggcctcatccgccagtacggcctgtgcggccgctccaccaacgaggcgatgctggtcatcgaggcctaccgcacgctgcgcgaccgcgggccctacccggccgaccaggtcgtcaaggacctcgccggcgccttcgccttcgtcgtcttcgacagccgctccggcgccgtcttcgccgccctcggcgccgccgacgccgggggaacgccggtgccgctgtactggggcgtcgcggccgacgggtccgcggtgatcagcgacgaccgggacctggtcaagcgcggctgcggcaagtcctacgcgcccttccccgcgggctgcatgttccacagcgacggagggctcaagagcttcgagcaccccatgaacaggctcaaggccatgccgcgcgtcgacagcgagggcgccatgtgcggcgccaccttcaaggtcgacaccttcaccaagatcaactccatgccccgtgttggcagcgccgccaactgggccgcctgggacgaagccatctagtagatctagccttgccatgtacactgcgctgcctgcaacccgttcgccggtgcccctgcccctgcccgtggtcttttatcatccttccaaccacgagactttgcttctaaaccagaggctccatctgtgtgccgccttgttttactagaaatctttttttttatcctttttcacttttcctgcctagtttttccccttatcctggcattgtacaaataatttctccagtgcttgtagcttgtggacttgggttgtccaacatgtcatgaatacaaactgagtttgctgc

SEQ ID NO: 10323 - protein, 331 aa, Zea mays subsp. mays
  peptide (1)..(331): Ceres Seq. ID no. 12350899
HSHPIPHSTHSADPVTRSPQAEHRSRTRKDAGHLPEAGGARAAGAQQPPRRRVAQQAPEPRRDPARLPRRAPGRRLLRLLRRRRRARLRRPLLLRHRHRHRHLPADVLRPGPHLLRLPGPPRQPQRPHPPVRPVRPLHQRGDAGHRGLPHAARPRALPGRPGRQGPRRRLRLRRLRQPLRRRLRRPRRRRRRGNAGAAVLGRRGRRVRGDQRRPGPGQARLRQVLRALPRGLHVPQRRRAQELRAPHEQAQGHAARRQRGRHVRRHLQGRHLHQDQLHAPCWQRRQLGRLGRSHLVDLALPCTLRCLQPVRRCPCPCPWSFIILPTTRLCF

SEQ ID NO: 10324 - protein, 294 aa, Zea mays subsp. mays
  peptide (1)..(294): Ceres Seq. ID no. 12350900
IPIPFPTLLIQQIPSLALHKQSTAAERGRMLAIFQKQVAHAPQELNSPRAGASPSKPRNPDEILRDFHAAHPAAAFSASFGGGAALACVGPSSSATATGTATYQRMFCGLDHIYCVFLGRLDNLSGLIRQYGLCGRSTNEAMLVIEAYRTLRDRGPYPADQVVKDLAGAFAFVVFDSRSGAVFAALGAADAGGTPVPLYWGVAADGSAVISDDRDLVKRGCGKSYAPFPAGCMFHSDGGLKSFEHPMNRLKAMPRVDSEGAMCGATFKVDTFTKINSMPRVGSAANWAAWDEAI

SEQ ID NO: 10325 - protein, 265 aa, Zea mays subsp. mays
  peptide (1)..(265): Ceres Seq. ID no. 12350901
MLAIFQKQVAHAPQELNSPRAGASPSKPRNPDEILRDFHAAHPAAAFSASFGGGAALACVGPSSSATATGTATYQRMFCGLDHIYCVFLGRLDNLSGLIRQYGLCGRSTNEAMLVIEAYRTLRDRGPYPADQVVKDLAGAFAFVVFDSRSGAVFAALGAADAGGTPVPLYWGVAADGSAVISDDRDLVKRGCGKSYAPFPAGCMFHSDGGLKSFEHPMNRLKAMPRVDSEGAMCGATFKVDTFTKINSMPRVGSAANWAAWDEAI

SEQ ID NO: 10326 - DNA, 1370 bp, Zea mays subsp. mays
  misc_feature (1)..(1370): Ceres Seq. ID no. 12368499
  misc_feature (1)..(1370): Ortholog of  Ceres SEQ ID NO 15176375 as cited in SEQ ID NO 53238
  misc_feature (1)..(1370): Ortholog of  Ceres SEQ ID NO 15170532 as cited in SEQ ID NO 55671
  misc_feature (1)..(1370): Ortholog of  Ceres SEQ ID NO 14316507 as cited in SEQ ID NO 57397
  misc_feature (1)..(1370): Ortholog of  Ceres SEQ ID NO 13663060 as cited in SEQ ID NO 60964
  misc_feature (1)..(1370): Ortholog of  Ceres SEQ ID NO 13598532 as cited in SEQ ID NO 65204
  misc_feature (1)..(1370): Ortholog of  Ceres SEQ ID NO 13656849 as cited in SEQ ID NO 65764
  misc_feature (1)..(1370): Ortholog of  Ceres SEQ ID NO 13656501 as cited in SEQ ID NO 69206
aaattcaaaatcaacccccctcgtcgcaaggccacaaccactccactcctccccatccctagctagccactagggtttgccagcctttgcagcgtcgcgctcgcgcctcatcccctcgcccatcgacggtagacgagagcgagcggtctgtgttcgtggagcaggggccggcgccatggagatcaacatcgtggaacaagtacgagaagctggagaaggtcggggagggcacctacggcaaggtgtacaaggcgcaggacaaggcgacggggcagctggtggcgctgaagaagacccgcctcgagatggacgaggagggcatcccgcccacggcgctccgcgagatctccctcctcaacctcctctcccactccatctacatcgtccgcctcctcgccgtcgagcaggccgctaagaacggcaagcccgtcctctacctcgtcttcgagttcctcgacaccgatctcaagaagtacctcgacgtctaccgcagggggcccagcgccaggccgctccccgcgacactcatcaagaatttcctgtatcagttatgcaaaggagttgcacactgccatagccatggtgtccttcaccgggatttaaagccacaaaacctgctggtggacaaggagaagggtatactgaagattgctgatctgggactcggtagggctttcactgtgcccatgaaaagctacacccatgagattgtgaccctttggtacagagctcctgaagttttgcttggagcaacacattactcaactggcgttgatatgtggtctgttggatgcatctttgctgaaatggcccgacggcaggctctctttcctggtgactcggagttgcaacagttgcttcacatcttcaggttgctgggaacacctactgaggaacagtggcctggagtgagtgatttaagggactggcatgagtttccacagtggaagccccagggtttggcacgtgtcgtcccaacactggaacctgaaggagttgaccttctatcgaaaatgcttcagcttgatccttcaaacaggatatcagctttagctgcgatggagcatccctactttaacagccttgacaagtcccagttctagccgttgtactatgtggttcagaaggcgctaccctcgtacagagagatttccaatggtgttatgaatctcaattgccatctaggcaactggttcatgattttaccaatctgttagtgagtgaaaatcgtgcgagggtcatatgtgttccccttgtcttaaaaatctggtgtggtgtagaacaagagttacctgtgggaggcctgtgataatgccctttatgtctcaacatccattttcgtgcattccatgttcttcaatacggactcg

SEQ ID NO: 10327 - protein, 265 aa, Zea mays subsp. mays
  peptide (1)..(265): Ceres Seq. ID no. 12368500
MDEEGIPPTALREISLLNLLSHSIYIVRLLAVEQAAKNGKPVLYLVFEFLDTDLKKYLDVYRRGPSARPLPATLIKNFLYQLCKGVAHCHSHGVLHRDLKPQNLLVDKEKGILKIADLGLGRAFTVPMKSYTHEIVTLWYRAPEVLLGATHYSTGVDMWSVGCIFAEMARRQALFPGDSELQQLLHIFRLLGTPTEEQWPGVSDLRDWHEFPQWKPQGLARVVPTLEPEGVDLLSKMLQLDPSNRISALAAMEHPYFNSLDKSQF

SEQ ID NO: 10328 - protein, 138 aa, Zea mays subsp. mays
  peptide (1)..(138): Ceres Seq. ID no. 12368501
MKSYTHEIVTLWYRAPEVLLGATHYSTGVDMWSVGCIFAEMARRQALFPGDSELQQLLHIFRLLGTPTEEQWPGVSDLRDWHEFPQWKPQGLARVVPTLEPEGVDLLSKMLQLDPSNRISALAAMEHPYFNSLDKSQF

SEQ ID NO: 10329 - DNA, 844 bp, Zea mays subsp. mays
  misc_feature (1)..(844): Ceres Seq. ID no. 12400449
  misc_feature (1)..(844): Ortholog of  Ceres SEQ ID NO 13598732 as cited in SEQ ID NO 60666
atccgttccaagtatctcccctcttgcgcctcctctcgactcttccgtttagtgcccaccgaaatctttctaccacccacgttccggcatccatggctcgtctgttcgcggcgcgagcccttacgctggcccgcccctcggcggcgccatccgccctccgcttctgcccctcccgcgcgctgtcggacaaggtggacttcatcgagatcgacctctccgaggagtccccttcctcttcatccggaggaggaggcgcgggcgaccccgccacggttcaggcgcagatggggtcgcggcgcctggaggacgccatccatggggtgctcgtgcggcgggcggcgcctgaatggctccccttcgtgccgggggcatcctactgggtcccgccgtttccgcgggcgctcggggtggcggagcttctcagctcggctatgcacatcacgaggggcgccgaggcgatgacggaggaggaggcattgagcttcactaccgtgcgggggtggccatccgcggcgtactttgtggcaggctcctactgaagaggcagctggggacagtgaaggtcttctgatgggttgtagttataacttatagtaatagacagctagggagcccctgcaacaatggatcccctcaagctgtcaagcatcttcggatggtgtgctcacagctggtaaaatgacactggttcaatcttatgtatttgcagaacccggtgcgctagcacctggacatggtgggtgtatggtccacggaacccagccgtggcgcataatgtaatagagtttgtagtttgtactttgtaccatattttccctcttgaataaaggcatgtgttacgctg

SEQ ID NO: 10330 - protein, 178 aa, Zea mays subsp. mays
  peptide (1)..(178): Ceres Seq. ID no. 12400450
PFQVSPLLRLLSTLPFSAHRNLSTTHVPASMARLFAARALTLARPSAAPSALRFCPSRALSDKVDFIEIDLSEESPSSSSGGGGAGDPATVQAQMGSRRLEDAIHGVLVRRAAPEWLPFVPGASYWVPPFPRALGVAELLSSAMHITRGAEAMTEEEALSFTTVRGWPSAAYFVAGSY

SEQ ID NO: 10331 - protein, 153 aa, Zea mays subsp. mays
  peptide (1)..(153): Ceres Seq. ID no. 12400451
IRSKYLPSCASSRLFRLVPTEIFLPPTFRHPWLVCSRREPLRWPAPRRRHPPSASAPPARCRTRWTSSRSTSPRSPLPLHPEEEARATPPRFRRRWGRGAWRTPSMGCSCGGRRLNGSPSCRGHPTGSRRFRGRSGWRSFSARLCTSRGAPRR

SEQ ID NO: 10332 - protein, 148 aa, Zea mays subsp. mays
  peptide (1)..(148): Ceres Seq. ID no. 12400452
MARLFAARALTLARPSAAPSALRFCPSRALSDKVDFIEIDLSEESPSSSSGGGGAGDPATVQAQMGSRRLEDAIHGVLVRRAAPEWLPFVPGASYWVPPFPRALGVAELLSSAMHITRGAEAMTEEEALSFTTVRGWPSAAYFVAGSY

SEQ ID NO: 10333 - DNA, 866 bp, Zea mays subsp. mays
  misc_feature (1)..(866): Ceres Seq. ID no. 12342039
  misc_feature (1)..(866): Ortholog of  Ceres SEQ ID NO 15177027 as cited in SEQ ID NO 58171
agttcgactcagctccgccgcgcgtgtcagccgatggaagagctgcgggccgccgtgacggcgcacttggaccaggtagcgggcctcgtgcaggcgctctcctccgagctccgccgcggcataggtcccgccgccgacaacctgcgcgccttcatccgcgccgttgactggacggagccatggctcatgtgcttgatggcattccatgtggttctgctgctcactgctgtagggttcaggaggaatgccaatttccagctattcttgttatttcttgcttattcaggagtgtatctagctgaaaagatgaacagatacctgggagagaactggaagagctttaccagtaggaattattttgatcgttctggagtttttatctctgtcgtctggtctgggccccttattgtcatatcgattgtcagtgtgattagcagcctcattgcattatgtcgattgatggtgaaatggaaaagagcagaacttaggcaccgggctcgacttgctcatgacaagaaggattgagagaagagaaaaaaatccttattatgggagaatcgaatgatttagtgattttgaacttttctaagtttgtatgccgcttgtcaacagggcactcaagaattaagtgttggaaatcctggataagcgaggagtgtctacagctattgttcctgctggtcactgtaggacagtagcagctagacatacttcataaaaaaatagatatggtacctgtctctatcttgttttagattgtagatgtaaacatggatgtaatcttgattgaaactgccaagatttgtagaacaaagcctcactgtttcgtttcccatcacaaatatgaaatatgagacgcggaagtg

SEQ ID NO: 10334 - protein, 174 aa, Zea mays subsp. mays
  peptide (1)..(174): Ceres Seq. ID no. 12342040
SSTQLRRACQPMEELRAAVTAHLDQVAGLVQALSSELRRGIGPAADNLRAFIRAVDWTEPWLMCLMAFHVVLLLTAVGFRRNANFQLFLLFLAYSGVYLAEKMNRYLGENWKSFTSRNYFDRSGVFISVVWSGPLIVISIVSVISSLIALCRLMVKWKRAELRHRARLAHDKKD

SEQ ID NO: 10335 - protein, 163 aa, Zea mays subsp. mays
  peptide (1)..(163): Ceres Seq. ID no. 12342041
MEELRAAVTAHLDQVAGLVQALSSELRRGIGPAADNLRAFIRAVDWTEPWLMCLMAFHVVLLLTAVGFRRNANFQLFLLFLAYSGVYLAEKMNRYLGENWKSFTSRNYFDRSGVFISVVWSGPLIVISIVSVISSLIALCRLMVKWKRAELRHRARLAHDKKD

SEQ ID NO: 10336 - protein, 112 aa, Zea mays subsp. mays
  peptide (1)..(112): Ceres Seq. ID no. 12342042
MCLMAFHVVLLLTAVGFRRNANFQLFLLFLAYSGVYLAEKMNRYLGENWKSFTSRNYFDRSGVFISVVWSGPLIVISIVSVISSLIALCRLMVKWKRAELRHRARLAHDKKD

SEQ ID NO: 10337 - DNA, 921 bp, Zea mays subsp. mays
  misc_feature (1)..(921): Ceres Seq. ID no. 12367023
  misc_feature (1)..(921): Ortholog of  Ceres SEQ ID NO 12611293 as cited in SEQ ID NO 56191
  misc_feature (1)..(921): Ortholog of  Ceres SEQ ID NO 12583682 as cited in SEQ ID NO 56297
  misc_feature (1)..(921): Ortholog of  Ceres SEQ ID NO 15179225 as cited in SEQ ID NO 0
aagctcgcactcactcacacccgcagcgaaggagggagcttgcacgggccaacgcacacacaacacaagctcgtcgtcgatggcgcggtgggctgcggtgctggcgctggccgcggccacggccatcgccgtggcgtccgtggcgggcggcgacatgaacgcggacaagacggagtgcgcggaccagctggtgggcctggcgccgtgcctgcagtacgtgcaggggcaggcccgcgcgccgccgcccgactgctgcggcggcctgcgccaggtgctggggaagagccccaagtgcctgtgcgtgctcgtcaaggacaaggacgaccccaacctgggcatcaagatcaacgccaccctcgcgctcgcgctccccaacgcctgcggcgccacccgcgccaacgtctcccactgcgctcagctcctgcatattcccccgggctccaaagacgccgccgtcttcagtcccggcagcgacaagggctccactgccgctccagccaaggacaactcgacggcgacgaccaactcccgcgcgctgcaggcgaccaccggacgcggcgtctcctcctcggcggcgaccgccggtgctgcactcgcggtgctgctcgccggctacctcctcctgctcgtgccagagctgtcgcctagctcgttctagaccctctgtcaagttgtgccaccagtaggatttgatgtgttgttgttctttctagtacgtgacgtgacagacaatttgctgctggtgtccttgttgttgtagtagttgcactgtgtgttcctgttatgctatgggtacgagatgttagggcatgggttaagctaagctaaggcgatggggtatcagcagtaccttacctctcatctggctgctgatcctttttgttcttggcactgctgttttatctgaacatttgatcagcc

SEQ ID NO: 10338 - protein, 218 aa, Zea mays subsp. mays
  peptide (1)..(218): Ceres Seq. ID no. 12367024
SSHSLTPAAKEGACTGQRTHNTSSSSMARWAAVLALAAATAIAVASVAGGDMNADKTECADQLVGLAPCLQYVQGQARAPPPDCCGGLRQVLGKSPKCLCVLVKDKDDPNLGIKINATLALALPNACGATRANVSHCAQLLHIPPGSKDAAVFSPGSDKGSTAAPAKDNSTATTNSRALQATTGRGVSSSAATAGAALAVLLAGYLLLLVPELSPSSF

SEQ ID NO: 10339 - protein, 215 aa, Zea mays subsp. mays
  peptide (1)..(215): Ceres Seq. ID no. 12367025
KLALTHTRSEGGSLHGPTHTQHKLVVDGAVGCGAGAGRGHGHRRGVRGGRRHERGQDGVRGPAGGPGAVPAVRAGAGPRAAARLLRRPAPGAGEEPQVPVRARQGQGRPQPGHQDQRHPRARAPQRLRRHPRQRLPLRSAPAYSPGLQRRRRLQSRQRQGLHCRSSQGQLDGDDQLPRAAGDHRTRRLLLGGDRRCCTRGAARRLPPPARARAVA

SEQ ID NO: 10340 - protein, 192 aa, Zea mays subsp. mays
  peptide (1)..(192): Ceres Seq. ID no. 12367026
MARWAAVLALAAATAIAVASVAGGDMNADKTECADQLVGLAPCLQYVQGQARAPPPDCCGGLRQVLGKSPKCLCVLVKDKDDPNLGIKINATLALALPNACGATRANVSHCAQLLHIPPGSKDAAVFSPGSDKGSTAAPAKDNSTATTNSRALQATTGRGVSSSAATAGAALAVLLAGYLLLLVPELSPSSF

SEQ ID NO: 10341 - DNA, 927 bp, Zea mays subsp. mays
  misc_feature (1)..(927): Ceres Seq. ID no. 12347657
  misc_feature (1)..(927): Ortholog of  Ceres SEQ ID NO 13599586 as cited in SEQ ID NO 0
aatttttccacggagccttccggataggatttgtctcccctccactgcgcctctccgtttccgccatggctccggccgccgccttcctgtcggcgtgcgccgctggttccattccccgtgcgcccttcctgatcccgaggcctcttcttctcccaattccgctctcccctgcgcgctgggaccgctcccgcagctgcagcctctttggcgtaggcgccaacactcgccgcgcgccaacccttcgacggaacgcctccacggagacggtggttccctacgtgccgggctctggcaagtacatagcgccggactacctcgtgaagaaggtgtcagccgaggaggtgcaggagctggtgagggggcagaggaaggtgccgctcatcgttgacttctacgcgacctggtgcgggccctgtgttcagatggcgcaggacatcgagatgcttgcagttgagtatgaggacaatgccctgtttgtgaaggtggacacagatgatgaatatgaatttgcaaaagacatgcaggtaagagggcttccgaccctttacttcttcagtccagaccaaaacaaagatgccatacgcaccgaggggctaattcctatggatatgatcagaaacatcattgacaacgagttatgacagctgatagatcactgtattaggaacataggcaatgttttatctttgtagcagaaaattttttgtcatgaggctaagcattaccgctaggtgctagtttgtgtgcttgatgttttcttttgctccaatggtaggtttcatctgtgcaaatccattctgctgtttctgtatcgtgttgtttattctcatcaaactctaggttgtgtcgtgctgttgtcggttaggcctgtgtgaccattttcatccctcgaatgataagatggctttggctcagattggtcctcac

SEQ ID NO: 10342 - protein, 212 aa, Zea mays subsp. mays
  peptide (1)..(212): Ceres Seq. ID no. 12347658
FFHGAFRIGFVSPPLRLSVSAMAPAAAFLSACAAGSIPRAPFLIPRPLLLPIPLSPARWDRSRSCSLFGVGANTRRAPTLRRNASTETVVPYVPGSGKYIAPDYLVKKVSAEEVQELVRGQRKVPLIVDFYATWCGPCVQMAQDIEMLAVEYEDNALFVKVDTDDEYEFAKDMQVRGLPTLYFFSPDQNKDAIRTEGLIPMDMIRNIIDNEL

SEQ ID NO: 10343 - protein, 191 aa, Zea mays subsp. mays
  peptide (1)..(191): Ceres Seq. ID no. 12347659
MAPAAAFLSACAAGSIPRAPFLIPRPLLLPIPLSPARWDRSRSCSLFGVGANTRRAPTLRRNASTETVVPYVPGSGKYIAPDYLVKKVSAEEVQELVRGQRKVPLIVDFYATWCGPCVQMAQDIEMLAVEYEDNALFVKVDTDDEYEFAKDMQVRGLPTLYFFSPDQNKDAIRTEGLIPMDMIRNIIDNEL

SEQ ID NO: 10344 - protein, 128 aa, Zea mays subsp. mays
  peptide (1)..(128): Ceres Seq. ID no. 12347660
IFPRSLPDRICLPSTAPLRFRHGSGRRLPVGVRRWFHSPCALPDPEASSSPNSALPCALGPLPQLQPLWRRRQHSPRANPSTERLHGDGGSLRAGLWQVHSAGLPREEGVSRGGAGAGEGAEEGAAHR

SEQ ID NO: 10345 - DNA, 899 bp, Zea mays subsp. mays
  misc_feature (1)..(899): Ceres Seq. ID no. 12351016
  misc_feature (1)..(899): Ortholog of  Ceres SEQ ID NO 13583898 as cited in SEQ ID NO 63147
aaaaaaatcaaaaacaaaagaagcaaacctcgtcgtcacgccatccctctccacctctcgtcttccagacgcctccaatctgggctcccagcggccagcgtctcggaaaagaggagcagcacggcacggcggcgatggcgaggaacgctccaataatatgctaacccgttctacccagtccaattagcagcctcccaaggagaaggagatccaatcctgcgggcgggcgtcccccgtatcccatccatcgatccgaatctcggaatctgcaggaccctgcggcgcggcttcttcgtggagaagaggttgctgccgaagccaccgccaggtagccatgtcgtcctccgtgctgagggctgcggccgacagggccattcgcaggcaggccctcacgctgacgaacgccgcggcgtccaggatccggcagctactcagcctaaggcaacggccatacctgcggctgggtgtcaaagcgcgaggttgcaacggcctctcctacaccctcaactatgccgatgaaaaggggaagttcgatgagcttgtcgaggagaaaggagttaaagtactgatcgaccccaaggctttgatgcatgttataggcaccaagatggactatgttgatgatccattaaagtccgagtttgtgttcataaacccaaattccaaagggcagtgtggctgcggtgagtctttcatgactacaggcagcaaagggtcgacgtcatgaggcgtttttcagtgtaaatgcttagccaagtgtctgcaggctccagggtacagattttcttgtgtctgttgcgtcgcagttcattcatatataataacacagcagtgggtttgtactggatatgcaactaactcgcatttacttgtaatgtaagttcacctcaaatgttgtt

SEQ ID NO: 10346 - protein, 130 aa, Zea mays subsp. mays
  peptide (1)..(130): Ceres Seq. ID no. 12351017
MSSSVLRAAADRAIRRQALTLTNAAASRIRQLLSLRQRPYLRLGVKARGCNGLSYTLNYADEKGKFDELVEEKGVKVLIDPKALMHVIGTKMDYVDDPLKSEFVFINPNSKGQCGCGESFMTTGSKGSTS

SEQ ID NO: 10347 - DNA, 975 bp, Zea mays subsp. mays
  misc_feature (1)..(975): Ceres Seq. ID no. 12367081
  misc_feature (1)..(975): Ortholog of  Ceres SEQ ID NO 14304132 as cited in SEQ ID NO 56475
  misc_feature (1)..(975): Ortholog of  Ceres SEQ ID NO 13664228 as cited in SEQ ID NO 61166
  misc_feature (1)..(975): Ortholog of  Ceres SEQ ID NO 15179439 as cited in SEQ ID NO 0
attcccagccaatcgcctctcgcttttaaatcctgcgccctaccgccgcctccactcccaccgctctcaatcctcccgcctcttcctaatccgcctcctcccgctcagtcgccgccgtggaggaaggagcaactcgatcgccagtcatgacccggggagagaaccaggagtcgcagaccgggaacgtctccgccgcatctgcggctgcgccgggaccgaagccggcatcggcgggggccgggaagggcgcggagggccagtcggtggtgcggcggctgcagtcggagctgatggcgctgatgatgggcggcgacccgggcgtgtcggcgttccccgagggggacaacatgctccactgggtgggcaccatcgcgggatccgccgggacggcctacgagggcacctcctaccgcctcgcgctggccttcaccgccgagtacccgtacaagccgcccaaggtgcggttcgacaccccctgcttccaccccaacgtcgacgtgcacggcaacatctgcctggacatcctccaggacaagtggtcctccgcctacgacgtgcgcaccatcctcctctccatccagagcctgctcggagagccgaacaacgactcgccgctcaacacgcaggcggcggcgctttgggcgaaccaggaagagttcaggaagatggtggagaagctctacaaggccgccgcgtagaggacagcacacggcgcagatgccgactcaggttcttcaagcaccgatctcacttggatcgattgacgtggatggttttgttgggttgggttcccagtctggtgctgtagcggtgtagcaggaacgcgtgggtagccttgagcctggcgattctgtaattgtcctttgagttctgaaatgttaagagattcatttttacatgactttttgttttttcatttttacactctggatatggacgggactagttgaatttaggaagatcgtatgatctcgc

SEQ ID NO: 10348 - protein, 268 aa, Zea mays subsp. mays
  peptide (1)..(268): Ceres Seq. ID no. 12367082
FPANRLSLLNPAPYRRLHSHRSQSSRLFLIRLLPLSRRRGGRSNSIASHDPGREPGVADRERLRRICGCAGTEAGIGGGREGRGGPVGGAAAAVGADGADDGRRPGRVGVPRGGQHAPLGGHHRGIRRDGLRGHLLPPRAGLHRRVPVQAAQGAVRHPLLPPQRRRARQHLPGHPPGQVVLRLRRAHHPPLHPEPARRAEQRLAAQHAGGGALGEPGRVQEDGGEALQGRRVEDSTRRRCRLRFFKHRSHLDRLTWMVLLGWVPSLVL

SEQ ID NO: 10349 - protein, 183 aa, Zea mays subsp. mays
  peptide (1)..(183): Ceres Seq. ID no. 12367083
MTRGENQESQTGNVSAASAAAPGPKPASAGAGKGAEGQSVVRRLQSELMALMMGGDPGVSAFPEGDNMLHWVGTIAGSAGTAYEGTSYRLALAFTAEYPYKPPKVRFDTPCFHPNVDVHGNICLDILQDKWSSAYDVRTILLSIQSLLGEPNNDSPLNTQAAALWANQEEFRKMVEKLYKAAA

SEQ ID NO: 10350 - protein, 135 aa, Zea mays subsp. mays
  peptide (1)..(135): Ceres Seq. ID no. 12367084
MALMMGGDPGVSAFPEGDNMLHWVGTIAGSAGTAYEGTSYRLALAFTAEYPYKPPKVRFDTPCFHPNVDVHGNICLDILQDKWSSAYDVRTILLSIQSLLGEPNNDSPLNTQAAALWANQEEFRKMVEKLYKAAA

SEQ ID NO: 10351 - DNA, 587 bp, Zea mays subsp. mays
  misc_feature (1)..(587): Ceres Seq. ID no. 12400564
  misc_feature (1)..(587): Ortholog of  Ceres SEQ ID NO 13586586 as cited in SEQ ID NO 0
gactgattcttctccttacctgcttctcccggtgtggatctcggctctcgacgagtttcagaggggttgttcgtaacatctgctaagatccgtggcggctgtttaggtgctggatccgtagcggcggcggcggccatggacaagagcatgctcggcgacctggacggcctccccgaggaggacaagatgcggatggccgccatgatcgaccagctccagatccgcgacagcctgagaatgtacaattcgctggtggagaggtgcttcacggactgcgtggacacgttccggcggaagaacctggacaagcaagaggagtcgtgcgtccgccggtgcgcggagaagttcctgaagcactccatgagggtcggcatgaggttcgccgagcttaaccagggtgtggccacgccggactaagaaacacgctgccgctggctggctgctctcgttgcgcgcccgccgccaggtttctggctttcgctggcacagatttgtagccgacaaaaggatttcagcacttcccctgcctgagatatatgcgttttagagccgaacgctgggtgtcagattgaataaaaactgccttg

SEQ ID NO: 10352 - protein, 93 aa, Zea mays subsp. mays
  peptide (1)..(93): Ceres Seq. ID no. 12400565
MDKSMLGDLDGLPEEDKMRMAAMIDQLQIRDSLRMYNSLVERCFTDCVDTFRRKNLDKQEESCVRRCAEKFLKHSMRVGMRFAELNQGVATPD

SEQ ID NO: 10353 - protein, 89 aa, Zea mays subsp. mays
  peptide (1)..(89): Ceres Seq. ID no. 12400566
MLGDLDGLPEEDKMRMAAMIDQLQIRDSLRMYNSLVERCFTDCVDTFRRKNLDKQEESCVRRCAEKFLKHSMRVGMRFAELNQGVATPD

SEQ ID NO: 10354 - protein, 76 aa, Zea mays subsp. mays
  peptide (1)..(76): Ceres Seq. ID no. 12400567
MRMAAMIDQLQIRDSLRMYNSLVERCFTDCVDTFRRKNLDKQEESCVRRCAEKFLKHSMRVGMRFAELNQGVATPD

SEQ ID NO: 10355 - DNA, 932 bp, Zea mays subsp. mays; identical to SEQ ID NO: 3229
  misc_feature (1)..(932): Ceres Seq. ID no. 12400274
  misc_feature (1)..(932): Ortholog of  Ceres SEQ ID NO 15170745 as cited in SEQ ID NO 52595

SEQ ID NO: 10356 - protein, 151 aa, Zea mays subsp. mays; identical to SEQ ID NO: 3230
  peptide (1)..(151): Ceres Seq. ID no. 12400275

SEQ ID NO: 10357 - protein, 121 aa, Zea mays subsp. mays; identical to SEQ ID NO: 3231
  peptide (1)..(121): Ceres Seq. ID no. 12400276

SEQ ID NO: 10358 - protein, 88 aa, Zea mays subsp. mays; identical to SEQ ID NO: 3232
  peptide (1)..(88): Ceres Seq. ID no. 12400277

SEQ ID NO: 10359 - DNA, 857 bp, Zea mays subsp. mays
  misc_feature (1)..(857): Ceres Seq. ID no. 12400410
  misc_feature (1)..(857): Ortholog of  Ceres SEQ ID NO 15169960 as cited in SEQ ID NO 57591
aaactcatcccaaaccagagcgaagaagaatcgccatcacagcaagctacgcgcactgaaatcctccaatccacaggacacagctctacttccacagttcgcagactcgcacgcaccgagcggctagcgatcaacgagaaatgtcgctggtgaggcgcagcagcgtgttcgacccattctctgtggacctcttcgaccccttcgacagcatgttccgctccatcgtgccgccgtcgttgtcgtcgtcggcggcctccgagaccgccgccttcgccagcgcccgcatcgactggaaggagacgcccgaggcgcacgtgttcaaggccgacctccccggcgtgaagaaggaggaggtcaaggtggaggtggaggacggcaacgtgctgctcatcagcgggcagcgcagcagggagaaggaggacaagggcgacaagtggcaccgcgtggagcgcagcagcggccagttcgtgcggcgcttccgcctgccggagaacgccaagacggaggaggtgaggggccgcgctggagaacggcgtgctcacggtcaccgtgcccaaggccgaggtcaagaagcccgaggttaagagcatccagatctccgtctgaagaagacatggacgcgaggtgaatggtcgcgtcgcgttcgcgtcgcggcgtcgggtcttgggtttcagcgacgcgactcgtgtgtgtggtactgtggttgctctgctttggtatgtctggtgtgtacgtgtgctgttcagtgtttcgtggtcatcgtctgtacattgtgctgttcggtgagctccccgactcagtgtgttgtgttctgcgagtgaataaataaaaacaaaccagctgtcgtctcgtgtcgt

SEQ ID NO: 10360 - protein, 147 aa, Zea mays subsp. mays
  peptide (1)..(147): Ceres Seq. ID no. 12400411
MSLVRRSSVFDPFSVDLFDPFDSMFRSIVPPSLSSSAASETAAFASARIDWKETPEAHVFKADLPGVKKEEVKVEVEDGNVLLISGQRSREKEDKGDKWHRVERSSGQFVRRFRLPENAKTEEVRGRAGERRAHGHRAQGRGQEARG

SEQ ID NO: 10361 - protein, 124 aa, Zea mays subsp. mays
  peptide (1)..(124): Ceres Seq. ID no. 12400412
MFRSIVPPSLSSSAASETAAFASARIDWKETPEAHVFKADLPGVKKEEVKVEVEDGNVLLISGQRSREKEDKGDKWHRVERSSGQFVRRFRLPENAKTEEVRGRAGERRAHGHRAQGRGQEARG

SEQ ID NO: 10362 - DNA, 861 bp, Zea mays subsp. mays
  misc_feature (1)..(861): Ceres Seq. ID no. 12342053
  misc_feature (1)..(861): Ortholog of  Ceres SEQ ID NO 15225398 as cited in SEQ ID NO 67001
  misc_feature (1)..(861): Ortholog of  Ceres SEQ ID NO 12635509 as cited in SEQ ID NO 0
aacgaagagagggaaaacaagtgtggaagagggaaaactggaaaaggcacagcaaaccgagaaaatggcggctcggcgtgggcgagagtgggacggggacgagcagggcgcggcgctgccaacgccggcgcccctcggcgcgccggtcgtctgccttctcagctccgccggagacctagccgccggcgccttcgtaggctccctcgtcggatacggaaaaggtttgatcacaaaccaaggcacgaaggcttgtcttagcattgctggatcttctgcaaagacatttgctgctcttgctggtgtccaaagtttcatcatgtgcttgctaagaagactgcgtgggaaagatgacatgatcaatgcgggtatggcaggttgttgcacaggcattgctttgagctttccaggtgcgccccaggcaatgttccacagctgtgtcaccttcgcagcattctcatgcataatggacggtctcagcaagcagcaggcagcaatggcactcacacttgatgtgaaatctccaactgtcaagtatgaggagggccgggtcatcccaccattcactcttccgccgcttctggatgcattggatcctctaggttcattctgccagacccttatcaagcctaagcattaggagtgcgctgaggcttgttaccccaaaaaggcagtttcgatctatagtttggcactgtatgctctataaccgttctgaatttgtctccagtcatgctgttcaagtttggtaactgtagtggcgctataggacatatgcccattttttgtcaatggtacattttttatgaaacttgctgaagagattataaccataagattgttcattggtgaagatttgatagt

SEQ ID NO: 10363 - protein, 211 aa, Zea mays subsp. mays
  peptide (1)..(211): Ceres Seq. ID no. 12342054
TKRGKTSVEEGKLEKAQQTEKMAARRGREWDGDEQGAALPTPAPLGAPVVCLLSSAGDLAAGAFVGSLVGYGKGLITNQGTKACLSIAGSSAKTFAALAGVQSFIMCLLRRLRGKDDMINAGMAGCCTGIALSFPGAPQAMFHSCVTFAAFSCIMDGLSKQQAAMALTLDVKSPTVKYEEGRVIPPFTLPPLLDALDPLGSFCQTLIKPKH

SEQ ID NO: 10364 - protein, 190 aa, Zea mays subsp. mays
  peptide (1)..(190): Ceres Seq. ID no. 12342055
MAARRGREWDGDEQGAALPTPAPLGAPVVCLLSSAGDLAAGAFVGSLVGYGKGLITNQGTKACLSIAGSSAKTFAALAGVQSFIMCLLRRLRGKDDMINAGMAGCCTGIALSFPGAPQAMFHSCVTFAAFSCIMDGLSKQQAAMALTLDVKSPTVKYEEGRVIPPFTLPPLLDALDPLGSFCQTLIKPKH

SEQ ID NO: 10365 - protein, 106 aa, Zea mays subsp. mays
  peptide (1)..(106): Ceres Seq. ID no. 12342056
MCLLRRLRGKDDMINAGMAGCCTGIALSFPGAPQAMFHSCVTFAAFSCIMDGLSKQQAAMALTLDVKSPTVKYEEGRVIPPFTLPPLLDALDPLGSFCQTLIKPKH

SEQ ID NO: 10366 - DNA, 552 bp, Zea mays subsp. mays
  misc_feature (1)..(552): Ceres Seq. ID no. 12361769
  misc_feature (1)..(552): Ortholog of  Ceres SEQ ID NO 14305533 as cited in SEQ ID NO 418
aagtttcaggcagagatggagcggatgggccgtgccggcacaccgcgcttcgcttggtccctcagcaacgtcccagacctgggccagcgccgcgctcaccgacacctccacctgcctcgactccctcgcccagcagtcccgcggtggcaaggacagcgacgacgccgtcagggtgaagaggagggtggtggccgtcgcgcaggccaccagcaacgcgctcgggctcgtcaacaggctccagccggcgccgcaccggcggcgtctcctgtgactcttgtagcagcagctagccacggaaatctttgatggttcctcgttctcatccatgtcgacatcatccgtcccctgcatctccttctccaattgccatgtatgcgtgtatgtatgggtatggtatgcgtgtatgtatggactacggatcgatcagctttctcgattgcgtggttgtcgttgtctatctgtagtaactctgcagctgggatcactcaattcccgctagtggttgttcaggattatgctcaagtttatgcgtagtaaatagcaaaatctttg

SEQ ID NO: 10367 - protein, 101 aa, Zea mays subsp. mays
  peptide (1)..(101): Ceres Seq. ID no. 12361770
KFQAEMERMGRAGTPRFAWSLSNVPDLGQRRAHRHLHLPRLPRPAVPRWQGQRRRRQGEEEGGGRRAGHQQRARARQQAPAGAAPAASPVTLVAAASHGNL

SEQ ID NO: 10368 - protein, 96 aa, Zea mays subsp. mays
  peptide (1)..(96): Ceres Seq. ID no. 12361771
MERMGRAGTPRFAWSLSNVPDLGQRRAHRHLHLPRLPRPAVPRWQGQRRRRQGEEEGGGRRAGHQQRARARQQAPAGAAPAASPVTLVAAASHGNL

SEQ ID NO: 10369 - protein, 93 aa, Zea mays subsp. mays
  peptide (1)..(93): Ceres Seq. ID no. 12361772
MGRAGTPRFAWSLSNVPDLGQRRAHRHLHLPRLPRPAVPRWQGQRRRRQGEEEGGGRRAGHQQRARARQQAPAGAAPAASPVTLVAAASHGNL

SEQ ID NO: 10370 - protein, 89 aa, Zea mays subsp. mays
  peptide (1)..(89): Ceres Seq. ID no. 12361773
SFRQRWSGWAVPAHRASLGPSATSQTWASAALTDTSTCLDSLAQQSRGGKDSDDAVRVKRRVVAVAQATSNALGLVNRLQPAPHRRRLL

SEQ ID NO: 10371 - DNA, 726 bp, Zea mays subsp. mays
  misc_feature (1)..(726): Ceres Seq. ID no. 12343292
  misc_feature (1)..(726): Ortholog of  Ceres SEQ ID NO 14308061 as cited in SEQ ID NO 55155
  misc_feature (1)..(726): Ortholog of  Ceres SEQ ID NO 13654238 as cited in SEQ ID NO 67874
acactttcaaggatttgctaaccaaacatgaagatgccgtctctgaatttctgagctcacattatgagcagttttttggactctacacaaaacttttatcttcaactaattatgtgacacgaagacaatcagtgaagtttctttcagagtttctgttggaggccccaaatgctcaaataatgaagcgttacattttggaagttcattacttaaacattatgatgggcctgctaaaggattcaagcaaaaatatcaggatatgtgccttccacatttttaaggtatttgttgccaatccaaacaagcctcgtgagattattcaggttttggttgagaatcacagagaagtgttgaagctactccacaatctccccacaagcaaaggtgaagatgaacagcttgatgaggagagagatttaattatcaaagaaatcgagaagcttgtgcggttgtcagtataaaccctcaggaaattcgaacgtatccttgaatacatactgtgcaatatgctgccttgtatagagcttgtttttcatgtatggaaaaaaaagtttggccacaaattgcatttttcgcgagaacacttagcatttctgtcagaaaattattgtcgtgtagcagaatttgcaacaggaataatctgcattatggtgtggtgttgataccattaaggattggtgaaagtgcctgccatttgaaatgggtacgcttgtcatgtttgtttcg

SEQ ID NO: 10372 - protein, 152 aa, Zea mays subsp. mays
  peptide (1)..(152): Ceres Seq. ID no. 12343293
TFKDLLTKHEDAVSEFLSSHYEQFFGLYTKLLSSTNYVTRRQSVKFLSEFLLEAPNAQIMKRYILEVHYLNIMMGLLKDSSKNIRICAFHIFKVFVANPNKPREIIQVLVENHREVLKLLHNLPTSKGEDEQLDEERDLIIKEIEKLVRLSV

SEQ ID NO: 10373 - protein, 93 aa, Zea mays subsp. mays
  peptide (1)..(93): Ceres Seq. ID no. 12343294
MKRYILEVHYLNIMMGLLKDSSKNIRICAFHIFKVFVANPNKPREIIQVLVENHREVLKLLHNLPTSKGEDEQLDEERDLIIKEIEKLVRLSV

SEQ ID NO: 10374 - protein, 80 aa, Zea mays subsp. mays
  peptide (1)..(80): Ceres Seq. ID no. 12343295
MMGLLKDSSKNIRICAFHIFKVFVANPNKPREIIQVLVENHREVLKLLHNLPTSKGEDEQLDEERDLIIKEIEKLVRLSV

SEQ ID NO: 10375 - DNA, 726 bp, Zea mays subsp. mays
  misc_feature (1)..(726): Ceres Seq. ID no. 12400560
  misc_feature (1)..(726): Ortholog of  Ceres SEQ ID NO 13583505 as cited in SEQ ID NO 62240
ctcggccctctcctcggcgacgccactactcctgcctcacgccgccagctcaaaccgcagaagagagaagagaagcacgcccaaaaattccgaggttttcacctcttggagcgcaccaacaccacccggagaccggagcgactcgccaccggcgcggaaaaggagggcggaggctcgatggcggatgagaatcaggctggaaagaaagaggaggaggaatttagcacaggccctctgtcagtcctaatgatgagtgttaagaacaacacccaggtcctcatcaattgccgcaacaacaagaagctgcttggccgtgttcgtgcttttgatcgccactgtaacatggtgctcgagaacgtgcgtgagatgtggacagagatccccaagactggcaagggcaaaaagaangctctgcctgtgaacaaggatagattcatcagtaagatgttcctcangggcgactcggtcatcatagtgctgaggaacccgaagtgatcgcccaaccagtcaccttgcagcagttatgccccttctctgggttcacggaatccgtgcctctgttgaaaaaaactgtagcttatgtatgtcttggcggattagctggttatcttgaactgacgttcatgtgacatggcaatggcacatgaacatacgtttcatgagtttggttgttaattggcgcttgcagtactttgatccctgaatgttgagattgcacttctgctt

SEQ ID NO: 10376 - protein, 164 aa, Zea mays subsp. mays
  peptide (1)..(164): Ceres Seq. ID no. 12400561
  misc_feature (136)..(136): Xaa is any aa, unknown or other
  misc_feature (152)..(152): Xaa is any aa, unknown or other
LGPLLGDATTPASRRQLKPQKREEKHAQKFRGFHLLERTNTTRRPERLATGAEKEGGGSMADENQAGKKEEEEFSTGPLSVLMMSVKNNTQVLINCRNNKKLLGRVRAFDRHCNMVLENVREMWTEIPKTGKGKKXALPVNKDRFISKMFLXGDSVIIVLRNPK

SEQ ID NO: 10377 - protein, 105 aa, Zea mays subsp. mays
  peptide (1)..(105): Ceres Seq. ID no. 12400562
  misc_feature (77)..(77): Xaa is any aa, unknown or other
  misc_feature (93)..(93): Xaa is any aa, unknown or other
MADENQAGKKEEEEFSTGPLSVLMMSVKNNTQVLINCRNNKKLLGRVRAFDRHCNMVLENVREMWTEIPKTGKGKKXALPVNKDRFISKMFLXGDSVIIVLRNPK

SEQ ID NO: 10378 - protein, 82 aa, Zea mays subsp. mays
  peptide (1)..(82): Ceres Seq. ID no. 12400563
  misc_feature (54)..(54): Xaa is any aa, unknown or other
  misc_feature (70)..(70): Xaa is any aa, unknown or other
MMSVKNNTQVLINCRNNKKLLGRVRAFDRHCNMVLENVREMWTEIPKTGKGKKXALPVNKDRFISKMFLXGDSVIIVLRNPK

SEQ ID NO: 10379 - DNA, 1336 bp, Zea mays subsp. mays
  misc_feature (1)..(1336): Ceres Seq. ID no. 12400914
  misc_feature (1)..(1336): Ortholog of  Ceres SEQ ID NO 14305750 as cited in SEQ ID NO 52458
  misc_feature (1)..(1336): Ortholog of  Ceres SEQ ID NO 14314252 as cited in SEQ ID NO 57492
  misc_feature (1)..(1336): Ortholog of  Ceres SEQ ID NO 12608276 as cited in SEQ ID NO 57871
  misc_feature (1)..(1336): Ortholog of  Ceres SEQ ID NO 13598492 as cited in SEQ ID NO 63882
  misc_feature (1)..(1336): Ortholog of  Ceres SEQ ID NO 13657914 as cited in SEQ ID NO 66230
  misc_feature (1)..(1336): Ortholog of  Ceres SEQ ID NO 13595877 as cited in SEQ ID NO 67702
  misc_feature (1)..(1336): Ortholog of  Ceres SEQ ID NO 13622667 as cited in SEQ ID NO 0
atatcctataacaatttccccaacccacatggccaacgccgacgctggcgacggcgacgaggtcatcctcgacgctcccggcttcatacgagtgtacaggagcggccgcgtcgagcgctttctgccggtcgacttcgccccgccctccactgacgccgccaccggcgtttcttcaaaggacgtcgccatcctcccagacgcctgcctattggttcgcatttacctcccagcgcccccctcttccggaagttacagcggcaagctccccgtcctggtgttcttccacggcggcgggttctgcctcggttcggcgtttgatgcggcggtgcactcccacgccaaccggttagccgcggctgccggcgcaatcatcgtgtcggtggaataccgcctcgcgccagagcatccggtccccgctctctaccgggacgcgtggacggcgctccagtgggtggccgcgcactccgtgggccgggggcaggaaccctggctgactgcccacgcggacctcgggcgcgtccacgtcggtggagagagcgcgggcgcgaacattgcccaccacgccgcgatgcgcgctggcagagaggagctgggccacggcgtgaagctcagctcgctcgtgatgatccatccctacttcctgggaggcgagagctccgagacagacgacatgggcgtagcgttgctccgcgagctcgtccggctgtggccggtggtatgcccgggcacgagcgggtgcgatgacgacccgttgatcaatccgatggcagagggtgcccccaatctcgctagcttggggtgccgacgcgtagtggtgtgcgtcgggggaaaggacccgatgagaggcagaggaaggctgtattgtgagaagctgaagagaagtgggtggcgcggggaggtggatgactgggaggcggacggccagggacacggtttccatctctcgtgccccatgagcgcagaggcggaggcgcaagtccgggtcatcgctgagtttctgacctacggatgacatatctgttttcccactccttcacgcggccatggtgcattgttctcgaatctgatatacattttttgtttcgagttttggttgaggacttgcatgtttatattttatatttttatctactatttcataagcttaataaatgtttggctatgggttccagattctcaattttcatcagaagaaggggttactgagctgtattagacttacctttgggttaatatctattggtgcaagacccagattggctatacctttgtaatcgtatttgctttgcctggctaaagtttatgacaaaattgtcgcattgctgacattctctct

SEQ ID NO: 10380 - protein, 336 aa, Zea mays subsp. mays
  peptide (1)..(336): Ceres Seq. ID no. 12400915
YPITISPTHMANADAGDGDEVILDAPGFIRVYRSGRVERFLPVDFAPPSTDAATGVSSKDVAILPDACLLVRIYLPAPPSSGSYSGKLPVLVFFHGGGFCLGSAFDAAVHSHANRLAAAAGAIIVSVEYRLAPEHPVPALYRDAWTALQWVAAHSVGRGQEPWLTAHADLGRVHVGGESAGANIAHHAAMRAGREELGHGVKLSSLVMIHPYFLGGESSETDDMGVALLRELVRLWPVVCPGTSGCDDDPLINPMAEGAPNLASLGCRRVVVCVGGKDPMRGRGRLYCEKLKRSGWRGEVDDWEADGQGHGFHLSCPMSAEAEAQVRVIAEFLTYG

SEQ ID NO: 10381 - protein, 327 aa, Zea mays subsp. mays
  peptide (1)..(327): Ceres Seq. ID no. 12400916
MANADAGDGDEVILDAPGFIRVYRSGRVERFLPVDFAPPSTDAATGVSSKDVAILPDACLLVRIYLPAPPSSGSYSGKLPVLVFFHGGGFCLGSAFDAAVHSHANRLAAAAGAIIVSVEYRLAPEHPVPALYRDAWTALQWVAAHSVGRGQEPWLTAHADLGRVHVGGESAGANIAHHAAMRAGREELGHGVKLSSLVMIHPYFLGGESSETDDMGVALLRELVRLWPVVCPGTSGCDDDPLINPMAEGAPNLASLGCRRVVVCVGGKDPMRGRGRLYCEKLKRSGWRGEVDDWEADGQGHGFHLSCPMSAEAEAQVRVIAEFLTYG

SEQ ID NO: 10382 - DNA, 1316 bp, Zea mays subsp. mays
  misc_feature (1)..(1316): Ceres Seq. ID no. 12400906
  misc_feature (1)..(1316): Ortholog of  Ceres SEQ ID NO 14303263 as cited in SEQ ID NO 1224
  misc_feature (1)..(1316): Ortholog of  Ceres SEQ ID NO 13593955 as cited in SEQ ID NO 54278
  misc_feature (1)..(1316): Ortholog of  Ceres SEQ ID NO 14314092 as cited in SEQ ID NO 62788
  misc_feature (1)..(1316): Ortholog of  Ceres SEQ ID NO 13597380 as cited in SEQ ID NO 64054
  misc_feature (1)..(1316): Ortholog of  Ceres SEQ ID NO 12625474 as cited in SEQ ID NO 64169
  misc_feature (1)..(1316): Ortholog of  Ceres SEQ ID NO 13597502 as cited in SEQ ID NO 64681
tctgctctgctcagccagctagccatatatacggcggcattcttcttctcttcttcttccccaataacatatcgagctgcaagctgctctgcttcttttctagcatgggcatgagggtcttgttggtggtcgtgctcatctcgttcgccccccttattaccactaatgtagcagcaggtgtcaacgccacgagatctgctggtaggcagcagaagcagaagcagaagccgctggcgcctgccctcatcgtgttcggcgactccatcgtggaccccggcaacaacaacgacatccacaccatcatcaaggccgacttcccgccctacggcacctacttccagaaccacagagccacgggaaggttctgcaacggcaggataccaaccgacttcatcgcctcccgcctcggcatcaaggagcttctgccgccctacctcacctccgagccgctcgacaagcacgacctcgtcaccggcgtcagcttcgcgtccggcggcacgggcttcgacccgctcacgccgcagctcgcctccgtgatctcgctcccggaccagctcaccatgttccacgactacctgggcaaggtgcgcgacgccgccggggacgccagggtgtcggatatcctgtcccggggcgtcttcgccatctgcgccggcagcgacgacgtggccaacacctacttcaccctgcgagcgcgcagcagctacgaccacgcctcctacgcgcgcctcctggtgcagcacgccaccgccttcgtcgaggacctcatccgcgccggcgcgcgccgcgtcgccttcatcggcatcccgcccatcggctgcgtcccgtcgcagcgcaccatgtccggcggtctcgaccggggctgctcgcagggccacaacgagatcgccgtcgcatacaacgccgggatggtgcagcagctggcggcgctgcgggccaagtaccccgacacgctgctcgtcttcatggacatctacggcttcctctacgacatgatgatgcacccgcgcagctacggcttcacgcagtccaccagaggatgctgcggcacgggcctcctcgaggtctccgtcctctgcaacggcgtcacctccgccgtctgccaagacgtcggcgactacctcttctgggacagctaccacccaacggagaaggcgtacaagatcctcgccgacttcgtcttcgacaactacgtcaagctcatcctcgtctagcttaccattattttcatttcatgagatggatttgatctgctggattatgcattaattgtttgctgctgtatttacatttgcttgtctgattaattgtttgct

SEQ ID NO: 10383 - protein, 403 aa, Zea mays subsp. mays
  peptide (1)..(403): Ceres Seq. ID no. 12400907
CSAQPASHIYGGILLLFFFPNNISSCKLLCFFSSMGMRVLLVVVLISFAPLITTNVAAGVNATRSAGRQQKQKQKPLAPALIVFGDSIVDPGNNNDIHTIIKADFPPYGTYFQNHRATGRFCNGRIPTDFIASRLGIKELLPPYLTSEPLDKHDLVTGVSFASGGTGFDPLTPQLASVISLPDQLTMFHDYLGKVRDAAGDARVSDILSRGVFAICAGSDDVANTYFTLRARSSYDHASYARLLVQHATAFVEDLIRAGARRVAFIGIPPIGCVPSQRTMSGGLDRGCSQGHNEIAVAYNAGMVQQLAALRAKYPDTLLVFMDIYGFLYDMMMHPRSYGFTQSTRGCCGTGLLEVSVLCNGVTSAVCQDVGDYLFWDSYHPTEKAYKILADFVFDNYVKLILV

SEQ ID NO: 10384 - protein, 369 aa, Zea mays subsp. mays
  peptide (1)..(369): Ceres Seq. ID no. 12400908
MGMRVLLVVVLISFAPLITTNVAAGVNATRSAGRQQKQKQKPLAPALIVFGDSIVDPGNNNDIHTIIKADFPPYGTYFQNHRATGRFCNGRIPTDFIASRLGIKELLPPYLTSEPLDKHDLVTGVSFASGGTGFDPLTPQLASVISLPDQLTMFHDYLGKVRDAAGDARVSDILSRGVFAICAGSDDVANTYFTLRARSSYDHASYARLLVQHATAFVEDLIRAGARRVAFIGIPPIGCVPSQRTMSGGLDRGCSQGHNEIAVAYNAGMVQQLAALRAKYPDTLLVFMDIYGFLYDMMMHPRSYGFTQSTRGCCGTGLLEVSVLCNGVTSAVCQDVGDYLFWDSYHPTEKAYKILADFVFDNYVKLILV

SEQ ID NO: 10385 - protein, 367 aa, Zea mays subsp. mays
  peptide (1)..(367): Ceres Seq. ID no. 12400909
MRVLLVVVLISFAPLITTNVAAGVNATRSAGRQQKQKQKPLAPALIVFGDSIVDPGNNNDIHTIIKADFPPYGTYFQNHRATGRFCNGRIPTDFIASRLGIKELLPPYLTSEPLDKHDLVTGVSFASGGTGFDPLTPQLASVISLPDQLTMFHDYLGKVRDAAGDARVSDILSRGVFAICAGSDDVANTYFTLRARSSYDHASYARLLVQHATAFVEDLIRAGARRVAFIGIPPIGCVPSQRTMSGGLDRGCSQGHNEIAVAYNAGMVQQLAALRAKYPDTLLVFMDIYGFLYDMMMHPRSYGFTQSTRGCCGTGLLEVSVLCNGVTSAVCQDVGDYLFWDSYHPTEKAYKILADFVFDNYVKLILV

SEQ ID NO: 10386 - DNA, 695 bp, Zea mays subsp. mays; identical to SEQ ID NO: 10175
  misc_feature (1)..(695): Ceres Seq. ID no. 12342067
  misc_feature (1)..(695): Ortholog of  Ceres SEQ ID NO 13596944 as cited in SEQ ID NO 68910

SEQ ID NO: 10387 - protein, 231 aa, Zea mays subsp. mays; identical to SEQ ID NO: 10176
  peptide (1)..(231): Ceres Seq. ID no. 12342068

SEQ ID NO: 10388 - protein, 218 aa, Zea mays subsp. mays; identical to SEQ ID NO: 10177
  peptide (1)..(218): Ceres Seq. ID no. 12342069

SEQ ID NO: 10389 - protein, 172 aa, Zea mays subsp. mays; identical to SEQ ID NO: 10178
  peptide (1)..(172): Ceres Seq. ID no. 12342070

SEQ ID NO: 10390 - DNA, 2266 bp, Zea mays subsp. mays
  misc_feature (1)..(2266): Ceres Seq. ID no. 13492661
  misc_feature (1)..(2266): Ortholog of  Ceres SEQ ID NO 13595072 as cited in SEQ ID NO 55971
gttgtgtgcgaccgacgacgcacagacgatcagagaggtctcctgccgccgtgccacggacgcgaccgacgcgtaaaagttacgctccgcctaggtcgcgcacgggcgccttgcatccgcgccccagtggcctcatttccaggaggcctggggcctgggcacggaacgtgcagcgggcctgtgctttatgccaaacacgaaagggttattaggccccgctcaatattggttttggtctaagagccaagcctggaacgcttggttgggctacgatcctttcggcccacgattgctgtgagatcatcgactgaaagcatgtgatggcggcaatgctttccgctgcttttctttaccgtcctcctagtagacactgacattttaaagactacgattctagtggttgtaataaacagcgacacgtgactgtcgactgtcgttatagccggcagtaaccgccatacagcttgtttcacttgtctcactgagtcactatcagcttctttcatccataaccaaagcaatttgttttctcaccattccttttaaaaaaaggtgaaataaacatgagtccgagtgagcactgagtcgcagaaatatcaaacctaggaccggagacgaggtgctacttcttcaaaatctgaactgtgccatcacaaaagaaagaaagaaagaaaaaagaagagaaatccacaccacagccaccgcaagatcccgggcgcccaatcacccttctccacggagattcctagcctcagccacagcccacatctgcctcatcgtctccctgaggctcccgtcgcgccacgtgttccagcatcccggacgcaccaatggcatccaagcatcagatttatttttattttctggcaacattcaagatagaacttgatcgcggcggtgtttcctccgtcgctttaaataccttcgtcgcctccacaagtccacagcatctcaagccaccatcgatcttcaagtctcgctacgtagcagtgcaataaaaaaagcagccgcaatggcgagcagcaccatggccctctcctccacggccttcgccggcaaggccgtgaacgtgccgtcgtcgtccgccttcggcgaggcccgcgtgacgatgcgcaagacggcggcgaaggccaagccagcggcggcgtccgggagcccgtggtacggccccgaccgcgtgctgtacctgggcccactgtccggcgagccgccgagctacctgacgggcgagttcccgggcgactacggctgggacaccgcggggctgtcggcggacccggagacgttcgccaagaaccgggagctggaggtgatccactcccgctgggccatgctgggcgcgctcggctgcgtcttcccggagctgctcgcccgcaacggcgtcaagttcggcgaggccgtgtggttcaaggccggctcccagatcttcagcgagggtggactggactacctcgggaacccgagcctcatccacgcgcagagcatcctcgccatctgggcctgccaggtcgtgctcatgggcgccgtcgagggctaccgcatcgccggcggcccgctcggcgaggtcgtcgacccgctctatcccggcggcagcttcgacccgctcggcctcgccgacgaccccgaggccttcgctgagctcaaggtgaaggagctcaagaacggccgcctcgccatgttctccatgttcggattcttcgtccaggccatcgtcaccgggaagggcccgctcgagaacctcgctgaccacattgccgaccccgtcaacaacaacgcttgggcctacgccaccaacttcgtccccggcaagtgagggaggcgccgccggtgacctttaggtgtccggatgcatgtgagcgcacgctggttttcggtttgtaccatgatgtaaactattgttcaatcaacaaggaataattgtgttcattgtcattatttttcccctctctttttcgttcctgccgattttatctaaatcaggtgtttgataaacggcatgattggtttcctgcttggccgtgtccagtctcaccaccagtgttgaccgtgtgcatgcacatgattggtgacctacactggctgagcgtagtctgaatgtacgagcacaacctagtcattttaccaccgcttccacatgcacgcgcagaaacgctagaaggaacgttcgctggttacccagaccggcggtaaccaatcacgcgaaaaaagagtagccgaattttacatattagagttcacacatcctagattaagcaccaagaattcg

SEQ ID NO: 10391 - protein, 266 aa, Zea mays subsp. mays
  peptide (1)..(266): Ceres Seq. ID no. 13492662
MASSTMALSSTAFAGKAVNVPSSSAFGEARVTMRKTAAKAKPAAASGSPWYGPDRVLYLGPLSGEPPSYLTGEFPGDYGWDTAGLSADPETFAKNRELEVIHSRWAMLGALGCVFPELLARNGVKFGEAVWFKAGSQIFSEGGLDYLGNPSLIHAQSILAIWACQVVLMGAVEGYRIAGGPLGEVVDPLYPGGSFDPLGLADDPEAFAELKVKELKNGRLAMFSMFGFFVQAIVTGKGPLENLADHIADPVNNNAWAYATNFVPGK

SEQ ID NO: 10392 - protein, 261 aa, Zea mays subsp. mays
  peptide (1)..(261): Ceres Seq. ID no. 13492663
MALSSTAFAGKAVNVPSSSAFGEARVTMRKTAAKAKPAAASGSPWYGPDRVLYLGPLSGEPPSYLTGEFPGDYGWDTAGLSADPETFAKNRELEVIHSRWAMLGALGCVFPELLARNGVKFGEAVWFKAGSQIFSEGGLDYLGNPSLIHAQSILAIWACQVVLMGAVEGYRIAGGPLGEVVDPLYPGGSFDPLGLADDPEAFAELKVKELKNGRLAMFSMFGFFVQAIVTGKGPLENLADHIADPVNNNAWAYATNFVPGK

SEQ ID NO: 10393 - protein, 234 aa, Zea mays subsp. mays
  peptide (1)..(234): Ceres Seq. ID no. 13492664
MRKTAAKAKPAAASGSPWYGPDRVLYLGPLSGEPPSYLTGEFPGDYGWDTAGLSADPETFAKNRELEVIHSRWAMLGALGCVFPELLARNGVKFGEAVWFKAGSQIFSEGGLDYLGNPSLIHAQSILAIWACQVVLMGAVEGYRIAGGPLGEVVDPLYPGGSFDPLGLADDPEAFAELKVKELKNGRLAMFSMFGFFVQAIVTGKGPLENLADHIADPVNNNAWAYATNFVPGK

SEQ ID NO: 10394 - DNA, 1153 bp, Zea mays subsp. mays
  misc_feature (1)..(1153): Ceres Seq. ID no. 12400804
  misc_feature (1)..(1153): Ortholog of  Ceres SEQ ID NO 14314442 as cited in SEQ ID NO 52358
  misc_feature (1)..(1153): Ortholog of  Ceres SEQ ID NO 12610442 as cited in SEQ ID NO 56281
  misc_feature (1)..(1153): Ortholog of  Ceres SEQ ID NO 12610713 as cited in SEQ ID NO 56591
  misc_feature (1)..(1153): Ortholog of  Ceres SEQ ID NO 12587345 as cited in SEQ ID NO 62844
  misc_feature (1)..(1153): Ortholog of  Ceres SEQ ID NO 13597357 as cited in SEQ ID NO 68961
  misc_feature (1)..(1153): Ortholog of  Ceres SEQ ID NO 13587656 as cited in SEQ ID NO 0
  misc_feature (1)..(1153): Ortholog of  Ceres SEQ ID NO 14309353 as cited in SEQ ID NO 0
  misc_feature (1)..(1153): Ortholog of  Ceres SEQ ID NO 15177686 as cited in SEQ ID NO 0
gcacgagaccattacctagaacatcctaatcaaaaaattccgtcgtcgtcgtcagcagcttctgcttgctttgtgggggaaggagagagagagagagcgagagagagatctagtagagaggctagtaggtggtcctcgaacgaagatgttggcggtgttcagcgggcaggtggtggaggtgccggcggagctggtggcggcgggcagccggacgccgtcgcccaagacgaaggcgtcgcagctcgtggggcgcttcctggccgcctccgagccggccgtgtccgtgcagctcggcgaccacggccacctcgcttactcccacaccaaccaggcgctcctccgccccaggtcgttcgcggccaaggacgaggtgttctgcctgttcgaaggggtgctggacaacctgggtcggctgagccagcagcacgggctgtcaagcaagggcgccaacgaggtgctcctcgtcatcgaggcctacaagacgctgcgcgaccgcgcgccctacccggccagcttcatgctcgcccagctcaccggctcctacgccttcgtcctcttcgacaagtccaccaactccctgctcgtcgcatccgaccccgagggcagggtgccgctcttctgggggatcaccgccgacggctgcgtcgccttctccgacgacatcgacatgctcaaaggctcatgcggcaagtcgctcgcgccgttcccgcaaggctgcttctactccaacgcgctcggagggctcaagtgctacgagaaccccaagcacaaggtcaccgctgtccccgccgacgaagaagagatctgcggtgccactttcaaggtggtggaagggtctactgtcctgacggcgctgcactgatcgatcatcagctggcggaggcgatgccatgatgatgatgcagaactttgtacatgcgttggtggatggtggtgtaacatagtggctgccaacaagtcatgctcatgcaaaccgatgaatctatctctgtatcatcgatctcggttgcttgctagtccagactccagacatggctatatatatatagctggtgctaataaataggagtataatcgtcatatcgatcggttgcgtgtggaatgccaatcatgtgtgtaatctgttggcaaataacaaacctctgttcctccc

SEQ ID NO: 10395 - protein, 297 aa, Zea mays subsp. mays
  peptide (1)..(297): Ceres Seq. ID no. 12400805
ARDHYLEHPNQKIPSSSSAASACFVGEGERERARERSSREASRWSSNEDVGGVQRAGGGGAGGAGGGGQPDAVAQDEGVAARGALPGRLRAGRVRAARRPRPPRLLPHQPGAPPPQVVRGQGRGVLPVRRGAGQPGSAEPAARAVKQGRQRGAPRHRGLQDAARPRALPGQLHARPAHRLLRLRPLRQVHQLPARRIRPRGQGAALLGDHRRRLRRLLRRHRHAQRLMRQVARAVPARLLLLQRARRAQVLREPQAQGHRCPRRRRRDLRCHFQGGGRVYCPDGAALIDHQLAEAMP

SEQ ID NO: 10396 - protein, 238 aa, Zea mays subsp. mays
  peptide (1)..(238): Ceres Seq. ID no. 12400806
MLAVFSGQVVEVPAELVAAGSRTPSPKTKASQLVGRFLAASEPAVSVQLGDHGHLAYSHTNQALLRPRSFAAKDEVFCLFEGVLDNLGRLSQQHGLSSKGANEVLLVIEAYKTLRDRAPYPASFMLAQLTGSYAFVLFDKSTNSLLVASDPEGRVPLFWGITADGCVAFSDDIDMLKGSCGKSLAPFPQGCFYSNALGGLKCYENPKHKVTAVPADEEEICGATFKVVEGSTVLTALH

SEQ ID NO: 10397 - DNA, 1828 bp, Zea mays subsp. mays
  misc_feature (1)..(1828): Ceres Seq. ID no. 12372212
  misc_feature (1)..(1828): Ortholog of  Ceres SEQ ID NO 14316144 as cited in SEQ ID NO 52397
atcgatctctcccctcctcacttcctcccctcacgggggcagccacgtacaaaggcaggcagctcgccaacgcccagcaccctctcgccgcgccaccccacgccgtgcgcctttaaagagagcgcacgacaagcttaaaggttcccacgccgccgctcgcgcttgtcttggcgccgcgacacagctggtcggtgcctttgatccgttccttccttttccagctgcagaggttacagagtcccgagccgtcgcgcgcgcgaaagcagaggagcggcaatggcggtggccgcgcggctcggcgccgtcttggcgtgcgtcatcttggcggccgtggcggtggcgccgcggccggtggcggggatcctcgacccggtcgacttcctcgcgctgcaggcggtgcggcggtcgctggacgacatgcccgggtccgcgttcttcgacgggtgggacttcaccgccgacccgtgcgggttccccggtgtgttctgcgacgcaccgggtggtggcgctcgcgctcggcgacccgcgggcggggtctccggggctgacggggaggctggacccagcgctgggccggctgtccgcgctcaccgagctctcgctcgtgcccgggcgcgtcgagggggagctcccggcgtcgctggcgtcgtgctcgaacctccgcttcctggccgtcagcaagaacctcctctccggccagatacctgacggcttcagcgcgctgtccaacctgcggacgctcgacgccagcttcaaccagatctccggcaccatcccgccgtccatcgccgcgctgccgtcgatcaccaacctcatcctctgccacaaccagcttaccggcggcgttccatcgttcctggactcgtccccgctcctgcggctggatctcaagcacaacgcgctctccggcggcgtgcctaccctgccggccgggctgcagtacctgtcgctgtccgcgaacaagctcaccggcacggtcgatcaggtgctgcccgggctgtcccggctcaacttcctcgacctcagcatgaaccagcttgagggcccgatcccggcgtcggtgctctcgctgccgctgtccgtgctgcagttgcagcgcaacttcttctcagggccggtgcagccgtcgaacgacgtgacgatcccggtggtggacctgagctacaacaggttctggggccagctctcgccactgctggcgggcgtcgggcagctgtaccttaacaacaaccggttcaccggcgaggtccccgcgcggctggtgcaggagctggtgggctccggcggcctgcaggtgctgtacctgcagcacaacttcctgacgggcatcgcgatatcgccgtcatcgtcgctcccctccaccgtctcgctctgcctgatgtacaactgcatggtgccgccggtgtacgcgccgtgcccgatcaaggccgggtcgcagaacacgcggccggcggaccagtgcccggagtggaggggctgagcctgatgtcggggtgagcttgatcgtgtctcagcaacgccagtgccaatgccggatcgcctccgatcaccggttgggaatagcgggaaagcagaactgaaggtcaatgattctttgattgatttgggtatagttacaggcaagtaagtgccttaataatccggatttacaggtgtgtgtttttgtttagttggtgtatgtgcgtttgtgtatctctgtgctgtatagtgagcagtactccctcccggagcttctatcgcactgccgcatgatgacgctgtttgcatctgatgatggatggtgttagtaagaggcagtgaagttattatttatcgaatcatgtcgctg

SEQ ID NO: 10398 - protein, 492 aa, Zea mays subsp. mays
  peptide (1)..(492): Ceres Seq. ID no. 12372213
SISPLLTSSPHGGSHVQRQAARQRPAPSRRATPRRAPLKRAHDKLKGSHAAARACLGAATQLVGAFDPFLPFPAAEVTESRAVARAKAEERQWRWPRGSAPSWRASSWRPWRWRRGRWRGSSTRSTSSRCRRCGGRWTTCPGPRSSTGGTSPPTRAGSPVCSATHRVVALALGDPRAGSPGLTGRLDPALGRLSALTELSLVPGRVEGELPASLASCSNLRFLAVSKNLLSGQIPDGFSALSNLRTLDASFNQISGTIPPSIAALPSITNLILCHNQLTGGVPSFLDSSPLLRLDLKHNALSGGVPTLPAGLQYLSLSANKLTGTVDQVLPGLSRLNFLDLSMNQLEGPIPASVLSLPLSVLQLQRNFFSGPVQPSNDVTIPVVDLSYNRFWGQLSPLLAGVGQLYLNNNRFTGEVPARLVQELVGSGGLQVLYLQHNFLTGIAISPSSSLPSTVSLCLMYNCMVPPVYAPCPIKAGSQNTRPADQCPEWRG

SEQ ID NO: 10399 - DNA, 958 bp, Zea mays subsp. mays
  misc_feature (1)..(958): Ceres Seq. ID no. 12340928
  misc_feature (1)..(958): Ortholog of  Ceres SEQ ID NO 13655262 as cited in SEQ ID NO 62944
aacaagcatcagagctcggtgtcacaaaacctgaccgatggcggcccggtgctccacagctgcctccgtggtcagaacaggatcgcgagacctctccccctccttttccttcacagccgcggcgctcccctcggcgcgtctgaggccggtaggagcgtgggtccgcggtggagggtacacctgcaggctccgcgccgtctgcgccatgggctccgcgccgtcgtcgtcccaatccccgtcgccgcacacgccttcaggacaaacccaagggaaagcagattataaatcactgagtgaagaggagtggaagaagcgcctgactgaagagcagtattatgttactcggcagaagggcactgaaagagcattcactggggaatactggaatactaaaaccccaggcatttatcagtgtgtctgctgcgacacccctctgtttcagtcatcaaccaaatttgatagtggtactgggtggccatcctattataaaccaattggtgaaaatgtcaagagcaagcttgatatgtcaatcatttttatgccccggaccgaggtgctctgtgcaacctgtgatgctcatctggggcatgtcttcgatgacgggccaccaccaacagggaagagatactgtatcaatagtgcatctctgaaattgaagccccaatagttgctggatactttagcaagaagtcaactataacgctggtccgccctatgtaaacttcggggttatgtatataaactactcgagttgtagcatatttattattctctttgttatgtaatatatgtgttcacaaaccgatgaaagtatgaaacaaacagccgctacttcactctggtattctggtctagaattaaggtgttgtttggttgacgaattgtaacgtaaatggcaacggtaatggtttgcactcgagtgacagttgacaacggtaataaatttaaatagatcttt

SEQ ID NO: 10400 - protein, 209 aa, Zea mays subsp. mays
  peptide (1)..(209): Ceres Seq. ID no. 12340929
MAARCSTAASVVRTGSRDLSPSFSFTAAALPSARLRPVGAWVRGGGYTCRLRAVCAMGSAPSSSQSPSPHTPSGQTQGKADYKSLSEEEWKKRLTEEQYYVTRQKGTERAFTGEYWNTKTPGIYQCVCCDTPLFQSSTKFDSGTGWPSYYKPIGENVKSKLDMSIIFMPRTEVLCATCDAHLGHVFDDGPPPTGKRYCINSASLKLKPQ

SEQ ID NO: 10401 - protein, 153 aa, Zea mays subsp. mays
  peptide (1)..(153): Ceres Seq. ID no. 12340930
MGSAPSSSQSPSPHTPSGQTQGKADYKSLSEEEWKKRLTEEQYYVTRQKGTERAFTGEYWNTKTPGIYQCVCCDTPLFQSSTKFDSGTGWPSYYKPIGENVKSKLDMSIIFMPRTEVLCATCDAHLGHVFDDGPPPTGKRYCINSASLKLKPQ

SEQ ID NO: 10402 - protein, 104 aa, Zea mays subsp. mays
  peptide (1)..(104): Ceres Seq. ID no. 12340931
MLLGRRALKEHSLGNTGILKPQAFISVSAATPLCFSHQPNLIVVLGGHPIINQLVKMSRASLICQSFLCPGPRCSVQPVMLIWGMSSMTGHHQQGRDTVSIVHL

SEQ ID NO: 10403 - DNA, 1199 bp, Zea mays subsp. mays
  misc_feature (1)..(1199): Ceres Seq. ID no. 12355415
  misc_feature (1)..(1199): Ortholog of  Ceres SEQ ID NO 13648488 as cited in SEQ ID NO 20419
aacaaaactcgtcagtagctgagtagccactgtgctcttgagaaggatgacgagccccatgcacgcgcggaaggctaagctcaagacccacttcatctccgccaaagcgaagctcaagcacaacgtcaccccgcgtcgcgtcgtcctgctggctgccgccgctacctccgccttcctcctcctattcaccctccgcaccctccactctgccgcgtcacgcagcgccagagcaagcgccgctgccaccgttgccgctgccattgcctccacgtctccagcgtccgtcgccgccgaccacgccgaccagctggagcagcaccaccatcaagagtgcgccaaggtgccgtcgtccgtcgcagaggcgctggtccactacgcgacgtccaacgagacgccgcaccagacggtggcggaggccggggccgccgcgcgcgtgctggcgcggcgtgcgccgtgtagcctcctggtgctggggctgggacccgacagcgcgctctgggcggcactcaaccacggcggccgcacgctcttcctcgaggcggacgccggccggatcgcctcggcccgcgccgcgcactcggccgggatcgacctccaggcccancnngtcgctctccaacaagaggccatgacgccgtccgacgatctcctggctctccgcaactnnnccgactgcgctgcctccccgccgaaacctctcaccgtggaccacctagagcaatctccgtgcacgctggcgccgcgcgggctaccggaaacgttctacgaggcggagtgggacgtgatcatggtgaacgccccggtgcctggagcgatctacacggccgcggtggcggctagggcgcggcgcccggggactggggaaaccgacgtgctggtccacggcgtggatgacactaccgaggagagcttcgccagggcattcttgtgtgagccgtacctgaaagaggaagctagcaggctccggcacttctccattcctagccacatggacaaggacgccatgccattttgcccattaatacgctaatgatataattgctatactgaataatcactcgtagatttaatctgaagttcatactttttttttctgttctggtgaaacagcatttgacactgtgatttctgtattttgtgatttggtgtttagattttgctcattttatcggtgtttgtgtataataattcactactgg

SEQ ID NO: 10404 - protein, 327 aa, Zea mays subsp. mays
  peptide (1)..(327): Ceres Seq. ID no. 12355416
  misc_feature (186)..(186): Xaa is any aa, unknown or other
  misc_feature (187)..(187): Xaa is any aa, unknown or other
  misc_feature (207)..(207): Xaa is any aa, unknown or other
  misc_feature (208)..(208): Xaa is any aa, unknown or other
MTSPMHARKAKLKTHFISAKAKLKHNVTPRRVVLLAAAATSAFLLLFTLRTLHSAASRSARASAAATVAAAIASTSPASVAADHADQLEQHHHQECAKVPSSVAEALVHYATSNETPHQTVAEAGAAARVLARRAPCSLLVLGLGPDSALWAALNHGGRTLFLEADAGRIASARAAHSAGIDLQAXXVALQQEAMTPSDDLLALRNXXDCAASPPKPLTVDHLEQSPCTLAPRGLPETFYEAEWDVIMVNAPVPGAIYTAAVAARARRPGTGETDVLVHGVDDTTEESFARAFLCEPYLKEEASRLRHFSIPSHMDKDAMPFCPLIR

SEQ ID NO: 10405 - protein, 323 aa, Zea mays subsp. mays
  peptide (1)..(323): Ceres Seq. ID no. 12355417
  misc_feature (182)..(182): Xaa is any aa, unknown or other
  misc_feature (183)..(183): Xaa is any aa, unknown or other
  misc_feature (203)..(203): Xaa is any aa, unknown or other
  misc_feature (204)..(204): Xaa is any aa, unknown or other
MHARKAKLKTHFISAKAKLKHNVTPRRVVLLAAAATSAFLLLFTLRTLHSAASRSARASAAATVAAAIASTSPASVAADHADQLEQHHHQECAKVPSSVAEALVHYATSNETPHQTVAEAGAAARVLARRAPCSLLVLGLGPDSALWAALNHGGRTLFLEADAGRIASARAAHSAGIDLQAXXVALQQEAMTPSDDLLALRNXXDCAASPPKPLTVDHLEQSPCTLAPRGLPETFYEAEWDVIMVNAPVPGAIYTAAVAARARRPGTGETDVLVHGVDDTTEESFARAFLCEPYLKEEASRLRHFSIPSHMDKDAMPFCPLIR

SEQ ID NO: 10406 - DNA, 1349 bp, Zea mays subsp. mays
  misc_feature (1)..(1349): Ceres Seq. ID no. 12357275
  misc_feature (1)..(1349): Ortholog of  Ceres SEQ ID NO 13590967 as cited in SEQ ID NO 65553
  misc_feature (1)..(1349): Ortholog of  Ceres SEQ ID NO 14309438 as cited in SEQ ID NO 0
cagaccccagacctttccccttccgtccccggccggcgccaacgccactccagtgagccgagggcggagacggtcacggtgggcagagtgacacgccgcacgcctctccgccccgctccgctccagattgcgcgcacccacccatggcgctcgccgcttcccaccacggcctcctgcccttcgcccccgctgccacgcctaccccgtcacgggggcacctgcgcttccgcgccgcgcgccctctgccccgccccgcccggagaatttgttgccaatctatcaactcagctaatgtgttgggagcttcttcaacgacatctgatgaggcagtcccagtcccagttgtccagatagatcaggactcagaccgtgatgcgaccattgtgcagctaagttttggagatcgtttgggggcactacttgacacgatgaaagcactccaaggaccttggccttgatgtcacaaaaggaagtgtgacaactgactcagctgtcacacaaacaaagttccacatcatgcgatttgggcgcaaggttgaggaccctgacatgttagaaaggattcggctaaccatcatcaacaaccttctccagtaccatcctgaatcaagtgagaagttagccatgggtgaattttttgggataaaacctcctgagaagaaggtagatgttgatattgcaacacatatagttgttgaagatgacggaccaaaaagaagcatactttacatagaaaccgccgaccggcctggcctacttcttgagataatcaagatcattgcggacacaaatattgatgtggaatcagctgagattgatactgaaggtttggttgcgaaggacaagtttcatgtaagttacagaggtggaaaactaaacagctccttatctcaggcgctgaccaattgcctgcgttattacctccgaaggcctgagacagatgaagacagctattgattgttgtgtttgtcgaaccttcctatagtgcattagaatcagaaactttggcttcagttccttcgctatgggccccttgtactgctgcaaatggagttttccattgtagctgataaagtgccgacaaggtgcatccatatgtgcataggtggcactgaatcggggctcactggaccagtttgatattgtagtaatatatatacagctgggagcaacataatttaggtttcgatcatcattatcccatttgattcctgttataagggatcacattggaaaaccctcacatgattgatgttgtctgtattctgtaagttggtgcaatccatttgcatgtaaaactcagctgcgtactgtggcgttctatgtagtggaataaataaaagagcatt

SEQ ID NO: 10407 - protein, 146 aa, Zea mays subsp. mays
  peptide (1)..(146): Ceres Seq. ID no. 12357276
MRFGRKVEDPDMLERIRLTIINNLLQYHPESSEKLAMGEFFGIKPPEKKVDVDIATHIVVEDDGPKRSILYIETADRPGLLLEIIKIIADTNIDVESAEIDTEGLVAKDKFHVSYRGGKLNSSLSQALTNCLRYYLRRPETDEDSY

SEQ ID NO: 10408 - protein, 135 aa, Zea mays subsp. mays
  peptide (1)..(135): Ceres Seq. ID no. 12357277
MLERIRLTIINNLLQYHPESSEKLAMGEFFGIKPPEKKVDVDIATHIVVEDDGPKRSILYIETADRPGLLLEIIKIIADTNIDVESAEIDTEGLVAKDKFHVSYRGGKLNSSLSQALTNCLRYYLRRPETDEDSY

SEQ ID NO: 10409 - protein, 117 aa, Zea mays subsp. mays
  peptide (1)..(117): Ceres Seq. ID no. 12357278
QTPDLSPSVPGRRQRHSSEPRAETVTVGRVTRRTPLRPAPLQIARTHPWRSPLPTTASCPSPPLPRLPRHGGTCASAPRALCPAPPGEFVANLSTQLMCWELLQRHLMRQSQSQLSR

SEQ ID NO: 10410 - DNA, 1124 bp, Zea mays subsp. mays
  misc_feature (1)..(1124): Ceres Seq. ID no. 12400892
  misc_feature (1)..(1124): Ortholog of  Ceres SEQ ID NO 13583438 as cited in SEQ ID NO 60632
aaaaaaacaaattagatagagctcgccgagcaagcaagcaagccaactcggccgtccgaacgaaagcgaagcgcggccaaactcactcgctaaacgctcccgttctcctccgcctgcccccaccggctccccttgtacacgagcgccggagacgccatggcggcggcgcagccgaagccggccaagaggctgggcggcatggcggaggcgctcgccatcgccgccgacctcggattccccgcctctaccacgcaggaagatcagactagctccgacaaaagcgatgatttggtgaaggttttgagggaactgactgtcgtgcagaggaacattgccaacttgcaagtggagctacagggaagaaaggatgataaaaacattgctcatttgactcatgtgagtgagatggaaaagaagtgcgagtctttggccagaatgactgcaattttgaaagatgtaattcagaacaaggatcgtattattgctcggctgcaacagccttattcccttgactgcataccagttgaagctgaataccagaaacaattctcggagctacttctgaaagcagcaagtgactatggggcattgacagcatcagtcggcgatttccagtggagccaaaactttagggaatcaccagctgtctggggggaaatgctgcgaccgattcctgctgcacttgcttcctgcacccggttcttcgaggcaatgtctgcgatgagggaatccttttctactcttcagaaactacgcgttggccattcctctctgtcaataaccccaagtgactccagcgacgattcaaagttcttgacgccacctcagtggagagacggctcgatactcgatagctggaagcaaatggatgacatcaacctggagagcagtggaattgacgccatgaatcagaggaggttgtcttggccctccatcaagagggacccgtaggtcgcaggtcacccattggatttaggttcccatgttacataaataggattccaccttgtgtagttggcattgattctctgtatttttaatccgatcacctgcacccatttggcatgttcgacttgtgagagatggtctataagttccttaaatcaatgtcgtggcaaaatttg

SEQ ID NO: 10411 - protein, 264 aa, Zea mays subsp. mays
  peptide (1)..(264): Ceres Seq. ID no. 12400893
MAAAQPKPAKRLGGMAEALAIAADLGFPASTTQEDQTSSDKSDDLVKVLRELTVVQRNIANLQVELQGRKDDKNIAHLTHVSEMEKKCESLARMTAILKDVIQNKDRIIARLQQPYSLDCIPVEAEYQKQFSELLLKAASDYGALTASVGDFQWSQNFRESPAVWGEMLRPIPAALASCTRFFEAMSAMRESFSTLQKLRVGHSSLSITPSDSSDDSKFLTPPQWRDGSILDSWKQMDDINLESSGIDAMNQRRLSWPSIKRDP

SEQ ID NO: 10412 - protein, 250 aa, Zea mays subsp. mays
  peptide (1)..(250): Ceres Seq. ID no. 12400894
MAEALAIAADLGFPASTTQEDQTSSDKSDDLVKVLRELTVVQRNIANLQVELQGRKDDKNIAHLTHVSEMEKKCESLARMTAILKDVIQNKDRIIARLQQPYSLDCIPVEAEYQKQFSELLLKAASDYGALTASVGDFQWSQNFRESPAVWGEMLRPIPAALASCTRFFEAMSAMRESFSTLQKLRVGHSSLSITPSDSSDDSKFLTPPQWRDGSILDSWKQMDDINLESSGIDAMNQRRLSWPSIKRDP

SEQ ID NO: 10413 - protein, 181 aa, Zea mays subsp. mays
  peptide (1)..(181): Ceres Seq. ID no. 12400895
MEKKCESLARMTAILKDVIQNKDRIIARLQQPYSLDCIPVEAEYQKQFSELLLKAASDYGALTASVGDFQWSQNFRESPAVWGEMLRPIPAALASCTRFFEAMSAMRESFSTLQKLRVGHSSLSITPSDSSDDSKFLTPPQWRDGSILDSWKQMDDINLESSGIDAMNQRRLSWPSIKRDP

SEQ ID NO: 10414 - DNA, 1049 bp, Zea mays subsp. mays; identical to SEQ ID NO: 10272
  misc_feature (1)..(1049): Ceres Seq. ID no. 12345528
  misc_feature (1)..(1049): Ortholog of  Ceres SEQ ID NO 13582073 as cited in SEQ ID NO 56218

SEQ ID NO: 10415 - protein, 192 aa, Zea mays subsp. mays; identical to SEQ ID NO: 10273
  peptide (1)..(192): Ceres Seq. ID no. 12345529

SEQ ID NO: 10416 - protein, 187 aa, Zea mays subsp. mays; identical to SEQ ID NO: 10274
  peptide (1)..(187): Ceres Seq. ID no. 12345530

SEQ ID NO: 10417 - protein, 177 aa, Zea mays subsp. mays; identical to SEQ ID NO: 10275
  peptide (1)..(177): Ceres Seq. ID no. 12345531

SEQ ID NO: 10418 - DNA, 1023 bp, Zea mays subsp. mays
  misc_feature (1)..(1023): Ceres Seq. ID no. 12400860
  misc_feature (1)..(1023): Ortholog of  Ceres SEQ ID NO 13595821 as cited in SEQ ID NO 56524
  misc_feature (1)..(1023): Ortholog of  Ceres SEQ ID NO 12784729 as cited in SEQ ID NO 61383
  misc_feature (1)..(1023): Ortholog of  Ceres SEQ ID NO 15174365 as cited in SEQ ID NO 0
aagttgcattgcatccatcgtgcctgatctccctcccaataagcacgtctgtttctccccagctccaagccggacgacgcagcgtagcagcagagagccagagaccagagatggccgccctcgccgccgcctccacggccgccttcgccgcgaagccgcgcgcgcgcctctccgtggcctgctccgccgccaccggcgacagcagcagcgtgtcgctcgcgtcctccgtgaagacgttctccgccgcgctggcgctgtcgtcggtgctgctgtcctcggccgccacctcccctccgcccgcggccgccgacatcgcggggctgaccccgtgcaaggagtccaaggcgttcgcgaagcgcgagaagaactcgatcaagaagctcaccgcgtcgctgaagaagtacgcgcccgacagcgcccccgcgctcgccatcaacgccaccatcgagaagaccaagcgccggttcgagaactacggcaagttcgggctgctgtgcggcgccgacggcctgccgcacctcatcgtcagcggcgaccagcggcactggggcgagttcgtcaccccgggcctgctcttcctctacatcgccggctggatcgggtgggtcggcaggagctacctcatcgccatcagcggcgagaagaagcccgccatgagggagatcatcatcgacgtcgagctcgccacccgcctcctccccagggggttcatctggcccgtcgccgcctaccgcgagctcatcaacggggacctcgtcgtcgacgacaaggacatcggctactactagctgcgcttgttcacctgcttgcactgtgcatatatattgctgctgccgagctgggcgcttggatagtacgtggggaaacatggatggcttttggtgtaggagctgcatgctttgctagggctatctggtcatgtaggaaatggaagctctgctgtactttaagaaacttgatgaaacctttgtataactcaactgtacctctatctatcccttgtgtgtatttgagaacgatttc

SEQ ID NO: 10419 - protein, 340 aa, Zea mays subsp. mays
  peptide (1)..(340): Ceres Seq. ID no. 12400861
SCIASIVPDLPPNKHVCFSPAPSRTTQRSSREPETRDGRPRRRLHGRLRREAARAPLRGLLRRHRRQQQRVARVLREDVLRRAGAVVGAAVLGRHLPSARGRRHRGADPVQGVQGVREAREELDQEAHRVAEEVRARQRPRARHQRHHREDQAPVRELRQVRAAVRRRRPAAPHRQRRPAALGRVRHPGPALPLHRRLDRVGRQELPHRHQRREEARHEGDHHRRRARHPPPPQGVHLARRRLPRAHQRGPRRRRQGHRLLLAALVHLLALCIYIAAAELGAWIVRGETWMAFGVGAACFARAIWSCRKWKLCCTLRNLMKPLYNSTVPLSIPCVYLRTI

SEQ ID NO: 10420 - protein, 261 aa, Zea mays subsp. mays
  peptide (1)..(261): Ceres Seq. ID no. 12400862
VALHPSCLISLPISTSVSPQLQAGRRSVAAESQRPEMAALAAASTAAFAAKPRARLSVACSAATGDSSSVSLASSVKTFSAALALSSVLLSSAATSPPPAAADIAGLTPCKESKAFAKREKNSIKKLTASLKKYAPDSAPALAINATIEKTKRRFENYGKFGLLCGADGLPHLIVSGDQRHWGEFVTPGLLFLYIAGWIGWVGRSYLIAISGEKKPAMREIIIDVELATRLLPRGFIWPVAAYRELINGDLVVDDKDIGYY

SEQ ID NO: 10421 - protein, 225 aa, Zea mays subsp. mays
  peptide (1)..(225): Ceres Seq. ID no. 12400863
MAALAAASTAAFAAKPRARLSVACSAATGDSSSVSLASSVKTFSAALALSSVLLSSAATSPPPAAADIAGLTPCKESKAFAKREKNSIKKLTASLKKYAPDSAPALAINATIEKTKRRFENYGKFGLLCGADGLPHLIVSGDQRHWGEFVTPGLLFLYIAGWIGWVGRSYLIAISGEKKPAMREIIIDVELATRLLPRGFIWPVAAYRELINGDLVVDDKDIGYY

SEQ ID NO: 10422 - DNA, 776 bp, Zea mays subsp. mays
  misc_feature (1)..(776): Ceres Seq. ID no. 12345536
  misc_feature (1)..(776): Ortholog of  Ceres SEQ ID NO 13587131 as cited in SEQ ID NO 331
  misc_feature (1)..(776): Ortholog of  Ceres SEQ ID NO 13661176 as cited in SEQ ID NO 61114
agtcgcctccttcctgcgccgccgccgccgccgccgccgccgctaccaccgcctcgcggccgcctgcggctccgcgtttccgcacggaagttggtgaaggtttcttgaggctgagaacatggtgctgaagacggaactttgccgcttcagcggccagaagatttatcctgggaaaggcattagatttatccgtgctgattctcaggtcttcctttttgccaactcgaaatgcaagcgctacttccacaaccgcctgaagcctgcaaagcttacctggacagcaatgtacaggaagcagcacaagaaggatatccatgctgaagcggtaaagaagaggcgccgcgccaccaagaagccatactccaggtcaattgtgggtgcttccttggaagtaatccagaagaagagagctgagaagccagaggtccgcgatgctgctagagaggctgctcttcgtgagatcaaggagcgcatcaagaagaccaaggatgagaagaaagcgaagaaggcggaggtgagcaagtcccagaagacgcagacaaagggtgcggtccagaagggttccaagggccccaagttgggcggcggtggtgggaagcgctgaaagaacttagtgtcgtttctcgacattgcagtcgttccttagccaaagccactttcgtagaacctgtgttgaatttgcaagacttattcaagcgttgcttgtgcgtgctaaataccatggcaagagaacggatttatatttatgcctgaaaaaaatgaccgttcatattctt

SEQ ID NO: 10423 - protein, 161 aa, Zea mays subsp. mays; identical to SEQ ID NO: 1700
  peptide (1)..(161): Ceres Seq. ID no. 12345537

SEQ ID NO: 10424 - protein, 106 aa, Zea mays subsp. mays; identical to SEQ ID NO: 1701
  peptide (1)..(106): Ceres Seq. ID no. 12345538

SEQ ID NO: 10425 - DNA, 949 bp, Zea mays subsp. mays
  misc_feature (1)..(949): Ceres Seq. ID no. 12357451
  misc_feature (1)..(949): Ortholog of  Ceres SEQ ID NO 15175519 as cited in SEQ ID NO 1110
  misc_feature (1)..(949): Ortholog of  Ceres SEQ ID NO 13637980 as cited in SEQ ID NO 58973
  misc_feature (1)..(949): Ortholog of  Ceres SEQ ID NO 12624081 as cited in SEQ ID NO 61729
  misc_feature (1)..(949): Ortholog of  Ceres SEQ ID NO 13599435 as cited in SEQ ID NO 0
aagtcacccaccccatccaaggccctcccaaagtcccaaaggccgccgccgcccgccagcccaccatggccgcgcagtccttcctcctcgccgccactgccgccgccaggtcccccgcggtcttcgccgctccctattcctccgcacgccctttccactcggtccacttcgtcgccggcccgtggggcgccgccgccgccagggcgctcgtcgtcgcggacgccactaagaaggccgtagccgtcctcaagggcgcgtctgaggtcgagggcgtggtcacgctcacgcaggacgacgatggacctacaactgtgaatgtccgtatcactggacttacccctggacttcatggcttccacctccacgagtttggtgatactaccaatgggtgcatatcgacaggaccacattttaatccaaacaatctgacgcacggtgcaccagaagacgaagtccgtcatgcgggtgacctgggaaacattgttgcaaatgctgagggcatagccgaggcaaccattgttgatacccagattcctttgactggcccaaattcagttgttgggagagcatttgtggttcatgagcttgaagatgatttggggaaagggggccatgagctcagcctctctactggaaatgctggtggaagactggcatgtggtgttgttggcctgactccattgtaggttgctcgccgggtgcccgggttgcagttgcagctacgctgttacatccttgccttggtggacttttgtcttcaatcgtgttattgggacagtgacctttttgtattacttggattcattccatgcatgtggtatggtgcgtaatagcctttgcaggtcgactgtataaaaagcaatatttagttgaggaaataagtgttgccacatatccaaatcgatctatgaagcactatgaacatcaaatgttattttgattttgtttc

SEQ ID NO: 10426 - protein, 227 aa, Zea mays subsp. mays; identical to SEQ ID NO: 3431
  peptide (1)..(227): Ceres Seq. ID no. 12357452

SEQ ID NO: 10427 - protein, 206 aa, Zea mays subsp. mays; identical to SEQ ID NO: 3432
  peptide (1)..(206): Ceres Seq. ID no. 12357453

SEQ ID NO: 10428 - DNA, 1777 bp, Zea mays subsp. mays
  misc_feature (1)..(1777): Ceres Seq. ID no. 12400848
  misc_feature (1)..(1777): Ortholog of  Ceres SEQ ID NO 13662245 as cited in SEQ ID NO 62708
acgcacgaatccaacccaagaacccatcaccaccctcgcgtcacatgcgcgcataggcccccggccgcaccgcaggtcgccatcacatcaccaccatgccgcctccgctgcttgtttgtctcctcatctttctcgcccccgtgtcgcggccgtggtctgtcgccgtcgaggccgagccgcagagcccgggcgcgaagcctcgtgtgttcccgctgcgggcgcggcaggtgccggcgggggcgctgccgcggccgccgagcaagctgcgcttccaccacaacgtcagcctcaccgtctcgctcgccgtcggcaagccgccgcagaacgtcactatggtgttcgacaccggcagcgagctctcctggctgctctgcgcgacggggcgccagggcagcgccggcgctgccagcgccatgggcgagtcgttccgcccgagggactcggccacgttcgccgccgtgccctgcggctccgcgcagtgcagctcccgggacctgccggcgccgccgtcctgcgacggggcctcgcgccagtgcagcgtgtcgctgtnctacgcggacgggtccacctccgacggcgcgctcgccaccgacgttttcgccgtcggcgacgcgccgccgctgcggtccgcgttcgggtgcatgtccaccgcgtatgactcctcccccgacggtgtcgcgacggccgggctgctgggcatgaacaggggcacgctctcctttgtgacgcaggccagcacgcgccgcttctcgtactgcatctccgaccgggacgacgccggcgtgctgctcctcggccacagcgacctcccctttctgccgctcaactacacgccgctgtatcagcccaccctgccgctcccctacttcgaccgcgtggcctactctgtccagctcctcggcatccgcgtcggcggcaagcccctgccgatcccggcgtcggtgctcgcgccggaccacaccggcgcagggcagacgatggtggactccggcacgcagttcaccttcctcctcggggatgcatactccgccctgaaagccgagttcttgaaacaaacgaagcccctcctccccgcgctcggcgaccccagctttgcattccaagaagcgctcgacacctgcttccgcgtgccagcggggcgcccgccgccgtcggcgaggctcccgcccgtgaccctgctgttcaatggcgcggagatgtcggtggccggggacaggctgctgtacaaggtccccggcgagcgccggggagccgacggcgtgtggtgcctaacgttcgggaacgcggacatggtgcccctgacggcgtacgtgatcgggcaccaccaccagatgaacctgtgggtcgagtacgacctggagcgcggtcgcgtcgggatcacgcctgtcaagtgcgacgtcgccagcgagcggctcggcctgatgttgtgacgctgcctggcgaaccgtaacctctctggctcgggggtttgttcctccagactccagtggccataaccttgataaacaagttgacagaaaagtcgatttttaacctgccaaacgtttctaagtttggaacttgtttatctttttttttttcatgtgaggaaggaaaacttgcataaccttgatcgtgcgtgtggcatgtacgatgtttagcgtaaactgtaaagtaagtgtagtgcagtgttgtgcttctttattttactgaacacgtagtgatttaacatgatctaagtagtggtgtactactgtactgctgtatattgtatgtaaatattagcttgttgtatatt

SEQ ID NO: 10429 - protein, 444 aa, Zea mays subsp. mays
  peptide (1)..(444): Ceres Seq. ID no. 12400849
  misc_feature (152)..(152): Xaa is any aa, unknown or other
MPPPLLVCLLIFLAPVSRPWSVAVEAEPQSPGAKPRVFPLRARQVPAGALPRPPSKLRFHHNVSLTVSLAVGKPPQNVTMVFDTGSELSWLLCATGRQGSAGAASAMGESFRPRDSATFAAVPCGSAQCSSRDLPAPPSCDGASRQCSVSLXYADGSTSDGALATDVFAVGDAPPLRSAFGCMSTAYDSSPDGVATAGLLGMNRGTLSFVTQASTRRFSYCISDRDDAGVLLLGHSDLPFLPLNYTPLYQPTLPLPYFDRVAYSVQLLGIRVGGKPLPIPASVLAPDHTGAGQTMVDSGTQFTFLLGDAYSALKAEFLKQTKPLLPALGDPSFAFQEALDTCFRVPAGRPPPSARLPPVTLLFNGAEMSVAGDRLLYKVPGERRGADGVWCLTFGNADMVPLTAYVIGHHHQMNLWVEYDLERGRVGITPVKCDVASERLGLML

SEQ ID NO: 10430 - protein, 365 aa, Zea mays subsp. mays
  peptide (1)..(365): Ceres Seq. ID no. 12400850
  misc_feature (73)..(73): Xaa is any aa, unknown or other
MVFDTGSELSWLLCATGRQGSAGAASAMGESFRPRDSATFAAVPCGSAQCSSRDLPAPPSCDGASRQCSVSLXYADGSTSDGALATDVFAVGDAPPLRSAFGCMSTAYDSSPDGVATAGLLGMNRGTLSFVTQASTRRFSYCISDRDDAGVLLLGHSDLPFLPLNYTPLYQPTLPLPYFDRVAYSVQLLGIRVGGKPLPIPASVLAPDHTGAGQTMVDSGTQFTFLLGDAYSALKAEFLKQTKPLLPALGDPSFAFQEALDTCFRVPAGRPPPSARLPPVTLLFNGAEMSVAGDRLLYKVPGERRGADGVWCLTFGNADMVPLTAYVIGHHHQMNLWVEYDLERGRVGITPVKCDVASERLGLML

SEQ ID NO: 10431 - protein, 338 aa, Zea mays subsp. mays
  peptide (1)..(338): Ceres Seq. ID no. 12400851
  misc_feature (46)..(46): Xaa is any aa, unknown or other
MGESFRPRDSATFAAVPCGSAQCSSRDLPAPPSCDGASRQCSVSLXYADGSTSDGALATDVFAVGDAPPLRSAFGCMSTAYDSSPDGVATAGLLGMNRGTLSFVTQASTRRFSYCISDRDDAGVLLLGHSDLPFLPLNYTPLYQPTLPLPYFDRVAYSVQLLGIRVGGKPLPIPASVLAPDHTGAGQTMVDSGTQFTFLLGDAYSALKAEFLKQTKPLLPALGDPSFAFQEALDTCFRVPAGRPPPSARLPPVTLLFNGAEMSVAGDRLLYKVPGERRGADGVWCLTFGNADMVPLTAYVIGHHHQMNLWVEYDLERGRVGITPVKCDVASERLGLML

SEQ ID NO: 10432 - DNA, 1576 bp, Zea mays subsp. mays
  misc_feature (1)..(1576): Ceres Seq. ID no. 12400844
  misc_feature (1)..(1576): Ortholog of  Ceres SEQ ID NO 14306707 as cited in SEQ ID NO 53331
tcttccccgtccctgtcgccatctatcactttccccgtttgcgttttggcccgaatctccgtctccgtctccgtctccatctccatctcctagccgccgcggctccactcctcagtcctcagtccgaagcgaactctccctccgcatccactgccaccatgagccgcgatcgctacttccaccgcctcctcgacctccacctccacgccaacgacgacctcttcttccccttccctacccctgcctcgtcctgcccctacatcaccgcctcctccgcncaccancgcttcctcctcgacgaccaccccttctacccaacctcctgcncgctcggcatcacctcccgctccccgatcgangacaccttcgacctcgacctcctcctccccctccccctccacgccgccgtctccgcgcccccgtgcgcggccttcgacttcgaccccttcctcctcgacaccctcggccaccgcatctccgtcctcgagcgcgcgctcgccctcgccccaccccgccgcaagtacacctacgccgccgaggccaacggcaggaagctcaagtggaccgccgaggacaggcccgccgggggccgcaacctcaagtgggaggccgagctcaggaccccgcacaccgacggcttcgaccgcaagtggaagtgggagtccaaggagtccgccaccggttccaccaaggtcaagtgggccaaggagatcaaggggaagggctgcctcgagccttggtccaactcctactccgtcgaggagacctacggtgaggatgaccatgccgacgacgacagggagaagaagaaacccactggcgtccagaagaaagtcaagggggaaaacaagcagcagcagaagaagcagggcaatgtggagatcgtcgagatcgaggacaacactgccggatgcgtcgccatcagaaaggcttttgaaatgaaccactacaagggcaagaggaaggaactttccccacaggatgccgcactgctcatccagatgaactacagggcgcacctggcccatcgctcccaggtgctccgttgccttcgcgacctcgccgtcgccaaggccaagctcaaggagatcaggtccttcttctacaacatcacataccgccgccgcatcgcatatgacaatgaagagcgccagaggtttgctgagaagatcattgtcctgctactgacagttgatgcccttgagggaccggactacatggtccgcaacgcaaggaggtccatgctggaggagctggaggggatgctggagatcgtggagcctcagccgccggggaagccgaggacgcttagccgcaggaggttcgatctcccagaaggcggagccatcgaaaaggagacgagggaggagggcaagtgaagtgcatcggtgggtggtggcatgcttgggcagtttggtatgcgcgatgcggactatagagtttgagtttgtgctgctaccgaaccgtggaccaccttaccccgttgagatgtttgatagctggactttttgtgctgttgtatttgtagaccagaacgttgttctttgtaataaattggcgtgtgctgctttttgcc

SEQ ID NO: 10433 - protein, 458 aa, Zea mays subsp. mays
  peptide (1)..(458): Ceres Seq. ID no. 12400845
  misc_feature (92)..(92): Xaa is any aa, unknown or other
  misc_feature (94)..(94): Xaa is any aa, unknown or other
  misc_feature (109)..(109): Xaa is any aa, unknown or other
  misc_feature (119)..(119): Xaa is any aa, unknown or other
FPVPVAIYHFPRLRFGPNLRLRLRLHLHLLAAAAPLLSPQSEANSPSASTATMSRDRYFHRLLDLHLHANDDLFFPFPTPASSCPYITASSXHXRFLLDDHPFYPTSCXLGITSRSPIXDTFDLDLLLPLPLHAAVSAPPCAAFDFDPFLLDTLGHRISVLERALALAPPRRKYTYAAEANGRKLKWTAEDRPAGGRNLKWEAELRTPHTDGFDRKWKWESKESATGSTKVKWAKEIKGKGCLEPWSNSYSVEETYGEDDHADDDREKKKPTGVQKKVKGENKQQQKKQGNVEIVEIEDNTAGCVAIRKAFEMNHYKGKRKELSPQDAALLIQMNYRAHLAHRSQVLRCLRDLAVAKAKLKEIRSFFYNITYRRRIAYDNEERQRFAEKIIVLLLTVDALEGPDYMVRNARRSMLEELEGMLEIVEPQPPGKPRTLSRRRFDLPEGGAIEKETREEGK

SEQ ID NO: 10434 - protein, 406 aa, Zea mays subsp. mays
  peptide (1)..(406): Ceres Seq. ID no. 12400846
  misc_feature (40)..(40): Xaa is any aa, unknown or other
  misc_feature (42)..(42): Xaa is any aa, unknown or other
  misc_feature (57)..(57): Xaa is any aa, unknown or other
  misc_feature (67)..(67): Xaa is any aa, unknown or other
MSRDRYFHRLLDLHLHANDDLFFPFPTPASSCPYITASSXHXRFLLDDHPFYPTSCXLGITSRSPIXDTFDLDLLLPLPLHAAVSAPPCAAFDFDPFLLDTLGHRISVLERALALAPPRRKYTYAAEANGRKLKWTAEDRPAGGRNLKWEAELRTPHTDGFDRKWKWESKESATGSTKVKWAKEIKGKGCLEPWSNSYSVEETYGEDDHADDDREKKKPTGVQKKVKGENKQQQKKQGNVEIVEIEDNTAGCVAIRKAFEMNHYKGKRKELSPQDAALLIQMNYRAHLAHRSQVLRCLRDLAVAKAKLKEIRSFFYNITYRRRIAYDNEERQRFAEKIIVLLLTVDALEGPDYMVRNARRSMLEELEGMLEIVEPQPPGKPRTLSRRRFDLPEGGAIEKETREEGK

SEQ ID NO: 10435 - protein, 257 aa, Zea mays subsp. mays
  peptide (1)..(257): Ceres Seq. ID no. 12400847
  misc_feature (93)..(93): Xaa is any aa, unknown or other
  misc_feature (95)..(95): Xaa is any aa, unknown or other
  misc_feature (109)..(109): Xaa is any aa, unknown or other
  misc_feature (120)..(120): Xaa is any aa, unknown or other
LPRPCRHLSLSPFAFWPESPSPSPSPSPSPSRRGSTPQSSVRSELSLRIHCHHEPRSLLPPPPRPPPPRQRRPLLPLPYPCLVLPLHHRLLRXPXLPPRRPPLLPNLLXARHHLPLPDRXHLRPRPPPPPPPPRRRLRAPVRGLRLRPLPPRHPRPPHLRPRARARPRPTPPQVHLRRRGQRQEAQVDRRGQARRGPQPQVGGRAQDPAHRRLRPQVEVGVQGVRHRFHQGQVGQGDQGEGLPRALVQLLLRRGDLR

SEQ ID NO: 10436 - DNA, 1080 bp, Zea mays subsp. mays
  misc_feature (1)..(1080): Ceres Seq. ID no. 12372229
  misc_feature (1)..(1080): Ortholog of  Ceres SEQ ID NO 14307424 as cited in SEQ ID NO 54228
  misc_feature (1)..(1080): Ortholog of  Ceres SEQ ID NO 13664279 as cited in SEQ ID NO 61603
  misc_feature (1)..(1080): Ortholog of  Ceres SEQ ID NO 13584254 as cited in SEQ ID NO 63465
gtacccgcgccgctcacgcccatccatcccttcgcgcacgcaacgcaaaaacaagcacaaacacgcgcgatccgatctgggccggccaagcagccacccatccatggcgactagggtttggctcaccgccctcctgcttggtttcctcgtcgccgcctcccccttcaccagccgagttgctagagctgaatccgaggaagatgctgctgcagctgaggttgttgaaggggctgatctaggtattgtgggtgatgatacacaggtttccagtgatggacctttaagtcctgctcctggtgtagagacagtagttgtcttcccaaaaaatgctggcaaaattgtactagcaggtgaagaaactgaattactagttggtctgcaaaatgacggtgaatcaattttgaatgttgttgctgttcattcaactctccatcttccttttgaccacaatatgtatggccagaaccttactgttcagaatttcttcaattcatcagttcctgtttctgtgcaagcaaccttcccctacaagttcgttgtgagcaagttcttgcagcctggagcatatgatctggttggttacatagtgtatgagatcgaccagcacccttaccagaatgtattctacaatggcactatcgaggttgttgaggctgtaggcttactcagtgttgagtctgtgttcctcatcacccttggatttgcacttcttggtctgtttggattgtgggcatatggccaggttcagcagctctcgaagaaaacaaagaaggcacccaaggtggagctcggaactggaacaactgatgccaacatcgatgagtggctggagggcacttcgtttgtgcagagaagcaaatccaagaagaagcagacctgagtctctccaggcttagttaaatccttttgaggatctagaatgaggcatttgagggtagcccttcacaagtgacttttgcagaaagatagatgcgtaaggaggtgctgaaaaccgtaaacatcttcattgacattttcgaccttagtgtactttacatggaacaaaattttgttaaaagaaagtatatgctgtggtttctg

SEQ ID NO: 10437 - protein, 292 aa, Zea mays subsp. mays
  peptide (1)..(292): Ceres Seq. ID no. 12372230
YPRRSRPSIPSRTQRKNKHKHARSDLGRPSSHPSMATRVWLTALLLGFLVAASPFTSRVARAESEEDAAAAEVVEGADLGIVGDDTQVSSDGPLSPAPGVETVVVFPKNAGKIVLAGEETELLVGLQNDGESILNVVAVHSTLHLPFDHNMYGQNLTVQNFFNSSVPVSVQATFPYKFVVSKFLQPGAYDLVGYIVYEIDQHPYQNVFYNGTIEVVEAVGLLSVESVFLITLGFALLGLFGLWAYGQVQQLSKKTKKAPKVELGTGTTDANIDEWLEGTSFVQRSKSKKKQT

SEQ ID NO: 10438 - protein, 258 aa, Zea mays subsp. mays
  peptide (1)..(258): Ceres Seq. ID no. 12372231
MATRVWLTALLLGFLVAASPFTSRVARAESEEDAAAAEVVEGADLGIVGDDTQVSSDGPLSPAPGVETVVVFPKNAGKIVLAGEETELLVGLQNDGESILNVVAVHSTLHLPFDHNMYGQNLTVQNFFNSSVPVSVQATFPYKFVVSKFLQPGAYDLVGYIVYEIDQHPYQNVFYNGTIEVVEAVGLLSVESVFLITLGFALLGLFGLWAYGQVQQLSKKTKKAPKVELGTGTTDANIDEWLEGTSFVQRSKSKKKQT

SEQ ID NO: 10439 - DNA, 1693 bp, Zea mays subsp. mays
  misc_feature (1)..(1693): Ceres Seq. ID no. 12566679
  misc_feature (1)..(1693): Ortholog of  Ceres SEQ ID NO 14308813 as cited in SEQ ID NO 55485
  misc_feature (1)..(1693): Ortholog of  Ceres SEQ ID NO 13655744 as cited in SEQ ID NO 64032
  misc_feature (1)..(1693): Ortholog of  Ceres SEQ ID NO 13590394 as cited in SEQ ID NO 66581
actactctggtcgtcctcgcgccgccgcagcagcagcagcgacgcgaccgccggtaatggcttccaccgttgtgctccggaacgccggctcccgccgactcttctgctactccactctccgcgccgccgcaatattgggacccgccgcgccacctgatgcgcccgcggcggcgtcggcccagccgccaccgatggcaggaaccctctgggcgaggtccatggccactttcacgcgcacgaagccacatgtgaacgtcggcaccattgggcacgtcgatcacggcaaaaccacactcactgccgccattaccaaggttctggcagaggcagggaaggccaaagcagttgcttttgacgagatcgacaaggccccggaagagagagccagaggaatcaccattgcaacagctcatgtcgagtatgagacggctaaaaggcattatgctcatgttgattgtccaggtcacgcagattatgtcaagaacatgatcactggagctgctcaaatggatggtggtattcttgtcgtgtcagctcctgatggcccaatgccacaaacaaaggagcacattcttcttgcccgtcaggttggtgtaccttcccttgtgtgcttcttaaacaaagttgatgctgttgatgacccagagctactggaacttgtagagatggagcttcgggagctcctcagtttctacaagttccctggtgatgagattccgatcatccgtgggtctgcgttgtctgctttgcaagggaacaacgatgagataggaaagaatgccattttgaaactaatggatgcagttgatgagtacattcctgatcctgtaaggcagcttgataaggctttcttgatgccgatagaagatgtgttttctatccagggtcgtggaactgttgttactgggcgtgttgagcagggaacaattaaaactggcgaagatgttgagatcttgggtttgacacagagtggtcccttgaagactacagttactggtgttgagatgttcaaaaagatactggaccatggagaggctggtgacaacgttggtcttcttcttcgtggtctaaagcgtggtgatgtcgagcgtggccaggtggtgtgcaaacctggtagtctgaagacatacaaaaagtttgaggcagaaatatacgtcctgacaaaggatgaaggtggccggcacactgcctttgtcacaaattacacaccccaattctacttcaggactgctgatgtcactggaaaggttgagttgcttggtgagacgaagatggttttgcccggtgacaatgtaaccgcgaatttcgagttgatatcgcctgttcctcttgaaactgggcaaagatttgcgatgagggaaggagggaggacagttggtgccggggttgtctccaaagttattagctgatgagtttccagtttcttgcccgtagcaatttagtaaagaaatgaatgctgacatgtttcttggaatgcatgggcaaaaaggcagagctggctggtctggccgccattcattctggacagtaccttgtgctttcttgttgaggtggctcatcataaagcatattttgtagccacttttccgagttgatattagtgggttcttaccaaatttaccgcgaaaattgctggtcatgttgggccgatgcgtcgttcttcgataggagatgaagtgctgttatcagtgcc

SEQ ID NO: 10440 - protein, 468 aa, Zea mays subsp. mays
  peptide (1)..(468): Ceres Seq. ID no. 12566680
YSGRPRAAAAAAATRPPVMASTVVLRNAGSRRLFCYSTLRAAAILGPAAPPDAPAAASAQPPPMAGTLWARSMATFTRTKPHVNVGTIGHVDHGKTTLTAAITKVLAEAGKAKAVAFDEIDKAPEERARGITIATAHVEYETAKRHYAHVDCPGHADYVKNMITGAAQMDGGILVVSAPDGPMPQTKEHILLARQVGVPSLVCFLNKVDAVDDPELLELVEMELRELLSFYKFPGDEIPIIRGSALSALQGNNDEIGKNAILKLMDAVDEYIPDPVRQLDKAFLMPIEDVFSIQGRGTVVTGRVEQGTIKTGEDVEILGLTQSGPLKTTVTGVEMFKKILDHGEAGDNVGLLLRGLKRGDVERGQVVCKPGSLKTYKKFEAEIYVLTKDEGGRHTAFVTNYTPQFYFRTADVTGKVELLGETKMVLPGDNVTANFELISPVPLETGQRFAMREGGRTVGAGVVSKVIS

SEQ ID NO: 10441 - protein, 450 aa, Zea mays subsp. mays
  peptide (1)..(450): Ceres Seq. ID no. 12566681
MASTVVLRNAGSRRLFCYSTLRAAAILGPAAPPDAPAAASAQPPPMAGTLWARSMATFTRTKPHVNVGTIGHVDHGKTTLTAAITKVLAEAGKAKAVAFDEIDKAPEERARGITIATAHVEYETAKRHYAHVDCPGHADYVKNMITGAAQMDGGILVVSAPDGPMPQTKEHILLARQVGVPSLVCFLNKVDAVDDPELLELVEMELRELLSFYKFPGDEIPIIRGSALSALQGNNDEIGKNAILKLMDAVDEYIPDPVRQLDKAFLMPIEDVFSIQGRGTVVTGRVEQGTIKTGEDVEILGLTQSGPLKTTVTGVEMFKKILDHGEAGDNVGLLLRGLKRGDVERGQVVCKPGSLKTYKKFEAEIYVLTKDEGGRHTAFVTNYTPQFYFRTADVTGKVELLGETKMVLPGDNVTANFELISPVPLETGQRFAMREGGRTVGAGVVSKVIS

SEQ ID NO: 10442 - protein, 405 aa, Zea mays subsp. mays
  peptide (1)..(405): Ceres Seq. ID no. 12566682
MAGTLWARSMATFTRTKPHVNVGTIGHVDHGKTTLTAAITKVLAEAGKAKAVAFDEIDKAPEERARGITIATAHVEYETAKRHYAHVDCPGHADYVKNMITGAAQMDGGILVVSAPDGPMPQTKEHILLARQVGVPSLVCFLNKVDAVDDPELLELVEMELRELLSFYKFPGDEIPIIRGSALSALQGNNDEIGKNAILKLMDAVDEYIPDPVRQLDKAFLMPIEDVFSIQGRGTVVTGRVEQGTIKTGEDVEILGLTQSGPLKTTVTGVEMFKKILDHGEAGDNVGLLLRGLKRGDVERGQVVCKPGSLKTYKKFEAEIYVLTKDEGGRHTAFVTNYTPQFYFRTADVTGKVELLGETKMVLPGDNVTANFELISPVPLETGQRFAMREGGRTVGAGVVSKVIS

SEQ ID NO: 10443 - DNA, 519 bp, Zea mays subsp. mays
  misc_feature (1)..(519): Ceres Seq. ID no. 1324806
  misc_feature (1)..(519): Ortholog of  Ceres SEQ ID NO 14304838 as cited in SEQ ID NO 59750
atcctaatcgaaaaatcgatctattctcgtctgaagcaattcgcccctgtcgtgagcagaaccctacagctcgtattcgcctcatctcgcagcagcagcagaagaacaagggtatggcgaaggatgggggtcccgactggaacggcctgctcaagtggagcctcgcccacggsacggcaccaacccgccgcgtgctctcagcgaggaagacagaaaatggttcatggatgctatgcaagccaacacggtagatgttgtgaagaggatgaaggagatcactcaggtgatgaaaactccagaagatgtcttgcagtctcagggcgtgacccctgagaacatcgaagatatgttggatgagctacaggagcatgttgaatccattgacatggcaaatgatctacattctattggtgggctggatcctctacttggttacttgaaaaattcaaatgctggcatccgagcaaaggcagcagaagttgttagtacaattgtgcagaataatccccacgagtcagc

SEQ ID NO: 10444 - protein, 110 aa, Zea mays subsp. mays
  peptide (1)..(110): Ceres Seq. ID no. 1324807
  misc_feature (58)..(58): Xaa is any aa, unknown or other
ILIEKSIYSRLKQFAPVVSRTLQLVFASSRSSSRRTRVWRRMGVPTGTACSSGASPTXRHQPAACSQRGRQKMVHGCYASQHGRCCEEDEGDHSGDENSRRCLAVSGRDP

SEQ ID NO: 10445 - protein, 98 aa, Zea mays subsp. mays
  peptide (1)..(98): Ceres Seq. ID no. 1324808
MDAMQANTVDVVKRMKEITQVMKTPEDVLQSQGVTPENIEDMLDELQEHVESIDMANDLHSIGGLDPLLGYLKNSNAGIRAKAAEVVSTIVQNNPHES

SEQ ID NO: 10446 - protein, 95 aa, Zea mays subsp. mays
  peptide (1)..(95): Ceres Seq. ID no. 1324809
MQANTVDVVKRMKEITQVMKTPEDVLQSQGVTPENIEDMLDELQEHVESIDMANDLHSIGGLDPLLGYLKNSNAGIRAKAAEVVSTIVQNNPHES

SEQ ID NO: 10447 - DNA, 1534 bp, Zea mays subsp. mays
  misc_feature (1)..(1534): Ceres Seq. ID no. 12351659
  misc_feature (1)..(1534): Ortholog of  Ceres SEQ ID NO 13662164 as cited in SEQ ID NO 67158
actactacttcccccccccgtcctctcgatctctctccccgttcccctgacgagccaggcgtcaagtggcagggaggagaggaggcaccgcgtgtgaggctcaatggggacggggagcgcgcgggcgctggccctggcgctcgccgtgcttctggcctgctccgacgtcgccgtcgtcacggctcaggaaaccgagcggatcgaaggaagcgctggtgatgtgttagaagatgaccctgttgggaggctcaaggtctatgtctatgatctccccagcaaatacaacaagaagctgctcaagaaggatcctaggtgcctgaaccatatgtttgccgctgagatcttcatgcaccggttcctgttgtcaagcgctgtccgaacttttaatcctgaggaagcagattggttctacacacccgtatacacgacgtgtgatctgacccctaagggtcttcccttgcctttcaagtctcctcggatgatgcgtagcgcaatccagctgattgctacgaactggccttactggaatagatcagatggcgcagatcatttctttgtcacaccccatgactttggtgcttgctttcattatcaggaagagaaagccattggacggggaatccttcccttgcttcagcgtgctacgttggttcagacctttggacagaagaaccatgtctgcctgaaggatgggtccatcacgatcccgccatatgcgcctcctcagaaaatgcagactcaccttatccccccggacacccctcgatccatctttgtgtacttccgaggtctgttctatgacaccggcaatgaccccgagggcggatactacgcaagaggtgctcgtgcatcggtctgggagaacttcaagaacaacccgctgtttgacatctcgaccgatcacccaccaacatactacgaagacatgcagcgctcggtgttctgcctctgcccgttgggctgggcaccgtggagtcccaggctagtcgaagccgtggtctttggctgcatcccggtgatcatcgcagacgacatcgtcctccccttcgcggacgccatccccgtgggaggagatcggcgtcttcgttgcagaggatgatgtcccgcagctggacagcatcctgacatccatccccacagacgtcgtgctgaggaagcagcggctccttgcgaacccgtcgatgaagcaggccatgctgttcccccagcctgctcagccaggagatgcgttccaccagatcctgaacggcctagcgcgcaagctcccgcacggcagcaatgtcttcctgaagcctggtgagagggccctgaactggaccgctggaccaccaggcgacctgaaaccttggtagcgtcctgtggatctgagatggatacgacttgttctgaaaggaaatatggagaacatgattatatatatacccgtgcctttgagttaccatgggtgcatagtgctgacaagaagccaaatgtacatcgttctatgttctttttctataactgttatatacatataaatatcttcgtttcttcc

SEQ ID NO: 10448 - protein, 331 aa, Zea mays subsp. mays
  peptide (1)..(331): Ceres Seq. ID no. 12351660
MGTGSARALALALAVLLACSDVAVVTAQETERIEGSAGDVLEDDPVGRLKVYVYDLPSKYNKKLLKKDPRCLNHMFAAEIFMHRFLLSSAVRTFNPEEADWFYTPVYTTCDLTPKGLPLPFKSPRMMRSAIQLIATNWPYWNRSDGADHFFVTPHDFGACFHYQEEKAIGRGILPLLQRATLVQTFGQKNHVCLKDGSITIPPYAPPQKMQTHLIPPDTPRSIFVYFRGLFYDTGNDPEGGYYARGARASVWENFKNNPLFDISTDHPPTYYEDMQRSVFCLCPLGWAPWSPRLVEAVVFGCIPVIIADDIVLPFADAIPVGGDRRLRCRG

SEQ ID NO: 10449 - protein, 257 aa, Zea mays subsp. mays
  peptide (1)..(257): Ceres Seq. ID no. 12351661
MFAAEIFMHRFLLSSAVRTFNPEEADWFYTPVYTTCDLTPKGLPLPFKSPRMMRSAIQLIATNWPYWNRSDGADHFFVTPHDFGACFHYQEEKAIGRGILPLLQRATLVQTFGQKNHVCLKDGSITIPPYAPPQKMQTHLIPPDTPRSIFVYFRGLFYDTGNDPEGGYYARGARASVWENFKNNPLFDISTDHPPTYYEDMQRSVFCLCPLGWAPWSPRLVEAVVFGCIPVIIADDIVLPFADAIPVGGDRRLRCRG

SEQ ID NO: 10450 - protein, 250 aa, Zea mays subsp. mays
  peptide (1)..(250): Ceres Seq. ID no. 12351662
MHRFLLSSAVRTFNPEEADWFYTPVYTTCDLTPKGLPLPFKSPRMMRSAIQLIATNWPYWNRSDGADHFFVTPHDFGACFHYQEEKAIGRGILPLLQRATLVQTFGQKNHVCLKDGSITIPPYAPPQKMQTHLIPPDTPRSIFVYFRGLFYDTGNDPEGGYYARGARASVWENFKNNPLFDISTDHPPTYYEDMQRSVFCLCPLGWAPWSPRLVEAVVFGCIPVIIADDIVLPFADAIPVGGDRRLRCRG

SEQ ID NO: 10451 - DNA, 1159 bp, Zea mays subsp. mays
  misc_feature (1)..(1159): Ceres Seq. ID no. 12400840
  misc_feature (1)..(1159): Ortholog of  Ceres SEQ ID NO 13599448 as cited in SEQ ID NO 521
  misc_feature (1)..(1159): Ortholog of  Ceres SEQ ID NO 15227301 as cited in SEQ ID NO 538
  misc_feature (1)..(1159): Ortholog of  Ceres SEQ ID NO 14311918 as cited in SEQ ID NO 51684
  misc_feature (1)..(1159): Ortholog of  Ceres SEQ ID NO 14307472 as cited in SEQ ID NO 54559
  misc_feature (1)..(1159): Ortholog of  Ceres SEQ ID NO 13596408 as cited in SEQ ID NO 62028
atccaggggtcggcatcagcctctctccctcgctctctctgactcgtcgcggcataaacaaacaaaccaaacaaagcaaagcaaaggcaaaaccccacctccaccacacctcgtcgtttgcttttcctcggtgcgggcggtgcggcacaagcccccagaccggttgcctccattactgagctgtgcgtgcgtggtggctgtctgccttgtggcggcgccggtcatggtgatggtggagatggacggtggcgtgggaggaggaggaggaggagggcagacgccggcgccacggcggtggcgcctggcggacgagcggtgtgacctgcgcgccatggagacggactacgtgcggcggtttcaccggcacgagccccgcgaacaccagtgctcctccgccgtcgccaagcacatcaaggcgcccgtccacctcgtctggtctctagtgaggcggtttgatcaaccacagcttttcaagccctttgtgagccggtgtgaaatgaagggcaacattgagattggcagtgtcagggaggttaatgtaaagtctgggctgccagccacaagaagcacggagaggctggaactgttagatgacaatgagcacatactcagcgtcagatttgttggaggtgatcacaggctgcagaactactcgtccatcctcaccgtccaccccgaggtcatcgacggcccgaccggggacgctcgtgatcgagtccttcgtggtggacgtccccgacggcaacaccaaggacgagacctgctacttcgtggaggccctgctcaagtgcaacctcaagtcgctcgcggaggtgtccgagcgacaggtcgtcaaggatcaaacggagccccttgaccggtgatgggggagatacatacatacatgtccgaacgatatgttcggatcactgcattgcattgcttacgatgtgcagagctaatcttcaacggagcccctaggttcctggagaaaagagctttgagggactgctactgctactgctatgccgcgtcgttcaaagttaagtttcctccttgcgattgtgtttgctgtccttttctccggcgttgtacgtcgcacaaggagaaggacaggcagaatatgatgtgctattgtagtattgaaaaatgaaaggaaaaaaagaactgtgaggctctg

SEQ ID NO: 10452 - protein, 284 aa, Zea mays subsp. mays
  peptide (1)..(284): Ceres Seq. ID no. 12400841
SRGRHQPLSLALSDSSRHKQTNQTKQSKGKTPPPPHLVVCFSSVRAVRHKPPDRLPPLLSCACVVAVCLVAAPVMVMVEMDGGVGGGGGGGQTPAPRRWRLADERCDLRAMETDYVRRFHRHEPREHQCSSAVAKHIKAPVHLVWSLVRRFDQPQLFKPFVSRCEMKGNIEIGSVREVNVKSGLPATRSTERLELLDDNEHILSVRFVGGDHRLQNYSSILTVHPEVIDGPTGDARDRVLRGGRPRRQHQGRDLLLRGGPAQVQPQVARGGVRATGRQGSNGAP

SEQ ID NO: 10453 - protein, 210 aa, Zea mays subsp. mays
  peptide (1)..(210): Ceres Seq. ID no. 12400842
MVMVEMDGGVGGGGGGGQTPAPRRWRLADERCDLRAMETDYVRRFHRHEPREHQCSSAVAKHIKAPVHLVWSLVRRFDQPQLFKPFVSRCEMKGNIEIGSVREVNVKSGLPATRSTERLELLDDNEHILSVRFVGGDHRLQNYSSILTVHPEVIDGPTGDARDRVLRGGRPRRQHQGRDLLLRGGPAQVQPQVARGGVRATGRQGSNGAP

SEQ ID NO: 10454 - protein, 208 aa, Zea mays subsp. mays
  peptide (1)..(208): Ceres Seq. ID no. 12400843
MVEMDGGVGGGGGGGQTPAPRRWRLADERCDLRAMETDYVRRFHRHEPREHQCSSAVAKHIKAPVHLVWSLVRRFDQPQLFKPFVSRCEMKGNIEIGSVREVNVKSGLPATRSTERLELLDDNEHILSVRFVGGDHRLQNYSSILTVHPEVIDGPTGDARDRVLRGGRPRRQHQGRDLLLRGGPAQVQPQVARGGVRATGRQGSNGAP

SEQ ID NO: 10455 - DNA, 2062 bp, Zea mays subsp. mays
  misc_feature (1)..(2062): Ceres Seq. ID no. 12372221
  misc_feature (1)..(2062): Ortholog of  Ceres SEQ ID NO 13657677 as cited in SEQ ID NO 66119
cacgacttctacgcctccaccacgaggcacgcaacaattagaacacatctcgccgccgccgaggacgacggcgatgatgtggcgttcgcgagctcgtgcgctgctcctactccgctcgaccattacccggccaccgccaccacctccacaaccatatcccactcgaaccctaacccgagtcccacctccccgcttcctgtcctcctccccggatcccatccccgattcctcctccgccgccgccgcggatcccttccctgaagccttctcctccccgaccaaggcttctcaagatgccgctgaggccggagaggacaacctgagctcgatgtgggaggaagctggcgacgccgacgacatctttgcctcccccggcagcgccgacgccgtagccgacgatgaggaggtcgcccgcatctgcgccgccgtggagtccacccccgaggacgagatcgcctccaccctcgctgacatgaccgtggacttcaacgagccactcctagccgcagtccttcttgctgctgatcaatgctcctgtaagaagctgatttccctgttcaactatgccgcgaagaataaccccacttccaagagcctctcgaatcttgaggttctcgtgagcaagctagctgattctgctgagatagacaaggcagacgcttacttgctttgggattcgattaaggaaataggctctgtgccaggatcagtgagtacaccgttgttgaatgaaatgattgccatattttggaagcttgagaagtcgaaagcagcgttggaggtgttctccaagttcgatgagtttggttgcactccggacagtgacagctattatcttgtgattgaagcagcacgaaagaagtccttgttccgctctgcttgtgaagtctgtgagaagatgattggctctgcctgcttccccaatggtgagaaggttggcaggattttgatttacctttgtgaggggaagaaggtgaagatggcacactcattataccttgcagtgaaggaaaaaaagattccagtcccaaaactagccttggatttccttgttggtgctttggcaaggaatgatgagaccattggtactgctctggagctgctggaagagtaccaaggggagtcgcttaagcatgcaggcaagtcctttgccacagttgtacatgctttgtgtaggctaagcaaaatggaggatgcaaataatttgttgatgaggatggtgcagcttgaagagtacaaaggggaatctcttaagaatgcaggcaagacatttgccacagttatacatggtttgtgtaggaaaaagaaattggaggatgcaaaagcattgttgatgagaatggtaaatgttgggccagctcctggtaatgcagtgtttaattttgtcatcacagcattgtcaaaacagggagaaatggaggatgcaaaaggtttgatgagaatgatggagagccaagggatcagccctgatatctatacttacagtgtgctcatgagtggctacgtgaaaggaggcatgattgatgaagcccatgatctacttcgtgaagctaagaaaattcatccgaagctaaacagggttgcttatcacatacttatccgtggatactgcaagatggaggacttcgagaaggccaatgagtgcctaaaggagatgaagaaagatgggttgcagccaaatgtggatgagtatgacaaactgattcagtcattgtgtctcaaggctatggactggagaagagctgagaaactcctggaggaaatggaggatagtggtttatgcctaaggggtataagtcgcagcctcataactgcagttaaggagttggaaggggaggaaatgcagtcaaaggcgagccaagaagcatagtttctctaggatactcgaatccatatgtctgctaattaacttttggatagagcctttctttttgagcttttcagctctggtgagcttgcaagaaacatcatctttgtacctgtgtttgtttgttgttatttactacaataattttgcatttatatttaaatgctagactgacaaagaagaatatttagttct

SEQ ID NO: 10456 - protein, 622 aa, Zea mays subsp. mays
  peptide (1)..(622): Ceres Seq. ID no. 12372222
TTSTPPPRGTQQLEHISPPPRTTAMMWRSRARALLLLRSTITRPPPPPPQPYPTRTLTRVPPPRFLSSSPDPIPDSSSAAAADPFPEAFSSPTKASQDAAEAGEDNLSSMWEEAGDADDIFASPGSADAVADDEEVARICAAVESTPEDEIASTLADMTVDFNEPLLAAVLLAADQCSCKKLISLFNYAAKNNPTSKSLSNLEVLVSKLADSAEIDKADAYLLWDSIKEIGSVPGSVSTPLLNEMIAIFWKLEKSKAALEVFSKFDEFGCTPDSDSYYLVIEAARKKSLFRSACEVCEKMIGSACFPNGEKVGRILIYLCEGKKVKMAHSLYLAVKEKKIPVPKLALDFLVGALARNDETIGTALELLEEYQGESLKHAGKSFATVVHALCRLSKMEDANNLLMRMVQLEEYKGESLKNAGKTFATVIHGLCRKKKLEDAKALLMRMVNVGPAPGNAVFNFVITALSKQGEMEDAKGLMRMMESQGISPDIYTYSVLMSGYVKGGMIDEAHDLLREAKKIHPKLNRVAYHILIRGYCKMEDFEKANECLKEMKKDGLQPNVDEYDKLIQSLCLKAMDWRRAEKLLEEMEDSGLCLRGISRSLITAVKELEGEEMQSKASQEA

SEQ ID NO: 10457 - protein, 598 aa, Zea mays subsp. mays
  peptide (1)..(598): Ceres Seq. ID no. 12372223
MMWRSRARALLLLRSTITRPPPPPPQPYPTRTLTRVPPPRFLSSSPDPIPDSSSAAAADPFPEAFSSPTKASQDAAEAGEDNLSSMWEEAGDADDIFASPGSADAVADDEEVARICAAVESTPEDEIASTLADMTVDFNEPLLAAVLLAADQCSCKKLISLFNYAAKNNPTSKSLSNLEVLVSKLADSAEIDKADAYLLWDSIKEIGSVPGSVSTPLLNEMIAIFWKLEKSKAALEVFSKFDEFGCTPDSDSYYLVIEAARKKSLFRSACEVCEKMIGSACFPNGEKVGRILIYLCEGKKVKMAHSLYLAVKEKKIPVPKLALDFLVGALARNDETIGTALELLEEYQGESLKHAGKSFATVVHALCRLSKMEDANNLLMRMVQLEEYKGESLKNAGKTFATVIHGLCRKKKLEDAKALLMRMVNVGPAPGNAVFNFVITALSKQGEMEDAKGLMRMMESQGISPDIYTYSVLMSGYVKGGMIDEAHDLLREAKKIHPKLNRVAYHILIRGYCKMEDFEKANECLKEMKKDGLQPNVDEYDKLIQSLCLKAMDWRRAEKLLEEMEDSGLCLRGISRSLITAVKELEGEEMQSKASQEA

SEQ ID NO: 10458 - protein, 597 aa, Zea mays subsp. mays
  peptide (1)..(597): Ceres Seq. ID no. 12372224
MWRSRARALLLLRSTITRPPPPPPQPYPTRTLTRVPPPRFLSSSPDPIPDSSSAAAADPFPEAFSSPTKASQDAAEAGEDNLSSMWEEAGDADDIFASPGSADAVADDEEVARICAAVESTPEDEIASTLADMTVDFNEPLLAAVLLAADQCSCKKLISLFNYAAKNNPTSKSLSNLEVLVSKLADSAEIDKADAYLLWDSIKEIGSVPGSVSTPLLNEMIAIFWKLEKSKAALEVFSKFDEFGCTPDSDSYYLVIEAARKKSLFRSACEVCEKMIGSACFPNGEKVGRILIYLCEGKKVKMAHSLYLAVKEKKIPVPKLALDFLVGALARNDETIGTALELLEEYQGESLKHAGKSFATVVHALCRLSKMEDANNLLMRMVQLEEYKGESLKNAGKTFATVIHGLCRKKKLEDAKALLMRMVNVGPAPGNAVFNFVITALSKQGEMEDAKGLMRMMESQGISPDIYTYSVLMSGYVKGGMIDEAHDLLREAKKIHPKLNRVAYHILIRGYCKMEDFEKANECLKEMKKDGLQPNVDEYDKLIQSLCLKAMDWRRAEKLLEEMEDSGLCLRGISRSLITAVKELEGEEMQSKASQEA

SEQ ID NO: 10459 - DNA, 1993 bp, Zea mays subsp. mays
  misc_feature (1)..(1993): Ceres Seq. ID no. 12367252
  misc_feature (1)..(1993): Ortholog of  Ceres SEQ ID NO 15180024 as cited in SEQ ID NO 0
aggaaccatctagatacagcggcggtacgtggactggactggagcgagcaagcctgcgccggcgccgccgtcctcccgaaacagaagctgtagttggtcaagaactggggatactgagttgaatatgatctcaaatccggtggactggtatagtttcggacccggatagaattggtagggatgcaagattggagggtgcgtgagttcgaaggtaaattcactgatgagtttgcccacagcagtagcaacgaacataaaggtggagttgaggcttctggtgtcattagtagtaagaagttgaagcatgcagttgctaatgagaaaatccaaggtgtcatccccggtacaaatagctcaggttcactgaaacgtaattcagagaacatccaacatgcgaacggggtattatcccagaatataagctgcgctggtgactacaaaaatggctccattgcctttcctttgagagaagaaaatacaataactgagaccagatgtccagatgataactggaactcctgtcagtttgcactgaacaatggttcgtccattctcaataaccacagtgctccccaggatagcctcacttatggagataatgatctaaactacatcgaatggcctggcattgacaattttgaggatgtcgatacattattcaggagttttgattcaacatatggtcagcagcagctggagaatgcagatgggttatcttggattccgtcttcagatgctgtttactctaccgatgttgctttgcaacaagggcttgattcgtcttattcagattatggtattctggatgatctctccgcattccaatgtgcagaagataaatcactacccttggttgatccttcatcagctttatgtgataatcaattcaatgatacctacctgttcagtgaacaaaagaatgtgaatgcatatggtgaacagatataccaagaggatttgatggagttgttgcccactgaccagatatgcagcggacatgaaaacattgatatggttggaaaccagtatccatctgaaaatgcaattcaaggtaccgaagataagaaattctctatagcgtcaacttcccagctgagttctcagaatttactgaatcaaagacaccacttagattccagttcaccaagcaatattacttcggagtcctatccaggaaagttcggtccatctagctgttcttctgcacaaagaaactcaaaagtgcagaagaaaactgtcaacatacaaccaagacagccagcaaatgataatgttatgaacacaagcagagcttcttacccttgtgagaactatgaaactgaaagaagaggattagggaaaagaactctgggggatcctcaagttacaatgggtagttcaatggtagtggatggctcatttgtatcatctatgtcctctgataactcagtcgaagaaagcagctttcaacaactgcaggatgctgttagtcagctggatgtgcaaaccaaattgtgcatcagggatggtttataccgattggcacgaagtgcgcaacatagacaagtttttccaaatacgatgaacagcaatggtggtagcgaggacggaaaggaactggagaacgcagaaacttcgtgcaagttcatggaccctcggagcatcgagacgcagacaaacccgatcgatcggtctatagctctgctacttttccgcgagtcatctggcggccatgtccatgtggctgtagcagccgacgatgcctcgtcactgaaatcccctgctggtgtatgatttcctgcctgccacatctcagttccagggccctgctgctaacccaggatgtttctaggcatgtatgtaaaaaaaaaaacaagcgtattgtgtagccaatagtctgtactctgtagtcacattaattttgtcatgcttgtatcctattgctagacggccgatgtgctaacctagtgctgttgactcaaattttatgcgtaatctaaaaaaaattatttct

SEQ ID NO: 10460 - protein, 530 aa, Zea mays subsp. mays
  peptide (1)..(530): Ceres Seq. ID no. 12367253
MQDWRVREFEGKFTDEFAHSSSNEHKGGVEASGVISSKKLKHAVANEKIQGVIPGTNSSGSLKRNSENIQHANGVLSQNISCAGDYKNGSIAFPLREENTITETRCPDDNWNSCQFALNNGSSILNNHSAPQDSLTYGDNDLNYIEWPGIDNFEDVDTLFRSFDSTYGQQQLENADGLSWIPSSDAVYSTDVALQQGLDSSYSDYGILDDLSAFQCAEDKSLPLVDPSSALCDNQFNDTYLFSEQKNVNAYGEQIYQEDLMELLPTDQICSGHENIDMVGNQYPSENAIQGTEDKKFSIASTSQLSSQNLLNQRHHLDSSSPSNITSESYPGKFGPSSCSSAQRNSKVQKKTVNIQPRQPANDNVMNTSRASYPCENYETERRGLGKRTLGDPQVTMGSSMVVDGSFVSSMSSDNSVEESSFQQLQDAVSQLDVQTKLCIRDGLYRLARSAQHRQVFPNTMNSNGGSEDGKELENAETSCKFMDPRSIETQTNPIDRSIALLLFRESSGGHVHVAVAADDASSLKSPAGV

SEQ ID NO: 10461 - protein, 270 aa, Zea mays subsp. mays
  peptide (1)..(270): Ceres Seq. ID no. 12367254
MELLPTDQICSGHENIDMVGNQYPSENAIQGTEDKKFSIASTSQLSSQNLLNQRHHLDSSSPSNITSESYPGKFGPSSCSSAQRNSKVQKKTVNIQPRQPANDNVMNTSRASYPCENYETERRGLGKRTLGDPQVTMGSSMVVDGSFVSSMSSDNSVEESSFQQLQDAVSQLDVQTKLCIRDGLYRLARSAQHRQVFPNTMNSNGGSEDGKELENAETSCKFMDPRSIETQTNPIDRSIALLLFRESSGGHVHVAVAADDASSLKSPAGV

SEQ ID NO: 10462 - DNA, 1199 bp, Zea mays subsp. mays
  misc_feature (1)..(1199): Ceres Seq. ID no. 12400837
  misc_feature (1)..(1199): Ortholog of  Ceres SEQ ID NO 15179153 as cited in SEQ ID NO 1066
  misc_feature (1)..(1199): Ortholog of  Ceres SEQ ID NO 15176047 as cited in SEQ ID NO 55988
  misc_feature (1)..(1199): Ortholog of  Ceres SEQ ID NO 13582167 as cited in SEQ ID NO 56203
  misc_feature (1)..(1199): Ortholog of  Ceres SEQ ID NO 13658295 as cited in SEQ ID NO 66515
gataaggagacggtactagtaaactgactaactgctgcccactcgccggagaaccatggccacggcggcggcgtgtgtgcgggtggcgtctccgttcacgggcccacctatctggcatcccagacacgtcatctcaacgaggcggggacccaggagggccgggctggccgtcacggcggcggctgccgccggtggatcgccgcgcactgtgctcgtcaccggcgcgggcggccgaacaggccaaattgtgtacaagaagttgaaggagagggaaggacagtttgtgggacgtggcctagtcaggacgggagagagcaaaggcaaaattggaggcggtgacgacgtgtttgtcggcgacatcagagaccccgagagcattgctcctgcgatcgagggcattgacgcgctcatcatcctcaccagcgcggtcccaaagatgaaaccggggtttgatcctagcaaaggggggcgccctgagttttactttgaagaagggagttatcctgagcaggtggattggattggccaaaagaatcaaattgatgctgctaagagcatcggtgcaaagcacatagttttggtgggatccatgggaggaacagacatcaatcacccgctaaacaagttaggaaatgcaaatatactggtgtggaagcgcaaggcagaacagtacctagcagactccggtcttccatatacaattataagagctggcggtttacaagataaagatggtggcttgcgagagttgattgttgggaaggatgatgagatcctgaaaacagaaacaagaactatagccagggccgatgttgcagaagtttgcatacaggcattgctattcgaagagtcaaagtttaaggcatttgatctggcatcaaaaccagaaggtgaagggacgccaactacagactttagggcactttttgcacaagttaatagtcgcttctaaagacataagattgttcttgccaagaagttgagggcattctttcgtaaagcgatatgaaatgtgtgtttagtaaggttagtttcctgtttactaagttcctaatatattacagttgttccatgtagcatccttttttatctcttgctctctagctacttttggctttatttcctgtctagacagcggattctgcataatgctaatgaactttcatatcaaataagattgctcagttatccataatgtt

SEQ ID NO: 10463 - protein, 298 aa, Zea mays subsp. mays
  peptide (1)..(298): Ceres Seq. ID no. 12400838
MATAAACVRVASPFTGPPIWHPRHVISTRRGPRRAGLAVTAAAAAGGSPRTVLVTGAGGRTGQIVYKKLKEREGQFVGRGLVRTGESKGKIGGGDDVFVGDIRDPESIAPAIEGIDALIILTSAVPKMKPGFDPSKGGRPEFYFEEGSYPEQVDWIGQKNQIDAAKSIGAKHIVLVGSMGGTDINHPLNKLGNANILVWKRKAEQYLADSGLPYTIIRAGGLQDKDGGLRELIVGKDDEILKTETRTIARADVAEVCIQALLFEESKFKAFDLASKPEGEGTPTTDFRALFAQVNSRF

SEQ ID NO: 10464 - protein, 171 aa, Zea mays subsp. mays
  peptide (1)..(171): Ceres Seq. ID no. 12400839
MKPGFDPSKGGRPEFYFEEGSYPEQVDWIGQKNQIDAAKSIGAKHIVLVGSMGGTDINHPLNKLGNANILVWKRKAEQYLADSGLPYTIIRAGGLQDKDGGLRELIVGKDDEILKTETRTIARADVAEVCIQALLFEESKFKAFDLASKPEGEGTPTTDFRALFAQVNSRF

SEQ ID NO: 10465 - DNA, 1577 bp, Zea mays subsp. mays
  misc_feature (1)..(1577): Ceres Seq. ID no. 12595047
  misc_feature (1)..(1577): Ortholog of  Ceres SEQ ID NO 15177750 as cited in SEQ ID NO 57772
  misc_feature (1)..(1577): Ortholog of  Ceres SEQ ID NO 13596581 as cited in SEQ ID NO 62420
  misc_feature (1)..(1577): Ortholog of  Ceres SEQ ID NO 13591273 as cited in SEQ ID NO 65904
  misc_feature (1)..(1577): Ortholog of  Ceres SEQ ID NO 13623086 as cited in SEQ ID NO 0
accaacttctcatcatcagccaagtgtaaagagtgcgaagaagcagtagcaaaaggattccattctcgtgttcttggagtggtccatcgatcgagctccgtgaaagagagagagagagagcaagcaatggcgacagcaggaaaggtgatcaagtgcagagctgccgtgacgtgggaggccggcaaaccgctgtccatcgaggaggtggaggtagcgccgccgcaggccatggaggtgcgtatcaagatcctctacaccgcgctctgccacaccgacgtctacttctgggaggccaaggggcaaaccccggtgttcccgaggatcttaggacacgaagcgggaggcatcgtggagagcgtcggagagggcgtgaccgacgtcgcgccaggcgaccacgtcctcccggtgttcaccggcgagtgcaaggagtgcgcccactgcaagtcggaggagagcaacatgtgcgacctcctcaggatcaacgtcgaccgcggcgtgatgatcggcgacggtaagtcccgcttcaccatcagcgggcagcccatcttccacttcgtcgggacgtccaccttcagcgagtacaccgtcatccatgtcggctgcctggccaagatcaaccccgaggcgcctctcgacaaagtctgcatcctcagctgtggtatctcgaccggccttggcgcgacactgaatgtggcgaaaccagccaagggctcgacggtggcgattttcgggcttggggctgtaggccttgctgctatggaaggtgctagactggctggtgcatcaaggatcatcggcgtggacatcaacccagcaaaatacgagcaagctaagaaatttggctgcactgaattcgttaaccccaaggaccacgacaagccagtgcaagaggtgctgattgagctgaccaacggcggcgtcgaccgcagcgtggagtgcaccggtaacgtcaacgccatgatatccgccttcgaatgtgtccacgacggctggggtgtcgccgtgctggtgggtgtcccgcacaaggacgaccagttcaagacccaccccatgaacttcctcagcgagaagacactcaagggcaccttcttcggaaactacaagccccgcaccgacctgcccaacgtggtcgagatgtacatgaaaaaggagctggagctggagaagttcatcacgcacagcgtgcccttctcggagatcaacacggcgttcgacctgatgctcaagggggagagcctgcgctgcatcatgaggatggaggattagagcttcattgcaagcttgctcctcctgcagggcaggcatgtcgcacagcaaatgggcatgaaaagttgaaggcgctccagtcctccagcttgtgtagtacacagtagcaataaaacgttagtgtttgtcctgtgcccatcctgtattattctgttccagggtttcacctttatcgtcagtgtgtggtcaggtttcaacccttctcagaacaacccccctcccagaaaaaaaacaaaggaagaagtttgtgtttcaagtttcagaatcccctgtctgtaatatccatttgcatgacaataatgagatactgt

SEQ ID NO: 10466 - protein, 421 aa, Zea mays subsp. mays
  peptide (1)..(421): Ceres Seq. ID no. 12595048
TNFSSSAKCKECEEAVAKGFHSRVLGVVHRSSSVKEREREQAMATAGKVIKCRAAVTWEAGKPLSIEEVEVAPPQAMEVRIKILYTALCHTDVYFWEAKGQTPVFPRILGHEAGGIVESVGEGVTDVAPGDHVLPVFTGECKECAHCKSEESNMCDLLRINVDRGVMIGDGKSRFTISGQPIFHFVGTSTFSEYTVIHVGCLAKINPEAPLDKVCILSCGISTGLGATLNVAKPAKGSTVAIFGLGAVGLAAMEGARLAGASRIIGVDINPAKYEQAKKFGCTEFVNPKDHDKPVQEVLIELTNGGVDRSVECTGNVNAMISAFECVHDGWGVAVLVGVPHKDDQFKTHPMNFLSEKTLKGTFFGNYKPRTDLPNVVEMYMKKELELEKFITHSVPFSEINTAFDLMLKGESLRCIMRMED

SEQ ID NO: 10467 - protein, 379 aa, Zea mays subsp. mays
  peptide (1)..(379): Ceres Seq. ID no. 12595049
MATAGKVIKCRAAVTWEAGKPLSIEEVEVAPPQAMEVRIKILYTALCHTDVYFWEAKGQTPVFPRILGHEAGGIVESVGEGVTDVAPGDHVLPVFTGECKECAHCKSEESNMCDLLRINVDRGVMIGDGKSRFTISGQPIFHFVGTSTFSEYTVIHVGCLAKINPEAPLDKVCILSCGISTGLGATLNVAKPAKGSTVAIFGLGAVGLAAMEGARLAGASRIIGVDINPAKYEQAKKFGCTEFVNPKDHDKPVQEVLIELTNGGVDRSVECTGNVNAMISAFECVHDGWGVAVLVGVPHKDDQFKTHPMNFLSEKTLKGTFFGNYKPRTDLPNVVEMYMKKELELEKFITHSVPFSEINTAFDLMLKGESLRCIMRMED

SEQ ID NO: 10468 - protein, 345 aa, Zea mays subsp. mays
  peptide (1)..(345): Ceres Seq. ID no. 12595050
MEVRIKILYTALCHTDVYFWEAKGQTPVFPRILGHEAGGIVESVGEGVTDVAPGDHVLPVFTGECKECAHCKSEESNMCDLLRINVDRGVMIGDGKSRFTISGQPIFHFVGTSTFSEYTVIHVGCLAKINPEAPLDKVCILSCGISTGLGATLNVAKPAKGSTVAIFGLGAVGLAAMEGARLAGASRIIGVDINPAKYEQAKKFGCTEFVNPKDHDKPVQEVLIELTNGGVDRSVECTGNVNAMISAFECVHDGWGVAVLVGVPHKDDQFKTHPMNFLSEKTLKGTFFGNYKPRTDLPNVVEMYMKKELELEKFITHSVPFSEINTAFDLMLKGESLRCIMRMED

SEQ ID NO: 10469 - DNA, 966 bp, Zea mays subsp. mays
  misc_feature (1)..(966): Ceres Seq. ID no. 12400800
  misc_feature (1)..(966): Ortholog of  Ceres SEQ ID NO 14302154 as cited in SEQ ID NO 0
aaaaataaataaataaaaacacgccgccgccatcaatggcgatgtcgcgcttcgggcgctccgggcagccggagaaccgcgaatctttctccatcctcgtcctcaacgtctccttccgcactacggctgacgatctcttcccgctcttcgatcgctacggcaaggtcttagacatctacatcccgcgcgaccacaggactggggatccgcgagggttcgcgttcgtgaggtacaattacgaggatgcaggcgcgggatgccattgacgggcttgatgggatgaggtttgatgggcgtgcgctcatggtgcagtttgccaaatacggacccaatgctgaaaagattcataggggtagaattacagaagaaaatccaaagccaaggggtcgttgcagaagccgcagtccaagacagaggtatcgagaggattatcgggatagagactatagaaggcgaagccagagcagaagtagggagcgatatgaacaggccgggtacagagatggtgatcatcgtcgccataggactcacagtatcagtcctgattatgacaggaaacgtaacagacacagtggctctcctgtacttaaacgccccagtcatagcagaagtcgttcgcctcgtagggcacctcatgaaggaatacctagcaagcccagagatggccgcgctgcatgttctggaagcccttgaccctgagctgtggctgaatatcacacagtttctcctggacagcttgaggcatctaaacagttctcatcatttgtattttcttactaagatggcctttgttttagtccaggatgagtagacgagctttggcaaaaacaacaatgtctgcttggttactgaatctacatggtgacaatgatggaatattgatgtggcacagcattcaacttccagtactgcgctttgtaaacatctaagcctcatttgggaactatatgcatgttggatattgtc

SEQ ID NO: 10470 - protein, 173 aa, Zea mays subsp. mays
  peptide (1)..(173): Ceres Seq. ID no. 12400801
MGVRSWCSLPNTDPMLKRFIGVELQKKIQSQGVVAEAAVQDRGIERIIGIETIEGEARAEVGSDMNRPGTEMVIIVAIGLTVSVLIMTGNVTDTVALLYLNAPVIAEVVRLVGHLMKEYLASPEMAALHVLEALDPELWLNITQFLLDSLRHLNSSHHLYFLTKMAFVLVQDE

SEQ ID NO: 10471 - protein, 159 aa, Zea mays subsp. mays
  peptide (1)..(159): Ceres Seq. ID no. 12400802
MLKRFIGVELQKKIQSQGVVAEAAVQDRGIERIIGIETIEGEARAEVGSDMNRPGTEMVIIVAIGLTVSVLIMTGNVTDTVALLYLNAPVIAEVVRLVGHLMKEYLASPEMAALHVLEALDPELWLNITQFLLDSLRHLNSSHHLYFLTKMAFVLVQDE

SEQ ID NO: 10472 - protein, 149 aa, Zea mays subsp. mays
  peptide (1)..(149): Ceres Seq. ID no. 12400803
MQARDAIDGLDGMRFDGRALMVQFAKYGPNAEKIHRGRITEENPKPRGRCRSRSPRQRYREDYRDRDYRRRSQSRSRERYEQAGYRDGDHRRHRTHSISPDYDRKRNRHSGSPVLKRPSHSRSRSPRRAPHEGIPSKPRDGRAACSGSP

SEQ ID NO: 10473 - DNA, 949 bp, Zea mays subsp. mays; identical to SEQ ID NO: 10425
  misc_feature (1)..(949): Ceres Seq. ID no. 12357451
  misc_feature (1)..(949): Ortholog of  Ceres SEQ ID NO 15175519 as cited in SEQ ID NO 1110
  misc_feature (1)..(949): Ortholog of  Ceres SEQ ID NO 13637980 as cited in SEQ ID NO 58973
  misc_feature (1)..(949): Ortholog of  Ceres SEQ ID NO 12624081 as cited in SEQ ID NO 61729
  misc_feature (1)..(949): Ortholog of  Ceres SEQ ID NO 13599435 as cited in SEQ ID NO 0

SEQ ID NO: 10474 - protein, 227 aa, Zea mays subsp. mays; identical to SEQ ID NO: 3431
  peptide (1)..(227): Ceres Seq. ID no. 12357452

SEQ ID NO: 10475 - protein, 206 aa, Zea mays subsp. mays; identical to SEQ ID NO: 3432
  peptide (1)..(206): Ceres Seq. ID no. 12357453

SEQ ID NO: 10476 - DNA, 735 bp, Zea mays subsp. mays
  misc_feature (1)..(735): Ceres Seq. ID no. 12351018
  misc_feature (1)..(735): Ortholog of  Ceres SEQ ID NO 12613614 as cited in SEQ ID NO 68243
  misc_feature (1)..(735): Ortholog of  Ceres SEQ ID NO 12556636 as cited in SEQ ID NO 0
  misc_feature (1)..(735): Ortholog of  Ceres SEQ ID NO 13600066 as cited in SEQ ID NO 0
  misc_feature (1)..(735): Ortholog of  Ceres SEQ ID NO 15179946 as cited in SEQ ID NO 0
cccaaaatactccaccaccgcacccactagggtttccgcaccgcattgcagaacctcgccgcctccaccctcaccacaccaccggcgatgtccacagcggcggcgcagggcggcagcgacaagccggcgctccggaggcccgtcttcaccaaggtcgaccagctcaggccgggcaccaacgggcacaccctcaccgtcaaggtcgtcagcgccacccccgtgcctgggcgcgcgcgcccaggcgcacccgccgccgccccatcccgcgcgccgcgcatcgccgagtgcctcgtcggggacgagaccggcgccatcgtcttcaccgcccgcaacgaccaagttgacttgctgaagcccaatgcgacagtgatcttgcgcaatgccaaaatagacatgttcaaaggatcaatgaggcttgcagtggacaagtgggggcggattgaggctgtagagccagccagtttcacggtgaaggaagacaacaacctgtctctaatagagtatgaattggttaatgtggctgagtaactgtccaatccaagcgtttctgccccctttatttcgtgccataagaaggaagtaccatgaatgaacattataaagcctcttgaagcgaagcgagtttatttgctacggtggggtagataaaggtcaaggctgtatggcctgtgttagaactttggataaattaagatgaattgcccttgcatctatgagattgttatccatctttgt

SEQ ID NO: 10477 - protein, 146 aa, Zea mays subsp. mays
  peptide (1)..(146): Ceres Seq. ID no. 12351019
MSTAAAQGGSDKPALRRPVFTKVDQLRPGTNGHTLTVKVVSATPVPGRARPGAPAAAPSRAPRIAECLVGDETGAIVFTARNDQVDLLKPNATVILRNAKIDMFKGSMRLAVDKWGRIEAVEPASFTVKEDNNLSLIEYELVNVAE

SEQ ID NO: 10478 - protein, 116 aa, Zea mays subsp. mays
  peptide (1)..(116): Ceres Seq. ID no. 12351020
PKYSTTAPTRVSAPHCRTSPPPPSPHHRRCPQRRRRAAATSRRSGGPSSPRSTSSGRAPTGTPSPSRSSAPPPCLGARAQAHPPPPHPARRASPSASSGTRPAPSSSPPATTKLTC

SEQ ID NO: 10479 - protein, 113 aa, Zea mays subsp. mays
  peptide (1)..(113): Ceres Seq. ID no. 12351021
QNTPPPHPLGFPHRIAEPRRLHPHHTTGDVHSGGAGRQRQAGAPEARLHQGRPAQAGHQRAHPHRQGRQRHPRAWARAPRRTRRRPIPRAAHRRVPRRGRDRRHRLHRPQRPS

SEQ ID NO: 10480 - DNA, 662 bp, Zea mays subsp. mays
  misc_feature (1)..(662): Ceres Seq. ID no. 12400556
  misc_feature (1)..(662): Ortholog of  Ceres SEQ ID NO 13660862 as cited in SEQ ID NO 60846
aattctctctcgaccgcggcatggccgccggcctctcattcccccgcgccggggccccgttcatcctcctccgcacctcctgtttctctccgtgggcagctctggtgccccgccgtcgacttctctctgggcctcccactgccggtgatcccccgcccccggcgctcccgccaacttcgaagctcgccgccccgccggttgtgggaacgccggagcccccgctgccgtttagggccgtggaggcggagatccttcgcgatattgaccccgtcgtcctgctcatcaaggatatcctccactccgatagatacggggatggcgaatgtctctgcccaagggacgaaaatgtcgtcgtggagaagctcctctcctaccatccacgcgcgcaggacaaaattgggtgtggacttgacgctataatggttgataggcaccctgagttcagaaagtcaagatgcctcttcgttgttcgaacagacggtgtttggattgatttctcataccagaagtgcctccgtgcatacatccgggaaaagtacccgtctcatgccgacagatttatacgagaacatttcaagcgaacatgaagcaaacccaaaagtaatttgaatacattgtatttttatgagttttggcatagtttatgtacatcattgaccctc

SEQ ID NO: 10481 - protein, 194 aa, Zea mays subsp. mays
  peptide (1)..(194): Ceres Seq. ID no. 12400557
FSLDRGMAAGLSFPRAGAPFILLRTSCFSPWAALVPRRRLLSGPPTAGDPPPPALPPTSKLAAPPVVGTPEPPLPFRAVEAEILRDIDPVVLLIKDILHSDRYGDGECLCPRDENVVVEKLLSYHPRAQDKIGCGLDAIMVDRHPEFRKSRCLFVVRTDGVWIDFSYQKCLRAYIREKYPSHADRFIREHFKRT

SEQ ID NO: 10482 - protein, 188 aa, Zea mays subsp. mays
  peptide (1)..(188): Ceres Seq. ID no. 12400558
MAAGLSFPRAGAPFILLRTSCFSPWAALVPRRRLLSGPPTAGDPPPPALPPTSKLAAPPVVGTPEPPLPFRAVEAEILRDIDPVVLLIKDILHSDRYGDGECLCPRDENVVVEKLLSYHPRAQDKIGCGLDAIMVDRHPEFRKSRCLFVVRTDGVWIDFSYQKCLRAYIREKYPSHADRFIREHFKRT

SEQ ID NO: 10483 - protein, 139 aa, Zea mays subsp. mays
  peptide (1)..(139): Ceres Seq. ID no. 12400559
NSLSTAAWPPASHSPAPGPRSSSSAPPVSLRGQLWCPAVDFSLGLPLPVIPRPRRSRQLRSSPPRRLWERRSPRCRLGPWRRRSFAILTPSSCSSRISSTPIDTGMANVSAQGTKMSSWRSSSPTIHARRTKLGVDLTL

SEQ ID NO: 10484 - DNA, 638 bp, Zea mays subsp. mays
  misc_feature (1)..(638): Ceres Seq. ID no. 12400466
  misc_feature (1)..(638): Ortholog of  Ceres SEQ ID NO 13598282 as cited in SEQ ID NO 68138
atgtgtggttgtgttcttataacagatgagagtgtggttgctcttgccaacggatgtccgcacctgcgctcgctgggcctctacttctgccagaacatcacggaccgcgccatgtactccctcgcaaacagccgcgtgaagagcaagcgtgggaggtgggatgcagtgaaagacgggctcgcgaacctcaacatcagccagtgcaccgccctgacgcccccggcggtgcaggccgtctgcgactccttcccggcgctgcacacctgccccgagaggcactccctcatcatcagtggctgcctcagcctcacgtcagtccactgcgcctgcgccctccacccacaccgtgccgggagagccctgatggccaaccatgcgtactaataagcatgttgggtggctttgcgctgatagttctcgtgaatggggacgcatgcctgggggtgatggcgtcgtccaggtgtagaggaagctccctgtgtacataaactcgaaacttggcggtgtgataagacactgctgtggtaggactttgtgtgataatcatggagtggcgaatttctggagagtggcatgtactccagtgctacctggacattgaccagaaaaaaaatgtggtatctagtggccttctgtgt

SEQ ID NO: 10485 - protein, 144 aa, Zea mays subsp. mays
  peptide (1)..(144): Ceres Seq. ID no. 12400467
MSAPALAGPLLLPEHHGPRHVLPRKQPREEQAWEVGCSERRAREPQHQPVHRPDAPGGAGRLRLLPGAAHLPREALPHHQWLPQPHVSPLRLRPPPTPCRESPDGQPCVLISMLGGFALIVLVNGDACLGVMASSRCRGSSLCT

SEQ ID NO: 10486 - protein, 127 aa, Zea mays subsp. mays
  peptide (1)..(127): Ceres Seq. ID no. 12400468
MCGCVLITDESVVALANGCPHLRSLGLYFCQNITDRAMYSLANSRVKSKRGRWDAVKDGLANLNISQCTALTPPAVQAVCDSFPALHTCPERHSLIISGCLSLTSVHCACALHPHRAGRALMANHAY

SEQ ID NO: 10487 - protein, 90 aa, Zea mays subsp. mays
  peptide (1)..(90): Ceres Seq. ID no. 12400469
MYSLANSRVKSKRGRWDAVKDGLANLNISQCTALTPPAVQAVCDSFPALHTCPERHSLIISGCLSLTSVHCACALHPHRAGRALMANHAY

SEQ ID NO: 10488 - DNA, 764 bp, Zea mays subsp. mays
  misc_feature (1)..(764): Ceres Seq. ID no. 12380968
  misc_feature (1)..(764): Ortholog of  Ceres SEQ ID NO 13598930 as cited in SEQ ID NO 0
gcacgagaccattacctagaacatcctaatcgaaaactcttcttcgcattgcctttcccttcagttgcaccgacctccagacgaaaccacccaagacgcgtgcttccattcctagcccaacagaagcgaagcacgccaccgaccaccggcctcgaagggatcatcttctctacaactcgtcctcgtggccttgttcctcctcttgtataggggactgcggcggagtggagatccgtgccgacatagtccgacttcttcgctcgctgcctacgattgatggcctcaccttcaccaaccgaagagttcagcagggaagcagctcgtcagtctctgatcgcgatctccgagtccactccggagacaccttcaccgcagacggtgaggacaccgccgatctccagcgcagagaacgggaagccgggcgatggggcggacaagttcagatcgaagctgatgtccatcacagacctgtcttctgatgcccaacctgcgcagtgccctcccgaggatgtcgctgcttaatcaatcgtgtgattctctgctcgacttgcggacacgatgtatcagtgcttgccgatcctctgaactggacatttggctgtcgtgctttaaactggacgtccttatggcttatgttattactggtcgtttttatttgataaataaatattcaggggaacgggtggaaatatactgtacaagtttcctgacttgttgatgaggaaccggtttgtctgaacatgctgccatgcactcatgctcgg

SEQ ID NO: 10489 - protein, 81 aa, Zea mays subsp. mays
  peptide (1)..(81): Ceres Seq. ID no. 12380969
MASPSPTEEFSREAARQSLIAISESTPETPSPQTVRTPPISSAENGKPGDGADKFRSKLMSITDLSSDAQPAQCPPEDVAA

SEQ ID NO: 10490 - protein, 79 aa, Zea mays subsp. mays
  peptide (1)..(79): Ceres Seq. ID no. 12380970
MPNLRSALPRMSLLNQSCDSLLDLRTRCISACRSSELDIWLSCFKLDVLMAYVITGRFYLINKYSGERVEIYCTSFLTC

SEQ ID NO: 10491 - protein, 69 aa, Zea mays subsp. mays
  peptide (1)..(69): Ceres Seq. ID no. 12380971
MSLLNQSCDSLLDLRTRCISACRSSELDIWLSCFKLDVLMAYVITGRFYLINKYSGERVEIYCTSFLTC

SEQ ID NO: 10492 - DNA, 718 bp, Zea mays subsp. mays
  misc_feature (1)..(718): Ceres Seq. ID no. 12390515
  misc_feature (1)..(718): Ortholog of  Ceres SEQ ID NO 15174240 as cited in SEQ ID NO 61866
cgcccccgcatcgtcgccaaagatgcagatctttgtgaagactctgacggggaagaccatcactttaggaggtggagtcctcggacaccatcgacaatgtgaaggccaagatccaggacaaggagggaatccccccggaccagcagcggctcatcttcgccggcaagcagctcgaggacggtcgcaccctcgccgactacaacatccagaaggagtccaccctccacctggtgctccgcctccgaggtggcgccaagaagcgcaagaagaagacgtacaccaagcccaagaagatcaagcacaagcacaagaaggtaaagctcgcagtgctgcagttctacaaggtggacgacgccaccggcaaggtgacccgcctccgcaaggagtgccccaacaccgagtgcggtgcgggtgtnttcatggccaaccacttcgaccgccactactgcggcaagtgcggcctcacctacgtctacaatcagaaggcgtaatcccatgcgccgctttgcttcacccgcctacctatcacgcattcacctgttggttactcgatttgaatatcatttagatcggtttgaggttggaacataaatgcagcagtagtttctgtcttattatattggtacctctgttactgagttgatgtggtcctggctcctgagcttaattttgttttcgtgttctatccttagagacgattgtaccttttggccgtttc

SEQ ID NO: 10493 - protein, 188 aa, Zea mays subsp. mays
  peptide (1)..(188): Ceres Seq. ID no. 12390516
  misc_feature (139)..(139): Xaa is any aa, unknown or other
APASSPKMQIFVKTLTGKTITLGGGVLGHHRQCEGQDPGQGGNPPGPAAAHLRRQAARGRSHPRRLQHPEGVHPPPGAPPPRWRQEAQEEDVHQAQEDQAQAQEGKARSAAVLQGGRRHRQGDPPPQGVPQHRVRCGCXHGQPLRPPLLRQVRPHLRLQSEGVIPCAALLHPPTYHAFTCWLLDLNII

SEQ ID NO: 10494 - protein, 181 aa, Zea mays subsp. mays
  peptide (1)..(181): Ceres Seq. ID no. 12390517
  misc_feature (132)..(132): Xaa is any aa, unknown or other
MQIFVKTLTGKTITLGGGVLGHHRQCEGQDPGQGGNPPGPAAAHLRRQAARGRSHPRRLQHPEGVHPPPGAPPPRWRQEAQEEDVHQAQEDQAQAQEGKARSAAVLQGGRRHRQGDPPPQGVPQHRVRCGCXHGQPLRPPLLRQVRPHLRLQSEGVIPCAALLHPPTYHAFTCWLLDLNII

SEQ ID NO: 10495 - DNA, 1181 bp, Zea mays subsp. mays; identical to SEQ ID NO: 10300
  misc_feature (1)..(1181): Ceres Seq. ID no. 12364890
  misc_feature (1)..(1181): Ortholog of  Ceres SEQ ID NO 15176294 as cited in SEQ ID NO 60388

SEQ ID NO: 10496 - protein, 161 aa, Zea mays subsp. mays; identical to SEQ ID NO: 10301
  peptide (1)..(161): Ceres Seq. ID no. 12364891
  misc_feature (92)..(92): Xaa is any aa, unknown or other
  misc_feature (115)..(115): Xaa is any aa, unknown or other
  misc_feature (116)..(116): Xaa is any aa, unknown or other
  misc_feature (118)..(118): Xaa is any aa, unknown or other

SEQ ID NO: 10497 - protein, 147 aa, Zea mays subsp. mays; identical to SEQ ID NO: 10302
  peptide (1)..(147): Ceres Seq. ID no. 12364892
  misc_feature (78)..(78): Xaa is any aa, unknown or other
  misc_feature (101)..(101): Xaa is any aa, unknown or other
  misc_feature (102)..(102): Xaa is any aa, unknown or other
  misc_feature (104)..(104): Xaa is any aa, unknown or other

SEQ ID NO: 10498 - protein, 99 aa, Zea mays subsp. mays; identical to SEQ ID NO: 10303
  peptide (1)..(99): Ceres Seq. ID no. 12364893

SEQ ID NO: 10499 - DNA, 1166 bp, Zea mays subsp. mays
  misc_feature (1)..(1166): Ceres Seq. ID no. 12400815
  misc_feature (1)..(1166): Ortholog of  Ceres SEQ ID NO 13597524 as cited in SEQ ID NO 64782
aacgccgccgccgccatggccactgccggagccttccacgccggcggcttcctcctcctcccggtccgacgaagtctccgcgggcccagcccctcaccatggtcccacttccgcacccacttcatctcctccaagccgccgccctccacccctctcccgccgcccgtgccgccagctcgcctgtcccccgtgggttctgccttcgggcctcctagcagaaagaccggcgcggttggagccggggctggcgcgggtgtcgtcgggtggtaccttggcctcttggacgcgcggcccgtgctgaccaagagcgtcaccgccgctgtcatcttcaccgccgcggacgtctcctcccagatgctcacacttggtcctgaggattcacttgattttcttaggaccatgcgtatggctagttatgggtttctgatctcaggacctagcctccatctttggttcaattttatctcaaaattgttccccaaaaaagatgtagtgaacacattgaagaagatgtttatagggcaagcagtctatggaccaattattaactcagttttcttctcatacaatgcaggattacaaggcgagactgttgctgagattattgcaagattgaagagggatctagttcccaccatcaaaagcgggcttttatactggccaacttgtgatttcattactttcaagtttgttccagttcatttacagccgctagtgagcaattcattctcatttctgtggaccatctacataacatatatggccagcttaaagaaagcagatgtggaggtggccccgagtacctaggtgttgtcgagtgactcaacatggctgttatctgtcgattcttcgtacaaggcagacttcatgtatgcctcctggatcgcggatgttatcgaccggcgattttaggctttagagagatggattgcttacgatgcatccttcacttttggttagggcatagtgtccacagggattctacttgcttatgtttttggctgaagaccattttgtttggatgatcgaattatactaggttcattgggtgggtcttctacgacgtctttcttacggtcttttgatcctatggctaagaagtacatttacttcaactaaattttctgtatctagttatggagatgcaagtgaacctgttctttgcc

SEQ ID NO: 10500 - protein, 268 aa, Zea mays subsp. mays
  peptide (1)..(268): Ceres Seq. ID no. 12400816
NAAAAMATAGAFHAGGFLLLPVRRSLRGPSPSPWSHFRTHFISSKPPPSTPLPPPVPPARLSPVGSAFGPPSRKTGAVGAGAGAGVVGWYLGLLDARPVLTKSVTAAVIFTAADVSSQMLTLGPEDSLDFLRTMRMASYGFLISGPSLHLWFNFISKLFPKKDVVNTLKKMFIGQAVYGPIINSVFFSYNAGLQGETVAEIIARLKRDLVPTIKSGLLYWPTCDFITFKFVPVHLQPLVSNSFSFLWTIYITYMASLKKADVEVAPST

SEQ ID NO: 10501 - protein, 263 aa, Zea mays subsp. mays
  peptide (1)..(263): Ceres Seq. ID no. 12400817
MATAGAFHAGGFLLLPVRRSLRGPSPSPWSHFRTHFISSKPPPSTPLPPPVPPARLSPVGSAFGPPSRKTGAVGAGAGAGVVGWYLGLLDARPVLTKSVTAAVIFTAADVSSQMLTLGPEDSLDFLRTMRMASYGFLISGPSLHLWFNFISKLFPKKDVVNTLKKMFIGQAVYGPIINSVFFSYNAGLQGETVAEIIARLKRDLVPTIKSGLLYWPTCDFITFKFVPVHLQPLVSNSFSFLWTIYITYMASLKKADVEVAPST

SEQ ID NO: 10502 - protein, 150 aa, Zea mays subsp. mays
  peptide (1)..(150): Ceres Seq. ID no. 12400818
MLTLGPEDSLDFLRTMRMASYGFLISGPSLHLWFNFISKLFPKKDVVNTLKKMFIGQAVYGPIINSVFFSYNAGLQGETVAEIIARLKRDLVPTIKSGLLYWPTCDFITFKFVPVHLQPLVSNSFSFLWTIYITYMASLKKADVEVAPST

SEQ ID NO: 10503 - DNA, 599 bp, Zea mays subsp. mays
  misc_feature (1)..(599): Ceres Seq. ID no. 12400807
  misc_feature (1)..(599): Ortholog of  Ceres SEQ ID NO 12329459 as cited in SEQ ID NO 20533
cgaaaaatcttctcccccagctccccagcaccagtccccaattatttggcctccgtcagagaggggagaaagacccgttcgaggcggcggcgatgtcggggcgcggcaacggcggcaagggtctgggcaagggtggagccaagcgccaccggaaggtgctccgcgacaacatccagggcatcaccaagccggcgatccggaggctggctcggaggggcggcgtgaagcgcatctcggggctcatctacgaggagacccgcggcgtgctcaagatcttcctcgagaacgtcatccgcgacgccgtcacctacaccgagcacgcgcgccgcaagaccgtcaccgccatggatgtcgtctacgcgctcaagcgccagggccgcaccctctacggcttcggaggctaggcgcctcttcgtagctggggaatgcttagggtgatacgtctctgtcgctgtgggtcgtagtgttgctgcgttcctggatgtaatccattttttttttctgcaatgaagagatgctggcaagcatactacctgcatatgttgcgcctgggtgattgttctccttagaaatggtagtaacagtgaatcttgttcacg

SEQ ID NO: 10504 - protein, 138 aa, Zea mays subsp. mays
  peptide (1)..(138): Ceres Seq. ID no. 12400808
EKSSPPAPQHQSPIIWPPSERGERPVRGGGDVGARQRRQGSGQGWSQAPPEGAPRQHPGHHQAGDPEAGSEGRREAHLGAHLRGDPRRAQDLPRERHPRRRHLHRARAPQDRHRHGCRLRAQAPGPHPLRLRRLGASS

SEQ ID NO: 10505 - protein, 133 aa, Zea mays subsp. mays
  peptide (1)..(133): Ceres Seq. ID no. 12400809
KNLLPQLPSTSPQLFGLRQRGEKDPFEAAAMSGRGNGGKGLGKGGAKRHRKVLRDNIQGITKPAIRRLARRGGVKRISGLIYEETRGVLKIFLENVIRDAVTYTEHARRKTVTAMDVVYALKRQGRTLYGFGG

SEQ ID NO: 10506 - protein, 103 aa, Zea mays subsp. mays
  peptide (1)..(103): Ceres Seq. ID no. 12400810
MSGRGNGGKGLGKGGAKRHRKVLRDNIQGITKPAIRRLARRGGVKRISGLIYEETRGVLKIFLENVIRDAVTYTEHARRKTVTAMDVVYALKRQGRTLYGFGG

SEQ ID NO: 10507 - DNA, 1630 bp, Zea mays subsp. mays
  misc_feature (1)..(1630): Ceres Seq. ID no. 13498060
  misc_feature (1)..(1630): Ortholog of  Ceres SEQ ID NO 14315063 as cited in SEQ ID NO 52256
  misc_feature (1)..(1630): Ortholog of  Ceres SEQ ID NO 15172325 as cited in SEQ ID NO 54668
  misc_feature (1)..(1630): Ortholog of  Ceres SEQ ID NO 13597678 as cited in SEQ ID NO 65375
  misc_feature (1)..(1630): Ortholog of  Ceres SEQ ID NO 13662880 as cited in SEQ ID NO 65422
  misc_feature (1)..(1630): Ortholog of  Ceres SEQ ID NO 14302071 as cited in SEQ ID NO 66585
  misc_feature (1)..(1630): Ortholog of  Ceres SEQ ID NO 14316013 as cited in SEQ ID NO 67181
  misc_feature (1)..(1630): Ortholog of  Ceres SEQ ID NO 12779098 as cited in SEQ ID NO 67698
  misc_feature (1)..(1630): Ortholog of  Ceres SEQ ID NO 13596180 as cited in SEQ ID NO 67941
  misc_feature (1)..(1630): Ortholog of  Ceres SEQ ID NO 13591190 as cited in SEQ ID NO 68044
  misc_feature (1)..(1630): Ortholog of  Ceres SEQ ID NO 13596089 as cited in SEQ ID NO 68373
aataatggccggcgcccaagaagctggcgacgccctggtcatcagccgtgcgcgcggcgnntgctggtgttcccgctgcccttccagggccacatcgacccgatgctgcacctggcgggcgtgctccacgcgcggggcctcgcggtgaccgtgctccacacgcgcttcaacgcgttggaccccgcgcggcacccggagttccagttcgtggccgtccccgacggcacgcccgccgacgtcgccgccatggggaggatcatcgacatcatcctggccatgaacgccgccatggaggcgtcgccggccgtcggggaggcgctgcgggcgtccgcggtcgcggggcaggacgggcggccccgcgcctcgtgcctcttcgtcgacgccaacctcctcgccgtgcacagggcggccagggcgctcggactgcccacgctggtgctgcgcaccgggagcgccgcctgcctcggctgcttcctggcctaccccatgctccacgaaaagggctatctgcctccgcaagagtcgcagctgtgcacgccggtgccggagctgccaccactccgagtgaaggacctgatctactcgaagcacagcgaccacgagctgatgcgcaaagtcctcgcccggggcagcgaaacagtgagagattgctccggcgtcgtcatcaacacagccgaggcactggaggcagccgagctagggaggctccgcgacgagctggtccacctcccggtggtgctcgccgccggcccactccacaagctctcctcctccaggggcgccgggagcagcttgctcgccccggaccacagctgcatcgagtggctggacgcgcagcggcccgggtcggtgctgtacgtgagcttcgggagcctggcggccatggactcgagcgagctccgggaggtggcatggggtctggcggagtgcggccaccccttcctatgggtcgtccggcccaacatggtacgaggctgcgacgtcgacagcgcgcggcagctgccggatggtttcgaggacgccgtcaagggcagaggcgtggtggtccgctgggccccgcagcaggaggtgctggcccaccgcgcagtgggtgggttctggagccactgcgggtggaactcgactctggaggcggtcagcgagggggtcccgatgatctgcaggccggacgccgtggaccagatgatgaacacgaggtacttgcaggacgtctggggcgtcggcttcgagctccaaggggagctggagagggggaagatcaaggacgcggttaggaagttgatgggtgagcgggagggagctgagatgagaagagcagcgcaagagctttgcgcgaaactagcaggctgcttggagagcactgggtcttctcaggttgccattgacaagttggttagctacattctgtctctgtgaatcttctgttctatggcgtatgtgtgttccgctgggttagcattggcagcagcttaacagctggtactcttatatggacaattattcctgtcaattatatgtagtgttctctttctctagctattttttaatttctctacacaccagcttctgatttcgttttaccgccttccatatcggagatattataaacctgactccctttcaagctctc

SEQ ID NO: 10508 - protein, 471 aa, Zea mays subsp. mays
  peptide (1)..(471): Ceres Seq. ID no. 13498061
  misc_feature (20)..(20): Xaa is any aa, unknown or other
  misc_feature (21)..(21): Xaa is any aa, unknown or other
NNGRRPRSWRRPGHQPCARXXLVFPLPFQGHIDPMLHLAGVLHARGLAVTVLHTRFNALDPARHPEFQFVAVPDGTPADVAAMGRIIDIILAMNAAMEASPAVGEALRASAVAGQDGRPRASCLFVDANLLAVHRAARALGLPTLVLRTGSAACLGCFLAYPMLHEKGYLPPQESQLCTPVPELPPLRVKDLIYSKHSDHELMRKVLARGSETVRDCSGVVINTAEALEAAELGRLRDELVHLPVVLAAGPLHKLSSSRGAGSSLLAPDHSCIEWLDAQRPGSVLYVSFGSLAAMDSSELREVAWGLAECGHPFLWVVRPNMVRGCDVDSARQLPDGFEDAVKGRGVVVRWAPQQEVLAHRAVGGFWSHCGWNSTLEAVSEGVPMICRPDAVDQMMNTRYLQDVWGVGFELQGELERGKIKDAVRKLMGEREGAEMRRAAQELCAKLAGCLESTGSSQVAIDKLVSYILSL

SEQ ID NO: 10509 - protein, 437 aa, Zea mays subsp. mays
  peptide (1)..(437): Ceres Seq. ID no. 13498062
MLHLAGVLHARGLAVTVLHTRFNALDPARHPEFQFVAVPDGTPADVAAMGRIIDIILAMNAAMEASPAVGEALRASAVAGQDGRPRASCLFVDANLLAVHRAARALGLPTLVLRTGSAACLGCFLAYPMLHEKGYLPPQESQLCTPVPELPPLRVKDLIYSKHSDHELMRKVLARGSETVRDCSGVVINTAEALEAAELGRLRDELVHLPVVLAAGPLHKLSSSRGAGSSLLAPDHSCIEWLDAQRPGSVLYVSFGSLAAMDSSELREVAWGLAECGHPFLWVVRPNMVRGCDVDSARQLPDGFEDAVKGRGVVVRWAPQQEVLAHRAVGGFWSHCGWNSTLEAVSEGVPMICRPDAVDQMMNTRYLQDVWGVGFELQGELERGKIKDAVRKLMGEREGAEMRRAAQELCAKLAGCLESTGSSQVAIDKLVSYILSL

SEQ ID NO: 10510 - protein, 389 aa, Zea mays subsp. mays
  peptide (1)..(389): Ceres Seq. ID no. 13498063
MGRIIDIILAMNAAMEASPAVGEALRASAVAGQDGRPRASCLFVDANLLAVHRAARALGLPTLVLRTGSAACLGCFLAYPMLHEKGYLPPQESQLCTPVPELPPLRVKDLIYSKHSDHELMRKVLARGSETVRDCSGVVINTAEALEAAELGRLRDELVHLPVVLAAGPLHKLSSSRGAGSSLLAPDHSCIEWLDAQRPGSVLYVSFGSLAAMDSSELREVAWGLAECGHPFLWVVRPNMVRGCDVDSARQLPDGFEDAVKGRGVVVRWAPQQEVLAHRAVGGFWSHCGWNSTLEAVSEGVPMICRPDAVDQMMNTRYLQDVWGVGFELQGELERGKIKDAVRKLMGEREGAEMRRAAQELCAKLAGCLESTGSSQVAIDKLVSYILSL

SEQ ID NO: 10511 - DNA, 1311 bp, Zea mays subsp. mays
  misc_feature (1)..(1311): Ceres Seq. ID no. 12400884
  misc_feature (1)..(1311): Ortholog of  Ceres SEQ ID NO 13598735 as cited in SEQ ID NO 64586
actggataattcgctcgctccgctcgatgcccgcttgtttgcggtgaagcctccggcgaacagccgtagcggaaacgccgcccgagatgtctgctccctccgccccaccccgcacggtgatctgtgtgggcgacgtccacggctacatcacgaagctggagagcctctggtccaacctccaggctgcactccccgccgacgccttcgccaccgcgctggtcatcttcctcggcgactacaacgatcgcggcccgcacacccgcagggtcctcgacttcctcctcgcgctcccgacgcgctaccccgcgcagcgccacgtcttcctctgcggcaaccacgacctcgccttcgcggcgttcgtcggggcgctgccgccgccgcccgacggctccccgttctcggccacctgggacgagtacatccacaacgaggagcacgaggggtggttccgcgggccgggattcgagggcatgcacgtgcaggggaggcggtggggcggggtcatcaaggagaggtggaaccccaagaaggggctcccgtacaagggctccatctacgacgcgcagcccaccttcgaatcctatggcgtcgcccatggttcccctgatcttgcaaaggctgtgccagaggagcacaagaggtttctgcatgatttggtttggatacatgaagaggaaaatgtgccaattgatatggatggaggacaaatcatctgcaatctgattgctgtccatgctggcctagagaggactatagatttgaatgagcaacttagagttttaagaactagagacacaagggtgccaaaggttcaaatgcttagtgggaggcaagatgtttgggacacacccaagggtctggccggcaagcagactattattgtaagtggccaccacgggaagctccacatcgacggcctccgatttataatcgacgaaggtggtggttatgaagacaaacctattgctgcaatagtttttccttcaaagacattgatcagaagtaccgaggaagcgggaaccacatcagagaggtgatctagagttctagacatcatcaggagcagtgaacacggaggcacagttttctctctctcttgaagttactgcttgtagtcatgtactcatgtcaaacgacaataggaagttaggaacaacgtccaaaggcaataagttggtgaaccggacctgcgttttctcattttagtcactaatgactatatgtctatatatattgtaccttgatgctgtcaatttagacgagaccgtacatcctcttttttagggcaataaactttactccctgtcctct

SEQ ID NO: 10512 - protein, 316 aa, Zea mays subsp. mays
  peptide (1)..(316): Ceres Seq. ID no. 12400885
MSAPSAPPRTVICVGDVHGYITKLESLWSNLQAALPADAFATALVIFLGDYNDRGPHTRRVLDFLLALPTRYPAQRHVFLCGNHDLAFAAFVGALPPPPDGSPFSATWDEYIHNEEHEGWFRGPGFEGMHVQGRRWGGVIKERWNPKKGLPYKGSIYDAQPTFESYGVAHGSPDLAKAVPEEHKRFLHDLVWIHEEENVPIDMDGGQIICNLIAVHAGLERTIDLNEQLRVLRTRDTRVPKVQMLSGRQDVWDTPKGLAGKQTIIVSGHHGKLHIDGLRFIIDEGGGYEDKPIAAIVFPSKTLIRSTEEAGTTSER

SEQ ID NO: 10513 - protein, 201 aa, Zea mays subsp. mays
  peptide (1)..(201): Ceres Seq. ID no. 12400886
LDNSLAPLDARLFAVKPPANSRSGNAARDVCSLRPTPHGDLCGRRPRLHHEAGEPLVQPPGCTPRRRLRHRAGHLPRRLQRSRPAHPQGPRLPPRAPDALPRAAPRLPLRQPRPRLRGVRRGAAAAARRLPVLGHLGRVHPQRGARGVVPRAGIRGHARAGEAVGRGHQGEVEPQEGAPVQGLHLRRAAHLRILWRRPWFP

SEQ ID NO: 10514 - protein, 188 aa, Zea mays subsp. mays
  peptide (1)..(188): Ceres Seq. ID no. 12400887
MHVQGRRWGGVIKERWNPKKGLPYKGSIYDAQPTFESYGVAHGSPDLAKAVPEEHKRFLHDLVWIHEEENVPIDMDGGQIICNLIAVHAGLERTIDLNEQLRVLRTRDTRVPKVQMLSGRQDVWDTPKGLAGKQTIIVSGHHGKLHIDGLRFIIDEGGGYEDKPIAAIVFPSKTLIRSTEEAGTTSER

SEQ ID NO: 10515 - DNA, 1072 bp, Zea mays subsp. mays
  misc_feature (1)..(1072): Ceres Seq. ID no. 12340576
  misc_feature (1)..(1072): Ortholog of  Ceres SEQ ID NO 14304202 as cited in SEQ ID NO 56346
  misc_feature (1)..(1072): Ortholog of  Ceres SEQ ID NO 14304159 as cited in SEQ ID NO 56494
  misc_feature (1)..(1072): Ortholog of  Ceres SEQ ID NO 12613472 as cited in SEQ ID NO 60611
  misc_feature (1)..(1072): Ortholog of  Ceres SEQ ID NO 12623915 as cited in SEQ ID NO 61013
acgtgccgtcgccacaatttaagcacggcttcctccgccacgacctccacacatcaccagcgcacagctctcctcatcggcgcacccgagctcgccctctccttcctcatcgaggcccgagtcctgctctgatggcgaccgacgtggctgagactcccgcgccgttggtggatgcggcccctgaggcgcccgcggacaccccggcggcgcctgctgttgacgcgaagccggccaaggccaagaaggccacagcgccgaagaagcgcgccagcccgacccatccgccgtacgccgagatggtctcggaggcgatcgcgtcgctcaaggagaggacggggtccagcagctttgctattgccaagttcttggaggacaagcacaaggacaagctcccgcccaacttccgcaagcttctgaacgttcagctcaagaagctcgtcgccggcggcaagctgaccaaggtgaagaactcgtacaagctgtcgtccgccaccaagccaaaggccgccccgaagaagaccaagaccggcgtgaagaagcccaaggccgctgccaaaccgaaggccaagtcccccgcgaagcccaagcccgccacaaagcccaaggcggccgcgaagcccgcttccaagcccgaaagcagcagcaaaacccaaggcaccagccaagcccaaggccaagcctgctgccaaggcgaagcccaaggctgccggcgctaagccgaagccagctgccaagaaggccggccgccccgccaaggcggccaagacgtcggccaaggccacgccaggaaagaaggcgccggtggccaagaagcccgcggccgccgcgaagaaggcgccggtagccaagaaggccgctccggcgaagaaggcggctgcccctgcccgaaaagcgccgtctcggaaggcgaagaagtagaggaggggtaggcgtcggagaaatgtagggtttggttctcgtattacgctagatgtttgctctccctttagcctaggtggtgtctgtgtgtgcaatgttgtaaatttgatatcggatgctgggaacactaagtcaatctttcagtagctgttgt

SEQ ID NO: 10516 - protein, 237 aa, Zea mays subsp. mays
  peptide (1)..(237): Ceres Seq. ID no. 12340577
VPSPQFKHGFLRHDLHTSPAHSSPHRRTRARPLLPHRGPSPALMATDVAETPAPLVDAAPEAPADTPAAPAVDAKPAKAKKATAPKKRASPTHPPYAEMVSEAIASLKERTGSSSFAIAKFLEDKHKDKLPPNFRKLLNVQLKKLVAGGKLTKVKNSYKLSSATKPKAAPKKTKTGVKKPKAAAKPKAKSPAKPKPATKPKAAAKPASKPESSSKTQGTSQAQGQACCQGEAQGCRR

SEQ ID NO: 10517 - protein, 194 aa, Zea mays subsp. mays
  peptide (1)..(194): Ceres Seq. ID no. 12340578
MATDVAETPAPLVDAAPEAPADTPAAPAVDAKPAKAKKATAPKKRASPTHPPYAEMVSEAIASLKERTGSSSFAIAKFLEDKHKDKLPPNFRKLLNVQLKKLVAGGKLTKVKNSYKLSSATKPKAAPKKTKTGVKKPKAAAKPKAKSPAKPKPATKPKAAAKPASKPESSSKTQGTSQAQGQACCQGEAQGCRR

SEQ ID NO: 10518 - protein, 139 aa, Zea mays subsp. mays
  peptide (1)..(139): Ceres Seq. ID no. 12340579
MVSEAIASLKERTGSSSFAIAKFLEDKHKDKLPPNFRKLLNVQLKKLVAGGKLTKVKNSYKLSSATKPKAAPKKTKTGVKKPKAAAKPKAKSPAKPKPATKPKAAAKPASKPESSSKTQGTSQAQGQACCQGEAQGCRR

SEQ ID NO: 10519 - DNA, 1245 bp, Zea mays subsp. mays
  misc_feature (1)..(1245): Ceres Seq. ID no. 12372214
  misc_feature (1)..(1245): Ortholog of  Ceres SEQ ID NO 14305750 as cited in SEQ ID NO 52458
  misc_feature (1)..(1245): Ortholog of  Ceres SEQ ID NO 14314252 as cited in SEQ ID NO 57492
  misc_feature (1)..(1245): Ortholog of  Ceres SEQ ID NO 12608276 as cited in SEQ ID NO 57871
  misc_feature (1)..(1245): Ortholog of  Ceres SEQ ID NO 13598492 as cited in SEQ ID NO 63882
  misc_feature (1)..(1245): Ortholog of  Ceres SEQ ID NO 13657914 as cited in SEQ ID NO 66230
  misc_feature (1)..(1245): Ortholog of  Ceres SEQ ID NO 13622667 as cited in SEQ ID NO 0
attgattccagcgatttggccggggtcagtagctaacgttccatcccagaaaaccccatcttatcataggaagtctaccagttttgccaccaaggtcacaccatccaccacggccatggagtccggcgcagacgaggtggcgttcgagtccccggcacatttccgcatctacaagagcgggaggatcgagcgcctgaaccggcccccggtccttcccgccggcctcgacgaggccaccggtgtcacctcaaaggacgtcgtcctggacgccggcaccggcctttccgtacgcatctacctccccaagctccaggaaccatccaagaagctcccggtcctcgtctacttccacggcggcgcgttcctcctcgagtcggccggctctgccacgtaccacacctacgtcaacccactcgcagccgccgcgggcgtcctggtggtgtccgtggactaccgcctggcaccggagcacccggtcccggcggcctacgaggactcgtgggccgcgctccagtgggtgacgtcggcgcaggacgagtggatcgtcgagcacggcgacacggcgcggctcttcctcgccggcgacagcgccggcgcaaacatcgtgcacgacatgctgatgcgggcgtccggcgccggcgggccgcgcgtcgagggcgccatcctgctccacccgtggttcggcgggaacgcgcccatcgagggcgagccggagggtgccgcagcggccaccgctgggctctggacctacgcgtgcccgggcgcggtcggcggcgccgacgacccgaggatgaaccctctcgcgccgggcgcgccgccgctggagaggctcgggtgcgcgaggatgctggtgtgcgccgggaagaaggacgcgctctacgtgagggaccgcgcgtactatgaagccgtggcggccagcgcgtggcccggggacgtggcgtggctcgagtccgaaggagaggagcacgtcttcttcctcccgaagcccgagtgcgagaacgccaagctgctcatggaccgcgtcgtggccttcattgccggggcctgacttgctctcttgtggccttgttggcgcggcaccgcgcgacgcagcatcaggtcgccattgaagatttaagttgtggacttgtgggcaagtttctctcgctgaatattggtcttgtctaaatttttttctggtacaagtgtggtactgaagtcttgaaactgattttttaataagcaaactataagtccacattattc

SEQ ID NO: 10520 - protein, 348 aa, Zea mays subsp. mays
  peptide (1)..(348): Ceres Seq. ID no. 12372215
LIPAIWPGSVANVPSQKTPSYHRKSTSFATKVTPSTTAMESGADEVAFESPAHFRIYKSGRIERLNRPPVLPAGLDEATGVTSKDVVLDAGTGLSVRIYLPKLQEPSKKLPVLVYFHGGAFLLESAGSATYHTYVNPLAAAAGVLVVSVDYRLAPEHPVPAAYEDSWAALQWVTSAQDEWIVEHGDTARLFLAGDSAGANIVHDMLMRASGAGGPRVEGAILLHPWFGGNAPIEGEPEGAAAATAGLWTYACPGAVGGADDPRMNPLAPGAPPLERLGCARMLVCAGKKDALYVRDRAYYEAVAASAWPGDVAWLESEGEEHVFFLPKPECENAKLLMDRVVAFIAGA

SEQ ID NO: 10521 - protein, 310 aa, Zea mays subsp. mays
  peptide (1)..(310): Ceres Seq. ID no. 12372216
MESGADEVAFESPAHFRIYKSGRIERLNRPPVLPAGLDEATGVTSKDVVLDAGTGLSVRIYLPKLQEPSKKLPVLVYFHGGAFLLESAGSATYHTYVNPLAAAAGVLVVSVDYRLAPEHPVPAAYEDSWAALQWVTSAQDEWIVEHGDTARLFLAGDSAGANIVHDMLMRASGAGGPRVEGAILLHPWFGGNAPIEGEPEGAAAATAGLWTYACPGAVGGADDPRMNPLAPGAPPLERLGCARMLVCAGKKDALYVRDRAYYEAVAASAWPGDVAWLESEGEEHVFFLPKPECENAKLLMDRVVAFIAGA

SEQ ID NO: 10522 - DNA, 1049 bp, Zea mays subsp. mays; identical to SEQ ID NO: 10272
  misc_feature (1)..(1049): Ceres Seq. ID no. 12345528
  misc_feature (1)..(1049): Ortholog of  Ceres SEQ ID NO 13582073 as cited in SEQ ID NO 56218

SEQ ID NO: 10523 - protein, 192 aa, Zea mays subsp. mays; identical to SEQ ID NO: 10273
  peptide (1)..(192): Ceres Seq. ID no. 12345529

SEQ ID NO: 10524 - protein, 187 aa, Zea mays subsp. mays; identical to SEQ ID NO: 10274
  peptide (1)..(187): Ceres Seq. ID no. 12345530

SEQ ID NO: 10525 - protein, 177 aa, Zea mays subsp. mays; identical to SEQ ID NO: 10275
  peptide (1)..(177): Ceres Seq. ID no. 12345531

SEQ ID NO: 10526 - DNA, 1097 bp, Zea mays subsp. mays
  misc_feature (1)..(1097): Ceres Seq. ID no. 12400951
  misc_feature (1)..(1097): Ortholog of  Ceres SEQ ID NO 12610954 as cited in SEQ ID NO 55930
  misc_feature (1)..(1097): Ortholog of  Ceres SEQ ID NO 12625335 as cited in SEQ ID NO 63326
  misc_feature (1)..(1097): Ortholog of  Ceres SEQ ID NO 12566590 as cited in SEQ ID NO 0
  misc_feature (1)..(1097): Ortholog of  Ceres SEQ ID NO 14305152 as cited in SEQ ID NO 0
  misc_feature (1)..(1097): Ortholog of  Ceres SEQ ID NO 15179949 as cited in SEQ ID NO 0
aatttcccattccatcctagggctcgcgagtcgcgtcccccaaagtgaatacagaaacctccagccccaggccaattcctcgaccgcatcgccacccaccccatctccatggctacctccgccctcgctgctctgtccgccaccgcggccgccgccggtaagcgcatcctcctgtcgcgccccgcctcctcctcctccctctccttcgcctcccgccgcctggccgccggggcacccctccgggggttccttggcgagccaatccgggccgtggcgtcgtcggcgtcggcggcccccgcggcggcggccaagaccatcgcggtcggggaccggctccctgacgcgacgctctcctacttcgacacgtcctcccccgacggcgagctgaagacggtgacggtccgcgacctcaccgcggggaagaaggtggtgctcttcgccgtgcccggcgcgttcacgcccacctgcacccagaagcacctcccggggttcgtggccaaggccggggagctccgcgccaagggcgtcgacaccgtggcctgcgtctccgtcaacgacgccttcgtgatgcgcgcgtggaaggagagtctggggatcggggacgaggtgctgctcctgtcggacggcaacggcgagctggcgcgcgccatgggcgtcgagctcgacctctccgacaagcccgtggggctcggcgtccggtcccgccgctacgcgctgctcgcggaggacggcgtggtcaaggtgatcaacctcgaggagggcggcgcgttcaccaacagcagcgccgaggacatgctcaacgcgctctgaactcgcgacgccatggttggttcgtctcttccggcaagagttggtttcttttccctgaaaataatcgtgacggcaacggtggcttgtgttactgccgccactgttgtgaccggcgctgttactagtgcactgcagagatgcaagtttcttgcgaacatggctttataggtctagcttcatgcaattgttgacgccctctgtttcatgacttgtcatggtatgcaactcttgtctgagaattgatcatctgcatagtaccactactatcacaggcgttctctattatt

SEQ ID NO: 10527 - protein, 233 aa, Zea mays subsp. mays
  peptide (1)..(233): Ceres Seq. ID no. 12400952
MATSALAALSATAAAAGKRILLSRPASSSSLSFASRRLAAGAPLRGFLGEPIRAVASSASAAPAAAAKTIAVGDRLPDATLSYFDTSSPDGELKTVTVRDLTAGKKVVLFAVPGAFTPTCTQKHLPGFVAKAGELRAKGVDTVACVSVNDAFVMRAWKESLGIGDEVLLLSDGNGELARAMGVELDLSDKPVGLGVRSRRYALLAEDGVVKVINLEEGGAFTNSSAEDMLNAL

SEQ ID NO: 10528 - protein, 128 aa, Zea mays subsp. mays
  peptide (1)..(128): Ceres Seq. ID no. 12400953
ISHSILGLASRVPQSEYRNLQPQANSSTASPPTPSPWLPPPSLLCPPPRPPPVSASSCRAPPPPPPSPSPPAAWPPGHPSGGSLASQSGPWRRRRRRPPRRRPRPSRSGTGSLTRRSPTSTRPPPTAS

SEQ ID NO: 10529 - DNA, 1187 bp, Zea mays subsp. mays
  misc_feature (1)..(1187): Ceres Seq. ID no. 12341028
  misc_feature (1)..(1187): Ortholog of  Ceres SEQ ID NO 12615296 as cited in SEQ ID NO 62724
  misc_feature (1)..(1187): Ortholog of  Ceres SEQ ID NO 15225093 as cited in SEQ ID NO 65177
  misc_feature (1)..(1187): Ortholog of  Ceres SEQ ID NO 15179532 as cited in SEQ ID NO 0
agtctggtaccgccggcaaagcagtcgttttcgtcctcttccttgattaaaccttccgtacccatatccacctgctgctccgaccttccagtcttctccgtaggggcttcgctccatagatttcgccgcaaggggcaacggcacacccaccaactgacctgacccacgagggatccgcagatgaagatcattccggtcccttgcctggatgacaactatgcctacttaatcgtggacgagagcaccaagaaggcagcggccgttgaccctgtggaaccggagaaggttctcaaggcggccggcgaggtcggcgcctacgtcgactgcgttctcaccacccatcaccactgggatcatgctggtggcaatgagaagatgaggctgcaggtgccagggataaaggtatttggaggatccctggacaatgtgaaaggctgcactgatcaggtggagaatggaatgaagttgtcacttgggaaggacattgagatactatgcctacacacgccttgccacactaaaggtcatatcagctactatgttactagtaaggagggtgaagatccagcggtcttcaccggagataccttgttcattgctgggtgtgggaagttttttgagggttctgcagagcaaatgtatcagtcccttattgttacactgggttcgctgccaaagtcaacccgagtttactgtgggcatgagtacactgtgaagaacctaaaattcatgctgacactggagccagagaatgagaagacgaaacagaaactggaatgggctgaaaagcagcgcgaagcgaatcagccaacagtgccctcgactataggagatgagtttgagataaatactttcatgcgtgttgatctaccagaaatacaggcgaaattcagtgtcaactctccagttgaagcaatgatagaggtcaggaagaccaaggataattggagaggttgaggacacccatggccgccactagtctgttgaaccagcattccaaagtgaactaatgcagaaaccttgccctgtaggtgggaatgaggtttactgccgtgcaatgctttgagaaatgtgttgttgtgaaggagaagactcctacaataagctccgcgttaatgagtagtaacaatacgctccttgtaacttgtggtctgtttgccaataataatgtacgaactgtagtgcct

SEQ ID NO: 10530 - protein, 258 aa, Zea mays subsp. mays
  peptide (1)..(258): Ceres Seq. ID no. 12341029
MKIIPVPCLDDNYAYLIVDESTKKAAAVDPVEPEKVLKAAGEVGAYVDCVLTTHHHWDHAGGNEKMRLQVPGIKVFGGSLDNVKGCTDQVENGMKLSLGKDIEILCLHTPCHTKGHISYYVTSKEGEDPAVFTGDTLFIAGCGKFFEGSAEQMYQSLIVTLGSLPKSTRVYCGHEYTVKNLKFMLTLEPENEKTKQKLEWAEKQREANQPTVPSTIGDEFEINTFMRVDLPEIQAKFSVNSPVEAMIEVRKTKDNWRG

SEQ ID NO: 10531 - protein, 193 aa, Zea mays subsp. mays
  peptide (1)..(193): Ceres Seq. ID no. 12341030
MRLQVPGIKVFGGSLDNVKGCTDQVENGMKLSLGKDIEILCLHTPCHTKGHISYYVTSKEGEDPAVFTGDTLFIAGCGKFFEGSAEQMYQSLIVTLGSLPKSTRVYCGHEYTVKNLKFMLTLEPENEKTKQKLEWAEKQREANQPTVPSTIGDEFEINTFMRVDLPEIQAKFSVNSPVEAMIEVRKTKDNWRG

SEQ ID NO: 10532 - protein, 165 aa, Zea mays subsp. mays
  peptide (1)..(165): Ceres Seq. ID no. 12341031
MKLSLGKDIEILCLHTPCHTKGHISYYVTSKEGEDPAVFTGDTLFIAGCGKFFEGSAEQMYQSLIVTLGSLPKSTRVYCGHEYTVKNLKFMLTLEPENEKTKQKLEWAEKQREANQPTVPSTIGDEFEINTFMRVDLPEIQAKFSVNSPVEAMIEVRKTKDNWRG

SEQ ID NO: 10533 - DNA, 754 bp, Zea mays subsp. mays
  misc_feature (1)..(754): Ceres Seq. ID no. 13492727
  misc_feature (1)..(754): Ortholog of  Ceres SEQ ID NO 15227150 as cited in SEQ ID NO 59837
atcgccccgcgaaccctagctcccgcaactgccgccgccactcccacgctcgcagccatgccgcccaagctcgacccgtcgcaggtggtggaggtgttcgtccgtgtgaccggcggcgaggtcggcgcagcgtcttcgctggcccccaagatcggcccgctcggtctttcccccaagaagatcggagaggacatcgccaaggagacggccaaggactggaagggcctccgcgtcaccgtcaagctcaccgtccagaaccggcaggccaaggtctccgtcgtcccctccgccgcggcgctcgtcatcaaggcgctcaaggagccagagagggaccgcaagaaggtcaagaacatcaagcacagcggcaacatcagcctcgacgacgtcatcgagatcgccaggaccatgaggcacaggtccatggccaaggaattggccggcaccgtcaaggagatcctcggtacctgcgtcagcgtcgggtgcaccgtcgacggcaaggaccccaaggacctgcagcaggagattgacgacggcgaggtggagatcccgtccgcttaagaaggattggtgtccaggactgtgttatctttgctgctgaagccattctctgcctagattttctcatatttatttgaggtgggggtggacgtggacgtggaactatggaagttatcacagcggagttttgcttagaaactttgtcatgctttaagtctgagacaatttctgtcaaattttatgaacattcctaggt

SEQ ID NO: 10534 - protein, 185 aa, Zea mays subsp. mays
  peptide (1)..(185): Ceres Seq. ID no. 13492728
IAPRTLAPATAAATPTLAAMPPKLDPSQVVEVFVRVTGGEVGAASSLAPKIGPLGLSPKKIGEDIAKETAKDWKGLRVTVKLTVQNRQAKVSVVPSAAALVIKALKEPERDRKKVKNIKHSGNISLDDVIEIARTMRHRSMAKELAGTVKEILGTCVSVGCTVDGKDPKDLQQEIDDGEVEIPSA

SEQ ID NO: 10535 - protein, 174 aa, Zea mays subsp. mays
  peptide (1)..(174): Ceres Seq. ID no. 13492729
RPANPSSRNCRRHSHARSHAAQARPVAGGGGVRPCDRRRGRRSVFAGPQDRPARSFPQEDRRGHRQGDGQGLEGPPRHRQAHRPEPAGQGLRRPLRRGARHQGAQGAREGPQEGQEHQAQRQHQPRRRHRDRQDHEAQVHGQGIGRHRQGDPRYLRQRRVHRRRQGPQGPAAGD

SEQ ID NO: 10536 - protein, 166 aa, Zea mays subsp. mays
  peptide (1)..(166): Ceres Seq. ID no. 13492730
MPPKLDPSQVVEVFVRVTGGEVGAASSLAPKIGPLGLSPKKIGEDIAKETAKDWKGLRVTVKLTVQNRQAKVSVVPSAAALVIKALKEPERDRKKVKNIKHSGNISLDDVIEIARTMRHRSMAKELAGTVKEILGTCVSVGCTVDGKDPKDLQQEIDDGEVEIPSA

SEQ ID NO: 10537 - DNA, 1020 bp, Zea mays subsp. mays
  misc_feature (1)..(1020): Ceres Seq. ID no. 12351061
  misc_feature (1)..(1020): Ortholog of  Ceres SEQ ID NO 13595072 as cited in SEQ ID NO 55971
gacacagccatcacacgcatactgcatacacaacacagagcatcagaaggagctacgatctgatcgacatggctgccgccaccatggctatcacctcccgcgcgctcgtcggcaagccggcggctggcacgagggacgtcttcggcgagggccgcatcaccatgcgcaagancgccgccaagcccaagccggcggcgtccggcagcccatggtacggtgccgaccgcgtcctgtacctgggcccgctgtccggctcgcccccgagctacctgaccggcgagttccccggcgactacgggtgggacaccgcggggctgtcggcggacccggagaccttcgccaagaaccgcgagctggaggtgatccactgccgctgggccatgctcggcgcgctcgggtgcgtgttcccggagctgctcgcccgcaacggcgtcaagttcggcgaggcggtgtggttcaaggcgggctcccagatcttcagcgagggcgggctggactacctcggcaacccgagcctggtccacgcgcagagcatcctggccatctgggcgtgccaggtggtgctcatgggcgccgtcgaggggtaccgcgtcgccggcggcccgctcggagaggtggtcgacccgctgtaccctggcggcagcttcgacccgctcgggctcgccgacgacccggaggcgttcgccgagctcaaggtgaaggagatcaagaacggccgcctcgccatgttctccatgttcggcttcttcgtgcaggctatcgtcaccggcaagggccccctcgagaacctcgccgaccacatcgccgaccccgtcaacaacaacgcctgggcttacgccaccaacttcgtccccggcaagtgagcgagggcatgatgcttgcatgcgtgtaccgtagacgtacgtattcctacgtactgcaggttgcaccagtatttgtgaagggagctttgggagccagagattgtaccgctagtgtatttgtatgcatgctgtggagctgaacaataaaatatgctgt

SEQ ID NO: 10538 - protein, 333 aa, Zea mays subsp. mays
  peptide (1)..(333): Ceres Seq. ID no. 12351062
  misc_feature (57)..(57): Xaa is any aa, unknown or other
TQPSHAYCIHNTEHQKELRSDRHGCRHHGYHLPRARRQAGGWHEGRLRRGPHHHAQXRRQAQAGGVRQPMVRCRPRPVPGPAVRLAPELPDRRVPRRLRVGHRGAVGGPGDLRQEPRAGGDPLPLGHARRARVRVPGAARPQRRQVRRGGVVQGGLPDLQRGRAGLPRQPEPGPRAEHPGHLGVPGGAHGRRRGVPRRRRPARRGGRPAVPWRQLRPARARRRPGGVRRAQGEGDQERPPRHVLHVRLLRAGYRHRQGPPREPRRPHRRPRQQQRLGLRHQLRPRQVSEGMMLACVYRRRTYSYVLQVAPVFVKGALGARDCTASVFVCMLWS

SEQ ID NO: 10539 - protein, 286 aa, Zea mays subsp. mays
  peptide (1)..(286): Ceres Seq. ID no. 12351063
  misc_feature (57)..(57): Xaa is any aa, unknown or other
HSHHTHTAYTTQSIRRSYDLIDMAAATMAITSRALVGKPAAGTRDVFGEGRITMRKXAAKPKPAASGSPWYGADRVLYLGPLSGSPPSYLTGEFPGDYGWDTAGLSADPETFAKNRELEVIHCRWAMLGALGCVFPELLARNGVKFGEAVWFKAGSQIFSEGGLDYLGNPSLVHAQSILAIWACQVVLMGAVEGYRVAGGPLGEVVDPLYPGGSFDPLGLADDPEAFAELKVKEIKNGRLAMFSMFGFFVQAIVTGKGPLENLADHIADPVNNNAWAYATNFVPGK

SEQ ID NO: 10540 - protein, 264 aa, Zea mays subsp. mays
  peptide (1)..(264): Ceres Seq. ID no. 12351064
MVRCRPRPVPGPAVRLAPELPDRRVPRRLRVGHRGAVGGPGDLRQEPRAGGDPLPLGHARRARVRVPGAARPQRRQVRRGGVVQGGLPDLQRGRAGLPRQPEPGPRAEHPGHLGVPGGAHGRRRGVPRRRRPARRGGRPAVPWRQLRPARARRRPGGVRRAQGEGDQERPPRHVLHVRLLRAGYRHRQGPPREPRRPHRRPRQQQRLGLRHQLRPRQVSEGMMLACVYRRRTYSYVLQVAPVFVKGALGARDCTASVFVCMLWS

SEQ ID NO: 10541 - protein, 264 aa, Zea mays subsp. mays
  peptide (1)..(264): Ceres Seq. ID no. 12351065
  misc_feature (35)..(35): Xaa is any aa, unknown or other
MAAATMAITSRALVGKPAAGTRDVFGEGRITMRKXAAKPKPAASGSPWYGADRVLYLGPLSGSPPSYLTGEFPGDYGWDTAGLSADPETFAKNRELEVIHCRWAMLGALGCVFPELLARNGVKFGEAVWFKAGSQIFSEGGLDYLGNPSLVHAQSILAIWACQVVLMGAVEGYRVAGGPLGEVVDPLYPGGSFDPLGLADDPEAFAELKVKEIKNGRLAMFSMFGFFVQAIVTGKGPLENLADHIADPVNNNAWAYATNFVPGK

SEQ ID NO: 10542 - DNA, 1233 bp, Zea mays subsp. mays
  misc_feature (1)..(1233): Ceres Seq. ID no. 12462338
  misc_feature (1)..(1233): Ortholog of  Ceres SEQ ID NO 15170627 as cited in SEQ ID NO 52703
  misc_feature (1)..(1233): Ortholog of  Ceres SEQ ID NO 13655124 as cited in SEQ ID NO 62896
  misc_feature (1)..(1233): Ortholog of  Ceres SEQ ID NO 13597493 as cited in SEQ ID NO 64613
  misc_feature (1)..(1233): Ortholog of  Ceres SEQ ID NO 14313540 as cited in SEQ ID NO 68110
  misc_feature (1)..(1233): Ortholog of  Ceres SEQ ID NO 13596175 as cited in SEQ ID NO 68297
  misc_feature (1)..(1233): Ortholog of  Ceres SEQ ID NO 14301898 as cited in SEQ ID NO 69243
aagctacacacacaggcagacaccgttccgcgggggaaaggtgcggacgcttgaatcctctccaactccggcaccgcattcgcacgcccgcgccgccccgaatcggagaggacagaggagtcatggacgcggcggcggcggctgcgagccccacgagcaagaggatcgcgctggtgacgggagggaacaagggcatcgggctcgagacgtgccggcagctggcgtccaggggcgtcagggtcgtcctgacggcgaggaacgaggcgaggggtttggaagcggtcgagcgcgtcaggtgcgcccgcggcgacgccgaggtttacttccaccagctcgatgtcaccgacccctgcagcgccgcccggctcgcggatttcgtcagggatcagttcggtaggctggacatcctgatcaacaatgcgggaatttcaggtgttcaccgtgatccagttttgtctgctgcggtcaaggataaggtcgatggcatggatgtaaatcagagagtcgaatggatgaaggaaaattcgaaagaaacatacgaggaggctgtacaatgtatgaaaacaaactattatggtgccaaacttgtcacagaggcactacttcctcttcttcagttatcctcctctggaaggattgtcaacgtatcgtcaggctttggactactgagaaatttcaacagcgaagaccttaggaaggagtttgaagacatcgacaatcttactgaaagtagactggaggaactgatggataagtttctagaggattttaaggccaacttagtagaggagcatgggtggccgacaggtggatcttcagcctacaaagtcgtcaaagcggcgctcaatgcgtacacgaggattcttgccaagaagtatcctacactgcgtatcaattgtttgacgcctggttatgtcaagaccgacatttctatgcacatgggggtactgacacttgaggaaggcgctcgcaaccccgtgaaggttgctctcttgcctgacgacggaccgactggtgcttattttgatctgaatggcgaggcgtcctttgtgtgatggtatttctcctttttcagcttcagaataaaagaaagagctatgaagtagttagtgccaatcagtattgtagttcgacttgaatacttaaactagcacgttgagcaaaccgtagagctcaacaccagggatttcctcgtcttctgtataatatctctggtgatgattgtatatttcc

SEQ ID NO: 10543 - protein, 350 aa, Zea mays subsp. mays
  peptide (1)..(350): Ceres Seq. ID no. 12462339
ATHTGRHRSAGERCGRLNPLQLRHRIRTPAPPRIGEDRGVMDAAAAAASPTSKRIALVTGGNKGIGLETCRQLASRGVRVVLTARNEARGLEAVERVRCARGDAEVYFHQLDVTDPCSAARLADFVRDQFGRLDILINNAGISGVHRDPVLSAAVKDKVDGMDVNQRVEWMKENSKETYEEAVQCMKTNYYGAKLVTEALLPLLQLSSSGRIVNVSSGFGLLRNFNSEDLRKEFEDIDNLTESRLEELMDKFLEDFKANLVEEHGWPTGGSSAYKVVKAALNAYTRILAKKYPTLRINCLTPGYVKTDISMHMGVLTLEEGARNPVKVALLPDDGPTGAYFDLNGEASFV

SEQ ID NO: 10544 - protein, 310 aa, Zea mays subsp. mays
  peptide (1)..(310): Ceres Seq. ID no. 12462340
MDAAAAAASPTSKRIALVTGGNKGIGLETCRQLASRGVRVVLTARNEARGLEAVERVRCARGDAEVYFHQLDVTDPCSAARLADFVRDQFGRLDILINNAGISGVHRDPVLSAAVKDKVDGMDVNQRVEWMKENSKETYEEAVQCMKTNYYGAKLVTEALLPLLQLSSSGRIVNVSSGFGLLRNFNSEDLRKEFEDIDNLTESRLEELMDKFLEDFKANLVEEHGWPTGGSSAYKVVKAALNAYTRILAKKYPTLRINCLTPGYVKTDISMHMGVLTLEEGARNPVKVALLPDDGPTGAYFDLNGEASFV

SEQ ID NO: 10545 - protein, 189 aa, Zea mays subsp. mays
  peptide (1)..(189): Ceres Seq. ID no. 12462341
MDVNQRVEWMKENSKETYEEAVQCMKTNYYGAKLVTEALLPLLQLSSSGRIVNVSSGFGLLRNFNSEDLRKEFEDIDNLTESRLEELMDKFLEDFKANLVEEHGWPTGGSSAYKVVKAALNAYTRILAKKYPTLRINCLTPGYVKTDISMHMGVLTLEEGARNPVKVALLPDDGPTGAYFDLNGEASFV

SEQ ID NO: 10546 - DNA, 998 bp, Zea mays subsp. mays
  misc_feature (1)..(998): Ceres Seq. ID no. 12404088
  misc_feature (1)..(998): Ortholog of  Ceres SEQ ID NO 13664314 as cited in SEQ ID NO 61681
acggggagaagtcgaacagcggccgcgcgcgggaagttgctcggaggcggcggcggatctcggaggcagcgacgcgcgggtggaggagctcagtgacagcgccagtgcctatcgagctagcgaatcgaggagattttccccactgtttctttcctgctgattccgatttcacgttgaaacaccggggggagaagaattgcgggcgaccataactcggcaagaagcggctccaaaaagggcatctacctttgccgattccggcaccgatggataccgcggcgtcggggaggttcgacaagctccagagctcgttcaagctctccatccagtgcctcctcacggcctgctcccgcgaggatgtcaatgacgctttctcgtccttcactgatgctgagaaggagcgtttgcaccggatgctcacccttgtgatgaagaatctgcatgccaacgtagtggatgagtttgacgacttctgccaagaaacacaggtggctgctgcccttgaaaagatagatgactttgttgaaaagcagaatcttgatgcattatcttcagagaagactactgttgaagaaatcgaagaaaaggtatcaagagcaaaaaaggatgaaattgaatatttgactggtttactgaaaaaggttgaagaaagtaacaatgctatgaaagctcgaattgacctcctaaagaaaggggaggatctaactgctgcaagagatgtcctcaataagatgacgcagtggaactctgcactcgtggagaacattaacccttgaatctgtgtgatgacgattcattggcgtcaaaggacatctttgtataggggtgtgttagattggatgacatgtgaatgtgattcatggatcagcctggatgttctgttatgattaagaactgctatgtatcgtgcaatagacacatcgtctgtacttttgatgttattatcaggtcccaaacttctttatatccaatatgttacaatatcattttggtgactc

SEQ ID NO: 10547 - protein, 169 aa, Zea mays subsp. mays
  peptide (1)..(169): Ceres Seq. ID no. 12404089
MDTAASGRFDKLQSSFKLSIQCLLTACSREDVNDAFSSFTDAEKERLHRMLTLVMKNLHANVVDEFDDFCQETQVAAALEKIDDFVEKQNLDALSSEKTTVEEIEEKVSRAKKDEIEYLTGLLKKVEESNNAMKARIDLLKKGEDLTAARDVLNKMTQWNSALVENINP

SEQ ID NO: 10548 - protein, 120 aa, Zea mays subsp. mays
  peptide (1)..(120): Ceres Seq. ID no. 12404090
MLTLVMKNLHANVVDEFDDFCQETQVAAALEKIDDFVEKQNLDALSSEKTTVEEIEEKVSRAKKDEIEYLTGLLKKVEESNNAMKARIDLLKKGEDLTAARDVLNKMTQWNSALVENINP

SEQ ID NO: 10549 - protein, 115 aa, Zea mays subsp. mays
  peptide (1)..(115): Ceres Seq. ID no. 12404091
MKNLHANVVDEFDDFCQETQVAAALEKIDDFVEKQNLDALSSEKTTVEEIEEKVSRAKKDEIEYLTGLLKKVEESNNAMKARIDLLKKGEDLTAARDVLNKMTQWNSALVENINP

SEQ ID NO: 10550 - DNA, 1517 bp, Zea mays subsp. mays; identical to SEQ ID NO: 6442
  misc_feature (1)..(1517): Ceres Seq. ID no. 12404731
  misc_feature (1)..(1517): Ortholog of  Ceres SEQ ID NO 14301932 as cited in SEQ ID NO 67747

SEQ ID NO: 10551 - protein, 406 aa, Zea mays subsp. mays; identical to SEQ ID NO: 6443
  peptide (1)..(406): Ceres Seq. ID no. 12404732

SEQ ID NO: 10552 - protein, 359 aa, Zea mays subsp. mays; identical to SEQ ID NO: 6444
  peptide (1)..(359): Ceres Seq. ID no. 12404733

SEQ ID NO: 10553 - DNA, 882 bp, Zea mays subsp. mays
  misc_feature (1)..(882): Ceres Seq. ID no. 12595582
  misc_feature (1)..(882): Ortholog of  Ceres SEQ ID NO 14314807 as cited in SEQ ID NO 52563
  misc_feature (1)..(882): Ortholog of  Ceres SEQ ID NO 12625405 as cited in SEQ ID NO 63172
gaatctatcgcactcgtagtcgtagctcaagcatcagcggcaggagctctgggcagcgtgcgcacgtggggtacctagctcgctctgctagcctaccatggctgatcaccaccggggcgcgacgggaggtggcgggggctacggcgacctccagcgcgggggcggcatgcacggcgaggcgcagcagcagcagaagcagggcgccatgatgacggcgctcaaggccgcgacggccgcgaccttcggcgggtcgatgctggtgctgtccgggctgatcctggccggcaccgtgatcgcgctcacggtggccacccccgtgctggtgatcttcagcccggtgctggtgccagccgccatcgcgctggcgctcatggcggccgggttcgtcacctccggcggcctcggcgtcgctgcgctgtccgtgttctcctggatgtacaagtacctgacgggcaagcacccgccgggcgccgaccagctggaccacgccaaggcgaggctggcgtccaaggcccgcgacatcaaggatgcagcacagcaccgcatcgaccaggcgcaggggtcttgagagaagaaccacactcgagcggaccgcgcgcgcgtcctccttgaaccactgccggcgcggcggcatatggcccttaaaggcggtggctgctgctacgtacgctgccgtagagtctcggtcgccgcgatagctctagctagtcgtttatgtgttgtgctttgtgtgtgcatgcatgtgtctgggggcatgcagtgcagtgcagtactatatgctgtatgcgtctctctttgatcggagaggcggatgtacagcatgctcgatatgtctagtttggatgtcatgtttatgatgaggaataaaatgcaggtcaggtg

SEQ ID NO: 10554 - protein, 156 aa, Zea mays subsp. mays
  peptide (1)..(156): Ceres Seq. ID no. 12595583
MADHHRGATGGGGGYGDLQRGGGMHGEAQQQQKQGAMMTALKAATAATFGGSMLVLSGLILAGTVIALTVATPVLVIFSPVLVPAAIALALMAAGFVTSGGLGVAALSVFSWMYKYLTGKHPPGADQLDHAKARLASKARDIKDAAQHRIDQAQGS

SEQ ID NO: 10555 - protein, 133 aa, Zea mays subsp. mays
  peptide (1)..(133): Ceres Seq. ID no. 12595584
MHGEAQQQQKQGAMMTALKAATAATFGGSMLVLSGLILAGTVIALTVATPVLVIFSPVLVPAAIALALMAAGFVTSGGLGVAALSVFSWMYKYLTGKHPPGADQLDHAKARLASKARDIKDAAQHRIDQAQGS

SEQ ID NO: 10556 - protein, 120 aa, Zea mays subsp. mays
  peptide (1)..(120): Ceres Seq. ID no. 12595585
MMTALKAATAATFGGSMLVLSGLILAGTVIALTVATPVLVIFSPVLVPAAIALALMAAGFVTSGGLGVAALSVFSWMYKYLTGKHPPGADQLDHAKARLASKARDIKDAAQHRIDQAQGS

SEQ ID NO: 10557 - DNA, 834 bp, Zea mays subsp. mays
  misc_feature (1)..(834): Ceres Seq. ID no. 12376239
  misc_feature (1)..(834): Ortholog of  Ceres SEQ ID NO 13598422 as cited in SEQ ID NO 68856
agctttgaacctggttctcctgtcgctcttcgtgcgggcgtgcggcacaccaccagaagagcggccgagcggcgcagagaagagagaaccagccgagcggagcggctgcgcttccggagggaggaaggaggatggagaaggctctcaccaagctcggcagcttcacaatctcccgcaaggccaagcaggagctctccgccatcggtgacgacatctcccgtttttcgagcacggtggaggagaaggcaaaatgggtgttcgagaaactcaaagggcacaagaagtcgctccctgatctactgcgcgagcacaacctccctccaggtctcttccctcgtaacatcatctgctacgagtacgacgaatcgacctcgaagctggtggtgcacctgtccaagccctgcgaggtgagcttcaaggattcctccaccgtaaggtatgctcctcgtgtcaaggcgactctgtcccgaggcaagctttccggggttgaaggcatgaagaccaaggtggtggtatgggtgaaggtggccagcgtgagcatcgagagctacaagtctgacaagatatgcttcatcgccggtgtgaagaagctgagaccgaaggatgcttatgaggtccctcgtgaagccatctctgtcgaggagttctgagctcaactcaactccattggtttgcctacgtagtatcattcattcgtagcatttttcgggtcccatgtgatcggcgattgatgtgctgtgatttggtagctttgtactgatattggaagcatgtggatctgttctgcctggcagaagataacccgtgcatgttatctgacgtgacgagtccttc

SEQ ID NO: 10558 - protein, 172 aa, Zea mays subsp. mays
  peptide (1)..(172): Ceres Seq. ID no. 12376240
MEKALTKLGSFTISRKAKQELSAIGDDISRFSSTVEEKAKWVFEKLKGHKKSLPDLLREHNLPPGLFPRNIICYEYDESTSKLVVHLSKPCEVSFKDSSTVRYAPRVKATLSRGKLSGVEGMKTKVVVWVKVASVSIESYKSDKICFIAGVKKLRPKDAYEVPREAISVEEF

SEQ ID NO: 10559 - protein, 136 aa, Zea mays subsp. mays
  peptide (1)..(136): Ceres Seq. ID no. 12376241
SFEPGSPVALRAGVRHTTRRAAERRREERTSRAERLRFRREEGGWRRLSPSSAASQSPARPSRSSPPSVTTSPVFRARWRRRQNGCSRNSKGTRSRSLIYCASTTSLQVSSLVTSSATSTTNRPRSWWCTCPSPAR

SEQ ID NO: 10560 - DNA, 799 bp, Zea mays subsp. mays
  misc_feature (1)..(799): Ceres Seq. ID no. 13498294
  misc_feature (1)..(799): Ortholog of  Ceres SEQ ID NO 12556910 as cited in SEQ ID NO 39
  misc_feature (1)..(799): Ortholog of  Ceres SEQ ID NO 13594970 as cited in SEQ ID NO 56328
  misc_feature (1)..(799): Ortholog of  Ceres SEQ ID NO 12585079 as cited in SEQ ID NO 63137
acgcagggcgtagcaaatcaggtaggcgaaatcggagcagaggccagggacgcgccagcgcgagcgataaggcacactgacatggccgccacggcgtactccaccgcgctccccggcggggcgcgcctccccgctgccggagccgccgcaccgccctctgccctcctcctcccgcggcgtaataaactgtctccgctccctctccggctccaagatgcgccgaggctgtcgttgctccgggtgaaggcctcctccgacgactcctcggccgcgagcggggacgagctcatcgccgacttgaaagccaagtgggacgccgtcgagaacaagagcactgtcctcacctacgccggcggcgctgtcgtcgctctctggctgacgtccgtcatcgtcggcgccatcaactccgtgcctctgctccccaagatcatggagcttgtcggcctcggctacaccggatggttcgtctaccgctaccttctcttcaaggaaagcaggaaagagctcgccgacgacatcgagtcgctcaagaaaaaaattgctgggacagagtaaaacatgttgttctcgtgaaactttttttggacgattctttcgggaacacgttgcctcttgtctagactccagatcagtgctacatgtctttgcactttttttttttgttgcataccttatgtcctcgtctctctggagagctttgtacgacgatggagaacaacagtgtacgatcgaactggacgccatcctcggggattgttttcttaaaatgaaatagggtatgtatccgggttttcttttc

SEQ ID NO: 10561 - protein, 184 aa, Zea mays subsp. mays
  peptide (1)..(184): Ceres Seq. ID no. 13498295
TQGVANQVGEIGAEARDAPARAIRHTDMAATAYSTALPGGARLPAAGAAAPPSALLLPRRNKLSPLPLRLQDAPRLSLLRVKASSDDSSAASGDELIADLKAKWDAVENKSTVLTYAGGAVVALWLTSVIVGAINSVPLLPKIMELVGLGYTGWFVYRYLLFKESRKELADDIESLKKKIAGTE

SEQ ID NO: 10562 - protein, 157 aa, Zea mays subsp. mays
  peptide (1)..(157): Ceres Seq. ID no. 13498296
MAATAYSTALPGGARLPAAGAAAPPSALLLPRRNKLSPLPLRLQDAPRLSLLRVKASSDDSSAASGDELIADLKAKWDAVENKSTVLTYAGGAVVALWLTSVIVGAINSVPLLPKIMELVGLGYTGWFVYRYLLFKESRKELADDIESLKKKIAGTE

SEQ ID NO: 10563 - DNA, 1241 bp, Zea mays subsp. mays; identical to SEQ ID NO: 7344
  misc_feature (1)..(1241): Ceres Seq. ID no. 12344775
  misc_feature (1)..(1241): Ortholog of  Ceres SEQ ID NO 12611141 as cited in SEQ ID NO 55992

SEQ ID NO: 10564 - protein, 236 aa, Zea mays subsp. mays; identical to SEQ ID NO: 7345
  peptide (1)..(236): Ceres Seq. ID no. 12344776

SEQ ID NO: 10565 - protein, 222 aa, Zea mays subsp. mays; identical to SEQ ID NO: 7346
  peptide (1)..(222): Ceres Seq. ID no. 12344777

SEQ ID NO: 10566 - protein, 198 aa, Zea mays subsp. mays; identical to SEQ ID NO: 7347
  peptide (1)..(198): Ceres Seq. ID no. 12344778

SEQ ID NO: 10567 - DNA, 956 bp, Zea mays subsp. mays
  misc_feature (1)..(956): Ceres Seq. ID no. 12372548
  misc_feature (1)..(956): Ortholog of  Ceres SEQ ID NO 14305840 as cited in SEQ ID NO 52339
cttcctcgccgcattgacctattcacttcctccataataactagtgctactaggtcccccacggccgaggaggaattagaaaacaaaattaaatctcaagtctagggcggagatgaatgttgcggaggaggaggtgagcatggagagggaggagaagggcggcaatgttcgcgatggcgaggtgaggacgacggcggcggcggcggcagctgtgagcctggagacgctgcggaagcggatggctgacttcgcgacggagcgggactgggagcagttccactcccccaggaacctccttctcgccctggtaggggaggtgggggagctgtctgagatattccaatggaaaggggaggtgcccaaggggctgccaggctgggacgatgccgagaaggagcacttgggcgaggagctcgccgacgtgctcctctatctggtgcgcctgtcggacatgtgcggcgtcgacctcggcaaggctgccctgcgcaagatggagatcaacgcccgcaaatacccagttggacagtgcaagggttcatccaagaagcacactcactacggctccactaacaatgttggcgacagcgacaaagctaatgccgcgaacaaggagcagcatagctgtggtgtctaaaatgactcggagctccttgaatggtaatttggatggtcgggcatgatctaggttacgtgtgctgatgaaacagggatgctctattttggtgggaaagggacaagttgcgtgggttcaagttcccctatatattagatggctaatgaaccaagtgttaaccacaaagcttcgtaggctgtagctcccctatgtctaatgtgtactggggcattctgattctgctggttcagttatgcagcttcatatgatgcgaaagcaaagctgactattgcagtagtactaatgagtactgacagtactttatgatgcaaaagctttctgt

SEQ ID NO: 10568 - protein, 173 aa, Zea mays subsp. mays
  peptide (1)..(173): Ceres Seq. ID no. 12372549
MNVAEEEVSMEREEKGGNVRDGEVRTTAAAAAAVSLETLRKRMADFATERDWEQFHSPRNLLLALVGEVGELSEIFQWKGEVPKGLPGWDDAEKEHLGEELADVLLYLVRLSDMCGVDLGKAALRKMEINARKYPVGQCKGSSKKHTHYGSTNNVGDSDKANAANKEQHSCGV

SEQ ID NO: 10569 - protein, 164 aa, Zea mays subsp. mays
  peptide (1)..(164): Ceres Seq. ID no. 12372550
MEREEKGGNVRDGEVRTTAAAAAAVSLETLRKRMADFATERDWEQFHSPRNLLLALVGEVGELSEIFQWKGEVPKGLPGWDDAEKEHLGEELADVLLYLVRLSDMCGVDLGKAALRKMEINARKYPVGQCKGSSKKHTHYGSTNNVGDSDKANAANKEQHSCGV

SEQ ID NO: 10570 - protein, 131 aa, Zea mays subsp. mays
  peptide (1)..(131): Ceres Seq. ID no. 12372551
MADFATERDWEQFHSPRNLLLALVGEVGELSEIFQWKGEVPKGLPGWDDAEKEHLGEELADVLLYLVRLSDMCGVDLGKAALRKMEINARKYPVGQCKGSSKKHTHYGSTNNVGDSDKANAANKEQHSCGV

SEQ ID NO: 10571 - DNA, 907 bp, Zea mays subsp. mays
  misc_feature (1)..(907): Ceres Seq. ID no. 12404717
  misc_feature (1)..(907): Ortholog of  Ceres SEQ ID NO 15169037 as cited in SEQ ID NO 58715
  misc_feature (1)..(907): Ortholog of  Ceres SEQ ID NO 15224680 as cited in SEQ ID NO 59829
  misc_feature (1)..(907): Ortholog of  Ceres SEQ ID NO 13594273 as cited in SEQ ID NO 60013
gcacgagaccattacctagaacatcctaatcgaaaaaaactcgtctcccgtctcctccgcgttcccgctttccacccgccgccgccgccgcccaccttaccgtcacctgctccttgcccagcatgtggggtagcaccgacggcggaacgccggaggtcaccctcgagacctccatgggcgctgtctctgttgagatgtactacaggcacgcgcccaagacttgccggaacttcgtcgagctcgcgcgacgtggctactacgacaacgttatcttccaccgcatcatcaaagatttcattgtgcaaggtggggatcctacaggaaccggcagaggtggcgagtccatctatggagcaaagtttgaggatgagataaagactgagttaaagcacactggggctggaattctgtccatggcaaacgctggcccaaacacgaatggaagccagttcttcataactcttgccccttgtcagtcacttgatgggaaacatacaatttttgggagggtatgcagaggaatggaaattgttaagcgccttggaagtgtgcagactgacaaaaatgataggcctatccatgaagtgaaaatcttgcgtgccgttgtcaaagactgaagcattatccagatgtaactccgagtgttggtttaggctttaataatggccatgttcatgtaagtggtacctttgcgaaaaggtgaaaagtgcagctagttccagcctatatgagtatggtctcaagatgtggctgacctgaaaccctacctgatgagtagattggaccttttgatcaagaaggtatttgaaacagtttatatgcgtgtgtggtttgagtttctctgcgaggtatttgaaacaaatagttccagactatgttcgcttcaatcttaaagtcagttgtttgg

SEQ ID NO: 10572 - protein, 164 aa, Zea mays subsp. mays
  peptide (1)..(164): Ceres Seq. ID no. 12404718
MWGSTDGGTPEVTLETSMGAVSVEMYYRHAPKTCRNFVELARRGYYDNVIFHRIIKDFIVQGGDPTGTGRGGESIYGAKFEDEIKTELKHTGAGILSMANAGPNTNGSQFFITLAPCQSLDGKHTIFGRVCRGMEIVKRLGSVQTDKNDRPIHEVKILRAVVKD

SEQ ID NO: 10573 - protein, 147 aa, Zea mays subsp. mays
  peptide (1)..(147): Ceres Seq. ID no. 12404719
MGAVSVEMYYRHAPKTCRNFVELARRGYYDNVIFHRIIKDFIVQGGDPTGTGRGGESIYGAKFEDEIKTELKHTGAGILSMANAGPNTNGSQFFITLAPCQSLDGKHTIFGRVCRGMEIVKRLGSVQTDKNDRPIHEVKILRAVVKD

SEQ ID NO: 10574 - protein, 140 aa, Zea mays subsp. mays
  peptide (1)..(140): Ceres Seq. ID no. 12404720
MYYRHAPKTCRNFVELARRGYYDNVIFHRIIKDFIVQGGDPTGTGRGGESIYGAKFEDEIKTELKHTGAGILSMANAGPNTNGSQFFITLAPCQSLDGKHTIFGRVCRGMEIVKRLGSVQTDKNDRPIHEVKILRAVVKD

SEQ ID NO: 10575 - DNA, 1959 bp, Zea mays subsp. mays
  misc_feature (1)..(1959): Ceres Seq. ID no. 12387609
  misc_feature (1)..(1959): Ortholog of  Ceres SEQ ID NO 14314108 as cited in SEQ ID NO 63184
atcctctattcctcttcccctcccactccccagctcctgccgccccgctccacgttccagaacatctgggcggtatcccattcgcatggtcaccccatagccccccgacaaaccaccccaccgacgcaccggcagcaatggcggtgggcagcggcctggccctgtaccacgtcctcggagtggccacctgcgtggcgctgctgtacttcaccttcggcgaggtggacctccgccacatctcgctcccgtccttgcccgtctccggcccgtcccccttccgcgcggctgccgtggcggcgcccttcgtggagcggcgcggcgcgcagctgttcctggccggccggcccttctacgtgaacgggtggaactcctactggctcatggaccaggccgtggagccgaggtcccgggaccgcgtctcccgcatgttccgcaccggcgccggagatgggcctcaccgtgtgccgctcctgggcgttcaatgacggcgcctacaacgccctccaggtctcccccggccacttcgacgagcgcgtcttcaaggcgctggaccgggtggtcgtggaggccgggcggcacggggtgcggctgatcctgagtctggcgaacaacctggaggcgtacggtggcaagacgcagtacgtgcggtgggcgtgggaagagggcgtcggcatgtccgcctccaacgattccttcttctacgatccagccatcctcgactacttcaaagtctacctcaagacgctgctgacgaggaagaaccacttgacaggggtggagtacagggacgaccccaccatcctcgcgtgggagctgatgaacgagccccgctgcaccacggacccctcaggcgacacgctgcagcgctggatggaggagatggcggcgtacgtcaagtccatcgacaagaagcatctgctcaccgtcggcaccgaggggttctacgggccgacgagcccccaggagaagctggacgtcaatccgggcacgtggaaggacaacaactacggttcggacttcatccgcaacgccaagatcccagacatcgacttcgcttccatccacctctaccctgacacctggctgctgcagcagcacgccacggtggacgagaagctcaagttcgtgaagcggtgggtggcgtcccacatcgaggacggggacaaggagctgggcaagccggtcctcgccaccgagttcgggctgtcgcaccgcgccaagggcttccaccactcccaccgcgacgtcttctacaaggccgtctacgacaccgtctaccggtcggccgcccgcggcggcgccggcgccggcgccttcgtgtggcagctcgccgtggaggacatggaggagttccacgacgacttctccgtcgtgcccagcgagcacccctcgctgcacaggctcatcaagtcgcaatcgtgcaggctggccaagcttaggcacggggtcggggaggaggccaagcggacgctgtcggtgtgcgccgccggctcgtcctaggaacgaccgacgagcggtgctgcgcaggcagaagccatttccacgcgtccccctttcagctttgttgcgcccagtccgagggttttgtctttgtttctgtcgtccgaatggagcgagtggtgatggtgaagtgtgtcagaaatagatcggagaaaaatgaaatagaaagcagcaacagcaacaagaaaaaaaaagtgtgttacctcgtgaggctttggtaatgctgctggttagattcgtttgtggccacagcaccgacgcctnacgcagtcacgcctgcctgtggaatggcagatcgacatagataagctacagtttccgtcctttgcaactgtacgttagatgcccttgacctttgatatgtagagtcatcgtcgggtggcatncaatggtaatagtcctccatatatagtgtatttctgcaatctggacattggacctatatttatatatagctgt

SEQ ID NO: 10576 - protein, 350 aa, Zea mays subsp. mays
  peptide (1)..(350): Ceres Seq. ID no. 12387610
MGLTVCRSWAFNDGAYNALQVSPGHFDERVFKALDRVVVEAGRHGVRLILSLANNLEAYGGKTQYVRWAWEEGVGMSASNDSFFYDPAILDYFKVYLKTLLTRKNHLTGVEYRDDPTILAWELMNEPRCTTDPSGDTLQRWMEEMAAYVKSIDKKHLLTVGTEGFYGPTSPQEKLDVNPGTWKDNNYGSDFIRNAKIPDIDFASIHLYPDTWLLQQHATVDEKLKFVKRWVASHIEDGDKELGKPVLATEFGLSHRAKGFHHSHRDVFYKAVYDTVYRSAARGGAGAGAFVWQLAVEDMEEFHDDFSVVPSEHPSLHRLIKSQSCRLAKLRHGVGEEAKRTLSVCAAGSS

SEQ ID NO: 10577 - protein, 275 aa, Zea mays subsp. mays
  peptide (1)..(275): Ceres Seq. ID no. 12387611
MSASNDSFFYDPAILDYFKVYLKTLLTRKNHLTGVEYRDDPTILAWELMNEPRCTTDPSGDTLQRWMEEMAAYVKSIDKKHLLTVGTEGFYGPTSPQEKLDVNPGTWKDNNYGSDFIRNAKIPDIDFASIHLYPDTWLLQQHATVDEKLKFVKRWVASHIEDGDKELGKPVLATEFGLSHRAKGFHHSHRDVFYKAVYDTVYRSAARGGAGAGAFVWQLAVEDMEEFHDDFSVVPSEHPSLHRLIKSQSCRLAKLRHGVGEEAKRTLSVCAAGSS

SEQ ID NO: 10578 - protein, 227 aa, Zea mays subsp. mays
  peptide (1)..(227): Ceres Seq. ID no. 12387612
MNEPRCTTDPSGDTLQRWMEEMAAYVKSIDKKHLLTVGTEGFYGPTSPQEKLDVNPGTWKDNNYGSDFIRNAKIPDIDFASIHLYPDTWLLQQHATVDEKLKFVKRWVASHIEDGDKELGKPVLATEFGLSHRAKGFHHSHRDVFYKAVYDTVYRSAARGGAGAGAFVWQLAVEDMEEFHDDFSVVPSEHPSLHRLIKSQSCRLAKLRHGVGEEAKRTLSVCAAGSS

SEQ ID NO: 10579 - DNA, 1102 bp, Zea mays subsp. mays
  misc_feature (1)..(1102): Ceres Seq. ID no. 12402877
  misc_feature (1)..(1102): Ortholog of  Ceres SEQ ID NO 13594560 as cited in SEQ ID NO 51329
  misc_feature (1)..(1102): Ortholog of  Ceres SEQ ID NO 12613701 as cited in SEQ ID NO 67983
aagagaccaggctggtggttgaggtgagaagctagaggagctagagcgatagagtcccatcgcaacacacaaagggaagaggaagaggaaggcgaggacgatgggcttgctcctgctgctccacgtcctcctcgtcgcggcggcggcgacagctcctgcagccgacgcatggggcaaggaggggcactacatggtgtgcaagatcgctgagagctttctgacgaaagaggcatcgacggcggtgaaggagctgctgccggggtgggccggcggcgagctcgcggagacgtgctcttgggcggacacgcagaggttccggtaccgctggtccagcccgctgcacttcgccgacacgccaggggactgcgagttcgactacgcccgggactgccacaacaccaaaggggagaagaacatgtgcgtggtcggagccatcaacaactacacggcggcgctgaaagactcatcaagtccatttgatccgacggagagcttgatgttcctggcgcacttcgtcggcgacgtccaccagcctctccactgcggccacaccgacgacctcggcggcaacaccatcgtcgtccactggtaccgaaggaagaccaacctgcaccacgtctgggacgtgaacgtcatcgagacggccatgaaggacttctacggcaacgaccagagcaccatgatacaggccatccagcagaacatcacggaggagtgggctgatgaggagaagaagtgggaggcctgccgtagccggacaaagacctgtgctgacaagtacgctgcagagagcgcgaagctggcctgcacggcgtacgagggtgtcgaccaggactccaccttggaagatgactacttcttcgccgcgctgccggtggttcagaagaggatcgcgcaaggaggcgtcaggctggccgcgatcctcaacaggatatttggtgggaacagcagatcaggcttcagagcagttgattgatcgatccataccagtagtagatatcaaacgattggacatgtggaggagtgggtggggaggggcagacatgatctgccatctgaattagaataataagaggtatcttgttgccgtctggcaatattg

SEQ ID NO: 10580 - protein, 291 aa, Zea mays subsp. mays
  peptide (1)..(291): Ceres Seq. ID no. 12402878
MGLLLLLHVLLVAAAATAPAADAWGKEGHYMVCKIAESFLTKEASTAVKELLPGWAGGELAETCSWADTQRFRYRWSSPLHFADTPGDCEFDYARDCHNTKGEKNMCVVGAINNYTAALKDSSSPFDPTESLMFLAHFVGDVHQPLHCGHTDDLGGNTIVVHWYRRKTNLHHVWDVNVIETAMKDFYGNDQSTMIQAIQQNITEEWADEEKKWEACRSRTKTCADKYAAESAKLACTAYEGVDQDSTLEDDYFFAALPVVQKRIAQGGVRLAAILNRIFGGNSRSGFRAVD

SEQ ID NO: 10581 - protein, 261 aa, Zea mays subsp. mays
  peptide (1)..(261): Ceres Seq. ID no. 12402879
MVCKIAESFLTKEASTAVKELLPGWAGGELAETCSWADTQRFRYRWSSPLHFADTPGDCEFDYARDCHNTKGEKNMCVVGAINNYTAALKDSSSPFDPTESLMFLAHFVGDVHQPLHCGHTDDLGGNTIVVHWYRRKTNLHHVWDVNVIETAMKDFYGNDQSTMIQAIQQNITEEWADEEKKWEACRSRTKTCADKYAAESAKLACTAYEGVDQDSTLEDDYFFAALPVVQKRIAQGGVRLAAILNRIFGGNSRSGFRAVD

SEQ ID NO: 10582 - protein, 186 aa, Zea mays subsp. mays
  peptide (1)..(186): Ceres Seq. ID no. 12402880
MCVVGAINNYTAALKDSSSPFDPTESLMFLAHFVGDVHQPLHCGHTDDLGGNTIVVHWYRRKTNLHHVWDVNVIETAMKDFYGNDQSTMIQAIQQNITEEWADEEKKWEACRSRTKTCADKYAAESAKLACTAYEGVDQDSTLEDDYFFAALPVVQKRIAQGGVRLAAILNRIFGGNSRSGFRAVD

SEQ ID NO: 10583 - DNA, 1552 bp, Zea mays subsp. mays
  misc_feature (1)..(1552): Ceres Seq. ID no. 12368823
  misc_feature (1)..(1552): Ortholog of  Ceres SEQ ID NO 14311812 as cited in SEQ ID NO 51566
ttttttttcgcctccgaattccgatcaccaaaaaaaggcctttcttttcttttcgtcgccctctcggtgctctggcttcgctgcgtcgcccgcccgtctctaaaagccttgtgtggatcgtggacgccgacgcggccgcagcagcagccacgggacgggagtagaggcgcagagagagagagagaaagagcgagagaaaggttgtgctcgctgcctgccgccgagagacggatgaagaagtgcccatcggagctggagctggaggccttcctccgcggccgggaggacgccacggcggcggcgggcggcgggcggcggtggccgagcagaagcctgcgcacgacgtcgctgcgctggcgccgttcggcgccggtggcgtgttcccctccagcgatctgtccgccttcagcttcgctgactcgaacaccctcaatggaactggaaacatccataatcacctttggtcccataaccagaacgtcaggcatcccgcagtctccacgacgatcgagtcgcagtcgtcgatctgtgcagctgcagcagcaagtccaacatcggctaccaacctgtacctgaaagagagccaggctctgggcggcacgagtggttccgactccgacagcgattcgctgctggacatcgagggtggcccgtgcgagcagagcacgaacccacaggacgtgaagaggatgcgacggatggtgtcgaaccgtgagtctgctcgacggtccaggaagaggaagcaagcccacctagctgaccttgagacacaggtcgaccagctgcgaggcgagaacgcgtcgctcttcaagcagctgacggacgccaaccagcagttcacgaccgcggtcacggacaacaggatcctcaagtcggacgtggaggccctcagagtcaaggtgaagctggcggaggacatggtggcgcgcggcgcgctgtcgtgcgggctgggcagcctggggctgtcgccagcgctgaacccgcggcaggcgtgccgcggccccgacgtgctgtccgtgtccggcctggacttccccggcgccgacgacgcctgcttcacggggctgtccccggcggagcagctgcagctccagagctcccccctgcagagcatcgccgccagcctcgagagcctggacaaccggatggccagcgaggtcaccagctgcggggggcccggcgtcgacgtctggccgtgggaccaccactccaacggcggcctgtccaagtgaagccggagacgccgggtgggagtggggtgagactcgcgccgctcgccgacggcacctatcctgtcctagtgtatgcgtatatcgatatgcatggcgggcgctagctatgaccatgagccgccgttatttctgtgttcgctggagtggtgaaagtgaacggacttgagtttttcagagtccctcgtctccgtcggtacatttactagttctgtaatagaactgactagcttaagctcgtgctactacatatatatatgtatgctgagagactgaactcgaagcataatcatgctaccatattatgtcatcattacattccg

SEQ ID NO: 10584 - protein, 191 aa, Zea mays subsp. mays
  peptide (1)..(191): Ceres Seq. ID no. 12368824
FFFASEFRSPKKGLSFLFVALSVLWLRCVARPSLKALCGSWTPTRPQQQPRDGSRGAERERERARERLCSLPAAERRMKKCPSELELEAFLRGREDATAAAGGGRRWPSRSLRTTSLRWRRSAPVACSPPAICPPSASLTRTPSMELETSIITFGPITRTSGIPQSPRRSSRSRRSVQLQQQVQHRLPTCT

SEQ ID NO: 10585 - protein, 180 aa, Zea mays subsp. mays
  peptide (1)..(180): Ceres Seq. ID no. 12368825
MRRMVSNRESARRSRKRKQAHLADLETQVDQLRGENASLFKQLTDANQQFTTAVTDNRILKSDVEALRVKVKLAEDMVARGALSCGLGSLGLSPALNPRQACRGPDVLSVSGLDFPGADDACFTGLSPAEQLQLQSSPLQSIAASLESLDNRMASEVTSCGGPGVDVWPWDHHSNGGLSK

SEQ ID NO: 10586 - protein, 177 aa, Zea mays subsp. mays
  peptide (1)..(177): Ceres Seq. ID no. 12368826
MVSNRESARRSRKRKQAHLADLETQVDQLRGENASLFKQLTDANQQFTTAVTDNRILKSDVEALRVKVKLAEDMVARGALSCGLGSLGLSPALNPRQACRGPDVLSVSGLDFPGADDACFTGLSPAEQLQLQSSPLQSIAASLESLDNRMASEVTSCGGPGVDVWPWDHHSNGGLSK

SEQ ID NO: 10587 - DNA, 714 bp, Zea mays subsp. mays
  misc_feature (1)..(714): Ceres Seq. ID no. 12350906
  misc_feature (1)..(714): Ortholog of  Ceres SEQ ID NO 13638466 as cited in SEQ ID NO 58311
aactgacccagagcgatcggagctgacgacgatggccgggaaggcggcggccgcgacggcggcgaggtgggcggaggggtacccgtggaaggagaagctggcaaagtacaagggtgagctcgggaagggggtgtggggatactgggagctcggcgcgtggaagccgctcggcatcagcgctcgcaagcgcgcccgcctccgcaaggaggtgctcctcgccggcgaggactggagctacgatcctccccgcggggagatgcgtaccaagcgcaagggccacaagtgcgaccgcatctccgccgagaagcgagcaaatactgttgagctgatgaagaagatgccccagatgctgctcgactacaagaaacgtaggtgggagaagaagatgaaagcggaggagagcggcaagaattgataccacgcggctcgtccagggtgcttctcttcctaaataaggtccaaactttatccaggaggtttgcaggacggctagattctgacgcgtcatttccttgtggattccttctctcctgtgatgcgactttggacgcactatcctgattgtgatgctttccaacacttgtgccactggatcgtgatttcagtgagccccaacttctgcagcactagtattttgttgagacaaatcagctataagcatgccatctgcccaataaacttgttcatcatgtaagatcaatgctgttagttttg

SEQ ID NO: 10588 - protein, 137 aa, Zea mays subsp. mays
  peptide (1)..(137): Ceres Seq. ID no. 12350907
TDPERSELTTMAGKAAAATAARWAEGYPWKEKLAKYKGELGKGVWGYWELGAWKPLGISARKRARLRKEVLLAGEDWSYDPPRGEMRTKRKGHKCDRISAEKRANTVELMKKMPQMLLDYKKRRWEKKMKAEESGKN

SEQ ID NO: 10589 - protein, 127 aa, Zea mays subsp. mays
  peptide (1)..(127): Ceres Seq. ID no. 12350908
MAGKAAAATAARWAEGYPWKEKLAKYKGELGKGVWGYWELGAWKPLGISARKRARLRKEVLLAGEDWSYDPPRGEMRTKRKGHKCDRISAEKRANTVELMKKMPQMLLDYKKRRWEKKMKAEESGKN

SEQ ID NO: 10590 - DNA, 1486 bp, Zea mays subsp. mays
  misc_feature (1)..(1486): Ceres Seq. ID no. 12434994
  misc_feature (1)..(1486): Ortholog of  Ceres SEQ ID NO 13662880 as cited in SEQ ID NO 65422
  misc_feature (1)..(1486): Ortholog of  Ceres SEQ ID NO 14302071 as cited in SEQ ID NO 66585
  misc_feature (1)..(1486): Ortholog of  Ceres SEQ ID NO 14316013 as cited in SEQ ID NO 67181
  misc_feature (1)..(1486): Ortholog of  Ceres SEQ ID NO 12779098 as cited in SEQ ID NO 67698
  misc_feature (1)..(1486): Ortholog of  Ceres SEQ ID NO 13596180 as cited in SEQ ID NO 67941
  misc_feature (1)..(1486): Ortholog of  Ceres SEQ ID NO 13591190 as cited in SEQ ID NO 68044
gttcccgctgcccttccagggccacatcgacccgatgctgcacctggcgggcgtgctccacgcgcggggcctcggcggtgaccgtgctccacacgcgcttcaacgcgttggaccccgcgcggcacccggagttccagttcgtggccgtccccgacggcacgcccgccgacgtcgccgccacggggaggatcatcgacatcatcctggccatgaacgccgccatggaggcgtcgccggccgtcggggaggcgctgccgggcgtccgcggtcgcggggcaggaggggcggccccgcgcctcgtgcctcttcgtcgacgccaacctcctcgccgtgcacagggcggccagggcgctcggactgcccacgctggtgctgcgcaccgggagcgccgcctgcctcggctgcttcctggcctaccccatgctccacgaaaagggctatctgcctccgcaagagtcgcagctgtgcacgccggtgccggagctgccaccactccgagtgaaggacctgatctactcgaagcacagcgaccacgagctgatgcgcaaagtcctcgcccggggcagcgaaacagtgagagattgctccggcgtcgtcatcaacacagccgaggcactggaggcagccgagctagggaggctccgcgacgagctggtccacctcccggtggtgctcgcggccggcccactccacaagctctcctcctccaggggcgccgggagcagcttgctcgccccggaccacagctgcatcgagtggctggacgcgcagcagcccgggtcggtgctgtacgtgagcttcgggagcctggcggccatggacacgagcgagctccgggaggtggcatggggtctggcggagtgcggccaccccttcctatgggtcgtccggcccaacatggtacgaggctgcgacgtcgacagcgcgcggcagctgccggatggcttcgaggacgccgtcaagggcagaggcgcgtggtccgctgggccccgcagcaggaggtgctggcccaccgcgcagtgggtgggttctggagccactgcgggtggaactcgactctggaggcggtcagcgagggggtcccgatgatctgtaggccggacgccgtggaccagatgatgaacacgaggtacttgcaggacgtctggggcgtcggcttcgagctccaaggggagctggagagggggaagatcaaggacgcggttaggaagttgatgggtgagcgggagggtgctgagatgagaagagcagcgcaagagctttgcgcgaaactagcaggctgcttggagagcgctgggtcttctcaggttgccattgacaagttggttagctacatactgtctctgtgaatcttctgttctatggcgtatgtgtgttccgctggtttagcattggcagcagcttaacagctggtattctgatggacaattattcctgtcaattatatgtagtgttctctttctctaggtatttttttaatttctcc

SEQ ID NO: 10591 - protein, 448 aa, Zea mays subsp. mays
  peptide (1)..(448): Ceres Seq. ID no. 12434995
SRCPSRATSTRCCTWRACSTRGASAVTVLHTRFNALDPARHPEFQFVAVPDGTPADVAATGRIIDIILAMNAAMEASPAVGEALPGVRGRGAGGAAPRLVPLRRRQPPRRAQGGQGARTAHAGAAHRERRLPRLLPGLPHAPRKGLSASARVAAVHAGAGAATTPSEGPDLLEAQRPRADAQSPRPGQRNSERLLRRRHQHSRGTGGSRAREAPRRAGPPPGGARGRPTPQALLLQGRREQLARPGPQLHRVAGRAAARVGAVRELREPGGHGHERAPGGGMGSGGVRPPLPMGRPAQHGTRLRRRQRAAAAGWLRGRRQGQRRVVRWAPQQEVLAHRAVGGFWSHCGWNSTLEAVSEGVPMICRPDAVDQMMNTRYLQDVWGVGFELQGELERGKIKDAVRKLMGEREGAEMRRAAQELCAKLAGCLESAGSSQVAIDKLVSYILSL

SEQ ID NO: 10592 - protein, 379 aa, Zea mays subsp. mays
  peptide (1)..(379): Ceres Seq. ID no. 12434996
MNAAMEASPAVGEALPGVRGRGAGGAAPRLVPLRRRQPPRRAQGGQGARTAHAGAAHRERRLPRLLPGLPHAPRKGLSASARVAAVHAGAGAATTPSEGPDLLEAQRPRADAQSPRPGQRNSERLLRRRHQHSRGTGGSRAREAPRRAGPPPGGARGRPTPQALLLQGRREQLARPGPQLHRVAGRAAARVGAVRELREPGGHGHERAPGGGMGSGGVRPPLPMGRPAQHGTRLRRRQRAAAAGWLRGRRQGQRRVVRWAPQQEVLAHRAVGGFWSHCGWNSTLEAVSEGVPMICRPDAVDQMMNTRYLQDVWGVGFELQGELERGKIKDAVRKLMGEREGAEMRRAAQELCAKLAGCLESAGSSQVAIDKLVSYILSL

SEQ ID NO: 10593 - protein, 375 aa, Zea mays subsp. mays
  peptide (1)..(375): Ceres Seq. ID no. 12434997
MEASPAVGEALPGVRGRGAGGAAPRLVPLRRRQPPRRAQGGQGARTAHAGAAHRERRLPRLLPGLPHAPRKGLSASARVAAVHAGAGAATTPSEGPDLLEAQRPRADAQSPRPGQRNSERLLRRRHQHSRGTGGSRAREAPRRAGPPPGGARGRPTPQALLLQGRREQLARPGPQLHRVAGRAAARVGAVRELREPGGHGHERAPGGGMGSGGVRPPLPMGRPAQHGTRLRRRQRAAAAGWLRGRRQGQRRVVRWAPQQEVLAHRAVGGFWSHCGWNSTLEAVSEGVPMICRPDAVDQMMNTRYLQDVWGVGFELQGELERGKIKDAVRKLMGEREGAEMRRAAQELCAKLAGCLESAGSSQVAIDKLVSYILSL

SEQ ID NO: 10594 - DNA, 1446 bp, Zea mays subsp. mays
  misc_feature (1)..(1446): Ceres Seq. ID no. 12368983
  misc_feature (1)..(1446): Ortholog of  Ceres SEQ ID NO 14304528 as cited in SEQ ID NO 53293
  misc_feature (1)..(1446): Ortholog of  Ceres SEQ ID NO 14315162 as cited in SEQ ID NO 60005
  misc_feature (1)..(1446): Ortholog of  Ceres SEQ ID NO 13659881 as cited in SEQ ID NO 66938
accttgtgttcttgcgctttctagctaggaagctctccttccttccgcgtagcctagacgaccactgtgcctgatcctgtcagctcagaacgtccgctctgccctccacgagtaagcgtggcgtcgccgtcgccgtcggggcggcgcttcccgtcggacaccacggcgatcgcgagctggcttccgtcgcccgccggcgccggccggggggacgacctctcgctgggtttcaatgccggcgccgcctccgcctcgtctggcgcctcgctggcggcagggctctggggctccgcggcgtcgcgccaggccgcggctgctgccgctgccgccgccgccgccgcggcgctcggctacggggcgataggccccaccggcgacgtcgggatgctcgtcgtcgcgcctccgggctcgttccaccaccagcgggcagccgacgacgacgactccgtgctcccgctcgtcaccgcggcgcagcgcaccctcgtcaacgcagacgccgcctccggcggccacggcaatccgcccgtgtcgtccgctggtgccatccagttttggcaccaggagccggccccggatgggcatgggtcccacggcgagaaggccgtcgccatgctggatcacgccagcggcgggcccgggtccggcggggcgacgtgccaggactgcggcaaccaggcgaagaaaggctgcgcgcacagccgctgccgcacgtgctgcaacagccgtggcttcgagtgtgacacccatgtcaggagcacctgggtgcccgccgcgcgccgccgagagcgcctgcagctcgcgggtggcggtggcgccggcgccggagcctcccctcctccccccacgcccgccacgaccaagaaaccccgcctggcgtgcccgatccccacgacgacggcggccaactctcgcgcctccacctccaacgccaccacgcctcgcagcttcgacgcctcctccggccaccaagacgcgtctttcaaggacagcctgccgcggcatgtgcgcgggccggcggtgttccggtgcgtgcgggtgacgtccgtggacgacggcggcggcggcggcggcaccaacggcgaggtcgcgtaccaggcggcggtgaccatcaacgggcacctgttcaggggcctcctctacgaccacggcgccgaagccgtgatgcccaccgcgtccgacctcaacctcggcagcgccgcccccaacctgtacagcggcgccagcgccccgctcatcctgggtggcctgggcagctgggctacggtaacacacacaccgtgaagttctgatcggtgagaagcaacaccgatcgagcaagggtggagtggagtagttccgttgtttgtccgctcgctttctttgtttcagctcattgtgactgctagcagcagtatagcagtgcagtggctcagcttcatgttactgaaagtgttgccatgtcgtgtc

SEQ ID NO: 10595 - protein, 298 aa, Zea mays subsp. mays
  peptide (1)..(298): Ceres Seq. ID no. 12368984
MLVVAPPGSFHHQRAADDDDSVLPLVTAAQRTLVNADAASGGHGNPPVSSAGAIQFWHQEPAPDGHGSHGEKAVAMLDHASGGPGSGGATCQDCGNQAKKGCAHSRCRTCCNSRGFECDTHVRSTWVPAARRRERLQLAGGGGAGAGASPPPPTPATTKKPRLACPIPTTTAANSRASTSNATTPRSFDASSGHQDASFKDSLPRHVRGPAVFRCVRVTSVDDGGGGGGTNGEVAYQAAVTINGHLFRGLLYDHGAEAVMPTASDLNLGSAAPNLYSGASAPLILGGLGSWATVTHTP

SEQ ID NO: 10596 - protein, 223 aa, Zea mays subsp. mays
  peptide (1)..(223): Ceres Seq. ID no. 12368985
MLDHASGGPGSGGATCQDCGNQAKKGCAHSRCRTCCNSRGFECDTHVRSTWVPAARRRERLQLAGGGGAGAGASPPPPTPATTKKPRLACPIPTTTAANSRASTSNATTPRSFDASSGHQDASFKDSLPRHVRGPAVFRCVRVTSVDDGGGGGGTNGEVAYQAAVTINGHLFRGLLYDHGAEAVMPTASDLNLGSAAPNLYSGASAPLILGGLGSWATVTHTP

SEQ ID NO: 10597 - protein, 154 aa, Zea mays subsp. mays
  peptide (1)..(154): Ceres Seq. ID no. 12368986
MGMGPTARRPSPCWITPAAGPGPAGRRARTAATRRRKAARTAAAARAATAVASSVTPMSGAPGCPPRAAESACSSRVAVAPAPEPPLLPPRPPRPRNPAWRARSPRRRRPTLAPPPPTPPRLAASTPPPATKTRLSRTACRGMCAGRRCSGACG

SEQ ID NO: 10598 - DNA, 1424 bp, Zea mays subsp. mays
  misc_feature (1)..(1424): Ceres Seq. ID no. 12340535
  misc_feature (1)..(1424): Ortholog of  Ceres SEQ ID NO 14311596 as cited in SEQ ID NO 51728
  misc_feature (1)..(1424): Ortholog of  Ceres SEQ ID NO 14307004 as cited in SEQ ID NO 59551
  misc_feature (1)..(1424): Ortholog of  Ceres SEQ ID NO 15177031 as cited in SEQ ID NO 60171
  misc_feature (1)..(1424): Ortholog of  Ceres SEQ ID NO 13661504 as cited in SEQ ID NO 61294
  misc_feature (1)..(1424): Ortholog of  Ceres SEQ ID NO 12617197 as cited in SEQ ID NO 63406
  misc_feature (1)..(1424): Ortholog of  Ceres SEQ ID NO 13597804 as cited in SEQ ID NO 64182
  misc_feature (1)..(1424): Ortholog of  Ceres SEQ ID NO 15179788 as cited in SEQ ID NO 64818
  misc_feature (1)..(1424): Ortholog of  Ceres SEQ ID NO 14302768 as cited in SEQ ID NO 64889
  misc_feature (1)..(1424): Ortholog of  Ceres SEQ ID NO 13598565 as cited in SEQ ID NO 65250
  misc_feature (1)..(1424): Ortholog of  Ceres SEQ ID NO 13598597 as cited in SEQ ID NO 65496
  misc_feature (1)..(1424): Ortholog of  Ceres SEQ ID NO 13596284 as cited in SEQ ID NO 68273
  misc_feature (1)..(1424): Ortholog of  Ceres SEQ ID NO 13596227 as cited in SEQ ID NO 68750
  misc_feature (1)..(1424): Ortholog of  Ceres SEQ ID NO 15178902 as cited in SEQ ID NO 0
  misc_feature (1)..(1424): Ortholog of  Ceres SEQ ID NO 15179068 as cited in SEQ ID NO 0
aaaaagagacctgggcaggacgacacaggcagagccgccggccctcgcttcttggtggggtctagtttctttctcgcctctgcctgtgcctgctggtggtaagtaataacagcgacacggtacccacgcacngcggcggcggcggcgacgacgaagacgacatgaccgtcggcgacgacgcggcggcgccggggcgggggcagacggtgtgcgtnaccggcgccggcggctacgtcgggtcgtggatcgtcaagctcctgctcnnncngggctacgccgtccgcggcaccgtgcgcaaccctgacgacgcgaagaacgcgcacctgctggcgctccccggcgcggcggagcggctggcgctgtgcaaggccgacctgctcgactacggcgcgctaagggcggccgtcgccggctgccacaagcgtcttccacgccgcgtcgccggtcaccgacgacccggaggagatggtggagccggcggtgcgggggacgcggtacgtcatcgacgcggcggccgaggccggcacggtccgccgcgtcgtcctgacgtcgtcgatcggcgcggtggccatggacccccgccgcgagccggacgccgtcgtcgacgagtcgtgctggagcgacctcgacttctgcaagaagaccaagaactggtactgctacggcaaggcggcggcggagcgggcggcgtgggagncggcggcggcgcgcggggtggacctggtggtggtggtgccggtgctggtgcagggcccggcgctgcagccgtcggtgaacgccagcctgatgcacgtgctcaagtacctgaacgggtccgccaagacgtacgccaacgcggtgcaggcgtacgtgcacgtccgcgacgccgccgacgcgcacgtccgcgtcttcgaggcgccccgcgccgccggccgctacatctgcgccgacgccgtgctccaccgcgaggacgtcgtccgcaccctccgcaagtccttcccgggctacccngtcccggagaggtgctctgacgaggtgaacccgaggaagcagccgtacaagatctccaaccagcggctgagggagctgggcctggagttcaccccggcggcgcaggcgctgtacgacaccgtcgtgtgcttccaggagaagggcatcctccctctccctgtccccgccccaacgccggcgtcaccggacgcctgagctagctgatgagctggcccagaaccaacgaagaaacatgtttggcacgcaaacngctattataacagtcgctgcttcgatcattctgccgctagagatagaatgtggagtgtgtgctactcgttgtgggcgtaagagtgtcagaagagtgcagcagtaactatatcgatgcgactttttatatgttgctatatcatgtgtgacaatctcctaataataaatatatggagtatcgtcct

SEQ ID NO: 10599 - protein, 282 aa, Zea mays subsp. mays
  peptide (1)..(282): Ceres Seq. ID no. 12340536
  misc_feature (18)..(18): Xaa is any aa, unknown or other
  misc_feature (35)..(35): Xaa is any aa, unknown or other
  misc_feature (36)..(36): Xaa is any aa, unknown or other
  misc_feature (179)..(179): Xaa is any aa, unknown or other
  misc_feature (277)..(277): Xaa is any aa, unknown or other
MTVGDDAAAPGRGQTVCXTGAGGYVGSWIVKLLLXXGYAVRGTVRNPDDAKNAHLLALPGAAERLALCKADLLDYGALRAAVAGCHKRLPRRVAGHRRPGGDGGAGGAGDAVRHRRGGRGRHGPPRRPDVVDRRGGHGPPPRAGRRRRRVVLERPRLLQEDQELVLLRQGGGGAGGVGXGGGARGGPGGGGAGAGAGPGAAAVGERQPDARAQVPERVRQDVRQRGAGVRARPRRRRRARPRLRGAPRRRPLHLRRRRAPPRGRRPHPPQVLPGLPXPGEVL

SEQ ID NO: 10600 - protein, 239 aa, Zea mays subsp. mays
  peptide (1)..(239): Ceres Seq. ID no. 12340537
  misc_feature (78)..(78): Xaa is any aa, unknown or other
  misc_feature (175)..(175): Xaa is any aa, unknown or other
MVEPAVRGTRYVIDAAAEAGTVRRVVLTSSIGAVAMDPRREPDAVVDESCWSDLDFCKKTKNWYCYGKAAAERAAWEXAAARGVDLVVVVPVLVQGPALQPSVNASLMHVLKYLNGSAKTYANAVQAYVHVRDAADAHVRVFEAPRAAGRYICADAVLHREDVVRTLRKSFPGYXVPERCSDEVNPRKQPYKISNQRLRELGLEFTPAAQALYDTVVCFQEKGILPLPVPAPTPASPDA

SEQ ID NO: 10601 - protein, 204 aa, Zea mays subsp. mays
  peptide (1)..(204): Ceres Seq. ID no. 12340538
  misc_feature (43)..(43): Xaa is any aa, unknown or other
  misc_feature (140)..(140): Xaa is any aa, unknown or other
MDPRREPDAVVDESCWSDLDFCKKTKNWYCYGKAAAERAAWEXAAARGVDLVVVVPVLVQGPALQPSVNASLMHVLKYLNGSAKTYANAVQAYVHVRDAADAHVRVFEAPRAAGRYICADAVLHREDVVRTLRKSFPGYXVPERCSDEVNPRKQPYKISNQRLRELGLEFTPAAQALYDTVVCFQEKGILPLPVPAPTPASPDA

SEQ ID NO: 10602 - DNA, 1906 bp, Zea mays subsp. mays
  misc_feature (1)..(1906): Ceres Seq. ID no. 12355602
  misc_feature (1)..(1906): Ortholog of  Ceres SEQ ID NO 14311882 as cited in SEQ ID NO 51638
  misc_feature (1)..(1906): Ortholog of  Ceres SEQ ID NO 14314567 as cited in SEQ ID NO 52335
  misc_feature (1)..(1906): Ortholog of  Ceres SEQ ID NO 14308803 as cited in SEQ ID NO 55038
  misc_feature (1)..(1906): Ortholog of  Ceres SEQ ID NO 13595437 as cited in SEQ ID NO 56562
  misc_feature (1)..(1906): Ortholog of  Ceres SEQ ID NO 14315985 as cited in SEQ ID NO 57720
accgctagtgctctagtcttacctagccttgctgagccccttgcagtgctgggaggagaaggacaaggtctctgatcagctcagcttgtctggtcaaagctgagagcctcgttgtgctgtgagtgcaagctcgaccgacaggacccctgccactgtgaagcacagcgtcagcggcgacaagacgaaggggcggaagctgccaagccgatagatctacgcaaatggagaccaaggacgtgtcgccgctcgccgccgccaccaccaccaccgcgggcgcccgtgcctgcaccgacctctcaaccgcctccgccggccccttcttctatggcgccgccgcagcaccagcaccagcaccatccgccgccgccgttcgcgcagcaggcggccccggttccgtcgcctgccgcgtccatgcccggcggcatgcggctctcgttcgaccagatgtccgggaaggcgcccggggagcagcaccaccactccgcgcccatgctgtacacggtgccaccaccgcagtccgccgcgggcgcgggcgcaccgggggccaatgtgctgggcatgggcgagctgatgcgcaagaagcgcggccggccgcgcaagtacgcgcccgacgggagcatggctctggcgctggcccccatctcctccgcctcagccggcggcgccgcagcccccggacagcagcagcacggcggcgggttctccatcagcagccccccgtccgaccccaacgccaagcgccgcggccggcctcccggctctggcaagaagaagcagttcgaagccttgggctcctggggcatcgccttcacccctcacatcctcaccgtcaaggccggcgaggatgttgcttcaaaaataatgacattctcacagcaaggccctcgcacagtctgcatcctttccgcgaatggtgcaattagtaatgttacacttcggcagccagccacatctggtggactagttacttatgaggggcgctttgagataatctcgctatctggttctttcctgcttgcggaggatggtgatactcgcagcaggactggtggcttgagtgtcgcacttgcaggatctgatggccgagttcttggagggtgtgttgctggaatgcttatggctgcaactcctgttcaggttgtggtggctagctttatcgcagagggaaagaaatcaaagccagcggaagcacggaaggttgaaccgatggctgctcctccaccgcagatggctacctttgttccacctccgctggccaccagccctccatcggagggaacatccagcgcatcatctgatgactctggcagcccaatccaccacagtgcgatgccgttcagcaactccagccagcatcaacaccctcaccagcaccagcaccagcacatgccgcctgcctacgcatccgggggttggtccctctcagtgcaccagcagaataggcatgattctgacatgaagatgatgtcgaactaacagtgctcaacctaggcgtcccatttgttggttgggctggagaggaaggaagctgctgatggttggtactgccgctatgaaatggtcttcttgcgccgtctgtcctgatcagtgaccccgtgttgctctggtcaatgacggtgtgtctgctatagctaagatagctaggaaggattagagtttatgggctcacttgctgttgttcccctgggtaagattaatttaatttgaattagccgctgttgtaatgctgtagccagtgtcctgaagtcgcttatcagtcagtccctgacgcgagctgtgatggttgcctgatgagatcttcacctcctagtcctaggctagttaaaatatcatttctctagtactatgaatcatgaatttacttggatgcttcggtttgattcaggaatttgatcgtattatgttt

SEQ ID NO: 10603 - protein, 383 aa, Zea mays subsp. mays
  peptide (1)..(383): Ceres Seq. ID no. 12355603
MAPPQHQHQHHPPPPFAQQAAPVPSPAASMPGGMRLSFDQMSGKAPGEQHHHSAPMLYTVPPPQSAAGAGAPGANVLGMGELMRKKRGRPRKYAPDGSMALALAPISSASAGGAAAPGQQQHGGGFSISSPPSDPNAKRRGRPPGSGKKKQFEALGSWGIAFTPHILTVKAGEDVASKIMTFSQQGPRTVCILSANGAISNVTLRQPATSGGLVTYEGRFEIISLSGSFLLAEDGDTRSRTGGLSVALAGSDGRVLGGCVAGMLMAATPVQVVVASFIAEGKKSKPAEARKVEPMAAPPPQMATFVPPPLATSPPSEGTSSASSDDSGSPIHHSAMPFSNSSQHQHPHQHQHQHMPPAYASGGWSLSVHQQNRHDSDMKMMSN

SEQ ID NO: 10604 - protein, 354 aa, Zea mays subsp. mays
  peptide (1)..(354): Ceres Seq. ID no. 12355604
MPGGMRLSFDQMSGKAPGEQHHHSAPMLYTVPPPQSAAGAGAPGANVLGMGELMRKKRGRPRKYAPDGSMALALAPISSASAGGAAAPGQQQHGGGFSISSPPSDPNAKRRGRPPGSGKKKQFEALGSWGIAFTPHILTVKAGEDVASKIMTFSQQGPRTVCILSANGAISNVTLRQPATSGGLVTYEGRFEIISLSGSFLLAEDGDTRSRTGGLSVALAGSDGRVLGGCVAGMLMAATPVQVVVASFIAEGKKSKPAEARKVEPMAAPPPQMATFVPPPLATSPPSEGTSSASSDDSGSPIHHSAMPFSNSSQHQHPHQHQHQHMPPAYASGGWSLSVHQQNRHDSDMKMMSN

SEQ ID NO: 10605 - protein, 350 aa, Zea mays subsp. mays
  peptide (1)..(350): Ceres Seq. ID no. 12355605
MRLSFDQMSGKAPGEQHHHSAPMLYTVPPPQSAAGAGAPGANVLGMGELMRKKRGRPRKYAPDGSMALALAPISSASAGGAAAPGQQQHGGGFSISSPPSDPNAKRRGRPPGSGKKKQFEALGSWGIAFTPHILTVKAGEDVASKIMTFSQQGPRTVCILSANGAISNVTLRQPATSGGLVTYEGRFEIISLSGSFLLAEDGDTRSRTGGLSVALAGSDGRVLGGCVAGMLMAATPVQVVVASFIAEGKKSKPAEARKVEPMAAPPPQMATFVPPPLATSPPSEGTSSASSDDSGSPIHHSAMPFSNSSQHQHPHQHQHQHMPPAYASGGWSLSVHQQNRHDSDMKMMSN

SEQ ID NO: 10606 - DNA, 1423 bp, Zea mays subsp. mays
  misc_feature (1)..(1423): Ceres Seq. ID no. 12347695
  misc_feature (1)..(1423): Ortholog of  Ceres SEQ ID NO 15225826 as cited in SEQ ID NO 64774
gttatctctgtcctctcctcgtgtttgttcttcctaccagcggagcgccagctacgcgctgtgcctcgtgcctagacgaacggcataggcaccggacggtggcgtcatgtgcgtggaggagccggaggacgccgaacggtttggttttggagacccaggggtcgaggagcccgctaagtttcccttggctcagatggagagagtttgtgaaaatacaacttctgctgatttaaggcagaagttaagcaattttgtcccagtaatccgatcgggggattggtctgatattggaggtcgccaatacatggaagacacccacgtgtgcattccggaccttgctaagaactttggtttcccatcattagataatgaagttgtttcattctatggggtctttgatggtcacggtggaaaagatgctgcccatttcgtttgtgataatttaccaaggatgattgtggaagattcagatttccctcttcagcttgaaaaagttgtgagaaggtcctttatgcagattgattgccagtttgctgagacatgctctctccatagagcatcgtcctccggtacaactgcacttacagcaatggtttttggatgtctcttctggtcgctaatgccggtgactgtagggcggttctttcccggtgtggcaccgcagtcgaaatgtccatggaccacaggccttgcagtctcagcgaaaaactgcgcgtagaatcgcttggtggctacgtggacgatggctatctgaacggtctgctaggagtcaccagagcgcttggtgactggcatctcgagggcatgaaaggagctggtgagacaggtggtcccctgagtgctgacccagagctcaagatgaccacgctgacgaaggacgacgagttcttgataattggcagcgacgggatctgggacgtcttctcgaaccagaactcggtggacttcgcccggaagcgcctccaggagcacaacgatgtgaagttgtgctgcagggaaatcgtcgaggaggcgatcaggcggggggctactgataacttgactgcagtgctggtctcgttccacctggaggccccgcctcggatcagagtggaccgtcctggtagggtggagaggagcatatctgctgaagggctcaatagcctcaggatactcctgggaaggcagtagctgcgttcttgtcgcgattttaggtgctgtgccgcattgccgagttgtaattgtatgtagtcatctcggctcctcattattgttagctgttaccctttgctgcgactgcgacacgtgttacgattcttgttggtgattgaaccaacaaacctgatattattcttgttggtgattgaaccaacaaacctgatactattcttgttcgtgactgaaccaacagatttgagctccgtcctgtgagagattttaagcc

SEQ ID NO: 10607 - protein, 203 aa, Zea mays subsp. mays
  peptide (1)..(203): Ceres Seq. ID no. 12347696
MCVEEPEDAERFGFGDPGVEEPAKFPLAQMERVCENTTSADLRQKLSNFVPVIRSGDWSDIGGRQYMEDTHVCIPDLAKNFGFPSLDNEVVSFYGVFDGHGGKDAAHFVCDNLPRMIVEDSDFPLQLEKVVRRSFMQIDCQFAETCSLHRASSSGTTALTAMVFGCLFWSLMPVTVGRFFPGVAPQSKCPWTTGLAVSAKNCA

SEQ ID NO: 10608 - protein, 189 aa, Zea mays subsp. mays
  peptide (1)..(189): Ceres Seq. ID no. 12347697
MSLLVANAGDCRAVLSRCGTAVEMSMDHRPCSLSEKLRVESLGGYVDDGYLNGLLGVTRALGDWHLEGMKGAGETGGPLSADPELKMTTLTKDDEFLIIGSDGIWDVFSNQNSVDFARKRLQEHNDVKLCCREIVEEAIRRGATDNLTAVLVSFHLEAPPRIRVDRPGRVERSISAEGLNSLRILLGRQ

SEQ ID NO: 10609 - protein, 174 aa, Zea mays subsp. mays
  peptide (1)..(174): Ceres Seq. ID no. 12347698
MERVCENTTSADLRQKLSNFVPVIRSGDWSDIGGRQYMEDTHVCIPDLAKNFGFPSLDNEVVSFYGVFDGHGGKDAAHFVCDNLPRMIVEDSDFPLQLEKVVRRSFMQIDCQFAETCSLHRASSSGTTALTAMVFGCLFWSLMPVTVGRFFPGVAPQSKCPWTTGLAVSAKNCA

SEQ ID NO: 10610 - DNA, 975 bp, Zea mays subsp. mays
  misc_feature (1)..(975): Ceres Seq. ID no. 12340580
  misc_feature (1)..(975): Ortholog of  Ceres SEQ ID NO 13662677 as cited in SEQ ID NO 63824
actcaagtacctccccggactactagctcacaccagcggtacccagcccacaccggcagatcagctgcgagctagtagacatcgaccggaccgaccaacaggagcagcaagccgggctagctcgctcgctcgctcgcaatggcttccatcatcgtgcaggcggtggtcatcctcctggacgtcatcgccttcggcctgggcgtcgcccgccgagcagcgccgcagccgggccaccgtcaccccggacgccgccaaggagtacgactactgcgtctacgactccgacatcgccacgggctacggcgtcggcgcgctgctcctcctcgccgccgcgcaggtcgtgctcatgctcgccagccgctgcttctgctgcggccgcgggctcaagccgggaggctcccgcgcctgcgccctcatcctcttcctcttcacatgggtgaccttcctcatcgcggaggcgtgcctgctggcgggatcagtacgcaacgcgtaccacacccggtacaggggcgtattctacggcgagtccctctcatgcgagacggtgcggaagggcgtcttcgctgctggcgcggcatttaccttcttcacggccatcctgggcgaggtatactacctcagctactccaaatcccgagatgccgctggtggtgctggctccagcattggcatgggcccttacaactaaaggagcttgatcgaggcaggcaggcagcccccgtgttttcaactctgcttcgtggtggatgaatgcagtgttctttttaacattaccttagtagggacggtgtaattggttgttggatccgcggttttttcctctctctttaggttcttgtatgaggttactcggttgggccgtatactgtttggattattgggctggattctggacatggtatacacgtattcgtagtatgctatgctgtttatatgtatgtgaaagaaataatagaagcgttgcatcgtctatcc

SEQ ID NO: 10611 - protein, 228 aa, Zea mays subsp. mays
  peptide (1)..(228): Ceres Seq. ID no. 12340581
LKYLPGLLAHTSGTQPTPADQLRASRHRPDRPTGAASRASSLARSQWLPSSCRRWSSSWTSSPSAWASPAEQRRSRATVTPDAAKEYDYCVYDSDIATGYGVGALLLLAAAQVVLMLASRCFCCGRGLKPGGSRACALILFLFTWVTFLIAEACLLAGSVRNAYHTRYRGVFYGESLSCETVRKGVFAAGAAFTFFTAILGEVYYLSYSKSRDAAGGAGSSIGMGPYN

SEQ ID NO: 10612 - protein, 203 aa, Zea mays subsp. mays
  peptide (1)..(203): Ceres Seq. ID no. 12340582
MASIIVQAVVILLDVIAFGLGVARRAAPQPGHRHPGRRQGVRLLRLRLRHRHGLRRRRAAPPRRRAGRAHARQPLLLLRPRAQAGRLPRLRPHPLPLHMGDLPHRGGVPAGGISTQRVPHPVQGRILRRVPLMRDGAEGRLRCWRGIYLLHGHPGRGILPQLLQIPRCRWWCWLQHWHGPLQLKELDRGRQAAPVFSTLLRGG

SEQ ID NO: 10613 - DNA, 806 bp, Zea mays subsp. mays
  misc_feature (1)..(806): Ceres Seq. ID no. 12336810
  misc_feature (1)..(806): Ortholog of  Ceres SEQ ID NO 13660334 as cited in SEQ ID NO 67468
agcaaccaaaaccccgaggaaaacgaaaaagctgctccctctcccggacttcagangccgaggacgctggagcacgcgtcggtccggcgcccccatggacccggcctgcgaggagctcgagcgccgcagccgttacctcagcgcgctcgtgcgccgcaccaagctcgccgacccgccccagccccagccggaggcaaggcggacgtggagcctcctcagctgaaggngccgccgcacgtcggcggtgagggtaaggnagggaaggatgangccaaggcggaggagangacggcgatgaagaaacngaanagggaagcagcggcggaggggaggaaggtggcggtgtgcgtgcgggcggcggacatgccgctgccgctgcagcggcgcgcggtgaggatcgccctcgaggccgtcgccgccatgccgcggctcgagagcaagcgcctcgcgcncgctctcaagaaggatttcgatacaacatacgggcccgcatggcactgcattgtcggcacaagctttggctcctacgtcactcactcgttggggggtttcctgtacttctccgtcgacaaagcctttctcctcttcagaactgccgtccagccacttgtccagctacaatgagacctgaaacatgttttactcgaactggtgtagatgcagcgcaaatgtaattttgaacagaatagacgacgctcagcacaccgtgtcttgccgcgtttgagtagcagaggtaatttgatctgtacacaatactgtagaacagccgtgcctctaacgttgtactgcccgaagtcctgctttgt

SEQ ID NO: 10614 - protein, 207 aa, Zea mays subsp. mays
  peptide (1)..(207): Ceres Seq. ID no. 12336811
  misc_feature (19)..(19): Xaa is any aa, unknown or other
  misc_feature (76)..(76): Xaa is any aa, unknown or other
  misc_feature (86)..(86): Xaa is any aa, unknown or other
  misc_feature (90)..(90): Xaa is any aa, unknown or other
  misc_feature (96)..(96): Xaa is any aa, unknown or other
  misc_feature (102)..(102): Xaa is any aa, unknown or other
  misc_feature (103)..(103): Xaa is any aa, unknown or other
  misc_feature (151)..(151): Xaa is any aa, unknown or other
SNQNPEENEKAAPSPGLQXPRTLEHASVRRPHGPGLRGARAPQPLPQRARAPHQARRPAPAPAGGKADVEPPQLKXPPHVGGEGKXGKDXAKAEEXTAMKKXXREAAAEGRKVAVCVRAADMPLPLQRRAVRIALEAVAAMPRLESKRLAXALKKDFDTTYGPAWHCIVGTSFGSYVTHSLGGFLYFSVDKAFLLFRTAVQPLVQLQ

SEQ ID NO: 10615 - protein, 109 aa, Zea mays subsp. mays
  peptide (1)..(109): Ceres Seq. ID no. 12336812
  misc_feature (4)..(4): Xaa is any aa, unknown or other
  misc_feature (5)..(5): Xaa is any aa, unknown or other
  misc_feature (53)..(53): Xaa is any aa, unknown or other
MKKXXREAAAEGRKVAVCVRAADMPLPLQRRAVRIALEAVAAMPRLESKRLAXALKKDFDTTYGPAWHCIVGTSFGSYVTHSLGGFLYFSVDKAFLLFRTAVQPLVQLQ

SEQ ID NO: 10616 - DNA, 1209 bp, Zea mays subsp. mays
  misc_feature (1)..(1209): Ceres Seq. ID no. 12364936
  misc_feature (1)..(1209): Ortholog of  Ceres SEQ ID NO 12614832 as cited in SEQ ID NO 68844
gaaaccgcctcccatctcatccgtctctctcgaatcccaccgtgcgctcactgcgatggacggctcatccaagcggatcggcggtggcggcgacgacatgcccagccccgaccacgaccagaacgccagccccaacgtcccgccgtccgccgctggtgacggcggcgcatcagccactgcggcggcagcgcccgccgccgggaggcggccgttcaccagcctcagccaagaggaggccgacctcgcccttgcccgcgtcctccaggagcaggagcgggcgtacatgatgctgaccggcggcgagtacgcgatctcggacgccgagagctacgactacgacgaggaggaagacggcgatgggagcgactacgaggaggaaggcgaggcgctcgacgaggacgagcaggttggggacgcggaagcggagggggctgagggggacctggacctggacccttctcagtacgaggacgacggggagggcgacgtctccgacaggctcatggcgctcgtcgggatcggtgattggcgagcaatggagcaggatgatgctggggacgaggaggacgacgaagatgctgaggttcatacacagggtgcatgggaagatgttgacccagacgaatactcttacgaggagctaattgcgctgggtgaagttgtcggtacggaaagcaaaggccttgctgctgacactattgcctcattaccttgggtgacttaccaggcacaagacaagcaagatggcaacatggaacagtgtgttatttgtcgtgtggagtttgacgagggcgagtcattagttgcactcccttgcaaacatccataccattctgagtgcataaaccagtggctgcagctaaacaaggtatgcccgatgtgcagtgctgaagttcccacttctgtgaacaagcaggcatgacttactcaaacggaagaagatagcggtggcttggtatttatctgccattgatggaatgaaagaagcgccaactgttaaattgttcagggaagcaagggaattggctgggttctgattccctgttttcttcagttcgacaggcttagtcccccccggcctgtacgcatgctaatttgtatggccataccgctggttatttatgcattccatcagacgccgatgattcattgcttgtagatgtaaatcaacaatcataccaccatagtcaatagcagttgttttaatgc

SEQ ID NO: 10617 - protein, 306 aa, Zea mays subsp. mays
  peptide (1)..(306): Ceres Seq. ID no. 12364937
KPPPISSVSLESHRALTAMDGSSKRIGGGGDDMPSPDHDQNASPNVPPSAAGDGGASATAAAAPAAGRRPFTSLSQEEADLALARVLQEQERAYMMLTGGEYAISDAESYDYDEEEDGDGSDYEEEGEALDEDEQVGDAEAEGAEGDLDLDPSQYEDDGEGDVSDRLMALVGIGDWRAMEQDDAGDEEDDEDAEVHTQGAWEDVDPDEYSYEELIALGEVVGTESKGLAADTIASLPWVTYQAQDKQDGNMEQCVICRVEFDEGESLVALPCKHPYHSECINQWLQLNKVCPMCSAEVPTSVNKQA

SEQ ID NO: 10618 - protein, 288 aa, Zea mays subsp. mays
  peptide (1)..(288): Ceres Seq. ID no. 12364938
MDGSSKRIGGGGDDMPSPDHDQNASPNVPPSAAGDGGASATAAAAPAAGRRPFTSLSQEEADLALARVLQEQERAYMMLTGGEYAISDAESYDYDEEEDGDGSDYEEEGEALDEDEQVGDAEAEGAEGDLDLDPSQYEDDGEGDVSDRLMALVGIGDWRAMEQDDAGDEEDDEDAEVHTQGAWEDVDPDEYSYEELIALGEVVGTESKGLAADTIASLPWVTYQAQDKQDGNMEQCVICRVEFDEGESLVALPCKHPYHSECINQWLQLNKVCPMCSAEVPTSVNKQA

SEQ ID NO: 10619 - protein, 274 aa, Zea mays subsp. mays
  peptide (1)..(274): Ceres Seq. ID no. 12364939
MPSPDHDQNASPNVPPSAAGDGGASATAAAAPAAGRRPFTSLSQEEADLALARVLQEQERAYMMLTGGEYAISDAESYDYDEEEDGDGSDYEEEGEALDEDEQVGDAEAEGAEGDLDLDPSQYEDDGEGDVSDRLMALVGIGDWRAMEQDDAGDEEDDEDAEVHTQGAWEDVDPDEYSYEELIALGEVVGTESKGLAADTIASLPWVTYQAQDKQDGNMEQCVICRVEFDEGESLVALPCKHPYHSECINQWLQLNKVCPMCSAEVPTSVNKQA

SEQ ID NO: 10620 - DNA, 1547 bp, Zea mays subsp. mays
  misc_feature (1)..(1547): Ceres Seq. ID no. 12364898
  misc_feature (1)..(1547): Ortholog of  Ceres SEQ ID NO 15171279 as cited in SEQ ID NO 51378
  misc_feature (1)..(1547): Ortholog of  Ceres SEQ ID NO 13596816 as cited in SEQ ID NO 62287
gcacgagaccattacctagaacatcctaatcaaaaaaaaggaaacacaattcagcacacgcaccaccaaagaggccggagaagaggggatctcggagaagagtcttcgcctcgcggagagacgtgctctgcctagcatatatagccacacgaaagagagtgcttggcctgccggccttcatctagctagctattgctaactagccagcagcagcgtgcgtgcgttgaaggcagcagaggtagagaggtttttgagagagagaatggcaagcaggcaaggtgtagccgcctccatgttcgccacggcattgctcctcggcgtctttgcatccatcccacaaagtgctgaggccatcggggtgtgctacggcatgagcgccaacaacctgccggcggcgagcacggtggtgagcatgtacaaggcgaacggcatctcggcgatgcggctgtacgcgccggaccagggcgcgctgcaggcggtgggcggcacgggcatcagcgtggccgtgggcgcccccaacgacgtgctgtccaacatcgcggctagccccgcggcggccgcgtcgtgggtgcgcaacaacatccaggcgtacccgtccgtgtcgttccggtacgtgtgcgtgggcaacgaggtggccggcggcgcggcgcaggacctggcgccggccatggagaacgtgcacgcggcgctggcggcggccgggctgggccacatcaaggtgacgacgtcggtgtcgcaggccatcctgggcgtgtacagcccgccgtccgccgcggagttcaccggcgaggcgcgcgggtacatgggccccgtgctgcagttcctggcccgcaccgggtcgccgctcatggccaacatctacccgtacctggcctgggcatacaaccccagcgccatggacatgagctacgcggctcttcacctcctccggcaccgtcgtgcaggacggcgcctacgggtaccagaacctcttcggacaccaccgtcgacgccttctacgtcgccatgggcaagaacggcggctccggcgtgccgctcgtggtgtcggagagcgggtggccgtccggcggcggcgtccaggccacgccggccaacgcgagggtgtacaaccagtacctcatcaaccacgtcgggcgcgggacgccgcgccaccccggcgccatcgagacctacctcttctccatgttcaacgagaaccagaaggagagcggcgtggagcagaactgggggctcttctaccccaacatgcagcacgtctaccccatcagcttctgaagaaccgttaaccgtaccgatccaagctagctgctagctggccctggtggtggctccgaccgacgacggacgacgacgatcgacctgcagccgtatgtgtcgatccggccgtatacagatgatagtacgtagcatgtatgtatatatatggtatatgtgggcttgctttgcgaccgctgggagtgagtatccgatccaattggtacggtagctactcccagatgcgtacgccgtgagtgatgctgagtacgtattttatatgtatatgttac

SEQ ID NO: 10621 - protein, 349 aa, Zea mays subsp. mays
  peptide (1)..(349): Ceres Seq. ID no. 12364899
MASRQGVAASMFATALLLGVFASIPQSAEAIGVCYGMSANNLPAASTVVSMYKANGISAMRLYAPDQGALQAVGGTGISVAVGAPNDVLSNIAASPAAAASWVRNNIQAYPSVSFRYVCVGNEVAGGAAQDLAPAMENVHAALAAAGLGHIKVTTSVSQAILGVYSPPSAAEFTGEARGYMGPVLQFLARTGSPLMANIYPYLAWAYNPSAMDMSYAALHLLRHRRAGRRLRVPEPLRTPPSTPSTSPWARTAAPACRSWCRRAGGRPAAASRPRRPTRGCTTSTSSTTSGAGRRATPAPSRPTSSPCSTRTRRRAAWSRTGGSSTPTCSTSTPSASEEPLTVPIQASC

SEQ ID NO: 10622 - protein, 339 aa, Zea mays subsp. mays
  peptide (1)..(339): Ceres Seq. ID no. 12364900
MFATALLLGVFASIPQSAEAIGVCYGMSANNLPAASTVVSMYKANGISAMRLYAPDQGALQAVGGTGISVAVGAPNDVLSNIAASPAAAASWVRNNIQAYPSVSFRYVCVGNEVAGGAAQDLAPAMENVHAALAAAGLGHIKVTTSVSQAILGVYSPPSAAEFTGEARGYMGPVLQFLARTGSPLMANIYPYLAWAYNPSAMDMSYAALHLLRHRRAGRRLRVPEPLRTPPSTPSTSPWARTAAPACRSWCRRAGGRPAAASRPRRPTRGCTTSTSSTTSGAGRRATPAPSRPTSSPCSTRTRRRAAWSRTGGSSTPTCSTSTPSASEEPLTVPIQASC

SEQ ID NO: 10623 - protein, 313 aa, Zea mays subsp. mays
  peptide (1)..(313): Ceres Seq. ID no. 12364901
MSANNLPAASTVVSMYKANGISAMRLYAPDQGALQAVGGTGISVAVGAPNDVLSNIAASPAAAASWVRNNIQAYPSVSFRYVCVGNEVAGGAAQDLAPAMENVHAALAAAGLGHIKVTTSVSQAILGVYSPPSAAEFTGEARGYMGPVLQFLARTGSPLMANIYPYLAWAYNPSAMDMSYAALHLLRHRRAGRRLRVPEPLRTPPSTPSTSPWARTAAPACRSWCRRAGGRPAAASRPRRPTRGCTTSTSSTTSGAGRRATPAPSRPTSSPCSTRTRRRAAWSRTGGSSTPTCSTSTPSASEEPLTVPIQASC

SEQ ID NO: 10624 - DNA, 1717 bp, Zea mays subsp. mays
  misc_feature (1)..(1717): Ceres Seq. ID no. 12341036
  misc_feature (1)..(1717): Ortholog of  Ceres SEQ ID NO 15171708 as cited in SEQ ID NO 60063
caaacgaccgcaccagccagtccacttcgccagtgatctgtctcagctcgtcgcgtctccggcgccgacagacacggggcgagtgggcaacgcggctccgagatcggcgggcaggatgatgatgctgatcgactgctcgaggtgccgtaccccgctgcagctgccgcacggggctccctgtatccgatgcgccatctgtggggctatcacgcacgtcgcccccgcccctcctgtcgagcccaaccgcggtgccgtacagccgccgccggggtggggtccaccgccgccgccggtgcacgggcgaaagcgagccgtggtgtgcgggatatcgtatcggcactcgcggtatgagctgaagggctgcatcaacgacgtcaagtgcatgcgccacgtcctcatgacgcgcttcaacttccccgacgactccatcattatgctcaacgaagaacaaaccgacccctacaaaatcccaacaaagcataacatagggatggccatgtattggcttgtgcaaggttgtcaacctggagactcattggtgttccattattctgggcatggagcacagcaaagaaactacaatggagatgaggttgatgggtttgatgaaaccctctgcccattggattttgagacacaaggaatgattgtggatgatgacataaatacagcactagttcgaccacttcctcgtggagttaaacttcatgcattcattgatgcttgtcatagtggaactgcacttgatttgccttacctctgcagaatgaacaggagtgggcaatatgtatgggaagatcaccgaccaccatctggtgtctggaaaggcactagtggtggggaggctatttcatttagtggttgtgatgatgatcagacctctgcagatacctctgctttatcaaaggtcacttcgactggtgcaatgacatttggcttcatccaagctattgaacgtggacagggcaccacctacggtagtatcctgaactccatgcgttcgacaatacgcaacacagatgactcagcaggtgtaggtggcggtgctgttacatcactaattacaatgcttcttactggagggagcctatctgctggtggtctgagacaggagccacaactgacggcatgcgagccatttgatgtctatgcgaagcccttctccctatgacgcgttcatggtgctgctgctgcccacccatttcacgttatcaacttatcatcgtgtacatttcaccatcccgattgttaacagcgcgtggaattacaatccgtataaggaagctatgcatatatatcgtttgtttcacaggtacaatccgtatatgcatagcttccttatacggatgtaattaggcctggaacaactgttgaactgaggaacgcaaagatcgacatgttcaagggttcgatgcggcttgcagtggacaagtggggaattgtcaaagctgctgaaagctcagctgagtggacagtcaaggaggacaacaacctgtccttaattgagtttgagctggtgaccgtgacggagtgaaaaccgccattgcttaggagtattgttggttttctgtgttgttgaacctaatcatcatcgccaatcaataaggactcgtggttgatgttctcggcatcggagttgcgtattgctgtaccgttgcttgcttactgtgcgttgtggctacttttgactgctatcgaataataataaattggtgtc

SEQ ID NO: 10625 - protein, 389 aa, Zea mays subsp. mays
  peptide (1)..(389): Ceres Seq. ID no. 12341037
KRPHQPVHFASDLSQLVASPAPTDTGRVGNAAPRSAGRMMMLIDCSRCRTPLQLPHGAPCIRCAICGAITHVAPAPPVEPNRGAVQPPPGWGPPPPPVHGRKRAVVCGISYRHSRYELKGCINDVKCMRHVLMTRFNFPDDSIIMLNEEQTDPYKIPTKHNIGMAMYWLVQGCQPGDSLVFHYSGHGAQQRNYNGDEVDGFDETLCPLDFETQGMIVDDDINTALVRPLPRGVKLHAFIDACHSGTALDLPYLCRMNRSGQYVWEDHRPPSGVWKGTSGGEAISFSGCDDDQTSADTSALSKVTSTGAMTFGFIQAIERGQGTTYGSILNSMRSTIRNTDDSAGVGGGAVTSLITMLLTGGSLSAGGLRQEPQLTACEPFDVYAKPFSL

SEQ ID NO: 10626 - protein, 351 aa, Zea mays subsp. mays
  peptide (1)..(351): Ceres Seq. ID no. 12341038
MMMLIDCSRCRTPLQLPHGAPCIRCAICGAITHVAPAPPVEPNRGAVQPPPGWGPPPPPVHGRKRAVVCGISYRHSRYELKGCINDVKCMRHVLMTRFNFPDDSIIMLNEEQTDPYKIPTKHNIGMAMYWLVQGCQPGDSLVFHYSGHGAQQRNYNGDEVDGFDETLCPLDFETQGMIVDDDINTALVRPLPRGVKLHAFIDACHSGTALDLPYLCRMNRSGQYVWEDHRPPSGVWKGTSGGEAISFSGCDDDQTSADTSALSKVTSTGAMTFGFIQAIERGQGTTYGSILNSMRSTIRNTDDSAGVGGGAVTSLITMLLTGGSLSAGGLRQEPQLTACEPFDVYAKPFSL

SEQ ID NO: 10627 - protein, 350 aa, Zea mays subsp. mays
  peptide (1)..(350): Ceres Seq. ID no. 12341039
MMLIDCSRCRTPLQLPHGAPCIRCAICGAITHVAPAPPVEPNRGAVQPPPGWGPPPPPVHGRKRAVVCGISYRHSRYELKGCINDVKCMRHVLMTRFNFPDDSIIMLNEEQTDPYKIPTKHNIGMAMYWLVQGCQPGDSLVFHYSGHGAQQRNYNGDEVDGFDETLCPLDFETQGMIVDDDINTALVRPLPRGVKLHAFIDACHSGTALDLPYLCRMNRSGQYVWEDHRPPSGVWKGTSGGEAISFSGCDDDQTSADTSALSKVTSTGAMTFGFIQAIERGQGTTYGSILNSMRSTIRNTDDSAGVGGGAVTSLITMLLTGGSLSAGGLRQEPQLTACEPFDVYAKPFSL

SEQ ID NO: 10628 - DNA, 1453 bp, Zea mays subsp. mays
  misc_feature (1)..(1453): Ceres Seq. ID no. 12364902
  misc_feature (1)..(1453): Ortholog of  Ceres SEQ ID NO 14307085 as cited in SEQ ID NO 54749
  misc_feature (1)..(1453): Ortholog of  Ceres SEQ ID NO 14313599 as cited in SEQ ID NO 54989
  misc_feature (1)..(1453): Ortholog of  Ceres SEQ ID NO 13595569 as cited in SEQ ID NO 56778
  misc_feature (1)..(1453): Ortholog of  Ceres SEQ ID NO 15225111 as cited in SEQ ID NO 58444
  misc_feature (1)..(1453): Ortholog of  Ceres SEQ ID NO 14313064 as cited in SEQ ID NO 59543
  misc_feature (1)..(1453): Ortholog of  Ceres SEQ ID NO 12611159 as cited in SEQ ID NO 59821
  misc_feature (1)..(1453): Ortholog of  Ceres SEQ ID NO 13661001 as cited in SEQ ID NO 67531
  misc_feature (1)..(1453): Ortholog of  Ceres SEQ ID NO 15178920 as cited in SEQ ID NO 0
tcctaatcgaaaaattagccagcgagctgaggcctgaggagcgagcacagccgagtcacccggccggccgcccgcacgcacggacaccaacaactcccttggacgcacccgatcgaccctgctgcctgctagccgtgcgcagtagtgggagcgagcacgagtgagagtgggcagcgagaacatacgccgcccccggccggtgtgactggtggtggcgtcgcgcgcgcgatggggagggcgccgtgctgcgagaaggtggggctcaagcgcgggaggtggacgaaggaggaggaccagatactcgccaactacatcgcagagcacggcgagggatcctggaggtcgctgcccaagaatgcagggctgctccgctgcggcaagagctgccgcctgcggtggatcaactaccttcgggccgacgtcaagagggggaacatctccaaggaggaagaggacgtcatcatcaagctccacgccacccttggaaacaggtggtccctgatcgccagccacctccccggccgaacagacaacgagatcaagaactactggaactcgcacctcagccgccagatccacacgtaccgccggaaatacaccgccggcccggacacggcgcccatcgccatcgccatcgccatcgacatgagcaagctgcacagcgccgagaggcggcgcggtggcaggaccccgggccggtcgccgaagagcgccaccagcagcagcagcatgaccaagagcaagcagccggacgaccctgagccagaaccggaggccggcggcgcgtccagcccgcggcacagcgacggggcgcgaagcgccgtggtggacccggacccggacccgaaccagcccaacagcagcagcggcagcggcagcacgggcgagggggaggacgcgacggggccgtgggtgctggatccgatcgagctcggggacctctgggaggccgagagcgagatggacgccctcatgtctatcgggggggctgcccacgactcggccaccgcggaaggattcgacgcggcccaggcccaggtggacgacctgttcgacgacatggactgggataacttcgcggcccatctgtggggggagccggagcagcagaacgaccacagcgcgcagccgcagccccagcaggccgccgagccgcaggctgctgctgctgctgatgtggcggcggcgggggcggaggcctgcgacccggacgaacacgaactggaggcgttggaaacttggctcctgtccgactcgttctgacagttcccgtcatcagataccgatcaggtcgacgcagctagctagggcctaggtgttgctccgtgcgtgcagtttcgtgtaaatttcgtttctagttcgtaaataggtgctggttcgtgcatggtatattggtatgggccttcgagttcgaatagagagagagaggagacttgcgtcatgcatggcatgg

SEQ ID NO: 10629 - protein, 344 aa, Zea mays subsp. mays
  peptide (1)..(344): Ceres Seq. ID no. 12364903
MGRAPCCEKVGLKRGRWTKEEDQILANYIAEHGEGSWRSLPKNAGLLRCGKSCRLRWINYLRADVKRGNISKEEEDVIIKLHATLGNRWSLIASHLPGRTDNEIKNYWNSHLSRQIHTYRRKYTAGPDTAPIAIAIAIDMSKLHSAERRRGGRTPGRSPKSATSSSSMTKSKQPDDPEPEPEAGGASSPRHSDGARSAVVDPDPDPNQPNSSSGSGSTGEGEDATGPWVLDPIELGDLWEAESEMDALMSIGGAAHDSATAEGFDAAQAQVDDLFDDMDWDNFAAHLWGEPEQQNDHSAQPQPQQAAEPQAAAAADVAAAGAEACDPDEHELEALETWLLSDSF

SEQ ID NO: 10630 - protein, 205 aa, Zea mays subsp. mays
  peptide (1)..(205): Ceres Seq. ID no. 12364904
MSKLHSAERRRGGRTPGRSPKSATSSSSMTKSKQPDDPEPEPEAGGASSPRHSDGARSAVVDPDPDPNQPNSSSGSGSTGEGEDATGPWVLDPIELGDLWEAESEMDALMSIGGAAHDSATAEGFDAAQAQVDDLFDDMDWDNFAAHLWGEPEQQNDHSAQPQPQQAAEPQAAAAADVAAAGAEACDPDEHELEALETWLLSDSF

SEQ ID NO: 10631 - protein, 177 aa, Zea mays subsp. mays
  peptide (1)..(177): Ceres Seq. ID no. 12364905
MTKSKQPDDPEPEPEAGGASSPRHSDGARSAVVDPDPDPNQPNSSSGSGSTGEGEDATGPWVLDPIELGDLWEAESEMDALMSIGGAAHDSATAEGFDAAQAQVDDLFDDMDWDNFAAHLWGEPEQQNDHSAQPQPQQAAEPQAAAAADVAAAGAEACDPDEHELEALETWLLSDSF

SEQ ID NO: 10632 - DNA, 1087 bp, Zea mays subsp. mays
  misc_feature (1)..(1087): Ceres Seq. ID no. 12342079
  misc_feature (1)..(1087): Ortholog of  Ceres SEQ ID NO 13598613 as cited in SEQ ID NO 65582
  misc_feature (1)..(1087): Ortholog of  Ceres SEQ ID NO 12635635 as cited in SEQ ID NO 0
aaaaacccacaccacacttcgttccccttgtcccaattgctcctccacttcccccaccgcccaccagtgatctcgccgccgcgacgcgaggcaccacggccggcgccggccgccttcctccagaaagtatcccccgtgcgcccgaatcacctcttaatttcgttcttagccgctgcgtttcacagaggtcgcgacatgcccgcctcggcggctcctcctgcccagcccgcggcaccgccccctcctcctcctcccgcttctcctgcccctccggaggatgtggaggcgactgccggttcaccttcgagggcttcagcagtggggacggtgaactggggaacggccaccctcgttggcgtcttcgctgggctgctatacggggggagcagggaggcctccgcttccgtcagtaaggatgccgaggtgatgctgaagatgggaagcacaactgacaagcgtgaacagtatagattgatgagagatgctatggagaaaaggttcattcgggttgccaaaggttcactagtcgggggtgttcggctggggatgtttactgcgactttctttggcatacagaaccttcttatcgatactcgtggagtacatgatgtattcaacattgccgctgctggctctgctactgcagctgcttttggccttatattgccagggtcaatgatgtggcgtgcaaggaatgtattggtgggatctgctcttggtgctggcatctgctatccacttggctgggtacagttaaagctggcagaaaaggccaatcttgagattgcaaattcaaaaccatcatccgatttgacagagggaaaagaaaatcaaagccgtgtgggtgctgctatcgaacgacttgagggtagtctgaagaagtgagtgaagcctacgcatcgatggcatttttctcgttgtcttggttccataaatgtagcagctacaaggactgggctgcactgactattgcttcttttctcgcatgttatggacttttatttcgagtttgcagtaggtatcgccgtaccgcactggtaacttgtatctttcaagtcacaagttattgagttcgcagttgctattc

SEQ ID NO: 10633 - protein, 294 aa, Zea mays subsp. mays
  peptide (1)..(294): Ceres Seq. ID no. 12342080
KNPHHTSFPLSQLLLHFPHRPPVISPPRREAPRPAPAAFLQKVSPVRPNHLLISFLAAAFHRGRDMPASAAPPAQPAAPPPPPPPASPAPPEDVEATAGSPSRASAVGTVNWGTATLVGVFAGLLYGGSREASASVSKDAEVMLKMGSTTDKREQYRLMRDAMEKRFIRVAKGSLVGGVRLGMFTATFFGIQNLLIDTRGVHDVFNIAAAGSATAAAFGLILPGSMMWRARNVLVGSALGAGICYPLGWVQLKLAEKANLEIANSKPSSDLTEGKENQSRVGAAIERLEGSLKK

SEQ ID NO: 10634 - protein, 229 aa, Zea mays subsp. mays
  peptide (1)..(229): Ceres Seq. ID no. 12342081
MPASAAPPAQPAAPPPPPPPASPAPPEDVEATAGSPSRASAVGTVNWGTATLVGVFAGLLYGGSREASASVSKDAEVMLKMGSTTDKREQYRLMRDAMEKRFIRVAKGSLVGGVRLGMFTATFFGIQNLLIDTRGVHDVFNIAAAGSATAAAFGLILPGSMMWRARNVLVGSALGAGICYPLGWVQLKLAEKANLEIANSKPSSDLTEGKENQSRVGAAIERLEGSLKK

SEQ ID NO: 10635 - protein, 152 aa, Zea mays subsp. mays
  peptide (1)..(152): Ceres Seq. ID no. 12342082
MLKMGSTTDKREQYRLMRDAMEKRFIRVAKGSLVGGVRLGMFTATFFGIQNLLIDTRGVHDVFNIAAAGSATAAAFGLILPGSMMWRARNVLVGSALGAGICYPLGWVQLKLAEKANLEIANSKPSSDLTEGKENQSRVGAAIERLEGSLKK

SEQ ID NO: 10636 - DNA, 1201 bp, Zea mays subsp. mays
  misc_feature (1)..(1201): Ceres Seq. ID no. 12374495
  misc_feature (1)..(1201): Ortholog of  Ceres SEQ ID NO 14311659 as cited in SEQ ID NO 51212
  misc_feature (1)..(1201): Ortholog of  Ceres SEQ ID NO 12635180 as cited in SEQ ID NO 0
cttcacgatacgcacccaccagaggaaaagggcaaaagccaaaaggcatcaccgccgcgacgacgatggcagcctcgctccaagccgcggccaccctgatgcagccggccaagatcggcggccgggcgccctttgcctcgctgccgtcccgcccgtcgtcgcaactcgcctgcagggcgttcggcgtcgacgccggcgccgccaggatcacgtgctccctgcaggacgtcgccagcaggtgcgtcgacgccgcgaagctcgccggcttcgcgctcgccacctcggcgctcctcgtctcgggcgcgagcgcggagggcacgcccaagaggctgacctacgacgagatccagagcaaaacgtacatggaggtgaagggcacgggcacggcgaaccagtgcccgaccatcgacggcggcgtggagtcgttcccgttcaaggccggcaagtaccagatgaagaagctgtgcctggagccgacgtccttcaccgtcaaggcggagggcatcgccaagaacgccccgcccgagttccagaagaccaagctcatgacccgcctcacgtacacgctggacgagatcgagggcccgctcgaggtcggctccgacggcacgctcaagttcgaggagaaggacggcatcgactacgccgccgtcaccgtgcagctcccggggggcgagcgcgtgccgttcctcttcaccgtcaagcagctcgtcgccaccggcaagcccgagagcttcggcgggcccttcctcgtgcccagctaccgcggctcctccttcctcgaccccaagggccgcggcggctccaccggctacgacaacgccgtcgcgctccccgccgggggcagaggtgacgaggaggagctccagaaggagaacatcaagaacgccgcctcctccaccggcaacatcacgttgagcgtcaccaagagcaacccggagaccggcgaggtcatcggcgtcttcgagagcgtgcagccgtccgacaccgacctcggggccaaggcgcccaaggatgtcaagatccagggggtctggtacgctcagctcgagtgattcgagtgtctaactgctaggtgtccgaccgccgtcatggatcttgggaaggtgtatgtataccatggaaaactttggagagcagaggaggaatcgtgtatgtaatgtacttgttaatgcaaattcgggctgtcgcttttttactc

SEQ ID NO: 10637 - protein, 350 aa, Zea mays subsp. mays
  peptide (1)..(350): Ceres Seq. ID no. 12374496
SRYAPTRGKGQKPKGITAATTMAASLQAAATLMQPAKIGGRAPFASLPSRPSSQLACRAFGVDAGAARITCSLQDVASRCVDAAKLAGFALATSALLVSGASAEGTPKRLTYDEIQSKTYMEVKGTGTANQCPTIDGGVESFPFKAGKYQMKKLCLEPTSFTVKAEGIAKNAPPEFQKTKLMTRLTYTLDEIEGPLEVGSDGTLKFEEKDGIDYAAVTVQLPGGERVPFLFTVKQLVATGKPESFGGPFLVPSYRGSSFLDPKGRGGSTGYDNAVALPAGGRGDEEELQKENIKNAASSTGNITLSVTKSNPETGEVIGVFESVQPSDTDLGAKAPKDVKIQGVWYAQLE

SEQ ID NO: 10638 - protein, 329 aa, Zea mays subsp. mays
  peptide (1)..(329): Ceres Seq. ID no. 12374497
MAASLQAAATLMQPAKIGGRAPFASLPSRPSSQLACRAFGVDAGAARITCSLQDVASRCVDAAKLAGFALATSALLVSGASAEGTPKRLTYDEIQSKTYMEVKGTGTANQCPTIDGGVESFPFKAGKYQMKKLCLEPTSFTVKAEGIAKNAPPEFQKTKLMTRLTYTLDEIEGPLEVGSDGTLKFEEKDGIDYAAVTVQLPGGERVPFLFTVKQLVATGKPESFGGPFLVPSYRGSSFLDPKGRGGSTGYDNAVALPAGGRGDEEELQKENIKNAASSTGNITLSVTKSNPETGEVIGVFESVQPSDTDLGAKAPKDVKIQGVWYAQLE

SEQ ID NO: 10639 - protein, 318 aa, Zea mays subsp. mays
  peptide (1)..(318): Ceres Seq. ID no. 12374498
MQPAKIGGRAPFASLPSRPSSQLACRAFGVDAGAARITCSLQDVASRCVDAAKLAGFALATSALLVSGASAEGTPKRLTYDEIQSKTYMEVKGTGTANQCPTIDGGVESFPFKAGKYQMKKLCLEPTSFTVKAEGIAKNAPPEFQKTKLMTRLTYTLDEIEGPLEVGSDGTLKFEEKDGIDYAAVTVQLPGGERVPFLFTVKQLVATGKPESFGGPFLVPSYRGSSFLDPKGRGGSTGYDNAVALPAGGRGDEEELQKENIKNAASSTGNITLSVTKSNPETGEVIGVFESVQPSDTDLGAKAPKDVKIQGVWYAQLE

SEQ ID NO: 10640 - DNA, 1219 bp, Zea mays subsp. mays
  misc_feature (1)..(1219): Ceres Seq. ID no. 12379390
  misc_feature (1)..(1219): Ortholog of  Ceres SEQ ID NO 15175488 as cited in SEQ ID NO 54441
agcaccacctccaaatcttctcgggcctgcctctgcctctgcctcctgaggtgctgaacgacagctctgctacttctgatctgcatgatggccgggaaagcagcatgccggagtcatggagccagctgcttcttgggggattagtcggagatcacgagagatacaacgctgccacagctttactgtcaaaaggattagaggagcgacctgcagcttacaattgctatgaccctggacatggtggtggtgaggagatccagacatcggggaccaacattaggtctcatcaggtgagccaggcgctcttagcgtcgtcctctcctaggtcctgcatcaccacaagcctcggcagcaacatgctggacttctcaaacaccaccgtgccgccggcaccggatctgaagaatcatcactccgataactcttctgagggtaacagcgctggaagtggttcggctccaaagaaggctagggttcagacctcttcttcagcacagtctaccctaaaggtaagaaaggagaggcttggggatagaatcactgcacttcaccagatagtgtccccatttggcaaggagactattggctacattagattcctcctgagtcaaatcgaggctctcagcttcccttacttgggccatgacaacggggactccatgcaacaacataatactaataacttgctgctaaaccatagcactagcgatgccatggtacaagttcaaggtcctccgatgaccaatcaggagggggaggtctatggcaatggcattgaggagggcagcaggaaggatttgaggagcagggggctgtgcctggtgccagtgtcgtgcacgtcgcacctcgccgacgacaacggcccctcagacttctgggcggtgtccgcggcgccgtccccgcctcctccgcctccgccattcgccggcatcatctggcgatagagtcgtgtccagaccggcgtcgatccacccatcagtcgcatgcattattcatgcatgcatgacgtaaatatatacatatagtatcatgcatcactataccattggtttttttttaaaaaaaaatgtttggttgcttgccagggttgctagctagctatagctttgtttgaccgatgagctgaggtatccatcgagcatggagctacctgcagcctataccaggctgctgtatactgtacgtatgtagtacaccgtagtatatgtactgtacgttg

SEQ ID NO: 10641 - protein, 313 aa, Zea mays subsp. mays
  peptide (1)..(313): Ceres Seq. ID no. 12379391
HHLQIFSGLPLPLPPEVLNDSSATSDLHDGRESSMPESWSQLLLGGLVGDHERYNAATALLSKGLEERPAAYNCYDPGHGGGEEIQTSGTNIRSHQVSQALLASSSPRSCITTSLGSNMLDFSNTTVPPAPDLKNHHSDNSSEGNSAGSGSAPKKARVQTSSSAQSTLKVRKERLGDRITALHQIVSPFGKETIGYIRFLLSQIEALSFPYLGHDNGDSMQQHNTNNLLLNHSTSDAMVQVQGPPMTNQEGEVYGNGIEEGSRKDLRSRGLCLVPVSCTSHLADDNGPSDFWAVSAAPSPPPPPPPFAGIIWR

SEQ ID NO: 10642 - protein, 279 aa, Zea mays subsp. mays
  peptide (1)..(279): Ceres Seq. ID no. 12379392
MPESWSQLLLGGLVGDHERYNAATALLSKGLEERPAAYNCYDPGHGGGEEIQTSGTNIRSHQVSQALLASSSPRSCITTSLGSNMLDFSNTTVPPAPDLKNHHSDNSSEGNSAGSGSAPKKARVQTSSSAQSTLKVRKERLGDRITALHQIVSPFGKETIGYIRFLLSQIEALSFPYLGHDNGDSMQQHNTNNLLLNHSTSDAMVQVQGPPMTNQEGEVYGNGIEEGSRKDLRSRGLCLVPVSCTSHLADDNGPSDFWAVSAAPSPPPPPPPFAGIIWR

SEQ ID NO: 10643 - protein, 195 aa, Zea mays subsp. mays
  peptide (1)..(195): Ceres Seq. ID no. 12379393
MLDFSNTTVPPAPDLKNHHSDNSSEGNSAGSGSAPKKARVQTSSSAQSTLKVRKERLGDRITALHQIVSPFGKETIGYIRFLLSQIEALSFPYLGHDNGDSMQQHNTNNLLLNHSTSDAMVQVQGPPMTNQEGEVYGNGIEEGSRKDLRSRGLCLVPVSCTSHLADDNGPSDFWAVSAAPSPPPPPPPFAGIIWR

SEQ ID NO: 10644 - DNA, 915 bp, Zea mays subsp. mays
  misc_feature (1)..(915): Ceres Seq. ID no. 12374370
  misc_feature (1)..(915): Ortholog of  Ceres SEQ ID NO 13597163 as cited in SEQ ID NO 63925
acaccacactcccgaaacgccgaaaccccaccccgcaccactcatggacgccgccggcgcgcgtccatcggcaccgtcggccgctgctgccgcagtcgccggggcctccgtcgcggacgagccccgggacgcgcgggtggtgcgggagctcctgcgctcgatgggtctcggtgagggcgagtacgaaccccgcgtcgtgcaccagttcctggacctggcctaccgatacgtcggagacgtgctaggggacgcccaagtctacgccgaccacgccgggaaggctcagatcgacgccgacgacgtccgcctcgccatccaggccaaggtcaatttctccttctcccagccgccgccgcgtgaggttctccttgagctggcccgcagccgaaacagaatgccgctgcccaaatcaattgctcctcctggctcaattcccctcccgcctgagcaggacacactgttggcccagaactaccaactcctgcctccgttgaagccgccacctcaatatgaggaaaacgaggatgagaatgaagaatccaacccaagtctgacaccgaacccggcaaattctaatccaaccttctcgcaggatcagcggagtaacgagcaacagcacactccccagcatggccagagggtttcatttcaactcaatgctgtggcagctgctgctgcaaagcgacctcggatgaccgtcgaccagctgaacatcggctaaccagttatcgttggttagactgtagtatcattttcccccatcttttagtgtggtgaatcatgtttcgaagagatttagtgttgtagtggtatgtagccagggcttgcatgcatatgtgtccaagttcgactttgggttgcttgtacttctccatttcataactgaaatcatatttcagatttgagttaaaaggt

SEQ ID NO: 10645 - protein, 239 aa, Zea mays subsp. mays
  peptide (1)..(239): Ceres Seq. ID no. 12374371
HHTPETPKPHPAPLMDAAGARPSAPSAAAAAVAGASVADEPRDARVVRELLRSMGLGEGEYEPRVVHQFLDLAYRYVGDVLGDAQVYADHAGKAQIDADDVRLAIQAKVNFSFSQPPPREVLLELARSRNRMPLPKSIAPPGSIPLPPEQDTLLAQNYQLLPPLKPPPQYEENEDENEESNPSLTPNPANSNPTFSQDQRSNEQQHTPQHGQRVSFQLNAVAAAAAKRPRMTVDQLNIG

SEQ ID NO: 10646 - protein, 225 aa, Zea mays subsp. mays
  peptide (1)..(225): Ceres Seq. ID no. 12374372
MDAAGARPSAPSAAAAAVAGASVADEPRDARVVRELLRSMGLGEGEYEPRVVHQFLDLAYRYVGDVLGDAQVYADHAGKAQIDADDVRLAIQAKVNFSFSQPPPREVLLELARSRNRMPLPKSIAPPGSIPLPPEQDTLLAQNYQLLPPLKPPPQYEENEDENEESNPSLTPNPANSNPTFSQDQRSNEQQHTPQHGQRVSFQLNAVAAAAAKRPRMTVDQLNIG

SEQ ID NO: 10647 - protein, 186 aa, Zea mays subsp. mays
  peptide (1)..(186): Ceres Seq. ID no. 12374373
MGLGEGEYEPRVVHQFLDLAYRYVGDVLGDAQVYADHAGKAQIDADDVRLAIQAKVNFSFSQPPPREVLLELARSRNRMPLPKSIAPPGSIPLPPEQDTLLAQNYQLLPPLKPPPQYEENEDENEESNPSLTPNPANSNPTFSQDQRSNEQQHTPQHGQRVSFQLNAVAAAAAKRPRMTVDQLNIG

SEQ ID NO: 10648 - DNA, 1701 bp, Zea mays subsp. mays
  misc_feature (1)..(1701): Ceres Seq. ID no. 12379394
  misc_feature (1)..(1701): Ortholog of  Ceres SEQ ID NO 14315257 as cited in SEQ ID NO 52552
  misc_feature (1)..(1701): Ortholog of  Ceres SEQ ID NO 14314636 as cited in SEQ ID NO 56924
  misc_feature (1)..(1701): Ortholog of  Ceres SEQ ID NO 15168421 as cited in SEQ ID NO 60131
  misc_feature (1)..(1701): Ortholog of  Ceres SEQ ID NO 13597574 as cited in SEQ ID NO 64677
  misc_feature (1)..(1701): Ortholog of  Ceres SEQ ID NO 13597843 as cited in SEQ ID NO 64850
  misc_feature (1)..(1701): Ortholog of  Ceres SEQ ID NO 13597678 as cited in SEQ ID NO 65375
  misc_feature (1)..(1701): Ortholog of  Ceres SEQ ID NO 15176787 as cited in SEQ ID NO 66468
  misc_feature (1)..(1701): Ortholog of  Ceres SEQ ID NO 13596180 as cited in SEQ ID NO 67941
  misc_feature (1)..(1701): Ortholog of  Ceres SEQ ID NO 13591190 as cited in SEQ ID NO 68044
  misc_feature (1)..(1701): Ortholog of  Ceres SEQ ID NO 13595961 as cited in SEQ ID NO 68223
  misc_feature (1)..(1701): Ortholog of  Ceres SEQ ID NO 14313563 as cited in SEQ ID NO 68700
aactcgtggaacctacagggctttaacttctcccaacttcctcaaacaaatcctagcatcttcctaccccgtcccgatccatccatggcagcccctaccgtcgtcttactgcccgtgtggggtgctggccacctcatgtccatgctcgacgccggcaagcggctgctcacccgcgggggtcgcgcgctctcgctcaccgtgctcgtcatgcgagcgcccacggagcagctcgcggccgatctcgacgcccacatacgcagggaggaggcatcgggcctcgacgtccgcttcgtccgcctccccgccgttcagcccccgacgcacttccacggcatcgaggagttcatctccaggctggtacagctgcacgcgccccacgtcagggcggctatctccagcctggcttccccggtggcagcggtcgttatggacttcttctgcacggcgctgctcgacgtgacccgcgagctcgccgtgcccgcgtacgtctacttcactgccagcgccgggatgctcgcgttcttcctccgcctcccgtcgctccacgaggaggtgacggtccagttcgaggagatggagggcgcggtggatgtgcccgggctgccgcccgtgccgccgtcttccctgccggtgccagtgatggacaagaaccacccgaattacacgtggttcatgtaccacggcaggcgcttcgccgaggccgacggcatcatcgtcaacacggctgccgagctcgagcagagcgtgcttgctgccatcgccgacgggcggtgcacgccgggtgtccgtgccccgacggtctatccaattggcccggttatctcgttcagcccccccgcccactaacacagaacatccgcacgagtgcgtgcggtggctcgacacgcagcccgcggcctccgtggtgctcctctgcttcgggagccaagggttctccgcggcgccacaggcgcacgagatcgcgcacggcctggagcgtagcggccaccgcttcctctgggtgctgcgcggcccaccggcacccggcgagcggcacccgtcggacgcgaacctctccgagctgctccccgatggattcctcgaaaggaccaagggcagaggcctggtgtggccgacgaaggcgccgcagaaagagatactagcccacgccgccgttggtggtttcgtgacacacggcggctggaactcggtgctcgagagcctgtggttcggggtgccgatggcaccgtggccgctgtacgccgagcagcacctgaacgcgttcacgctggtggcctatgtaggcgtcgccgtggcgatgaaggtggacaggaagaggaacaatttcgtggaggcctcggagctggagcgagcggtgaaggagctgatgggcggtggcgaggaagggaggaaggcgagggagaaggccatggagatgagggatgcctgcaggaacgccgtggaggagggtggctcatcctactcttcactacgaaggctatcagagaagatatgtaaagtcgacaagaacctatgagtctgacgatgagaggcaattttacatcacattctttattgctgtaaactagcagtaagagaggatgtgattgattaaggttgagaataaattcttatcattgaatataaattagatgaatgatatattttatctaaaaataaagtaaaaatcaaacacctataatttggcaatttctattatat

SEQ ID NO: 10649 - protein, 281 aa, Zea mays subsp. mays
  peptide (1)..(281): Ceres Seq. ID no. 12379395
NSWNLQGFNFSQLPQTNPSIFLPRPDPSMAAPTVVLLPVWGAGHLMSMLDAGKRLLTRGGRALSLTVLVMRAPTEQLAADLDAHIRREEASGLDVRFVRLPAVQPPTHFHGIEEFISRLVQLHAPHVRAAISSLASPVAAVVMDFFCTALLDVTRELAVPAYVYFTASAGMLAFFLRLPSLHEEVTVQFEEMEGAVDVPGLPPVPPSSLPVPVMDKNHPNYTWFMYHGRRFAEADGIIVNTAAELEQSVLAAIADGRCTPGVRAPTVYPIGPVISFSPPAH

SEQ ID NO: 10650 - protein, 253 aa, Zea mays subsp. mays
  peptide (1)..(253): Ceres Seq. ID no. 12379396
MAAPTVVLLPVWGAGHLMSMLDAGKRLLTRGGRALSLTVLVMRAPTEQLAADLDAHIRREEASGLDVRFVRLPAVQPPTHFHGIEEFISRLVQLHAPHVRAAISSLASPVAAVVMDFFCTALLDVTRELAVPAYVYFTASAGMLAFFLRLPSLHEEVTVQFEEMEGAVDVPGLPPVPPSSLPVPVMDKNHPNYTWFMYHGRRFAEADGIIVNTAAELEQSVLAAIADGRCTPGVRAPTVYPIGPVISFSPPAH

SEQ ID NO: 10651 - protein, 236 aa, Zea mays subsp. mays
  peptide (1)..(236): Ceres Seq. ID no. 12379397
MSMLDAGKRLLTRGGRALSLTVLVMRAPTEQLAADLDAHIRREEASGLDVRFVRLPAVQPPTHFHGIEEFISRLVQLHAPHVRAAISSLASPVAAVVMDFFCTALLDVTRELAVPAYVYFTASAGMLAFFLRLPSLHEEVTVQFEEMEGAVDVPGLPPVPPSSLPVPVMDKNHPNYTWFMYHGRRFAEADGIIVNTAAELEQSVLAAIADGRCTPGVRAPTVYPIGPVISFSPPAH

SEQ ID NO: 10652 - DNA, 1417 bp, Zea mays subsp. mays
  misc_feature (1)..(1417): Ceres Seq. ID no. 12364906
  misc_feature (1)..(1417): Ortholog of  Ceres SEQ ID NO 15176596 as cited in SEQ ID NO 55168
  misc_feature (1)..(1417): Ortholog of  Ceres SEQ ID NO 14301576 as cited in SEQ ID NO 62362
tttttttttctcctccgccttccactcatccttgcccctgcctgccgtcgtgcatcatcatctccggccagggccagggcattcgtctccgcctccggtccggcctcctccactccgcgccccccagacgcgtcgctgcgtagctgctggccgccatggccaccgtcatggccgcggccgtctcgtccttcccgtcctcctcggccgtcgtcgccaaggcgtcgccggcgtccccctgtgccgccccgcacttccgcccgagggccgtgcgggccgctatccgggcgcaggcgtccgccgtcgaggcgcccgccacggccaaggccaagaaggagtccaagaagcaggaggagggcgtcgtcaccaacctatacaagcccaaggagccgtacgtcggcaggtgcctcctcaacaccaagatcaccggcgacgatgcgccgggggagacgtggcacatggtcttcagcaccgaaggcaagatcccgtacagagagggccagtccatcggcgtcatcgccgatggcgtcgacaagaacggcaagccgcacaaggtcaggctctactccatcgccagcagcgcgatcggcgacttcggcgactccaagacagtctcgctgtgtgtcaagaggctcatctacaccaacgatgccggagagatcgtcaaaggagtctgctccaacttcttatgtgatcttcagccaggtgataacgtccagataacaggaccagtcggcaaagaaatgctgatgcccaaagaccccaacgctaccattataatgcttgccaccggtacaggtatcgctccgttccgatcgttcctgtggaagatgttctttgagaagcatgacgactacaagttcaacggtctgggctggctcttcctgggtgttccaacgagcagctcgttgctctacaaggaggagttcgggaagatgaaggagagagcgccggagaacttccgggtcgactacgccgtcagccgggagcagacgaacgcggcgggggagaggatgtacatccagacccgtatggcggagtacaaagaggagctgtgggagctcctgaagaaggacaacacctacgtctacatgtgtgggttgaaaggcatggagaagggtatcgatgacattatggtgtcactggctgaaaaagacggaatcgactggttcgactacaagaagcagctgaagaggggagatcaatggaatgtggaggtctactaaccgctgaattttgcagctgacattttgtgttgtgcgtatctgtaagtgaggccagggtgtactacgtatataatgtagatagtgagtgtgttctgcgtttttttactattgccgtctctgtttatagatttgtataagtactcttaatattatgcctattcgattttttatatgagtaatgtgatcaagtgccc

SEQ ID NO: 10653 - protein, 355 aa, Zea mays subsp. mays
  peptide (1)..(355): Ceres Seq. ID no. 12364907
MATVMAAAVSSFPSSSAVVAKASPASPCAAPHFRPRAVRAAIRAQASAVEAPATAKAKKESKKQEEGVVTNLYKPKEPYVGRCLLNTKITGDDAPGETWHMVFSTEGKIPYREGQSIGVIADGVDKNGKPHKVRLYSIASSAIGDFGDSKTVSLCVKRLIYTNDAGEIVKGVCSNFLCDLQPGDNVQITGPVGKEMLMPKDPNATIIMLATGTGIAPFRSFLWKMFFEKHDDYKFNGLGWLFLGVPTSSSLLYKEEFGKMKERAPENFRVDYAVSREQTNAAGERMYIQTRMAEYKEELWELLKKDNTYVYMCGLKGMEKGIDDIMVSLAEKDGIDWFDYKKQLKRGDQWNVEVY

SEQ ID NO: 10654 - protein, 351 aa, Zea mays subsp. mays
  peptide (1)..(351): Ceres Seq. ID no. 12364908
MAAAVSSFPSSSAVVAKASPASPCAAPHFRPRAVRAAIRAQASAVEAPATAKAKKESKKQEEGVVTNLYKPKEPYVGRCLLNTKITGDDAPGETWHMVFSTEGKIPYREGQSIGVIADGVDKNGKPHKVRLYSIASSAIGDFGDSKTVSLCVKRLIYTNDAGEIVKGVCSNFLCDLQPGDNVQITGPVGKEMLMPKDPNATIIMLATGTGIAPFRSFLWKMFFEKHDDYKFNGLGWLFLGVPTSSSLLYKEEFGKMKERAPENFRVDYAVSREQTNAAGERMYIQTRMAEYKEELWELLKKDNTYVYMCGLKGMEKGIDDIMVSLAEKDGIDWFDYKKQLKRGDQWNVEVY

SEQ ID NO: 10655 - protein, 255 aa, Zea mays subsp. mays
  peptide (1)..(255): Ceres Seq. ID no. 12364909
MVFSTEGKIPYREGQSIGVIADGVDKNGKPHKVRLYSIASSAIGDFGDSKTVSLCVKRLIYTNDAGEIVKGVCSNFLCDLQPGDNVQITGPVGKEMLMPKDPNATIIMLATGTGIAPFRSFLWKMFFEKHDDYKFNGLGWLFLGVPTSSSLLYKEEFGKMKERAPENFRVDYAVSREQTNAAGERMYIQTRMAEYKEELWELLKKDNTYVYMCGLKGMEKGIDDIMVSLAEKDGIDWFDYKKQLKRGDQWNVEVY

SEQ ID NO: 10656 - DNA, 1365 bp, Zea mays subsp. mays
  misc_feature (1)..(1365): Ceres Seq. ID no. 12342083
  misc_feature (1)..(1365): Ortholog of  Ceres SEQ ID NO 14312166 as cited in SEQ ID NO 59253
agcctcgccgtcgattctctcccctccccttcgtcctcacgagcgacgaacgtcacgaacccctcctccacctcctgctactatcggcgccggagccctcctctggtctcaccgtgcaaatccccaaccccgaggcagacgcaggccagcccctgtgatggcacagaccaacggcaacgaccccttcagtccccctgtttcccaagaaagggttgtgataacaaacaagcatggtgagaggcttgtggggctgctgcatcacaccgcttcaaacaagattgtggtcttgtgccatggttttatagctaccaagaatgacagcctcattcttgacctggcggaagcgttgacaaaggaagggatcagtgtcttccgcttcgatttcagtggaaatggagaaagtgaaggccagtttgagtatggcaactacaggaaggaggctgacgatttgcattctgttgtattgtatctgtgtcaaaaaagttatgacatagcagctgttgttggtcatagcaaaggaggagatgtggtgattctatatgcttctgttcatgatgatgtgggcacaattgttaatttatcgggccggtttgatttaacaaaaggcattgaagaacggataggggaagggtctatcgatagaataaacaaagaaggctaccttgatgtcaaggacaaatctgaaaatgccagctacagggtaaccaaagaaagtttgatggaacggcttaatactgatatgcgcgctgcaagtgtttccataagcaagggatgcaggttcttaacagtccatggctcagctgataagaccatacccgtagaagatgcccatgagtttgcgaagcatatacccaaccatgaactgcgtgtcatagaaggagcaaatcataactacacctcacatcgcaaagaagttgctgatgcagtagtagatttcatcacgtccaatgtaaccgtataataaggctgggggatgaatgtcattccagaccacttggtcatgcacctatcgatcccctccatcatggggcaatactggtactaggtgtctattatcttctgaaccgaaaaccccatgtcatgcaggtttgatatgatgatgttgctcgtatgtgctcttaagaattactgtaaatattgaactcctggtagacttgtatgccgcagctcgcagtttatataggctcatatctctatagttttttttttctttcttctttgttcgagggctctattcccttgctcttttttgcatggttcatgtaagttttcttccttgtaccctatagttatttaatttatttaaatttggcactgtggactattttgtacaagaagtcttagtgcaaacgtacaagcaggccc

SEQ ID NO: 10657 - protein, 319 aa, Zea mays subsp. mays
  peptide (1)..(319): Ceres Seq. ID no. 12342084
ASPSILSPPLRPHERRTSRTPPPPPATIGAGALLWSHRANPQPRGRRRPAPVMAQTNGNDPFSPPVSQERVVITNKHGERLVGLLHHTASNKIVVLCHGFIATKNDSLILDLAEALTKEGISVFRFDFSGNGESEGQFEYGNYRKEADDLHSVVLYLCQKSYDIAAVVGHSKGGDVVILYASVHDDVGTIVNLSGRFDLTKGIEERIGEGSIDRINKEGYLDVKDKSENASYRVTKESLMERLNTDMRAASVSISKGCRFLTVHGSADKTIPVEDAHEFAKHIPNHELRVIEGANHNYTSHRKEVADAVVDFITSNVTV

SEQ ID NO: 10658 - protein, 267 aa, Zea mays subsp. mays
  peptide (1)..(267): Ceres Seq. ID no. 12342085
MAQTNGNDPFSPPVSQERVVITNKHGERLVGLLHHTASNKIVVLCHGFIATKNDSLILDLAEALTKEGISVFRFDFSGNGESEGQFEYGNYRKEADDLHSVVLYLCQKSYDIAAVVGHSKGGDVVILYASVHDDVGTIVNLSGRFDLTKGIEERIGEGSIDRINKEGYLDVKDKSENASYRVTKESLMERLNTDMRAASVSISKGCRFLTVHGSADKTIPVEDAHEFAKHIPNHELRVIEGANHNYTSHRKEVADAVVDFITSNVTV

SEQ ID NO: 10659 - DNA, 1233 bp, Zea mays subsp. mays
  misc_feature (1)..(1233): Ceres Seq. ID no. 12345079
  misc_feature (1)..(1233): Ortholog of  Ceres SEQ ID NO 13638976 as cited in SEQ ID NO 55790
  misc_feature (1)..(1233): Ortholog of  Ceres SEQ ID NO 12616626 as cited in SEQ ID NO 64532
cccatttcctcttctccaaaccccactcaccgcaacgagccgccggatccatggccggcaaagacgggtccccgcctcctcccccgctcccatcctaccctgagatgatcgtggaggcaatccgggcgctgggactcgagaacggctgcaacaagactgcgatctcggactacatcaagggcagctacggctccaacctccctgcccagcacaacgccgtcctcacgggtcacctcgcccgcatgaaggctaccggcgagctcgccttcctcaggaacaactatctcctccccaacgaggacgaagcctccccgctgagcaccggtgggcacaagggccccgccgccgccgaggaggagtctactggcgtgttggacgttggtgacgatgtgttgcttgcttcccctctcgtcatcgacgctgacgccgtcgacattgatgtgcctgctccagctcccgttgtcaccgctgatgtcgacgatattgacgtgcctgctccagctcccgttgtcaccgctgatgtcaaccctgttcataccaagcggggacgcggacggcccccgaagcccaaggaccccgttgctgagggctacggtggtaagcccgctacagctcccgtcgccgccgctgccgtgcctgtcaagcgcgggcgcggacgtccgccgaaacccaagaaccccgtcgccgaggactcagctcccactgcggcttccgttgtcaccactgatggcaatgccgtgcctgtgaagcgtgggcgcggacgccccccaaagctcaaggaccccatcaatgtggccactgaccaggccaccagcggcatgctgagcccacgtggccgtgggcgcccgcccaagaaggccaaggtcgccgtggaagatcccagaggtgaacctgctgcagctcgagacgttgttgctgatgccagtgctgtacatgtcaagcgtgggcgtggacggcccccaagatgagtcctgcagctgcagtgactgggaagccgtctgagtcttaaaccatgaacattgaatcctatggtggtaatggtttgggagtagcttggtgtatcaaattgagttctgaactatcttatccagttgggtgcatagcatcggaagactaatctcaataatctggatggtttctgtacattgaatggcggatgatgcgtaatagttgactgctgctgaagacttgacttaatcattgctattttcttctcattgttgcgtgttaatt

SEQ ID NO: 10660 - protein, 321 aa, Zea mays subsp. mays
  peptide (1)..(321): Ceres Seq. ID no. 12345080
HFLFSKPHSPQRAAGSMAGKDGSPPPPPLPSYPEMIVEAIRALGLENGCNKTAISDYIKGSYGSNLPAQHNAVLTGHLARMKATGELAFLRNNYLLPNEDEASPLSTGGHKGPAAAEEESTGVLDVGDDVLLASPLVIDADAVDIDVPAPAPVVTADVDDIDVPAPAPVVTADVNPVHTKRGRGRPPKPKDPVAEGYGGKPATAPVAAAAVPVKRGRGRPPKPKNPVAEDSAPTAASVVTTDGNAVPVKRGRGRPPKLKDPINVATDQATSGMLSPRGRGRPPKKAKVAVEDPRGEPAAARDVVADASAVHVKRGRGRPPR

SEQ ID NO: 10661 - protein, 305 aa, Zea mays subsp. mays
  peptide (1)..(305): Ceres Seq. ID no. 12345081
MAGKDGSPPPPPLPSYPEMIVEAIRALGLENGCNKTAISDYIKGSYGSNLPAQHNAVLTGHLARMKATGELAFLRNNYLLPNEDEASPLSTGGHKGPAAAEEESTGVLDVGDDVLLASPLVIDADAVDIDVPAPAPVVTADVDDIDVPAPAPVVTADVNPVHTKRGRGRPPKPKDPVAEGYGGKPATAPVAAAAVPVKRGRGRPPKPKNPVAEDSAPTAASVVTTDGNAVPVKRGRGRPPKLKDPINVATDQATSGMLSPRGRGRPPKKAKVAVEDPRGEPAAARDVVADASAVHVKRGRGRPPR

SEQ ID NO: 10662 - protein, 287 aa, Zea mays subsp. mays
  peptide (1)..(287): Ceres Seq. ID no. 12345082
MIVEAIRALGLENGCNKTAISDYIKGSYGSNLPAQHNAVLTGHLARMKATGELAFLRNNYLLPNEDEASPLSTGGHKGPAAAEEESTGVLDVGDDVLLASPLVIDADAVDIDVPAPAPVVTADVDDIDVPAPAPVVTADVNPVHTKRGRGRPPKPKDPVAEGYGGKPATAPVAAAAVPVKRGRGRPPKPKNPVAEDSAPTAASVVTTDGNAVPVKRGRGRPPKLKDPINVATDQATSGMLSPRGRGRPPKKAKVAVEDPRGEPAAARDVVADASAVHVKRGRGRPPR

SEQ ID NO: 10663 - DNA, 1849 bp, Zea mays subsp. mays
  misc_feature (1)..(1849): Ceres Seq. ID no. 12351282
  misc_feature (1)..(1849): Ortholog of  Ceres SEQ ID NO 14311203 as cited in SEQ ID NO 53639
  misc_feature (1)..(1849): Ortholog of  Ceres SEQ ID NO 15176053 as cited in SEQ ID NO 57792
  misc_feature (1)..(1849): Ortholog of  Ceres SEQ ID NO 14311175 as cited in SEQ ID NO 60223
  misc_feature (1)..(1849): Ortholog of  Ceres SEQ ID NO 15224727 as cited in SEQ ID NO 64990
  misc_feature (1)..(1849): Ortholog of  Ceres SEQ ID NO 14308023 as cited in SEQ ID NO 65865
  misc_feature (1)..(1849): Ortholog of  Ceres SEQ ID NO 14307972 as cited in SEQ ID NO 66436
  misc_feature (1)..(1849): Ortholog of  Ceres SEQ ID NO 15170175 as cited in SEQ ID NO 67138
  misc_feature (1)..(1849): Ortholog of  Ceres SEQ ID NO 12614670 as cited in SEQ ID NO 68565
cccccctcccccacccacccagcgtgcgaggcgatcaaaccgtgtgcgggcatggtggccgcgctgctcctgacctcggcgaccgcgctcctggcgctggcggcggcgtggctctgggactacgtcgtggtgcgcctcctttggcggccccgcgccgtggccggcatgttcagggcgcagggggtccgcgggccgccctacagcttcctcagcggctgcaaccgcgagatgaggaggatgaaggcggaggccgacgacgggctccggctggacgtccgcgaccacaactacctccccagggtgatgccccatttcctcgcctggaagcagctgtacggggagccattcctgtactggatgggtccgcggccccgggtctgcctcttcgactacgagtcggtaaggcaagttcttttcaacaagcccggtcatttcttcaaggacgacgcccacccgactatcctggcaatgatgggcaaagggctggtcctggtggaaggcaccgactgggtgcgccatcggagggtggtcaacccagccttcgccatggacaagctcaagatgatgacggagacgatggtcagctgtgctgagccactgatcaagcggtgggaacagctcgcagcagccagcagatccagcgaggacggtgggaggggagaagtgcaagtggagttcagcaagcagttccaggacctgacggcggacgttatcgcccacaccggtttcggaagcagctacaaggagggcaaagaggtgttccatacgcagaagcagctcctggcgctcgccatggcgactctcctcaacgtgcagctgccaggattcaagtatctccctaccaagaacaacaggctcaagtgggcgctagaaaagaagatgaagacgacgctcacggcgatcatacagtcgcgggtggcatccaatgggaggagtagtggatacggagacgacctgctcggcctgatgctcgaggcctggctcacagcggaacgaggaggaggggaacgggacgagtcgagcctgaccatggacgagatcatagacgagtgcaagacattcttcttcgcaggccacgagaccacgtcccatttgctcacctggacaatgttcttgctcagcgtgtacccggaatggcagcaacggctaagggacgaggtcctgagagagtgcggacaggcaaaccctactgcagacacgcttaacaaattcaatgagatgacgatggtgctcctcgagacactgagactctacggccctgtcatgctcatgctaaggaagcctacctccgacataaggctgggcagcctcagcataccgaaaggcaacgggatcgccatacccgtcccgttcctccaccgagacagagaggtctggggcgacaacgccaatgacttcgatccgttgaggtttcagaacggggtcacgaacgcggccaagaccccgcaggctcttctgtcgttctcgatcgggccgagggcatgcatcggccagaacttcgcgatgctggaagcgaagtcggtgatggccatgatcatgaagaagttctccttcacgctttcctcgagctacgtgcacgcgcctgtggattatatcacgctccagcctaagttcggccttcccatagttttgaggccactcccggatgtatgatgtgaaatggatctgtagcctgatagctgattttttttggggggtctaagtatgcataagaggtcagtattcaggacttggtttcatccgccaaacagtaaggctaaagaaccaaaacttgttgaaaactggtaactttctgggattttatgcccgtattatgtatataaatatataatgctacatagaactttgt

SEQ ID NO: 10664 - protein, 550 aa, Zea mays subsp. mays
  peptide (1)..(550): Ceres Seq. ID no. 12351283
PPSPTHPACEAIKPCAGMVAALLLTSATALLALAAAWLWDYVVVRLLWRPRAVAGMFRAQGVRGPPYSFLSGCNREMRRMKAEADDGLRLDVRDHNYLPRVMPHFLAWKQLYGEPFLYWMGPRPRVCLFDYESVRQVLFNKPGHFFKDDAHPTILAMMGKGLVLVEGTDWVRHRRVVNPAFAMDKLKMMTETMVSCAEPLIKRWEQLAAASRSSEDGGRGEVQVEFSKQFQDLTADVIAHTGFGSSYKEGKEVFHTQKQLLALAMATLLNVQLPGFKYLPTKNNRLKWALEKKMKTTLTAIIQSRVASNGRSSGYGDDLLGLMLEAWLTAERGGGERDESSLTMDEIIDECKTFFFAGHETTSHLLTWTMFLLSVYPEWQQRLRDEVLRECGQANPTADTLNKFNEMTMVLLETLRLYGPVMLMLRKPTSDIRLGSLSIPKGNGIAIPVPFLHRDREVWGDNANDFDPLRFQNGVTNAAKTPQALLSFSIGPRACIGQNFAMLEAKSVMAMIMKKFSFTLSSSYVHAPVDYITLQPKFGLPIVLRPLPDV

SEQ ID NO: 10665 - protein, 533 aa, Zea mays subsp. mays
  peptide (1)..(533): Ceres Seq. ID no. 12351284
MVAALLLTSATALLALAAAWLWDYVVVRLLWRPRAVAGMFRAQGVRGPPYSFLSGCNREMRRMKAEADDGLRLDVRDHNYLPRVMPHFLAWKQLYGEPFLYWMGPRPRVCLFDYESVRQVLFNKPGHFFKDDAHPTILAMMGKGLVLVEGTDWVRHRRVVNPAFAMDKLKMMTETMVSCAEPLIKRWEQLAAASRSSEDGGRGEVQVEFSKQFQDLTADVIAHTGFGSSYKEGKEVFHTQKQLLALAMATLLNVQLPGFKYLPTKNNRLKWALEKKMKTTLTAIIQSRVASNGRSSGYGDDLLGLMLEAWLTAERGGGERDESSLTMDEIIDECKTFFFAGHETTSHLLTWTMFLLSVYPEWQQRLRDEVLRECGQANPTADTLNKFNEMTMVLLETLRLYGPVMLMLRKPTSDIRLGSLSIPKGNGIAIPVPFLHRDREVWGDNANDFDPLRFQNGVTNAAKTPQALLSFSIGPRACIGQNFAMLEAKSVMAMIMKKFSFTLSSSYVHAPVDYITLQPKFGLPIVLRPLPDV

SEQ ID NO: 10666 - protein, 495 aa, Zea mays subsp. mays
  peptide (1)..(495): Ceres Seq. ID no. 12351285
MFRAQGVRGPPYSFLSGCNREMRRMKAEADDGLRLDVRDHNYLPRVMPHFLAWKQLYGEPFLYWMGPRPRVCLFDYESVRQVLFNKPGHFFKDDAHPTILAMMGKGLVLVEGTDWVRHRRVVNPAFAMDKLKMMTETMVSCAEPLIKRWEQLAAASRSSEDGGRGEVQVEFSKQFQDLTADVIAHTGFGSSYKEGKEVFHTQKQLLALAMATLLNVQLPGFKYLPTKNNRLKWALEKKMKTTLTAIIQSRVASNGRSSGYGDDLLGLMLEAWLTAERGGGERDESSLTMDEIIDECKTFFFAGHETTSHLLTWTMFLLSVYPEWQQRLRDEVLRECGQANPTADTLNKFNEMTMVLLETLRLYGPVMLMLRKPTSDIRLGSLSIPKGNGIAIPVPFLHRDREVWGDNANDFDPLRFQNGVTNAAKTPQALLSFSIGPRACIGQNFAMLEAKSVMAMIMKKFSFTLSSSYVHAPVDYITLQPKFGLPIVLRPLPDV

SEQ ID NO: 10667 - DNA, 1739 bp, Zea mays subsp. mays
  misc_feature (1)..(1739): Ceres Seq. ID no. 12347699
  misc_feature (1)..(1739): Ortholog of  Ceres SEQ ID NO 15176959 as cited in SEQ ID NO 52610
  misc_feature (1)..(1739): Ortholog of  Ceres SEQ ID NO 15176571 as cited in SEQ ID NO 54430
accctttttcgtctctcctctgcctttccccatcgtctctccgtctacacctcatcataatcacagattcacagagcgctagggaggagagagggctagggtttcgtgctccctcacgcaacgaatccgagccggatcggggggtgcgcggagtcaccggcggcccggcgttgcctgggctgtgatacagttgcaatggcatctgtaactgatgagacagctaagattgagggtttgacatctgctgcagcctttgtggagggtggcattcaggacgcatgtgatgatgcatgcagcatttgccttgaggctttctgtgagagtgacccttctgcattgactggctgcaaacatgagttccatctccaatgcattcttgaatggtgccagagaagttcacagtgcccaatgtgttggcagcctattactatgaaggatcctaccagtcaggagctgcttgaggcagtagagcgtgagaggaatataagaactaatcaaactcggaacacaactatatttcatcatcctgctcttggggattttgagctgcagcatctgcctgttggtaatgatgctgagcttgaagagcgtatactgcagcatctagctgctgctgctgcaatgggaagggcacaccatcttggaagaagggaggggcacaggggacgatctggctctcatggtcgtccacatttcctagttttctctacacaaccaaattcaccttctgctggcacaatctcttcatcttctgctcatatggagggagaaaatgattcaaatcctgccacacctagagctagcgagtcatctccacgagctattcgcattggagaagtgggaaaccaaagtcctgggatgcttacctacgatgctgaacaggatgctgtcgtttcttccggaaatagcactcctgtatcgagtcctaggttttttaacaggagacactccactggacagtcaactccagacagggctgggccatcggatattcagtctttctcagactccctgaagtcccgcttaaatgccgtctctatgaagtacaaagaatctattacaaagagtactcgagggtggaaggagagattgttttcacgtaattcatccgtggcggatcttggttctgaagtgagaagagaagttaatgctggaattgcgtccgtatcacggatgatggagcgtctggaaactagaggaaatagcagaacaagtgatagcccggcagcatccacttctgaagttccctctgctacagaatcaagcaatgaaagggttacagagagcaactctgctgctgctgctgctggtggtggtactacccactacgggtaccagcgctagcaacgcctccgccccttgtgttgcgacatccggttcaaattaggacatgtaagggtctcagaaagaaggcttacacctgcaattcttcatcttcaaaggtttgtgagcctggcggcagagcagaagtgcagtaacatgatgccgtcatttttttctcaaccactgcataaacggctgcaaggggaaaaaaaccaaacggtgatttgatgtattggctcgataaaatggtggtgcgtgtggcctaggagaagtcggatttcatcttctgttttcgtctctttgtaaaaaaaatcgtctgagggcagatgtttaccggtataaataacggatatgtcatcttcatagtacgtggatcagttataaatatgattggaacagcaaagcttgctgctgtt

SEQ ID NO: 10668 - protein, 382 aa, Zea mays subsp. mays
  peptide (1)..(382): Ceres Seq. ID no. 12347700
MASVTDETAKIEGLTSAAAFVEGGIQDACDDACSICLEAFCESDPSALTGCKHEFHLQCILEWCQRSSQCPMCWQPITMKDPTSQELLEAVERERNIRTNQTRNTTIFHHPALGDFELQHLPVGNDAELEERILQHLAAAAAMGRAHHLGRREGHRGRSGSHGRPHFLVFSTQPNSPSAGTISSSSAHMEGENDSNPATPRASESSPRAIRIGEVGNQSPGMLTYDAEQDAVVSSGNSTPVSSPRFFNRRHSTGQSTPDRAGPSDIQSFSDSLKSRLNAVSMKYKESITKSTRGWKERLFSRNSSVADLGSEVRREVNAGIASVSRMMERLETRGNSRTSDSPAASTSEVPSATESSNERVTESNSAAAAAGGGTTHYGYQR

SEQ ID NO: 10669 - protein, 311 aa, Zea mays subsp. mays
  peptide (1)..(311): Ceres Seq. ID no. 12347701
MCWQPITMKDPTSQELLEAVERERNIRTNQTRNTTIFHHPALGDFELQHLPVGNDAELEERILQHLAAAAAMGRAHHLGRREGHRGRSGSHGRPHFLVFSTQPNSPSAGTISSSSAHMEGENDSNPATPRASESSPRAIRIGEVGNQSPGMLTYDAEQDAVVSSGNSTPVSSPRFFNRRHSTGQSTPDRAGPSDIQSFSDSLKSRLNAVSMKYKESITKSTRGWKERLFSRNSSVADLGSEVRREVNAGIASVSRMMERLETRGNSRTSDSPAASTSEVPSATESSNERVTESNSAAAAAGGGTTHYGYQR

SEQ ID NO: 10670 - protein, 304 aa, Zea mays subsp. mays
  peptide (1)..(304): Ceres Seq. ID no. 12347702
MKDPTSQELLEAVERERNIRTNQTRNTTIFHHPALGDFELQHLPVGNDAELEERILQHLAAAAAMGRAHHLGRREGHRGRSGSHGRPHFLVFSTQPNSPSAGTISSSSAHMEGENDSNPATPRASESSPRAIRIGEVGNQSPGMLTYDAEQDAVVSSGNSTPVSSPRFFNRRHSTGQSTPDRAGPSDIQSFSDSLKSRLNAVSMKYKESITKSTRGWKERLFSRNSSVADLGSEVRREVNAGIASVSRMMERLETRGNSRTSDSPAASTSEVPSATESSNERVTESNSAAAAAGGGTTHYGYQR

SEQ ID NO: 10671 - DNA, 1358 bp, Zea mays subsp. mays
  misc_feature (1)..(1358): Ceres Seq. ID no. 13493529
  misc_feature (1)..(1358): Ortholog of  Ceres SEQ ID NO 14312293 as cited in SEQ ID NO 58744
  misc_feature (1)..(1358): Ortholog of  Ceres SEQ ID NO 15177596 as cited in SEQ ID NO 59731
aaaccaacccacgccatcatcatccgtcaatccatccatccatccgcttgtccctaccacctccaccaaccaaaacccccaaccgccgaggtcaccggcgactccgtcctcgccgcgccgcgccgtgaggatgtcgttccactaccacgaccacgggctgtccatggacgccgcggcagcggcggccgccgccgcgtcgtcgccgaaccctagcggcttctcccccggcatcggcggggaaagggagaaggcggccatcgcggcgcacccgctgtacgagcgcctcctggaggcgcacgtcgcctgcctacgcgtcgccacccccgtcgaccagctcccccgcatcgacgcgcagatcgccgcgcgccccccgccgctcgccgcggccgccggggccgcggccgcgggaggcccgtccggcggggaggagctcgacctcttcatgacgcactatgtattgctcctttgctcattcaaggagcagttgcagcagcatgtacgtgttcatgcaatggaagcagtgatgggttgctgggagcttgaacaatctttacaaagcctaacaggggcatctccgggtgaaggcactggaggaaccatgtctgacgatgaagataaccaggtggatagtgaagccaacatgttcgatggaaatgatggatcagacggtatgggctttggccccctaatactgacagagggtgaacggtccttagttgagcgtgtacggaaggagctgaagaacgagcttaagcagggttacaaggaaaagcttgtcgatatcagggaagagatcatgcgcaaacgcagggctgggaaacttcctggagataccgcatctgtactgaaagcttggtggcaagctcattcgaagtggccgtacccaactgaagacgacaaggccagactggtgcaggaaacggggttgcagctaaagcagatcaacaactggttcattaaccaacgcaaacggaactggcacagcaacccaacatcctcggctgaaaagaccaagaagaaaaggtgatgatggcccagagcaatcttggcaaaaagctagacatgtccactatactttattatggcgaagtacattctccctcacttcgtaggcaagagggaaaggtatcttgggtgacttgagtggccacctaatgcgcaagtttgaccacgtgtggggctggggttgggtagtgacctcagcagtatagcattcgctaacgtgatgtgggaatcacgtgttgcagtagaaccggcgagcgggaggggggtaatttatgttgtattgtaattactatatatgaaagacggacacaaacgtcgctcctcgtacgtccacgtcgtcacttttttcagcg

SEQ ID NO: 10672 - protein, 341 aa, Zea mays subsp. mays
  peptide (1)..(341): Ceres Seq. ID no. 13493530
NQPTPSSSVNPSIHPLVPTTSTNQNPQPPRSPATPSSPRRAVRMSFHYHDHGLSMDAAAAAAAAASSPNPSGFSPGIGGEREKAAIAAHPLYERLLEAHVACLRVATPVDQLPRIDAQIAARPPPLAAAAGAAAAGGPSGGEELDLFMTHYVLLLCSFKEQLQQHVRVHAMEAVMGCWELEQSLQSLTGASPGEGTGGTMSDDEDNQVDSEANMFDGNDGSDGMGFGPLILTEGERSLVERVRKELKNELKQGYKEKLVDIREEIMRKRRAGKLPGDTASVLKAWWQAHSKWPYPTEDDKARLVQETGLQLKQINNWFINQRKRNWHSNPTSSAEKTKKKR

SEQ ID NO: 10673 - protein, 298 aa, Zea mays subsp. mays
  peptide (1)..(298): Ceres Seq. ID no. 13493531
MSFHYHDHGLSMDAAAAAAAAASSPNPSGFSPGIGGEREKAAIAAHPLYERLLEAHVACLRVATPVDQLPRIDAQIAARPPPLAAAAGAAAAGGPSGGEELDLFMTHYVLLLCSFKEQLQQHVRVHAMEAVMGCWELEQSLQSLTGASPGEGTGGTMSDDEDNQVDSEANMFDGNDGSDGMGFGPLILTEGERSLVERVRKELKNELKQGYKEKLVDIREEIMRKRRAGKLPGDTASVLKAWWQAHSKWPYPTEDDKARLVQETGLQLKQINNWFINQRKRNWHSNPTSSAEKTKKKR

SEQ ID NO: 10674 - protein, 287 aa, Zea mays subsp. mays
  peptide (1)..(287): Ceres Seq. ID no. 13493532
MDAAAAAAAAASSPNPSGFSPGIGGEREKAAIAAHPLYERLLEAHVACLRVATPVDQLPRIDAQIAARPPPLAAAAGAAAAGGPSGGEELDLFMTHYVLLLCSFKEQLQQHVRVHAMEAVMGCWELEQSLQSLTGASPGEGTGGTMSDDEDNQVDSEANMFDGNDGSDGMGFGPLILTEGERSLVERVRKELKNELKQGYKEKLVDIREEIMRKRRAGKLPGDTASVLKAWWQAHSKWPYPTEDDKARLVQETGLQLKQINNWFINQRKRNWHSNPTSSAEKTKKKR

SEQ ID NO: 10675 - DNA, 1446 bp, Zea mays subsp. mays
  misc_feature (1)..(1446): Ceres Seq. ID no. 13569613
  misc_feature (1)..(1446): Ortholog of  Ceres SEQ ID NO 13592961 as cited in SEQ ID NO 20522
  misc_feature (1)..(1446): Ortholog of  Ceres SEQ ID NO 12583469 as cited in SEQ ID NO 51031
  misc_feature (1)..(1446): Ortholog of  Ceres SEQ ID NO 13597389 as cited in SEQ ID NO 63426
  misc_feature (1)..(1446): Ortholog of  Ceres SEQ ID NO 13595998 as cited in SEQ ID NO 68161
ggctgccgcatttattatattggtttggtacttggtagtttggtgacgctgaggcctcgtccccgatcagacttgttcggcctcttcgacggcgtgcccgtctccccgggctcattcgccatgcattcctcagcctccgcgagaggaggacgagggctcctcttgccggcggctgcggcggcggttgtggtgctactgttgggtgcagtggcgccagcggcgggttgctatccgcgcgtgttcaacttcggggactctctggcggacacgggcaactacccgttcgtctatggcaacgactcagccaagctccggccaccctacggcgagaccttcttccaccgcgccaccgggcgcgcctccaacgggcgcctcgtggtcgacttcatcgcggacacgctcggcctcccgttcgtgcgaccgtatctgagcggacggagcgcggaggacttcgcgggcggggccaacttcgccgtgggcggcgccacggcgctcagcccggacttcttccgtgcaagggggttccacaacatgggaaaccgagtggacctcgacatggagatgaagtggttccgcggcctgctcgacctactctgccccggcaacctcgccggttgctcggatatgatgaaccaatctctcttcttagttggagaaatcgggggcaatgactacaacggacctcttctttctggagttcccttcgaggaaattcgcgccatcactccgagtgttgttgcgaaaatttcttctacaatcagcgaattgattcagctaggagccaagactcttgtggttccaggaaaccttcctattggatgtgtcccaaaatatctgatgatattcaagagcaataagaaagaggattatgatccacagacaggttgtcttagatggatgaacgagttctcacagtaccacaacaagcttcttgtggagcagctcaagaagcttcgcaggctccatcctggagtaaccatcatctatgctgattactatggagctgctatggaaatattcctttcccctgaacgatatgggatcgaatatcccctagtggcttgctgtggtgcagaaggaccctacggtgtgtccccaactacaagctgtggattgggagaatataagctgtgcgataatccagaaaggtatggatcatgggatggcctccatccaacagaatctgcatacaaggtcatcgctatgggcctgctactaggttcctatacaagaccgccaatcgcttccaccaccacttcatgtccacagcttatggagctcggctcttctgctgaatacaaacgcctctacgacctgtaataatttatgtaattatattttattgtatgtactccctcgcccacttcaataagtcccattttgcgagtacatgtactttgtaacttttaactaataacttatcaaactagctactatatatttgtt

SEQ ID NO: 10676 - protein, 439 aa, Zea mays subsp. mays
  peptide (1)..(439): Ceres Seq. ID no. 13569614
GCRIYYIGLVLGSLVTLRPRPRSDLFGLFDGVPVSPGSFAMHSSASARGGRGLLLPAAAAAVVVLLLGAVAPAAGCYPRVFNFGDSLADTGNYPFVYGNDSAKLRPPYGETFFHRATGRASNGRLVVDFIADTLGLPFVRPYLSGRSAEDFAGGANFAVGGATALSPDFFRARGFHNMGNRVDLDMEMKWFRGLLDLLCPGNLAGCSDMMNQSLFLVGEIGGNDYNGPLLSGVPFEEIRAITPSVVAKISSTISELIQLGAKTLVVPGNLPIGCVPKYLMIFKSNKKEDYDPQTGCLRWMNEFSQYHNKLLVEQLKKLRRLHPGVTIIYADYYGAAMEIFLSPERYGIEYPLVACCGAEGPYGVSPTTSCGLGEYKLCDNPERYGSWDGLHPTESAYKVIAMGLLLGSYTRPPIASTTTSCPQLMELGSSAEYKRLYDL

SEQ ID NO: 10677 - protein, 399 aa, Zea mays subsp. mays
  peptide (1)..(399): Ceres Seq. ID no. 13569615
MHSSASARGGRGLLLPAAAAAVVVLLLGAVAPAAGCYPRVFNFGDSLADTGNYPFVYGNDSAKLRPPYGETFFHRATGRASNGRLVVDFIADTLGLPFVRPYLSGRSAEDFAGGANFAVGGATALSPDFFRARGFHNMGNRVDLDMEMKWFRGLLDLLCPGNLAGCSDMMNQSLFLVGEIGGNDYNGPLLSGVPFEEIRAITPSVVAKISSTISELIQLGAKTLVVPGNLPIGCVPKYLMIFKSNKKEDYDPQTGCLRWMNEFSQYHNKLLVEQLKKLRRLHPGVTIIYADYYGAAMEIFLSPERYGIEYPLVACCGAEGPYGVSPTTSCGLGEYKLCDNPERYGSWDGLHPTESAYKVIAMGLLLGSYTRPPIASTTTSCPQLMELGSSAEYKRLYDL

SEQ ID NO: 10678 - protein, 262 aa, Zea mays subsp. mays
  peptide (1)..(262): Ceres Seq. ID no. 13569616
MGNRVDLDMEMKWFRGLLDLLCPGNLAGCSDMMNQSLFLVGEIGGNDYNGPLLSGVPFEEIRAITPSVVAKISSTISELIQLGAKTLVVPGNLPIGCVPKYLMIFKSNKKEDYDPQTGCLRWMNEFSQYHNKLLVEQLKKLRRLHPGVTIIYADYYGAAMEIFLSPERYGIEYPLVACCGAEGPYGVSPTTSCGLGEYKLCDNPERYGSWDGLHPTESAYKVIAMGLLLGSYTRPPIASTTTSCPQLMELGSSAEYKRLYDL

SEQ ID NO: 10679 - DNA, 1957 bp, Zea mays subsp. mays
  misc_feature (1)..(1957): Ceres Seq. ID no. 13494733
  misc_feature (1)..(1957): Ortholog of  Ceres SEQ ID NO 15177320 as cited in SEQ ID NO 52645
  misc_feature (1)..(1957): Ortholog of  Ceres SEQ ID NO 15171359 as cited in SEQ ID NO 57279
  misc_feature (1)..(1957): Ortholog of  Ceres SEQ ID NO 14313840 as cited in SEQ ID NO 59568
  misc_feature (1)..(1957): Ortholog of  Ceres SEQ ID NO 15168502 as cited in SEQ ID NO 60095
  misc_feature (1)..(1957): Ortholog of  Ceres SEQ ID NO 13662245 as cited in SEQ ID NO 62708
  misc_feature (1)..(1957): Ortholog of  Ceres SEQ ID NO 14314084 as cited in SEQ ID NO 63256
  misc_feature (1)..(1957): Ortholog of  Ceres SEQ ID NO 15169466 as cited in SEQ ID NO 66135
  misc_feature (1)..(1957): Ortholog of  Ceres SEQ ID NO 14303091 as cited in SEQ ID NO 66369
aggcctccactcattcctgcccccgacactcccactgccaccagtcctctcaccgccaggcgcggcacaatgcagccgcctacccttctcccgctaggcgccgtcgtggtcgccatcctcctgctcgccaccgccccgagccccgccgtctcccgccaccgccactcgtccgccgcggacacggagacgctcgatgtagccgcctcgctctcccgcgcccgcgccgcgctctccaccgacgccgtctcggntgcaccagtccgcggccgccgccgccgccggggcgaagcgctccccgcgagcgcgggagggcggcctcacgctgcggctccactcccgggacttcctgcccgaggagcaggggcggcacgagacgtaccgctcgctcgtgctctcccgcctccgccgcgactcggcgcgcgccgctgcggtgtcggcccgcgcgacgctggcggcggacggcgtgacccggctggacctgcgccccgcgaacgggtcggcggtgttcgcggcgtcggcggcggcggcggcgatccagggtcccgtggtgtccggcgtcgggcagggcagcggcgagtacttctcccgcgtgggcatcggcagccccgcgcggcagctgtacatggtgctggacaccggcagcgacgtcacctgggtgcagtgccagccctgcgccgactgctaccagcagtccgacccggtgttcgacccgtccctctccgcctcctacgccgccgtctcctgcgactcccagcgctgccgggacctggacaccgcggcgtgccgcaacgccacgggcgcctgcctctacgaggtggcctacggcgacggctcctacaccgtgggcgacttcgccaccgagacgctcacgctgggggactccaccccggtcggcaacgtcgccatcgggtgcggccacgacaacgagggcctcttcgtcggcgccgcggggctgctggcgctgggcggcgggccgctctccttcccgtcccagatctccgcgtccaccttctcctactgcctcgtggaccgcgactccccggccgcgtccacgctccagttcggcgacggcgccgccgaggcgggcaccgtgacggcgcctctcgtgcgcagcccgcgcacgagcaccttctactacgtggcgctttcgggcatctcggtgggcgggcagccgctgtccatcccggcatccgccttcgccatggacgccacgtcgggctcgggcggcgtcatcgtggactccggcaccgccgtgacgcggctccagtccgccgcgtacgcggcgctccgcgacgccttcgtccagggcgcgccgtcgctgccccggacctccggggtgtcgctgttcgacacgtgctacgacctgtcggaccggacgagcgtggaggtgcccgcggtgtcgctgcggttcgagggcggcggcgcgctgcggctgccggcgaagaactacctgatccccgtggacggagccggcacctactgcctggcgttcgcgccgacgaacgcggccgtgtccatcatcgggaacgtgcagcagcagggcacccgcgtcagcttcgacaccgccaggggcgccgtcggcttcacccccaacaagtgctagcctagcctagcctaagcctgccttctggctaaccgtgccctgttagccacggttgtcagtagtaatgacaagccggtgtttaattagcgggagaatgattagatggggggtaattaagcggtgggccctgccgggtctggggaggagcgaaaggcaaaggcgaggacagatgatgccattgccatgccagcctgtgtccggcgcgatgggtccagctccagcagtgtttctctctttctctcgagtatgcgtgcgtggagccttgtcatgacgaattagatcgtgggggctcccaagttaagagtatttatttttattttatttgctatgtcaagaaaatggaagtttccatcc

SEQ ID NO: 10680 - protein, 535 aa, Zea mays subsp. mays
  peptide (1)..(535): Ceres Seq. ID no. 13494734
  misc_feature (84)..(84): Xaa is any aa, unknown or other
RPPLIPAPDTPTATSPLTARRGTMQPPTLLPLGAVVVAILLLATAPSPAVSRHRHSSAADTETLDVAASLSRARAALSTDAVSXAPVRGRRRRRGEALPASAGGRPHAAAPLPGLPARGAGAARDVPLARALPPPPRLGARRCGVGPRDAGGGRRDPAGPAPRERVGGVRGVGGGGGDPGSRGVRRRAGQRRVLLPRGHRQPRAAAVHGAGHRQRRHLGAVPALRRLLPAVRPGVRPVPLRLLRRRLLRLPALPGPGHRGVPQRHGRLPLRGGLRRRLLHRGRLRHRDAHAGGLHPGRQRRHRVRPRQRGPLRRRRGAAGAGRRAALLPVPDLRVHLLLLPRGPRLPGRVHAPVRRRRRRGGHRDGASRAQPAHEHLLLRGAFGHLGGRAAAVHPGIRLRHGRHVGLGRRHRGLRHRRDAAPVRRVRGAPRRLRPGRAVAAPDLRGVAVRHVLRPVGPDERGGARGVAAVRGRRRAAAAGEELPDPRGRSRHLLPGVRADERGRVHHRERAAAGHPRQLRHRQGRRRLHPQQVLA

SEQ ID NO: 10681 - protein, 512 aa, Zea mays subsp. mays
  peptide (1)..(512): Ceres Seq. ID no. 13494735
  misc_feature (61)..(61): Xaa is any aa, unknown or other
MQPPTLLPLGAVVVAILLLATAPSPAVSRHRHSSAADTETLDVAASLSRARAALSTDAVSXAPVRGRRRRRGEALPASAGGRPHAAAPLPGLPARGAGAARDVPLARALPPPPRLGARRCGVGPRDAGGGRRDPAGPAPRERVGGVRGVGGGGGDPGSRGVRRRAGQRRVLLPRGHRQPRAAAVHGAGHRQRRHLGAVPALRRLLPAVRPGVRPVPLRLLRRRLLRLPALPGPGHRGVPQRHGRLPLRGGLRRRLLHRGRLRHRDAHAGGLHPGRQRRHRVRPRQRGPLRRRRGAAGAGRRAALLPVPDLRVHLLLLPRGPRLPGRVHAPVRRRRRRGGHRDGASRAQPAHEHLLLRGAFGHLGGRAAAVHPGIRLRHGRHVGLGRRHRGLRHRRDAAPVRRVRGAPRRLRPGRAVAAPDLRGVAVRHVLRPVGPDERGGARGVAAVRGRRRAAAAGEELPDPRGRSRHLLPGVRADERGRVHHRERAAAGHPRQLRHRQGRRRLHPQQVLA

SEQ ID NO: 10682 - protein, 326 aa, Zea mays subsp. mays
  peptide (1)..(326): Ceres Seq. ID no. 13494736
MVLDTGSDVTWVQCQPCADCYQQSDPVFDPSLSASYAAVSCDSQRCRDLDTAACRNATGACLYEVAYGDGSYTVGDFATETLTLGDSTPVGNVAIGCGHDNEGLFVGAAGLLALGGGPLSFPSQISASTFSYCLVDRDSPAASTLQFGDGAAEAGTVTAPLVRSPRTSTFYYVALSGISVGGQPLSIPASAFAMDATSGSGGVIVDSGTAVTRLQSAAYAALRDAFVQGAPSLPRTSGVSLFDTCYDLSDRTSVEVPAVSLRFEGGGALRLPAKNYLIPVDGAGTYCLAFAPTNAAVSIIGNVQQQGTRVSFDTARGAVGFTPNKC

SEQ ID NO: 10683 - DNA, 1499 bp, Zea mays subsp. mays
  misc_feature (1)..(1499): Ceres Seq. ID no. 13580175
  misc_feature (1)..(1499): Ortholog of  Ceres SEQ ID NO 13596194 as cited in SEQ ID NO 68484
acaccacacctacatgtttctttaccctaacggcctaacctttctgctctagcgaaggcacagccgccgctgtttcttcatcttccttgcagcgccggcgctccatcttactctccctcccttactagcgcttgacacgcaggtgacgggcggcagcgacggcgctcagactcgggcttttagtgacggcatcagcggtttcccctcccgcctcttgccagtcccatcgcgccctcgcctcgggtcctctgcacaccgtccagtgaccttgcgtgatggactggataaagttttgcagcgattttaccgcaagtgatgggaaacagcatgcattgcttgataatcttaatcaggaattgtcccagaagtctgtactattgggtgatggttttaaactgtcagctgctgataatgatgtgtttgcaactgttcatccttttgtgatccgtgttagtgacagcgagttgcagaaatatccacatgtactgcggtggatggactacattcagaacactgttggtgctggtacaactttgcaaaagataaatgtgaccaagtctgactttgatccaccttctcatccaaggaaagctgataaaaaagatgctgaatcaagttcaaagaaagccatttccgtacagaagactgctgacaagtcaaatggaagtgctgactcaaagaaatccacaagagagcctcctgaaaataaggagaatcctactgctgcggggaacagcaaaacctctggggagaaaaagaaagtgcaagagaagtcagcaggaaaaacaacagagaaagctccagagaaaattgcagacaaggaatcagagtgcgatatcagtatcctgaatatacaggttggccttatccgtaaagcatggaagcatccatctgctgacagccttttagttgaggagatagatttgggagatggtaatgtgcgtcaagttgttagtggtcttgcaaagtattgcagcccagatgatcttactaatcggcatgttgtcttgatcacgaatgtgaagcctggaaagctgcgagatgtaatgtctgctggattggtcctttgtgcttcaactgaagatcatgctgctgtggagcctttgattcctccagaaggagccaagattggagaacgcatttcatttgctgggtttgatgggaagcctgaagatgttctaaatccaaagaaaaagcagctggacaagattaccccgcatcttcgtaccgacgagaatggaattgcaatgttcaaaggtgttccctttactacatcagctggcccatgtagatcttcgattcacaacggaaatgttaagtgagcagctcattagacatggttgcatagattgacatcaaacttatgcaggctgtctgtgtaccattttgtcatacatcatgttttgcccatatttagcgttgcaaaatttgaacagagttacactatctgtaagcaattttctactaatggttggcccagagtttgcttttgagtatgc

SEQ ID NO: 10684 - protein, 348 aa, Zea mays subsp. mays
  peptide (1)..(348): Ceres Seq. ID no. 13580176
MDWIKFCSDFTASDGKQHALLDNLNQELSQKSVLLGDGFKLSAADNDVFATVHPFVIRVSDSELQKYPHVLRWMDYIQNTVGAGTTLQKINVTKSDFDPPSHPRKADKKDAESSSKKAISVQKTADKSNGSADSKKSTREPPENKENPTAAGNSKTSGEKKKVQEKSAGKTTEKAPEKIADKESECDISILNIQVGLIRKAWKHPSADSLLVEEIDLGDGNVRQVVSGLAKYCSPDDLTNRHVVLITNVKPGKLRDVMSAGLVLCASTEDHAAVEPLIPPEGAKIGERISFAGFDGKPEDVLNPKKKQLDKITPHLRTDENGIAMFKGVPFTTSAGPCRSSIHNGNVK

SEQ ID NO: 10685 - protein, 275 aa, Zea mays subsp. mays
  peptide (1)..(275): Ceres Seq. ID no. 13580177
MDYIQNTVGAGTTLQKINVTKSDFDPPSHPRKADKKDAESSSKKAISVQKTADKSNGSADSKKSTREPPENKENPTAAGNSKTSGEKKKVQEKSAGKTTEKAPEKIADKESECDISILNIQVGLIRKAWKHPSADSLLVEEIDLGDGNVRQVVSGLAKYCSPDDLTNRHVVLITNVKPGKLRDVMSAGLVLCASTEDHAAVEPLIPPEGAKIGERISFAGFDGKPEDVLNPKKKQLDKITPHLRTDENGIAMFKGVPFTTSAGPCRSSIHNGNVK

SEQ ID NO: 10686 - DNA, 1466 bp, Zea mays subsp. mays
  misc_feature (1)..(1466): Ceres Seq. ID no. 12374177
  misc_feature (1)..(1466): Ortholog of  Ceres SEQ ID NO 15170830 as cited in SEQ ID NO 52691
  misc_feature (1)..(1466): Ortholog of  Ceres SEQ ID NO 12356503 as cited in SEQ ID NO 0
ctctcgctctaggcccctacccataagaaacttcgtcacggtctactctttctccgtcctagcaaaatcctccccgtactgagagccaaagaaacaacaaaggcaggaggccggcgaactacgcgaggaaaatttcgtttcccgggaggaagtcgggagtcgagacacgcgcgggtcaaaatcgcctccgtcgctgctgttgctgtcggaggcgagcaggaaggggaaagaacgagcttggaaccttggacagctcaagaagaggggacggggaggcggcagcctgtgagaaggcacgtgacacgtgaaggagcccgagggtagggaggaaccgaatcgagacatggactcggagcactggatctcgcgccctggccgccgccaagcgttactacgcggcgcagctcggccacgtcgacgatgtgcccgggatagggacggaggaggtggagatggagattgaggacgacgggggcttggagatggagatggagatggcgctggggctcggggacgcgacgtggccggaggtcgcctgcccctactgctacgaggaccatgacgtcgcgtccctctgcgtccacctcgaggaggaccacccctatgagccccacgccgcgccctgccccatttgctcccaaagggttacaagagatatgcttaaccatatgaccatgcagcatggttacctgttcaagaacggtcacaggtctcgcagatacattattcccgagagccatgcaatttctgcattgagccgagatctacggggtactcatttacgggctcttctagggggtggtcatggccacagatcaagcaatgcagtgactacaaacatttccagcgatcctcttctttcgtcgtttggcctgggcttctcaccatcagatgcaccagaaccatcaaaatcggcgtcttctattccagatggcgcctcaatacgtaaggagacaccggttcagccttgggagtcgagtattgattcatctctcacaagcgaggaaagggagcaaaagcggaaacaggccaccggcagagcaacctttgtgcaaggcctagtgctctccactctatttggagactgatcgttcgaaacagctctaggttcttgcacatgctagttcggcgcttactcctgcctggtccgcatagtcagatagtgctccacccggtttggtgcatctaactctgatggcgggaaagttcgcctcaggaaacttagccgcgttcttctttgtttcagaaaagcgcgcagttgattctatcgtgatatagcttgatttaagctagctgttgtaccgttgtctttaccaatttatcagccagtaattcttatctgttagctcactggcagatcgtgtttgcaccaacatacataatagcctgtaacatgtacttacacaaagcaagaaaggcgcttgtttgagcgcacattcttcttgttgtaagaccagttaaggcct

SEQ ID NO: 10687 - protein, 211 aa, Zea mays subsp. mays
  peptide (1)..(211): Ceres Seq. ID no. 12374178
MEIEDDGGLEMEMEMALGLGDATWPEVACPYCYEDHDVASLCVHLEEDHPYEPHAAPCPICSQRVTRDMLNHMTMQHGYLFKNGHRSRRYIIPESHAISALSRDLRGTHLRALLGGGHGHRSSNAVTTNISSDPLLSSFGLGFSPSDAPEPSKSASSIPDGASIRKETPVQPWESSIDSSLTSEEREQKRKQATGRATFVQGLVLSTLFGD

SEQ ID NO: 10688 - protein, 201 aa, Zea mays subsp. mays
  peptide (1)..(201): Ceres Seq. ID no. 12374179
MEMEMALGLGDATWPEVACPYCYEDHDVASLCVHLEEDHPYEPHAAPCPICSQRVTRDMLNHMTMQHGYLFKNGHRSRRYIIPESHAISALSRDLRGTHLRALLGGGHGHRSSNAVTTNISSDPLLSSFGLGFSPSDAPEPSKSASSIPDGASIRKETPVQPWESSIDSSLTSEEREQKRKQATGRATFVQGLVLSTLFGD

SEQ ID NO: 10689 - protein, 199 aa, Zea mays subsp. mays
  peptide (1)..(199): Ceres Seq. ID no. 12374180
MEMALGLGDATWPEVACPYCYEDHDVASLCVHLEEDHPYEPHAAPCPICSQRVTRDMLNHMTMQHGYLFKNGHRSRRYIIPESHAISALSRDLRGTHLRALLGGGHGHRSSNAVTTNISSDPLLSSFGLGFSPSDAPEPSKSASSIPDGASIRKETPVQPWESSIDSSLTSEEREQKRKQATGRATFVQGLVLSTLFGD

SEQ ID NO: 10690 - DNA, 1151 bp, Zea mays subsp. mays
  misc_feature (1)..(1151): Ceres Seq. ID no. 12362748
  misc_feature (1)..(1151): Ortholog of  Ceres SEQ ID NO 13639033 as cited in SEQ ID NO 55960
cccaggccccctccccacctccacctccaggcaccactggtcccacctcctcacctgcgaggatgctgctcgtgagtcaggcagcgaacggctccctctccgcgcggcggctgccgtcgaagccgccggggccgtccaccaccaacccctacccgctcttcgccaaccctcgcctcctgcgccgccgcctggcgctctccggcgctggcgccgaccaagccccgcgccgcgccgcgccgaccccagccgccgcgggcgagggcccctccgcctcctccaccgaggacccggtccttgtccgcgtcgccgacgacggcgtgccgctcgagggcgtcatccagattgagaagcccggggatgcggccgccgagtccaagctcgtctcctacgcgaagctgggtcttctggccggcggggacgtgttctgccttctgctgttctctgcgattggaaggttcagccatggcctgcccgtcctcgacgccgagacgttcaagacggccgaccccttcattgctgggtggctgctgagcgcctaccttcttggcggatttggcgatgatgccaaagggcgcaatggcgtcggaagcgcggttatcaccgcagctaaatcatgggctgttgggataccgttgggacttgctatccgagcagtgacgtctggtcatcttccaccaactccttttatcttggtaaccatgggaagtacaggggtcttgttaactgcatggcgtgctttggtatcacaactgttttccaaccagcaaaagcagcaggatgatgtctaccggcgtggaagtccttttgagctttttgagctactcacatcgctggtgcggaggtggtgacatctgaaggctgaagcctatagaaggtaagaagggcattgttccgctctggtatccgcaatcatcaggttcagccatctgtgtctattgtgtaagtacaattttgaaggtgaagaagagcaggctaaaacctagtttggagcatttgccgaacccaaaaaatgtttggcaataacacgcccgcgatgttggtttagtatattatattatattcataagatgtactcatattcctgatcttccacttgtaaaattgtatccagcttaacaaatcctaatcgataagaccgttgcctcttgttc

SEQ ID NO: 10691 - protein, 281 aa, Zea mays subsp. mays
  peptide (1)..(281): Ceres Seq. ID no. 12362749
QAPSPPPPPGTTGPTSSPARMLLVSQAANGSLSARRLPSKPPGPSTTNPYPLFANPRLLRRRLALSGAGADQAPRRAAPTPAAAGEGPSASSTEDPVLVRVADDGVPLEGVIQIEKPGDAAAESKLVSYAKLGLLAGGDVFCLLLFSAIGRFSHGLPVLDAETFKTADPFIAGWLLSAYLLGGFGDDAKGRNGVGSAVITAAKSWAVGIPLGLAIRAVTSGHLPPTPFILVTMGSTGVLLTAWRALVSQLFSNQQKQQDDVYRRGSPFELFELLTSLVRRW

SEQ ID NO: 10692 - protein, 261 aa, Zea mays subsp. mays
  peptide (1)..(261): Ceres Seq. ID no. 12362750
MLLVSQAANGSLSARRLPSKPPGPSTTNPYPLFANPRLLRRRLALSGAGADQAPRRAAPTPAAAGEGPSASSTEDPVLVRVADDGVPLEGVIQIEKPGDAAAESKLVSYAKLGLLAGGDVFCLLLFSAIGRFSHGLPVLDAETFKTADPFIAGWLLSAYLLGGFGDDAKGRNGVGSAVITAAKSWAVGIPLGLAIRAVTSGHLPPTPFILVTMGSTGVLLTAWRALVSQLFSNQQKQQDDVYRRGSPFELFELLTSLVRRW

SEQ ID NO: 10693 - DNA, 1362 bp, Zea mays subsp. mays
  misc_feature (1)..(1362): Ceres Seq. ID no. 13492731
  misc_feature (1)..(1362): Ortholog of  Ceres SEQ ID NO 14312281 as cited in SEQ ID NO 59172
  misc_feature (1)..(1362): Ortholog of  Ceres SEQ ID NO 14302299 as cited in SEQ ID NO 68665
  misc_feature (1)..(1362): Ortholog of  Ceres SEQ ID NO 15174396 as cited in SEQ ID NO 0
caacaacttgggcgcgcgcgcggccgggtagcaaaagctcgcgatctgtgcgcccaccaccgggaggagcgaagatgcggatgagctgcaatggctgccgcgtcctgcgcaagggctgcggcgacgcctgcaccatccgcccctgcctgcagtggatcgaggcccccgaggcgcaggccaacgccaccgtcttcctcgcaaagttctacggccgggcgggcctgctcaacctgctcgccgccgcgcccgacgacggcgtccgccccgcggtcttccgctccctgctctacgaggcgtgcggccgcatcgtcaacccggtctacggctccgtcggcctgctctggtcgcgccagtggcacaggtgcgccgacgccgtcgaggccgtgctcaggggggaccccgtcgtgcaggtcgacgccgggtccgacgccgccgctgccccgccgctgctcgccggcgncaggccgccgccgccggccgccttcgacatccgccacgtccccagggatcccgacgccaccgccgccgacctcctccgcgccggccgcaagaggttcaagcgcgcgggttcgtcttccaacgcctccaaggcgaagcccctgcccctcgagctcgagggcaaggccggcaacaacgaacgcgcgtcgcccagccctcnnccgacgnnacaactgagaggcggaggagctgcagccggtgccgatggtcgtcgagccagaacacggcgaggagtccgccggcagccacgaccaccacctgcagctgcaggggtggtcggaggaggacaccgacgtggaggcggcctcacacgtgagccaagccgaggctgagccgccagccagcagccagagccaggtgctggtagcggatcaggaggaagaggaggttgggctcgagctcacgcttgggttcgagcctgtcgtcaggcagcagccgaggtcgtcgcgctgcgacaagagcggcttgagcgcggcatcgagcctcatcggcctgcggctgcagctgccggccgcctaagcacaggcacagctcgcacctaaacgaatagagcagttttgcgaccctgcgcctgcggtgtttgcttaaaaataagcttttggacccccgggtgccaggagacacacagtagccaacttcaaattttctaggttttgtttatctttttcaatttttcttcttgtctttaactgtaaaagttgatggactgcacaattactcaggtagagggggtttggttccccgatcaaagagggcgtttggttactcggtttagttcttatatcgaatgtttaaatgccagttataagtattatatgtagtatatttaaaaattaattatataaatgaagactaaacattagt

SEQ ID NO: 10694 - protein, 275 aa, Zea mays subsp. mays
  peptide (1)..(275): Ceres Seq. ID no. 13492732
  misc_feature (153)..(153): Xaa is any aa, unknown or other
  misc_feature (219)..(219): Xaa is any aa, unknown or other
  misc_feature (222)..(222): Xaa is any aa, unknown or other
TTWARARPGSKSSRSVRPPPGGAKMRMSCNGCRVLRKGCGDACTIRPCLQWIEAPEAQANATVFLAKFYGRAGLLNLLAAAPDDGVRPAVFRSLLYEACGRIVNPVYGSVGLLWSRQWHRCADAVEAVLRGDPVVQVDAGSDAAAAPPLLAGXRPPPPAAFDIRHVPRDPDATAADLLRAGRKRFKRAGSSSNASKAKPLPLELEGKAGNNERASPSPXPTXQLRGGGAAAGADGRRARTRRGVRRQPRPPPAAAGVVGGGHRRGGGLTREPSRG

SEQ ID NO: 10695 - protein, 251 aa, Zea mays subsp. mays
  peptide (1)..(251): Ceres Seq. ID no. 13492733
  misc_feature (129)..(129): Xaa is any aa, unknown or other
  misc_feature (195)..(195): Xaa is any aa, unknown or other
  misc_feature (198)..(198): Xaa is any aa, unknown or other
MRMSCNGCRVLRKGCGDACTIRPCLQWIEAPEAQANATVFLAKFYGRAGLLNLLAAAPDDGVRPAVFRSLLYEACGRIVNPVYGSVGLLWSRQWHRCADAVEAVLRGDPVVQVDAGSDAAAAPPLLAGXRPPPPAAFDIRHVPRDPDATAADLLRAGRKRFKRAGSSSNASKAKPLPLELEGKAGNNERASPSPXPTXQLRGGGAAAGADGRRARTRRGVRRQPRPPPAAAGVVGGGHRRGGGLTREPSRG

SEQ ID NO: 10696 - protein, 249 aa, Zea mays subsp. mays
  peptide (1)..(249): Ceres Seq. ID no. 13492734
  misc_feature (127)..(127): Xaa is any aa, unknown or other
  misc_feature (193)..(193): Xaa is any aa, unknown or other
  misc_feature (196)..(196): Xaa is any aa, unknown or other
MSCNGCRVLRKGCGDACTIRPCLQWIEAPEAQANATVFLAKFYGRAGLLNLLAAAPDDGVRPAVFRSLLYEACGRIVNPVYGSVGLLWSRQWHRCADAVEAVLRGDPVVQVDAGSDAAAAPPLLAGXRPPPPAAFDIRHVPRDPDATAADLLRAGRKRFKRAGSSSNASKAKPLPLELEGKAGNNERASPSPXPTXQLRGGGAAAGADGRRARTRRGVRRQPRPPPAAAGVVGGGHRRGGGLTREPSRG

SEQ ID NO: 10697 - DNA, 1175 bp, Zea mays subsp. mays; identical to SEQ ID NO: 1897
  misc_feature (1)..(1175): Ceres Seq. ID no. 12566396
  misc_feature (1)..(1175): Ortholog of  Ceres SEQ ID NO 13598479 as cited in SEQ ID NO 60680

SEQ ID NO: 10698 - protein, 283 aa, Zea mays subsp. mays; identical to SEQ ID NO: 1898
  peptide (1)..(283): Ceres Seq. ID no. 12566397

SEQ ID NO: 10699 - protein, 215 aa, Zea mays subsp. mays; identical to SEQ ID NO: 1899
  peptide (1)..(215): Ceres Seq. ID no. 12566398

SEQ ID NO: 10700 - protein, 206 aa, Zea mays subsp. mays; identical to SEQ ID NO: 1900
  peptide (1)..(206): Ceres Seq. ID no. 12566399

SEQ ID NO: 10701 - DNA, 1733 bp, Zea mays subsp. mays
  misc_feature (1)..(1733): Ceres Seq. ID no. 12374173
  misc_feature (1)..(1733): Ortholog of  Ceres SEQ ID NO 14301502 as cited in SEQ ID NO 61205
gatacaaaccctaatccccaccgccgcccgaccccgcagcctcattccaggcgcatcgacagcgacggcacgcgctggtccatccacggtccaccagtcgacctcgctcacccgcgagccgcgggccttgtcctcgtcgtcgttcataggcagtgcagcctcattcaccggtcgtcctcgtccaccagcgaattgaagttcctcgcccatcagccaacgacgtcgacgcggcctcgttctcgtccagcccacagcccagcgtgctgcacgtcgccttgctgttgctgtgctgctgctgcctatgtttcaaatgtcccaactggacctagccctcggacggaagtgcccaggacctgtcaatatatgccagctgtgcggcgagccagagctgagcggcgtacagatttcttgcccttgatttgatcaagggcaaaagtgtccggccactagctgccaatataataaaataagtcccgccgccattcaccaaatcggccgccagggctccgtcctctagctgctccgtccggtggtccagccagctgcctagctccctccgacggtccggccagcaccgcctcctgctcgtggccttgcccagctcctccgctctccggtgagacgtagatcttggtgcggcagggcgctacggagggggggtggtgctgttgtgcgtgtgctggtggcctggtgctagcaaccaagcctattatgaaatctggtgctagttaactgctgaaaggtacagtactatggatcacgaatgatgtattgtatgcaattcggcccggagcgtcactaaatcctggatccgcattggccgcagcgccagtggccagtgtccagcctgccagctcagcccggcggcaagcgcccagcggctggctcgggcagcggccagtgaccagcagccgactcgtttcttcggcgttctccgccactgccccccagctatgcaccctgttccagtcccctcccagccctttaccgcaactcctgcaaaaaaacttgtttcaaggagcactgctgtgaggaaggccatccattttgtcaacctgcggacagctggaaggtctagtggaaacctggctatgaactccgtaccaaaacccgcccctgggtccgaaacatctgggagggaggattttgctgtgggggataaggatgctgtggtcattgttgatcatgggtcaagacgccaagaatccaatctcatgctaaatgactttgttgagatgttccgggcgaagactagctataggattgttgagcctgctcatatggagctagcggagcctactataaaggatgcttttggaaaatgtgtgcaacaaggagcatctcgagttattattagtccatatttcctttcccctggacgacactggaagcaagacattcctgctttagcagcagaggcatcaaaggagcactcaaatataccctatattgtcactgcccctcttgggctgcatgagcttatggtggatatcatgaatgatcgcatcaagtactgcctgcgacatgttgcgggtgatgtcgatgagtgtacagtgtgtgccggaactggaaagtgccgcatgtactcctgatggagcatacctggtaattgtttcttggtattaccatttattgtgagatctggagaatacgagatctgacgagtgtatagttcattttgtaatcttggactgtccatattctgagcagattgtcagaattagacaagtgcc

SEQ ID NO: 10702 - protein, 212 aa, Zea mays subsp. mays
  peptide (1)..(212): Ceres Seq. ID no. 12374174
MHPVPVPSQPFTATPAKKLVSRSTAVRKAIHFVNLRTAGRSSGNLAMNSVPKPAPGSETSGREDFAVGDKDAVVIVDHGSRRQESNLMLNDFVEMFRAKTSYRIVEPAHMELAEPTIKDAFGKCVQQGASRVIISPYFLSPGRHWKQDIPALAAEASKEHSNIPYIVTAPLGLHELMVDIMNDRIKYCLRHVAGDVDECTVCAGTGKCRMYS

SEQ ID NO: 10703 - protein, 166 aa, Zea mays subsp. mays
  peptide (1)..(166): Ceres Seq. ID no. 12374175
MNSVPKPAPGSETSGREDFAVGDKDAVVIVDHGSRRQESNLMLNDFVEMFRAKTSYRIVEPAHMELAEPTIKDAFGKCVQQGASRVIISPYFLSPGRHWKQDIPALAAEASKEHSNIPYIVTAPLGLHELMVDIMNDRIKYCLRHVAGDVDECTVCAGTGKCRMYS

SEQ ID NO: 10704 - protein, 140 aa, Zea mays subsp. mays
  peptide (1)..(140): Ceres Seq. ID no. 12374176
DTNPNPHRRPTPQPHSRRIDSDGTRWSIHGPPVDLAHPRAAGLVLVVVHRQCSLIHRSSSSTSELKFLAHQPTTSTRPRSRPAHSPACCTSPCCCCAAAAYVSNVPTGPSPRTEVPRTCQYMPAVRRARAERRTDFLPLI

SEQ ID NO: 10705 - DNA, 1034 bp, Zea mays subsp. mays
  misc_feature (1)..(1034): Ceres Seq. ID no. 12363023
  misc_feature (1)..(1034): Ortholog of  Ceres SEQ ID NO 13593932 as cited in SEQ ID NO 54078
  misc_feature (1)..(1034): Ortholog of  Ceres SEQ ID NO 12635231 as cited in SEQ ID NO 0
acgcgaggtcacgagatatggcggacggcaagcgaggggaggattcggccgtggcgttgaagacctcgccgtcgtcggcggtgatggctgggggtttacgcggcgttagcaaccctctggaggagtggagcgggcgcgtgaaggcgattgaggccgggttccgcgcgtggatggcgaagcaacccatccaaatcgaggccgcggtgaccacggccgtgggggcggtgcagggcggggctctgggtgggctcatgggctcgctcacagctgacggcgggtcgccgttccccatcccgcagccgccgcccaacgccaacccagaggccatggcgtcgttcaagcaggcccaggctttagctggtggacccttggtgcaagcccggaactttgcagtcatgaccggcgcaaacgcaggcatatcttgtgtcatgagaaggatacgagggaaagaggatatccagggcagcatggcagctgctttcggttctggtgctcttttctccatagtgagcggaatgggaactcctaatccagtagcaaatgcagttacaactggtgttgcttttgcagtatttcaaggtggctttttcatgatcgggcagaaattctcaaagccaccaagtgaagatacatactactctcggacaagaagcatgctgcacaaactgggtcttgaaaagtatgagaagaatttcaagaggggtctcctcaatgatcaaacattaccactccttacggacagtgctctgagagatgtgaagatccctcctggacccagacttctcatactcgaccaaattaaaagggaccccgagctggttcgagcaaagtagcagtcacaattgtcgacagctggttctttctgggttgcatagggtttgaaagcgatgccgtctctagtttcttaataaactttctaggcaagcaagcaagaatttagttgtgctgtagttaattgttttttggccgatcagtttgcatcgatcctattaaattctgaacaacaggtatttatatgcatcttattcaaattt

SEQ ID NO: 10706 - protein, 276 aa, Zea mays subsp. mays
  peptide (1)..(276): Ceres Seq. ID no. 12363024
ARSRDMADGKRGEDSAVALKTSPSSAVMAGGLRGVSNPLEEWSGRVKAIEAGFRAWMAKQPIQIEAAVTTAVGAVQGGALGGLMGSLTADGGSPFPIPQPPPNANPEAMASFKQAQALAGGPLVQARNFAVMTGANAGISCVMRRIRGKEDIQGSMAAAFGSGALFSIVSGMGTPNPVANAVTTGVAFAVFQGGFFMIGQKFSKPPSEDTYYSRTRSMLHKLGLEKYEKNFKRGLLNDQTLPLLTDSALRDVKIPPGPRLLILDQIKRDPELVRAK

SEQ ID NO: 10707 - protein, 271 aa, Zea mays subsp. mays
  peptide (1)..(271): Ceres Seq. ID no. 12363025
MADGKRGEDSAVALKTSPSSAVMAGGLRGVSNPLEEWSGRVKAIEAGFRAWMAKQPIQIEAAVTTAVGAVQGGALGGLMGSLTADGGSPFPIPQPPPNANPEAMASFKQAQALAGGPLVQARNFAVMTGANAGISCVMRRIRGKEDIQGSMAAAFGSGALFSIVSGMGTPNPVANAVTTGVAFAVFQGGFFMIGQKFSKPPSEDTYYSRTRSMLHKLGLEKYEKNFKRGLLNDQTLPLLTDSALRDVKIPPGPRLLILDQIKRDPELVRAK

SEQ ID NO: 10708 - protein, 249 aa, Zea mays subsp. mays
  peptide (1)..(249): Ceres Seq. ID no. 12363026
MAGGLRGVSNPLEEWSGRVKAIEAGFRAWMAKQPIQIEAAVTTAVGAVQGGALGGLMGSLTADGGSPFPIPQPPPNANPEAMASFKQAQALAGGPLVQARNFAVMTGANAGISCVMRRIRGKEDIQGSMAAAFGSGALFSIVSGMGTPNPVANAVTTGVAFAVFQGGFFMIGQKFSKPPSEDTYYSRTRSMLHKLGLEKYEKNFKRGLLNDQTLPLLTDSALRDVKIPPGPRLLILDQIKRDPELVRAK

SEQ ID NO: 10709 - DNA, 1092 bp, Zea mays subsp. mays
  misc_feature (1)..(1092): Ceres Seq. ID no. 12372425
  misc_feature (1)..(1092): Ortholog of  Ceres SEQ ID NO 15226198 as cited in SEQ ID NO 62150
ctcatccggagtcgtcgccaagaaccacagccaccgcgatggcgcagatcatcgatggcaaggccatcgccgccgacgtccgccgcgaggtcgccgccgatgtggccgcgctctcgtcagcccacggactcgtgccggggctggccgtggtcatcgtggggagcaggaaggactcgcagacgtacgtgaacatgaagcgcaaggcgtgcgccgaggtcggcatctgctccatcgacgtcgacctcccggaggacatctccgagaccgcgctcgtcgccgaggttcatcgcctcaacgctgaccccgcagtgcacgggatccttgtccagcttccacttcctaagcatatcaacgaagagaagatactgagcgagatttccatcgagaaagatgtggatggcttccatcctctcaacattggcaagcttgcaatgaaaggcagagagccactgttcgtaccatgtacgccaaaggggtgcatggagctcttgtcaaggagcggagtcactgttaaaggtaagcgggcagttgtggttggtcgcagcaacatcgtcgggctacctgtatccctgctccttctgaaggcagatgcgaccgtatctgttgtgcactcgcggacccctgatcctgaaagcattgtacgcgaagctgacatagtcatcgcggcagctgggcaggctatgatgatcaaaggtgactggatcaagccaggtgctgcggtcatcgatgtcgggacgaactccatcgatgaccctacccggaagtccgggtaccggctcgtcggcgatgtggatttcgcagcagcgagcaaggttgctgggtacctgactccggttcccggaggcgttggcccaatgacggtggcaatgctgctgaagaacacggtggatggggcaaagcgggggatagtcgagtagctacgttcatctcacttctcgttgctgtacggcctgtgttgcaaggatgtgagctgactcgaaaagcgtgtgttggttggtgtaacaatctgtttcccaagaataagaatgatagtcacagctgttttcctgtttaataaatgcaatgaagaaagaattttggctttgctgctgt

SEQ ID NO: 10710 - protein, 304 aa, Zea mays subsp. mays
  peptide (1)..(304): Ceres Seq. ID no. 12372426
HPESSPRTTATAMAQIIDGKAIAADVRREVAADVAALSSAHGLVPGLAVVIVGSRKDSQTYVNMKRKACAEVGICSIDVDLPEDISETALVAEVHRLNADPAVHGILVQLPLPKHINEEKILSEISIEKDVDGFHPLNIGKLAMKGREPLFVPCTPKGCMELLSRSGVTVKGKRAVVVGRSNIVGLPVSLLLLKADATVSVVHSRTPDPESIVREADIVIAAAGQAMMIKGDWIKPGAAVIDVGTNSIDDPTRKSGYRLVGDVDFAAASKVAGYLTPVPGGVGPMTVAMLLKNTVDGAKRGIVE

SEQ ID NO: 10711 - protein, 292 aa, Zea mays subsp. mays
  peptide (1)..(292): Ceres Seq. ID no. 12372427
MAQIIDGKAIAADVRREVAADVAALSSAHGLVPGLAVVIVGSRKDSQTYVNMKRKACAEVGICSIDVDLPEDISETALVAEVHRLNADPAVHGILVQLPLPKHINEEKILSEISIEKDVDGFHPLNIGKLAMKGREPLFVPCTPKGCMELLSRSGVTVKGKRAVVVGRSNIVGLPVSLLLLKADATVSVVHSRTPDPESIVREADIVIAAAGQAMMIKGDWIKPGAAVIDVGTNSIDDPTRKSGYRLVGDVDFAAASKVAGYLTPVPGGVGPMTVAMLLKNTVDGAKRGIVE

SEQ ID NO: 10712 - protein, 241 aa, Zea mays subsp. mays
  peptide (1)..(241): Ceres Seq. ID no. 12372428
MKRKACAEVGICSIDVDLPEDISETALVAEVHRLNADPAVHGILVQLPLPKHINEEKILSEISIEKDVDGFHPLNIGKLAMKGREPLFVPCTPKGCMELLSRSGVTVKGKRAVVVGRSNIVGLPVSLLLLKADATVSVVHSRTPDPESIVREADIVIAAAGQAMMIKGDWIKPGAAVIDVGTNSIDDPTRKSGYRLVGDVDFAAASKVAGYLTPVPGGVGPMTVAMLLKNTVDGAKRGIVE

SEQ ID NO: 10713 - DNA, 1132 bp, Zea mays subsp. mays
  misc_feature (1)..(1132): Ceres Seq. ID no. 12368827
  misc_feature (1)..(1132): Ortholog of  Ceres SEQ ID NO 13594655 as cited in SEQ ID NO 51843
  misc_feature (1)..(1132): Ortholog of  Ceres SEQ ID NO 13637562 as cited in SEQ ID NO 53674
  misc_feature (1)..(1132): Ortholog of  Ceres SEQ ID NO 13595851 as cited in SEQ ID NO 56559
  misc_feature (1)..(1132): Ortholog of  Ceres SEQ ID NO 15173454 as cited in SEQ ID NO 57898
  misc_feature (1)..(1132): Ortholog of  Ceres SEQ ID NO 13598755 as cited in SEQ ID NO 69032
agctcaccgccacctccacgctcgaagctcctcccgaaccggccgcatcgtcgccatggcagccgccgcttctgcaagctccgtgaaggaagtgctgccgtctcccctgacctccgcctccgagccccctccccttttcgatggcaccaccaggttgtacgtggcctatctttgcccgttcgcgcagcgcgcttggattgctagaaactacaagggtctgcaggacaagattaagatagttgccatcgatctcgctgacaggccagcgtggtacaaggagaaggtttatccagaaaacaaggtgccttctctagagcacgacaaccaggtgaaaggagagagcttggatttggttaagtacatcgacaacaacttcgaaggtccatcgttgctccccgaggatcatgcaaagcagcagttcgctgaggagctgctcggatacactgacgcattcaacaaagcattttactcatgtttagtcgacagggaagatgtgtctgaggaagccgttgctgccttggacaaaatagaagacgccctggggaaattcaacgacggcccgttcttccttggccagttcagtctggtggacgttgcgtatgtaccgttcatcgagaggtttcagatactctattccaatataaagaactatgacatcacaaagggcagacccagccttcagaaattcatcgaggaagtgaacaagatcgatgcgtacacacagactaaactggacccgcagtttttgcttgagcaaacaaagaagcggcttgggattgcttaaagcctgtgaccaaggacgagactttcgccagaagcaccagcgtagtagatcggagctcgttttagtaggttgtgtgcttggatattacgtctggtcttcaataaggcatggccttctttaatggctgtgcttctgaaaataaataaactagttgtccaggtattatcgttgctttggtgacgtgtcgatgtcactgtatatatatgaatgggtgggaaagaatgatgatgtgcagtgtgttctgtgcaaatattgccgagatgaaggatcagtatccatgtagacattcatatattgctcatattgtgacacggcgcatgaaagacatggtttcggcccctaccacgc

SEQ ID NO: 10714 - protein, 260 aa, Zea mays subsp. mays
  peptide (1)..(260): Ceres Seq. ID no. 12368828
AHRHLHARSSSRTGRIVAMAAAASASSVKEVLPSPLTSASEPPPLFDGTTRLYVAYLCPFAQRAWIARNYKGLQDKIKIVAIDLADRPAWYKEKVYPENKVPSLEHDNQVKGESLDLVKYIDNNFEGPSLLPEDHAKQQFAEELLGYTDAFNKAFYSCLVDREDVSEEAVAALDKIEDALGKFNDGPFFLGQFSLVDVAYVPFIERFQILYSNIKNYDITKGRPSLQKFIEEVNKIDAYTQTKLDPQFLLEQTKKRLGIA

SEQ ID NO: 10715 - protein, 242 aa, Zea mays subsp. mays
  peptide (1)..(242): Ceres Seq. ID no. 12368829
MAAAASASSVKEVLPSPLTSASEPPPLFDGTTRLYVAYLCPFAQRAWIARNYKGLQDKIKIVAIDLADRPAWYKEKVYPENKVPSLEHDNQVKGESLDLVKYIDNNFEGPSLLPEDHAKQQFAEELLGYTDAFNKAFYSCLVDREDVSEEAVAALDKIEDALGKFNDGPFFLGQFSLVDVAYVPFIERFQILYSNIKNYDITKGRPSLQKFIEEVNKIDAYTQTKLDPQFLLEQTKKRLGIA

SEQ ID NO: 10716 - DNA, 1341 bp, Zea mays subsp. mays
  misc_feature (1)..(1341): Ceres Seq. ID no. 12351670
  misc_feature (1)..(1341): Ortholog of  Ceres SEQ ID NO 12608620 as cited in SEQ ID NO 60192
  misc_feature (1)..(1341): Ortholog of  Ceres SEQ ID NO 13654314 as cited in SEQ ID NO 67914
atcactcaccaagaaccagagaggagcttcatcagctcattcaattctcgttccatccctcgtctcttgtgtcccgcctccgttccataattcaccagcgtcgtcctacccatatctcccatcgtcttctccctcgcgccatcagcttccccaagccagcggcgaccatgatctccccggacaccatccgcacggccatcggcgtcatcggcaatggaactgcactcgtgctcttcctctccccagtgcctacgttcatccgcatctggaagaaagggtcggtggagcagtactcgccgatcccgtacgtggcgacgctgctgaactgcatgatgtgggtgctgtacgggctgccggcggtgcacccgcacagcatgctggtgatcaccatcaacggcaccggcatggcgatccagctgacctacgtggcgctcttcctcctctactccgcgggggcggccggcgcaaggtggtcctgctgctggccgccgaggtgggcttcgtcggcgccgtcgccgcgctggtgctcagcctggcgcacacgcacgagcgcaggtccatggtggtcggcatcctctgcgtcctcttcggcaccggcatgtacgccgccccgctctccgtcaaaaatggtgatccagacaaagagcgtggagtacatgcccctgttcctgtcgctggcttccctcgtgaatggcatctgctggactgcttacgcgctcatccgcttcgacctctacattactatccccaacgggctgggcgtgctgttcgcggtggcgcagctggtgctgtacgccatctactacaagtccacccaggagatcatcgaggcgcgcaagcgcaaggccgaccagatcgccatgaccggggtggtcgtcgacggcggcaagaccaacaaccaagccgccgcgggccaatactgaccgacgatcaagtgacgatcgacaccaatatgctcatgcaagaagccagcggcaaatcaattatgtcgccgctgggttttatgtattttgtgattctatctgcacgctgcttgtccgtcccaatggaaaaaaaagggggggaagaaaaaggtttgtcggtatatgtgttctcgccgaataactctcgcgcatagctagctggtggggctgagtcactgccttcgctatatgtatacgtgcaaaaattagaggtggagggttgttttagctaatcccaccttaattccaaggcagagtgacctttttttttttctccttctgtttcctaggattttgctataattgagcaatttagcgcgacttgttattggtgttggtgtgtctcaatcaaatagtaaaatgttcattttactctttc

SEQ ID NO: 10717 - protein, 371 aa, Zea mays subsp. mays
  peptide (1)..(371): Ceres Seq. ID no. 12351671
SLTKNQRGASSAHSILVPSLVSCVPPPFHNSPASSYPYLPSSSPSRHQLPQASGDHDLPGHHPHGHRRHRQWNCTRALPLPSAYVHPHLEERVGGAVLADPVRGDAAELHDVGAVRAAGGAPAQHAGDHHQRHRHGDPADLRGALPPLLRGGGRRKVVLLLAAEVGFVGAVAALVLSLAHTHERRSMVVGILCVLFGTGMYAAPLSVKNGDPDKERGVHAPVPVAGFPREWHLLDCLRAHPLRPLHYYPQRAGRAVRGGAAGAVRHLLQVHPGDHRGAQAQGRPDRHDRGGRRRRQDQQPSRRGPILTDDQVTIDTNMLMQEASGKSIMSPLGFMYFVILSARCLSVPMEKKGGEEKGLSVYVFSPNNSRA

SEQ ID NO: 10718 - protein, 306 aa, Zea mays subsp. mays
  peptide (1)..(306): Ceres Seq. ID no. 12351672
HSPRTREELHQLIQFSFHPSSLVSRLRSIIHQRRPTHISHRLLPRAISFPKPAATMISPDTIRTAIGVIGNGTALVLFLSPVPTFIRIWKKGSVEQYSPIPYVATLLNCMMWVLYGLPAVHPHSMLVITINGTGMAIQLTYVALFLLYSAGAAGARWSCCWPPRWASSAPSPRWCSAWRTRTSAGPWWSASSASSSAPACTPPRSPSKMVIQTKSVEYMPLFLSLASLVNGICWTAYALIRFDLYITIPNGLGVLFAVAQLVLYAIYYKSTQEIIEARKRKADQIAMTGVVVDGGKTNNQAAAGQY

SEQ ID NO: 10719 - protein, 251 aa, Zea mays subsp. mays
  peptide (1)..(251): Ceres Seq. ID no. 12351673
MISPDTIRTAIGVIGNGTALVLFLSPVPTFIRIWKKGSVEQYSPIPYVATLLNCMMWVLYGLPAVHPHSMLVITINGTGMAIQLTYVALFLLYSAGAAGARWSCCWPPRWASSAPSPRWCSAWRTRTSAGPWWSASSASSSAPACTPPRSPSKMVIQTKSVEYMPLFLSLASLVNGICWTAYALIRFDLYITIPNGLGVLFAVAQLVLYAIYYKSTQEIIEARKRKADQIAMTGVVVDGGKTNNQAAAGQY

SEQ ID NO: 10720 - DNA, 1075 bp, Zea mays subsp. mays
  misc_feature (1)..(1075): Ceres Seq. ID no. 12364946
  misc_feature (1)..(1075): Ortholog of  Ceres SEQ ID NO 15173410 as cited in SEQ ID NO 61812
agtacagatccaccgccaccaccaccaccaagcactccagtcccgcagcagcatggccggcagcgcgtcccgcctcgccatcctcttggtgctcctggcggcgtcaccgctgcttggcgcgacgcagaaggccgcgccagggccggcgtcgtcgtcgggctcgggcgcgggcgcggcggacgcggcgccgccgacggacgtgaacaaggcgctgaaggacgagcagttcagcgagttccggcagctgctgcacgacacgcgcgtggacacgcagatcaacgcgcagctgacggacagctacaacgggctgaccatcatggcgcccaccaacgccgccttcgacaagatgaaggcgggcgtgctgaacgggctgtcgccgcaggagcagatccagatggtgctctactgcgtgctgccccggttctacagcctgtccatgctcggcaccctcagcggcaaggtcaacacgcaggggtccggccacgacgggccctacaggtacgacatcaagcggtcggggaacaacgtcaacgtgtccacgggggtgaactggatgctgctgggcagccccgtcagcaaggacttcccgctcgccatctaccccgtcgacaaggtgccgctcccctacgagctgttcgggcccaagccgcccacgccggcgcccgcgccggcacccgcgcccgggccggccaaggccaagaccaagaagaagaagaagtccgccgccatcgccgagccgcccacggccgacgacgacgacaccggctccacctccgacgaccagaaggctgccgccgcgccgccacgcgccagcagggcggccgccgcgctctccgtgctcggcgccgctgttctcgtcggcggcctcttctgatgggaagaggatcggatcggaggaggatagaatgaatgcaccgtcattcagaccaagatcacacggcgtgtgtgcgtttggccatcggctttattctttcttctctcttctcttgggggattttctctctctctctctctctctcggtgatttgtatttgtaacttaatgtgatatacattagcagtggttgttcttcttt

SEQ ID NO: 10721 - protein, 302 aa, Zea mays subsp. mays
  peptide (1)..(302): Ceres Seq. ID no. 12364947
STDPPPPPPPSTPVPQQHGRQRVPPRHPLGAPGGVTAAWRDAEGRARAGVVVGLGRGRGGRGAADGREQGAEGRAVQRVPAAAARHARGHADQRAADGQLQRADHHGAHQRRLRQDEGGRAERAVAAGADPDGALLRAAPVLQPVHARHPQRQGQHAGVRPRRALQVRHQAVGEQRQRVHGGELDAAGQPRQQGLPARHLPRRQGAAPLRAVRAQAAHAGARAGTRARAGQGQDQEEEEVRRHRRAAHGRRRRHRLHLRRPEGCRRAATRQQGGRRALRARRRCSRRRPLLMGRGSDRRRIE

SEQ ID NO: 10722 - protein, 290 aa, Zea mays subsp. mays
  peptide (1)..(290): Ceres Seq. ID no. 12364948
VQIHRHHHHQALQSRSSMAGSASRLAILLVLLAASPLLGATQKAAPGPASSSGSGAGAADAAPPTDVNKALKDEQFSEFRQLLHDTRVDTQINAQLTDSYNGLTIMAPTNAAFDKMKAGVLNGLSPQEQIQMVLYCVLPRFYSLSMLGTLSGKVNTQGSGHDGPYRYDIKRSGNNVNVSTGVNWMLLGSPVSKDFPLAIYPVDKVPLPYELFGPKPPTPAPAPAPAPGPAKAKTKKKKKSAAIAEPPTADDDDTGSTSDDQKAAAAPPRASRAAAALSVLGAAVLVGGLF

SEQ ID NO: 10723 - protein, 273 aa, Zea mays subsp. mays
  peptide (1)..(273): Ceres Seq. ID no. 12364949
MAGSASRLAILLVLLAASPLLGATQKAAPGPASSSGSGAGAADAAPPTDVNKALKDEQFSEFRQLLHDTRVDTQINAQLTDSYNGLTIMAPTNAAFDKMKAGVLNGLSPQEQIQMVLYCVLPRFYSLSMLGTLSGKVNTQGSGHDGPYRYDIKRSGNNVNVSTGVNWMLLGSPVSKDFPLAIYPVDKVPLPYELFGPKPPTPAPAPAPAPGPAKAKTKKKKKSAAIAEPPTADDDDTGSTSDDQKAAAAPPRASRAAAALSVLGAAVLVGGLF

SEQ ID NO: 10724 - DNA, 2021 bp, Zea mays subsp. mays
  misc_feature (1)..(2021): Ceres Seq. ID no. 12413767
  misc_feature (1)..(2021): Ortholog of  Ceres SEQ ID NO 13656138 as cited in SEQ ID NO 65492
atcgcaaactcggaaaccttgagaggaaagccaccagcagcaagcgaagaccaccagcagcagcgcagcggcgacgtgtttcgctctcgccatggcgtcgtcgtcctcgtcccggctgctgctcctcctcctcccgtgcctcgcgctcacgctgctcggcgcggcagacgccgaagtgcaccaccacgagttcgttatccaagagacgccggtgaagaggctgtgcaagacgcacaacatcatcacggtgaacgggcagtacccggggccgacgctggaggtcagggagggtgacacgctcgtcatcaacgtcgtcaaccgggcgcagtacaacgccaccatccactggcacggcatccggcagataaggactgggtgggcggacgggccggagttcgtgacgcagtgccccatcaggcccggcggcagctacaagtaccggttcaccatccaggggcaggagggcacgctgtggtggcacgcgcacagctcctggctcagggccaccgtctacggcgcgctcatcatccgccccagggagaacaagacctacccattcgccaagccctcgcgagaagtccccgtcatcctcggtgagtggtgggatgcgaacccgatcgacgtcatccgggaggcgcagaggaccggcggcggtcccaacgtctccgacgcgttcaccatcaacggccagcccggcgacctgtacaaatgctccaacaaagagactacggccatcccggtggaggccggcgagacggcgctgctgcggttcatcaacgccgcgctcaaccacgagctgttcgtcaccatcgcgcagcacaagatgacggtcgtcgccaccgacgcgtcctacaccaagcccttcaccacctcggtgctcatgctcgcgccgggccagaccaccgacgtcctcgtcaccatggaccagccgcccacccgctactacgtcgccgcgcgcgcctacgtctccggccagaacgtggccttcgacaacaccaccaccacggccgtcctcgagtacgactgcggctgcgcctccgacttcggccccaagatacagccggcgttcccggcggcgctaccggccttcaacgacacgtccgccgccaccgccttcgccgccgggatcaggagccccgaccgggtcaaggtccacgagaacgtcgacgagtacctcttcttcaccgtcggcctcggcctcttcaactgcaagccgggccagctctgcgccgggcccaacaacaacacccgcttcgcggccagcatgaacaacgtctccttcgtcttcccgcagaccgactccctcctccacgcgcactactacaagatccccggcgtcttcaccaccgacttcccggcatacccgccggtgcagttcgactacacggggcagaacgtcagccaggccctgtggcagccggtccccgccaccaagctgtacccgctcaggttcggctccgtggtgcagctcgtcctgcaggacaccagcatcgtcacgcccgagaaccaccccatccacatccacggctacgatttcttcatcctcgccgagggcttcggcaacttcgaccccaagaaggacgtcgagaagttcaactacgtcgacccgccccagaggaacaccgtggcggtgcctgtcaacggttgggcggtcatccagttcgtcgccgacaacccaggtgtgtggctcatgcattgccatctggacgtgcacatcacctggggcctggcaatggctttcctagtggaggacggctatggcgaactgcagtcgctggagccgcccccagttgatcttcccatgtgctagtggaggacggatatttgtgttgaggaagaaagcctgttcacgttgtatgttaattgttactcttttttggtggaggggggcgtgttcgtgatcttaaattcttaggggacttgattttccagcttgatttgaagtttcttctgtaaatctatgtaattttcaattaatgacattcagcatattatttgagaataaattatttctttgtacg

SEQ ID NO: 10725 - protein, 572 aa, Zea mays subsp. mays
  peptide (1)..(572): Ceres Seq. ID no. 12413768
MASSSSSRLLLLLLPCLALTLLGAADAEVHHHEFVIQETPVKRLCKTHNIITVNGQYPGPTLEVREGDTLVINVVNRAQYNATIHWHGIRQIRTGWADGPEFVTQCPIRPGGSYKYRFTIQGQEGTLWWHAHSSWLRATVYGALIIRPRENKTYPFAKPSREVPVILGEWWDANPIDVIREAQRTGGGPNVSDAFTINGQPGDLYKCSNKETTAIPVEAGETALLRFINAALNHELFVTIAQHKMTVVATDASYTKPFTTSVLMLAPGQTTDVLVTMDQPPTRYYVAARAYVSGQNVAFDNTTTTAVLEYDCGCASDFGPKIQPAFPAALPAFNDTSAATAFAAGIRSPDRVKVHENVDEYLFFTVGLGLFNCKPGQLCAGPNNNTRFAASMNNVSFVFPQTDSLLHAHYYKIPGVFTTDFPAYPPVQFDYTGQNVSQALWQPVPATKLYPLRFGSVVQLVLQDTSIVTPENHPIHIHGYDFFILAEGFGNFDPKKDVEKFNYVDPPQRNTVAVPVNGWAVIQFVADNPGVWLMHCHLDVHITWGLAMAFLVEDGYGELQSLEPPPVDLPMC

SEQ ID NO: 10726 - protein, 361 aa, Zea mays subsp. mays
  peptide (1)..(361): Ceres Seq. ID no. 12413769
MLQQRDYGHPGGGRRDGAAAVHQRRAQPRAVRHHRAAQDDGRRHRRVLHQALHHLGAHARAGPDHRRPRHHGPAAHPLLRRRARLRLRPERGLRQHHHHGRPRVRLRLRLRLRPQDTAGVPGGATGLQRHVRRHRLRRRDQEPRPGQGPRERRRVPLLHRRPRPLQLQAGPALRRAQQQHPLRGQHEQRLLRLPADRLPPPRALLQDPRRLHHRLPGIPAGAVRLHGAERQPGPVAAGPRHQAVPAQVRLRGAARPAGHQHRHAREPPHPHPRLRFLHPRRGLRQLRPQEGRREVQLRRPAPEEHRGGACQRLGGHPVRRRQPRCVAHALPSGRAHHLGPGNGFPSGGRLWRTAVAGAAPS

SEQ ID NO: 10727 - protein, 328 aa, Zea mays subsp. mays
  peptide (1)..(328): Ceres Seq. ID no. 12413770
MTVVATDASYTKPFTTSVLMLAPGQTTDVLVTMDQPPTRYYVAARAYVSGQNVAFDNTTTTAVLEYDCGCASDFGPKIQPAFPAALPAFNDTSAATAFAAGIRSPDRVKVHENVDEYLFFTVGLGLFNCKPGQLCAGPNNNTRFAASMNNVSFVFPQTDSLLHAHYYKIPGVFTTDFPAYPPVQFDYTGQNVSQALWQPVPATKLYPLRFGSVVQLVLQDTSIVTPENHPIHIHGYDFFILAEGFGNFDPKKDVEKFNYVDPPQRNTVAVPVNGWAVIQFVADNPGVWLMHCHLDVHITWGLAMAFLVEDGYGELQSLEPPPVDLPMC

SEQ ID NO: 10728 - DNA, 1342 bp, Zea mays subsp. mays
  misc_feature (1)..(1342): Ceres Seq. ID no. 12425290
  misc_feature (1)..(1342): Ortholog of  Ceres SEQ ID NO 13594377 as cited in SEQ ID NO 58177
  misc_feature (1)..(1342): Ortholog of  Ceres SEQ ID NO 15224613 as cited in SEQ ID NO 58938
  misc_feature (1)..(1342): Ortholog of  Ceres SEQ ID NO 13664309 as cited in SEQ ID NO 60596
gcacgagaccattacctagaacatcctaatcgaaaagggagcaatataactaactgcacaaacgcaaaagtcaaacttgcagctgaggaatcgatcgcatcggtatcttgacgtgttcattgcccgattctagctactagtccccgctagctcttgagcgatcgtcgtagctagccgcccgccgtcgatcgatgggtgcaccggcgccgtccgtcgccgtggtcgccgcggtggtggtttgcctgtgcggcgcctttgcgcgcgcgcaggacatggacaacgagtgggcgcggccgccgtaccgcggcttcttcggcggccccgggtcgctgctgccgcagtcggacgtggacctgctggagttcccgctgaacctggagtacctggagacggagttcttctgctgggccgctctggggtacggcctcgacgccatcgatgccaacctcaccggcggcgggccgccctccatcggcggccagtccgccttccctcaccccgttcatccgcgacgtcgccacccagttctgctaccaagaagtcggacacctcagggcgatcaagcagacggtgaggggcttcccgcggccgttgctggacatcagcgcggccaacttcggcaagatcatcgagcaggcgctgaacgcgacgctggatccgcccttcaacccctacgagaacagcgtcaacttcctcgtcgcctcctacatcatcccctacgtcggcctcaccggctacgtcggcgccaaccccaggctcttcacccctcaggccagaaagctgctggcggggctgctggcggtggagtcagcgcaggacgcggtgatccggacgctgctgtacgagcgcgggatggcgcgtgtggcgggctacgccgtcggggtggcggaggtcacggcgcacatctcggacctcaggaactcgctggggaggaggggcgtcaaggacgagggactggtggtggcggccgagctggggcccgaggggctcaccgtggggaatgtcatcgccggtgaccacctctcgctcgcctacgaccgcacgcccgaggagatcctcggcatcgtctacggcaccggcaaccccgctcagcacggtgggttctttccccagggcgccgacggccgcatcgccagggggctcctcgcgtagcgcatgggcgtgtagcgaccgtgcgctgagcagcacggggggtaaagttgtccgtgtccctgctgcacggtacaggctgtagactagtactagtactttacgtgtttgtatgttcgcgactttgacgcatgtagttgtgtggtgagtgtgtaaactggatgatataaatgaatgttggtggaaataaagc

SEQ ID NO: 10729 - protein, 274 aa, Zea mays subsp. mays
  peptide (1)..(274): Ceres Seq. ID no. 12425291
MGAPAPSVAVVAAVVVCLCGAFARAQDMDNEWARPPYRGFFGGPGSLLPQSDVDLLEFPLNLEYLETEFFCWAALGYGLDAIDANLTGGGPPSIGGQSAFPHPVHPRRRHPVLLPRSRTPQGDQADGEGLPAAVAGHQRGQLRQDHRAGAERDAGSALQPLREQRQLPRRLLHHPLRRPHRLRRRQPQALHPSGQKAAGGAAGGGVSAGRGDPDAAVRARDGACGGLRRRGGGGHGAHLGPQELAGEEGRQGRGTGGGGRAGARGAHRGECHRR

SEQ ID NO: 10730 - protein, 247 aa, Zea mays subsp. mays
  peptide (1)..(247): Ceres Seq. ID no. 12425292
MDNEWARPPYRGFFGGPGSLLPQSDVDLLEFPLNLEYLETEFFCWAALGYGLDAIDANLTGGGPPSIGGQSAFPHPVHPRRRHPVLLPRSRTPQGDQADGEGLPAAVAGHQRGQLRQDHRAGAERDAGSALQPLREQRQLPRRLLHHPLRRPHRLRRRQPQALHPSGQKAAGGAAGGGVSAGRGDPDAAVRARDGACGGLRRRGGGGHGAHLGPQELAGEEGRQGRGTGGGGRAGARGAHRGECHRR

SEQ ID NO: 10731 - protein, 237 aa, Zea mays subsp. mays
  peptide (1)..(237): Ceres Seq. ID no. 12425293
MPTSPAAGRPPSAASPPSLTPFIRDVATQFCYQEVGHLRAIKQTVRGFPRPLLDISAANFGKIIEQALNATLDPPFNPYENSVNFLVASYIIPYVGLTGYVGANPRLFTPQARKLLAGLLAVESAQDAVIRTLLYERGMARVAGYAVGVAEVTAHISDLRNSLGRRGVKDEGLVVAAELGPEGLTVGNVIAGDHLSLAYDRTPEEILGIVYGTGNPAQHGGFFPQGADGRIARGLLA

SEQ ID NO: 10732 - DNA, 1359 bp, Zea mays subsp. mays
  misc_feature (1)..(1359): Ceres Seq. ID no. 12342086
  misc_feature (1)..(1359): Ortholog of  Ceres SEQ ID NO 14305022 as cited in SEQ ID NO 53586
  misc_feature (1)..(1359): Ortholog of  Ceres SEQ ID NO 12506279 as cited in SEQ ID NO 55440
  misc_feature (1)..(1359): Ortholog of  Ceres SEQ ID NO 13654847 as cited in SEQ ID NO 62459
  misc_feature (1)..(1359): Ortholog of  Ceres SEQ ID NO 15174357 as cited in SEQ ID NO 0
gctctatacgactcctccatcctccccccctccccgtgatggctgcaatggatggggtaattgtagtggagctgtagaggcggcgggggtgcggttgcgacggactgtgctgcgccgacaagctgggaagaggaggcagcggcggcggggtgggacttgggatgggtcttctgtcgaaccgggtggagcggtcggagatcaggcccggcgaccacatctacacctggcgggccgtctacgcctactcccaccacggtatttatgtcgggggaagcaaagtggtccattttacacgtaagaaagaaactgaaacttcagattcatcagactccacctccagcctgatctcagagatttcatcagagtgccaaacattccctgattgtggatttcagctgtctaatagtggtgttgtcctcacttgcttggactgtttcctccgcaacggctccctctattgcttcgagtatggagtgccatctgcagttttccttgcaaagattcgtggggggacctgcaccattgccgaatcagacccaccagaagttgttgtccatcgagcgatgtacctgcttcaaaatggttttggaaactacgacatgtttgagaagaactgcgaagacttcgcactctactgcaagactgggcttctacctgttgaggagcctggcattgggactagtgggcaagcttcttctgctattggtgtgccgttggcagctcttctgtccactccgttcaagcttcttctgctggtccgcttggaatggccactgtcactgctgggatgtactgtgctggcagatacattactgacataggagtaaggaaggacgtagcaaaagttgaagtggagaaattatcatcgcaccccggtttccaccttgttgaagatgaagaatcagtcaacaagcgatcagaaaaaccaaagaccttgctccctatgaagaggaaacgagaaaggtgactgcgaagcacagcttaggaggatgaacttctcttcccttcaattggtgtcgaattgtggataatttgggatatgataataagactcggtatagatatgtgccttgcgaatgtatcataattggattaggcgcacccctcacctgatcaactgtaactgccttataaattcaatcaaattgctatataatgtagatttttcttctttgtgaggtttcagtcttctgctgcaattaataacagttataatattttttactgatctgggagatcactgtatctgtattctgtagttacaacttacaaggtagagcaaactatcggcaatggcgttttcatcaggtatactgtacgaaaagtgaatataaaaaattgagcagagcttgtttttgg

SEQ ID NO: 10733 - protein, 219 aa, Zea mays subsp. mays
  peptide (1)..(219): Ceres Seq. ID no. 12342087
MGLLSNRVERSEIRPGDHIYTWRAVYAYSHHGIYVGGSKVVHFTRKKETETSDSSDSTSSLISEISSECQTFPDCGFQLSNSGVVLTCLDCFLRNGSLYCFEYGVPSAVFLAKIRGGTCTIAESDPPEVVVHRAMYLLQNGFGNYDMFEKNCEDFALYCKTGLLPVEEPGIGTSGQASSAIGVPLAALLSTPFKLLLLVRLEWPLSLLGCTVLADTLLT

SEQ ID NO: 10734 - protein, 115 aa, Zea mays subsp. mays
  peptide (1)..(115): Ceres Seq. ID no. 12342088
MECHLQFSLQRFVGGPAPLPNQTHQKLLSIERCTCFKMVLETTTCLRRTAKTSHSTARLGFYLLRSLALGLVGKLLLLLVCRWQLFCPLRSSFFCWSAWNGHCHCWDVLCWQIHY

SEQ ID NO: 10735 - DNA, 1417 bp, Zea mays subsp. mays
  misc_feature (1)..(1417): Ceres Seq. ID no. 12353388
  misc_feature (1)..(1417): Ortholog of  Ceres SEQ ID NO 13590967 as cited in SEQ ID NO 65553
  misc_feature (1)..(1417): Ortholog of  Ceres SEQ ID NO 14309438 as cited in SEQ ID NO 0
actcggccactcgacaccaccctccgcgctccgcatccgctcctccctctgctgccgtgccggtgccgctagccatccccacttctcacccgccccctctcctctactgccgccagccgcaacaaagatatggatagagcggccgcgacagccgcagacattatcgtcatgatcccatcgctctcgccttcgcctttgtagcactacctcctcgtccatccgcccccctatttcgtcccactcgggttgctagatcggactggatctctctgcccgtttcttggagcagagatggccgaaatgaccgtgactgtcgcggccgccaaaagcaccctccggacgtgccccggcgcccgccgtgctgcggttcttggtcggtggatgcctcttgcaccagcggcgcccgccaacttgaaattgttctctccagctgtgagggttccaagggctacttcccctgcggcggttgaggatgggagcaacactgatatagtccctatcccgaaagttataatagaccaagactcagatccggatgcaaccattgtagaaataaccttgggtgatcgtcttggcgatctccttgatacgatgagtgcgctaaagaacttggggctaaatgttgttaaagctagtgtctgtctcgattctactggcaagcatatcaagtttgctataactagagcgttcactggccgtaaaattgatgatccagagttgttagaagcagttcgactgacgatcattaacaacatgatacagtatcatccagagtccagcagtcaattggctatgggggcaacttttgggccagaagcccctacggaagaggttgatgtggatatagcaacccacatagatatctatgatgatggccctgaaagaagcttacttgtggtggaaacagcggatcgtccagggttactggttgaccttgttaagatcatctcggacatcagcattaatgtccaatctggagagtttgacactgaggggctactggctaaagcaaaattccatgtcagctacaggggcagaacactgaccgaggctttacaacaggttctttctaatagcttgcgctatttcttgaggcggccgacaacagaggacgccagcttctagccagatagatgatcatgaagcctcccaactttcttatgtggtggtattcacatgaattgaataccatcgtcaaagcatttgaaacacgcacaataatttgttaagatgggggcaattgtacttgatgttatggcaccacaccaattcgaagtattttttgttccaaggcaggggaatctgttgtatccaagtgcagaagattgctattcttaatcatgtaataacacattattattttgctacttgggatacaccgtttggtggtaaataagatggaatattgtgggggccc

SEQ ID NO: 10736 - protein, 277 aa, Zea mays subsp. mays
  peptide (1)..(277): Ceres Seq. ID no. 12353389
MAEMTVTVAAAKSTLRTCPGARRAAVLGRWMPLAPAAPANLKLFSPAVRVPRATSPAAVEDGSNTDIVPIPKVIIDQDSDPDATIVEITLGDRLGDLLDTMSALKNLGLNVVKASVCLDSTGKHIKFAITRAFTGRKIDDPELLEAVRLTIINNMIQYHPESSSQLAMGATFGPEAPTEEVDVDIATHIDIYDDGPERSLLVVETADRPGLLVDLVKIISDISINVQSGEFDTEGLLAKAKFHVSYRGRTLTEALQQVLSNSLRYFLRRPTTEDASF

SEQ ID NO: 10737 - protein, 274 aa, Zea mays subsp. mays
  peptide (1)..(274): Ceres Seq. ID no. 12353390
MTVTVAAAKSTLRTCPGARRAAVLGRWMPLAPAAPANLKLFSPAVRVPRATSPAAVEDGSNTDIVPIPKVIIDQDSDPDATIVEITLGDRLGDLLDTMSALKNLGLNVVKASVCLDSTGKHIKFAITRAFTGRKIDDPELLEAVRLTIINNMIQYHPESSSQLAMGATFGPEAPTEEVDVDIATHIDIYDDGPERSLLVVETADRPGLLVDLVKIISDISINVQSGEFDTEGLLAKAKFHVSYRGRTLTEALQQVLSNSLRYFLRRPTTEDASF

SEQ ID NO: 10738 - protein, 247 aa, Zea mays subsp. mays
  peptide (1)..(247): Ceres Seq. ID no. 12353391
MPLAPAAPANLKLFSPAVRVPRATSPAAVEDGSNTDIVPIPKVIIDQDSDPDATIVEITLGDRLGDLLDTMSALKNLGLNVVKASVCLDSTGKHIKFAITRAFTGRKIDDPELLEAVRLTIINNMIQYHPESSSQLAMGATFGPEAPTEEVDVDIATHIDIYDDGPERSLLVVETADRPGLLVDLVKIISDISINVQSGEFDTEGLLAKAKFHVSYRGRTLTEALQQVLSNSLRYFLRRPTTEDASF

SEQ ID NO: 10739 - DNA, 2887 bp, Zea mays subsp. mays
  misc_feature (1)..(2887): Ceres Seq. ID no. 13635664
  misc_feature (1)..(2887): Ortholog of  Ceres SEQ ID NO 13600310 as cited in SEQ ID NO 5086
  misc_feature (1)..(2887): Ortholog of  Ceres SEQ ID NO 14313863 as cited in SEQ ID NO 54791
  misc_feature (1)..(2887): Ortholog of  Ceres SEQ ID NO 15226111 as cited in SEQ ID NO 55604
  misc_feature (1)..(2887): Ortholog of  Ceres SEQ ID NO 15180362 as cited in SEQ ID NO 0
ggctgagaccgctcagcgacaaggagatttcaaggggggacccggcggagtgggagtgcatcaacgacactaccatcatctcccggagcaccttcccggaccggcccactgctccgactgcgtattcgttcgatagggtatttcgttctgactgtactaccaaagaagtatatgaggaagggaccaaagcagttgccctctctgtagttagtggcattaactcaagtgtttttgcatatggtcaaacaagtagtggaaaaacatacaccatgactggaataacggaatatacagcagcagatatctatgattacattgccaagcatgaagagagagcgtttgtattgaaattttcagcaatcgaaatatataacgaagttgtaagggatcttcttagtgcagaaaacacatcgcttagactttgggatgatgcagagaagggaacatgtgtagagaaccttacagaggtgaccttgagggattcagaccacctgaaagaacttattctacgtgtgaagctcaaaaggaggaccggagagacatacttaaatgaaaacagctccagatcacaccaaatacttaaactgactattgaaagttctgctcatgagttcttgggtaaggacaagtcaacaacacttgttgctagtgtgaacttcgttgatttggctggaagtgaacgtgcatcccaggcattatcagctgggactaggctgaaggaaggttgtcatattaatagaagtctacttaccctaggaactggtattcggaaactaagcaaggtaagaaatgggcacataccataccgagattcaaagctcacgcgcatattcaccttctctaggaggcaatgcaagaacagcaattatttgtacaatgagcccagcccggagccatatggacagtcaaggaataccttgttgtttgcaagttgtgcaaaggaagtggtgacaaatgcccaggttaatgtcgttatgtctgataaggcactggttaagcaattacaaaaagaacttgcaaggttggagagtgaattgcgatgcccagcttcatattctggtcttgaagcattagtgagagaaaaagataatcaaatccggaagatggataaagaaattaaggaactgaagttacatcgtgatcttgctcagtctagactgcaagatttgctcaaggttgttggagataaccacggttcgaagcaccccctggcttcttctgcaagaaattttacttttgatgttcctcagccatgtgaggatgagcaatcgacgacatcagaagctttcagcagtggccaaattttaggcttcaaggcgcctgacacacaaagagattataggtcacagcaatctgaaaatgatgtgcagtttgctacccctcttagctattcaatcagcagtcccccattcagtgggatgcctccaactaatggcagaaatgataactctcatatatctgatgaagattcagaggatctttgcaaagaagtacggtgcatagagaccaatgaaacagaagaaaatgaatgcttagagtcgtcagctgtgggaagcaatagtctgcaagattcaaatttagcttccagcatgcatgggaacgacaatacaaatcgatctgtgaattctggacggaatgatgcatcttctattaccctggaacaacatctggagaatgtcaaaaaaccgtttgccaatcctggcatggatctgggatcctctacacgtaactcgtcaagctcaaaagtaattggcagaagcaggagctgtaggtctctgatgggttctactctgttggaagacttggagaaagaagtttgcacccctccaagcagaagtttcatggactacccagggaggcccgaaacatgtcaaagaagggtacccgcactgaactacgatgcagagagtgaagctttatccagggcaggatcaatgctatctgaaattaccaccacgaggggtggactgaaggaaaacagctctgctgctggtgatacagaatttgttgctggcataggtgaatttgtcgcggagctaaaagaaatggcccagggtcataatggagaattggctgaagggaccataaggagcgtggggctggatcccattatggatatcttgcaatcaccttctcgctggcctttggaattcgagaagaaacagcaggagatcattgacctgtggcatggatgcaacgtttccttggtccacaggacttactttttcctgctgttcaaaggggacccagccgacgccatttacatggaagtggagcttaggaggttatcatttctcaagaacacatactccaacggaagcatggggtatgatatggtggcaggcagcttgagcacttctctggtttcaagtgcaaagaaactgcaacgcgagagggagatgctctgcaggcagatgcagaagcggctgacgatccaggaacgggagagcctgtacaccaagtggggagtctcgctgtcctccaagaggaggcggctgcaggtcgctcggcgcctttggacggagaccagggacctggagcatgtgagggagagcgcgtccctcgtggccagactgatcgggctcctggagcctgggaaggcgctgagggagatgtttggtctgagcttcgcgccgcagcagtccacccggaggtcgcacagtagttggcggtatggccgttcttctctagactgactgagctcgaaagacgcagctgacaaaaaaacaacaacagttattccgttgttttcgttttgtgtagtgcctgatttttttgctgtcctctcggaaaatagaaattcctgaacattttgtgaccagtctgcgagaaaatttggtagcattttcaagatttattgatgtttacaatttggaaaccgtcaacg

SEQ ID NO: 10740 - protein, 897 aa, Zea mays subsp. mays
  peptide (1)..(897): Ceres Seq. ID no. 13635665
LRPLSDKEISRGDPAEWECINDTTIISRSTFPDRPTAPTAYSFDRVFRSDCTTKEVYEEGTKAVALSVVSGINSSVFAYGQTSSGKTYTMTGITEYTAADIYDYIAKHEERAFVLKFSAIEIYNEVVRDLLSAENTSLRLWDDAEKGTCVENLTEVTLRDSDHLKELILRVKLKRRTGETYLNENSSRSHQILKLTIESSAHEFLGKDKSTTLVASVNFVDLAGSERASQALSAGTRLKEGCHINRSLLTLGTGIRKLSKVRNGHIPYRDSKLTRIFTFSRRQCKNSNYLYNEPSPEPYGQSRNTLLFASCAKEVVTNAQVNVVMSDKALVKQLQKELARLESELRCPASYSGLEALVREKDNQIRKMDKEIKELKLHRDLAQSRLQDLLKVVGDNHGSKHPLASSARNFTFDVPQPCEDEQSTTSEAFSSGQILGFKAPDTQRDYRSQQSENDVQFATPLSYSISSPPFSGMPPTNGRNDNSHISDEDSEDLCKEVRCIETNETEENECLESSAVGSNSLQDSNLASSMHGNDNTNRSVNSGRNDASSITLEQHLENVKKPFANPGMDLGSSTRNSSSSKVIGRSRSCRSLMGSTLLEDLEKEVCTPPSRSFMDYPGRPETCQRRVPALNYDAESEALSRAGSMLSEITTTRGGLKENSSAAGDTEFVAGIGEFVAELKEMAQGHNGELAEGTIRSVGLDPIMDILQSPSRWPLEFEKKQQEIIDLWHGCNVSLVHRTYFFLLFKGDPADAIYMEVELRRLSFLKNTYSNGSMGYDMVAGSLSTSLVSSAKKLQREREMLCRQMQKRLTIQERESLYTKWGVSLSSKRRRLQVARRLWTETRDLEHVRESASLVARLIGLLEPGKALREMFGLSFAPQQSTRRSHSSWRYGRSSLD

SEQ ID NO: 10741 - protein, 808 aa, Zea mays subsp. mays
  peptide (1)..(808): Ceres Seq. ID no. 13635666
MTGITEYTAADIYDYIAKHEERAFVLKFSAIEIYNEVVRDLLSAENTSLRLWDDAEKGTCVENLTEVTLRDSDHLKELILRVKLKRRTGETYLNENSSRSHQILKLTIESSAHEFLGKDKSTTLVASVNFVDLAGSERASQALSAGTRLKEGCHINRSLLTLGTGIRKLSKVRNGHIPYRDSKLTRIFTFSRRQCKNSNYLYNEPSPEPYGQSRNTLLFASCAKEVVTNAQVNVVMSDKALVKQLQKELARLESELRCPASYSGLEALVREKDNQIRKMDKEIKELKLHRDLAQSRLQDLLKVVGDNHGSKHPLASSARNFTFDVPQPCEDEQSTTSEAFSSGQILGFKAPDTQRDYRSQQSENDVQFATPLSYSISSPPFSGMPPTNGRNDNSHISDEDSEDLCKEVRCIETNETEENECLESSAVGSNSLQDSNLASSMHGNDNTNRSVNSGRNDASSITLEQHLENVKKPFANPGMDLGSSTRNSSSSKVIGRSRSCRSLMGSTLLEDLEKEVCTPPSRSFMDYPGRPETCQRRVPALNYDAESEALSRAGSMLSEITTTRGGLKENSSAAGDTEFVAGIGEFVAELKEMAQGHNGELAEGTIRSVGLDPIMDILQSPSRWPLEFEKKQQEIIDLWHGCNVSLVHRTYFFLLFKGDPADAIYMEVELRRLSFLKNTYSNGSMGYDMVAGSLSTSLVSSAKKLQREREMLCRQMQKRLTIQERESLYTKWGVSLSSKRRRLQVARRLWTETRDLEHVRESASLVARLIGLLEPGKALREMFGLSFAPQQSTRRSHSSWRYGRSSLD

SEQ ID NO: 10742 - protein, 573 aa, Zea mays subsp. mays
  peptide (1)..(573): Ceres Seq. ID no. 13635667
MSDKALVKQLQKELARLESELRCPASYSGLEALVREKDNQIRKMDKEIKELKLHRDLAQSRLQDLLKVVGDNHGSKHPLASSARNFTFDVPQPCEDEQSTTSEAFSSGQILGFKAPDTQRDYRSQQSENDVQFATPLSYSISSPPFSGMPPTNGRNDNSHISDEDSEDLCKEVRCIETNETEENECLESSAVGSNSLQDSNLASSMHGNDNTNRSVNSGRNDASSITLEQHLENVKKPFANPGMDLGSSTRNSSSSKVIGRSRSCRSLMGSTLLEDLEKEVCTPPSRSFMDYPGRPETCQRRVPALNYDAESEALSRAGSMLSEITTTRGGLKENSSAAGDTEFVAGIGEFVAELKEMAQGHNGELAEGTIRSVGLDPIMDILQSPSRWPLEFEKKQQEIIDLWHGCNVSLVHRTYFFLLFKGDPADAIYMEVELRRLSFLKNTYSNGSMGYDMVAGSLSTSLVSSAKKLQREREMLCRQMQKRLTIQERESLYTKWGVSLSSKRRRLQVARRLWTETRDLEHVRESASLVARLIGLLEPGKALREMFGLSFAPQQSTRRSHSSWRYGRSSLD

SEQ ID NO: 10743 - DNA, 1006 bp, Zea mays subsp. mays
  misc_feature (1)..(1006): Ceres Seq. ID no. 12368995
  misc_feature (1)..(1006): Ortholog of  Ceres SEQ ID NO 14307431 as cited in SEQ ID NO 54422
  misc_feature (1)..(1006): Ortholog of  Ceres SEQ ID NO 14301614 as cited in SEQ ID NO 61994
  misc_feature (1)..(1006): Ortholog of  Ceres SEQ ID NO 13663965 as cited in SEQ ID NO 69145
aaaaaactgagtaaaaaaacacaagaacataaccgcagcaataacaatatacacaaagacgggagagagaagagagatggcggaagcgacgccgtacgaggagcagcggcggaggcaggtggaggcgaacaaacggaagctggaggagctgcagctccaccacctctctgctgccatcagagaggccgccgccgccgccaagccctcgctggtcaagaagcggaaggcgcgggtgcctctcgacgtcgccgacgccgtgatggagccagtacggcggtccggccggctcgccaacctcccggataagcccgtgtaccgcgagaaggttcccgattttgggatgaagattaggaggacgtacggatcggtgagaagagatctgaccaaccgggtgtacgcgaccgacgatgcgaggagctacgccatctctaaggcggaggatctggagcaagagctggactccagcttccccatcttcatcaagcccatgacccagtcccatgtcaccgggggcttctggctgggccttccgattcatttctgccggaagtatctgcccaagcgtgacgagatgatcaccctggtggatgaggatgatgacgagtccgacacgctgtacctcgcaatgaagcgggggctcagtgctggatggagagggtttgccgtccagcagaagctggtggatggagattgcctggtcttccagctgattgagcaaacaaagttcaaggtctacataactagagcaagttcctactacgaaagcgaggactgatgaaactagtagcttgtaatctggtgattggagctcagttatggaggtggctgcgttggacaagcttgcatctgggaatcgctggggtgtcttgaaactttttggtggcagaaagttagctgatgtatgaaacccagtatctcctaccaattgttgctgatttgtgtacttcttgggcttaccacttgcacggttcagaaacctgcactatgtaagggggttgttggtggc

SEQ ID NO: 10744 - protein, 232 aa, Zea mays subsp. mays
  peptide (1)..(232): Ceres Seq. ID no. 12368996
MAEATPYEEQRRRQVEANKRKLEELQLHHLSAAIREAAAAAKPSLVKKRKARVPLDVADAVMEPVRRSGRLANLPDKPVYREKVPDFGMKIRRTYGSVRRDLTNRVYATDDARSYAISKAEDLEQELDSSFPIFIKPMTQSHVTGGFWLGLPIHFCRKYLPKRDEMITLVDEDDDESDTLYLAMKRGLSAGWRGFAVQQKLVDGDCLVFQLIEQTKFKVYITRASSYYESED

SEQ ID NO: 10745 - protein, 171 aa, Zea mays subsp. mays
  peptide (1)..(171): Ceres Seq. ID no. 12368997
MEPVRRSGRLANLPDKPVYREKVPDFGMKIRRTYGSVRRDLTNRVYATDDARSYAISKAEDLEQELDSSFPIFIKPMTQSHVTGGFWLGLPIHFCRKYLPKRDEMITLVDEDDDESDTLYLAMKRGLSAGWRGFAVQQKLVDGDCLVFQLIEQTKFKVYITRASSYYESED

SEQ ID NO: 10746 - protein, 144 aa, Zea mays subsp. mays
  peptide (1)..(144): Ceres Seq. ID no. 12368998
MKIRRTYGSVRRDLTNRVYATDDARSYAISKAEDLEQELDSSFPIFIKPMTQSHVTGGFWLGLPIHFCRKYLPKRDEMITLVDEDDDESDTLYLAMKRGLSAGWRGFAVQQKLVDGDCLVFQLIEQTKFKVYITRASSYYESED

SEQ ID NO: 10747 - DNA, 754 bp, Zea mays subsp. mays
  misc_feature (1)..(754): Ceres Seq. ID no. 12413763
  misc_feature (1)..(754): Ortholog of  Ceres SEQ ID NO 15178860 as cited in SEQ ID NO 0
aaaaaaccaaaagcagaggggaaagtgccgtcagctctgactctcgggcacttggctgacgacccgttctctctttgcaactgcaactgcaacgcaccaagaaactgccggcgatcgatcggggcaaggagataaacatggtgcacgggaagctggaggtcctcctcgtctccgccaagggactcgaggacaccgatttcctcaataacatggaccccttcgtgatccttacctgccgcacccaagagcagaaaagcagcgtcgcaaatggagcaggaagcgagcccgaatggaacgagaccttcgtcttcaccgtctccgacgacaccccgcagctgcacctcaagatcatggacagcgacctcaccaacgacgatttcgtcggcgaacgaaccatccccctggaggccgtgtttcaggaaggcagccttcccccggcggttcacccggtcgtcaaggaggagaagtactgcggagaggtcaagctcgcgctcaccttcactccagcagcggaaactcgccgccctgatgacaacgaggaggggccgccttacagcagctggagttgatctatctgccatgggatgcatgcatcatatatatccaccaagagaagagaggataattaattaatctactcaagagaagaatcagtgttgctgttatgcgaccctctatctatctatatatatgtgcttaatttgtcatgaacgactgccaatataaaataaactattcagagttgtttgcacgt

SEQ ID NO: 10748 - protein, 143 aa, Zea mays subsp. mays
  peptide (1)..(143): Ceres Seq. ID no. 12413764
MVHGKLEVLLVSAKGLEDTDFLNNMDPFVILTCRTQEQKSSVANGAGSEPEWNETFVFTVSDDTPQLHLKIMDSDLTNDDFVGERTIPLEAVFQEGSLPPAVHPVVKEEKYCGEVKLALTFTPAAETRRPDDNEEGPPYSSWS

SEQ ID NO: 10749 - protein, 121 aa, Zea mays subsp. mays
  peptide (1)..(121): Ceres Seq. ID no. 12413765
MEQEASPNGTRPSSSPSPTTPRSCTSRSWTATSPTTISSANEPSPWRPCFRKAAFPRRFTRSSRRRSTAERSSSRSPSLQQRKLAALMTTRRGRLTAAGVDLSAMGCMHHIYPPREERIIN

SEQ ID NO: 10750 - protein, 119 aa, Zea mays subsp. mays
  peptide (1)..(119): Ceres Seq. ID no. 12413766
MDPFVILTCRTQEQKSSVANGAGSEPEWNETFVFTVSDDTPQLHLKIMDSDLTNDDFVGERTIPLEAVFQEGSLPPAVHPVVKEEKYCGEVKLALTFTPAAETRRPDDNEEGPPYSSWS

SEQ ID NO: 10751 - DNA, 1357 bp, Zea mays subsp. mays
  misc_feature (1)..(1357): Ceres Seq. ID no. 12413779
  misc_feature (1)..(1357): Ortholog of  Ceres SEQ ID NO 15175900 as cited in SEQ ID NO 53751
agatcagatccgacaactcgccctcccgtctttccctctctctcctcccaccacacccggtcgtcgttgtcgcggcgtgagcgagcgagaggggaaaacccaaaaccctagcaccccccgccccgtcgccgacggccgccggagtagagagatggcggtggacgaggtgaactcggtctacgtcggcggccttccctacgaggccaacgaggagatgcttcgcgacgccttcgggtactacggcaccatcgtctccgtcaaggtgattaatgatcatgctgtcaaaggcaagtgttatggttttgttactttcactcaccccagagctactgagcaagcaattgcgggcatggacggcaagaaattaggcaaccgtattgttcgagtaaatgaagtgcgtacaagaggcccccgcgattttggccgagatggtttcagacgagatccaagaaggtatggtagagatccatactgggacagaagggacagggaacggagctatgatcgtgaaagagatccctaccatgacagggatagtgatagatcccgtgagcatgatagagaaagagattatgaacatggtggatttaatagagaaattgactatcccatggaccgagatcgtgaaggagatgagagacgtcctagagaacatgatcgtacagcagaaatgcataatgtggattcagataatgacaaagataaggaacatgtatcaagaaaaaggttcagccgcccaaaaggtcgtgatagcagagatttatcaagttccagtgatggtcttcaaaatgatggaaaacatcagttggataaaactattcagatgcgcgaggaccttgaaaatgagattaaccagattaaggataaaatatctgggaaagaacagcacattgcagatttgcagaagaaagctcagaaactagaggatgaactggttgccgcacggaaagtctcttcagaacgacagttggcggttacagacctgtacaaacatttcctccaacttcaggactacaatgatagggtcaaaacagctgaacagaggctgcagtctcttgttgatgctgccttggtcgagctcgacatggccgaagatgctactaccagagatggctcgatgtacgagaacggcgtgctttgaacacccaactgccatgggtttgtgtggttgctgatttgttagatttgtagtttgcgtctgccatgtaatagaaccgcactgtaactagaaacaggaaaaatgttttgtgtaagggtcggagaatctgctgtcgtggtccttgagcccggatttctctttcgtagttggattcattaaccggcctgagtattcctgttaccgtatgttttgagcgtg

SEQ ID NO: 10752 - protein, 379 aa, Zea mays subsp. mays
  peptide (1)..(379): Ceres Seq. ID no. 12413780
DQIRQLALPSFPLSPPTTPGRRCRGVSEREGKTQNPSTPRPVADGRRSREMAVDEVNSVYVGGLPYEANEEMLRDAFGYYGTIVSVKVINDHAVKGKCYGFVTFTHPRATEQAIAGMDGKKLGNRIVRVNEVRTRGPRDFGRDGFRRDPRRYGRDPYWDRRDRERSYDRERDPYHDRDSDRSREHDRERDYEHGGFNREIDYPMDRDREGDERRPREHDRTAEMHNVDSDNDKDKEHVSRKRFSRPKGRDSRDLSSSSDGLQNDGKHQLDKTIQMREDLENEINQIKDKISGKEQHIADLQKKAQKLEDELVAARKVSSERQLAVTDLYKHFLQLQDYNDRVKTAEQRLQSLVDAALVELDMAEDATTRDGSMYENGVL

SEQ ID NO: 10753 - protein, 329 aa, Zea mays subsp. mays
  peptide (1)..(329): Ceres Seq. ID no. 12413781
MAVDEVNSVYVGGLPYEANEEMLRDAFGYYGTIVSVKVINDHAVKGKCYGFVTFTHPRATEQAIAGMDGKKLGNRIVRVNEVRTRGPRDFGRDGFRRDPRRYGRDPYWDRRDRERSYDRERDPYHDRDSDRSREHDRERDYEHGGFNREIDYPMDRDREGDERRPREHDRTAEMHNVDSDNDKDKEHVSRKRFSRPKGRDSRDLSSSSDGLQNDGKHQLDKTIQMREDLENEINQIKDKISGKEQHIADLQKKAQKLEDELVAARKVSSERQLAVTDLYKHFLQLQDYNDRVKTAEQRLQSLVDAALVELDMAEDATTRDGSMYENGVL

SEQ ID NO: 10754 - protein, 308 aa, Zea mays subsp. mays
  peptide (1)..(308): Ceres Seq. ID no. 12413782
MLRDAFGYYGTIVSVKVINDHAVKGKCYGFVTFTHPRATEQAIAGMDGKKLGNRIVRVNEVRTRGPRDFGRDGFRRDPRRYGRDPYWDRRDRERSYDRERDPYHDRDSDRSREHDRERDYEHGGFNREIDYPMDRDREGDERRPREHDRTAEMHNVDSDNDKDKEHVSRKRFSRPKGRDSRDLSSSSDGLQNDGKHQLDKTIQMREDLENEINQIKDKISGKEQHIADLQKKAQKLEDELVAARKVSSERQLAVTDLYKHFLQLQDYNDRVKTAEQRLQSLVDAALVELDMAEDATTRDGSMYENGVL

SEQ ID NO: 10755 - DNA, 1747 bp, Zea mays subsp. mays
  misc_feature (1)..(1747): Ceres Seq. ID no. 12566487
  misc_feature (1)..(1747): Ortholog of  Ceres SEQ ID NO 15172321 as cited in SEQ ID NO 55415
gcacgagaccattacctagaacatcctaatcgaaaactactgtagccgctgctgctcctctcctcccatctcaccacacaccgcagccccagcaagatcgcgcggaggccatggcgaagcccaagccttcctccgccggcgccaagccgaccgcggctgcgccaccggttacagtgcactcggcgctggtcacctacacctccatgctcgcgctcctctccctctgcccgcccttcgtcatcctcctgtggtacacgatggtgcacgcggacggatcggtggtgcggacttacgagcacctcagggatcacggcgtgctcgaggggctcaaggccatctggcccatgcccaccctcgtcgcgtggaagatcatcttcggcttcgggctcttcgaggccgtcctacagctgctgctccctgggaagcgcttcgaagggcccatctcgcctgccgggaacgtgccggtctacaaggcaaatggcttacaagcatatgcagtgaccttgataacttaccttggtttgtggtggttcggtatatttaaccctgcaatagtgtatgatcacttgggggagatatactctgctcttgtttttggaagctttgtgttctgtatttttctctacataaagggccatgtatttccatcttcatctgactctggatcctctgggaatgtgataattgacttctactggggtatggagctgtaccctcggattggcaagtactttgatatcaaagtattcaccaactgtcgtttcggtatgatgtcctgggctgttcttgccgtaacctattgcataaagcagtatgaaatgaatggcagagttgctgattctatgcttgtgaatactgcacttatgttgatctatatcactaagttcttttggtgggaatctggatattggtgtactatggacattgctcatgatagagctggtttctatatctgctggggatgcttggtatgggttccatccatatatacttcccctggaatgtaccttgtaaaccaccctttgaatttgggcccccagctagcactctcaattcttctagctggaatgttgtgcatatacataaactatgattgtgaccgtcagcgccaagaatttcgacggacgaatgggaaatgctcggtctggggcaaggctccatctaagattgttgcctcttatcagactacaaagggagaaactaaaaccagtcttctcttgacttctggatggtggggcttgtcacgtcacttccactatgtcccagagatactatctgcatttttctggactgttccagctcttttcaatcacttcctaccatacttctacgtgatctttctgactatattattgtttgaccgagcaaagagggatgatgaccggtgctcatcaaagtacgggaagtactggaagatttactgcaacaaagtaccatacagagtcattcctggcatttactgagcatctcgagttctggacgactcttgatattaagctcaacagatgccacgatatccagtcttcataccgatttgctactgattgtgtaatgtcgctggtaggcttgggctgtacgcagtattaggtgtaggcaacttggcttttggcatttaccttgtatgtgtcgtgtatctagggctggggcttgctccttcagttgttagacagtagggggtaatctcaggggtgcaatgtactccctccgtcctaaaataaaagcatatctagtatttaaattttgtttc

SEQ ID NO: 10756 - protein, 450 aa, Zea mays subsp. mays
  peptide (1)..(450): Ceres Seq. ID no. 12566488
MAKPKPSSAGAKPTAAAPPVTVHSALVTYTSMLALLSLCPPFVILLWYTMVHADGSVVRTYEHLRDHGVLEGLKAIWPMPTLVAWKIIFGFGLFEAVLQLLLPGKRFEGPISPAGNVPVYKANGLQAYAVTLITYLGLWWFGIFNPAIVYDHLGEIYSALVFGSFVFCIFLYIKGHVFPSSSDSGSSGNVIIDFYWGMELYPRIGKYFDIKVFTNCRFGMMSWAVLAVTYCIKQYEMNGRVADSMLVNTALMLIYITKFFWWESGYWCTMDIAHDRAGFYICWGCLVWVPSIYTSPGMYLVNHPLNLGPQLALSILLAGMLCIYINYDCDRQRQEFRRTNGKCSVWGKAPSKIVASYQTTKGETKTSLLLTSGWWGLSRHFHYVPEILSAFFWTVPALFNHFLPYFYVIFLTILLFDRAKRDDDRCSSKYGKYWKIYCNKVPYRVIPGIY

SEQ ID NO: 10757 - protein, 419 aa, Zea mays subsp. mays
  peptide (1)..(419): Ceres Seq. ID no. 12566489
MLALLSLCPPFVILLWYTMVHADGSVVRTYEHLRDHGVLEGLKAIWPMPTLVAWKIIFGFGLFEAVLQLLLPGKRFEGPISPAGNVPVYKANGLQAYAVTLITYLGLWWFGIFNPAIVYDHLGEIYSALVFGSFVFCIFLYIKGHVFPSSSDSGSSGNVIIDFYWGMELYPRIGKYFDIKVFTNCRFGMMSWAVLAVTYCIKQYEMNGRVADSMLVNTALMLIYITKFFWWESGYWCTMDIAHDRAGFYICWGCLVWVPSIYTSPGMYLVNHPLNLGPQLALSILLAGMLCIYINYDCDRQRQEFRRTNGKCSVWGKAPSKIVASYQTTKGETKTSLLLTSGWWGLSRHFHYVPEILSAFFWTVPALFNHFLPYFYVIFLTILLFDRAKRDDDRCSSKYGKYWKIYCNKVPYRVIPGIY

SEQ ID NO: 10758 - protein, 401 aa, Zea mays subsp. mays
  peptide (1)..(401): Ceres Seq. ID no. 12566490
MVHADGSVVRTYEHLRDHGVLEGLKAIWPMPTLVAWKIIFGFGLFEAVLQLLLPGKRFEGPISPAGNVPVYKANGLQAYAVTLITYLGLWWFGIFNPAIVYDHLGEIYSALVFGSFVFCIFLYIKGHVFPSSSDSGSSGNVIIDFYWGMELYPRIGKYFDIKVFTNCRFGMMSWAVLAVTYCIKQYEMNGRVADSMLVNTALMLIYITKFFWWESGYWCTMDIAHDRAGFYICWGCLVWVPSIYTSPGMYLVNHPLNLGPQLALSILLAGMLCIYINYDCDRQRQEFRRTNGKCSVWGKAPSKIVASYQTTKGETKTSLLLTSGWWGLSRHFHYVPEILSAFFWTVPALFNHFLPYFYVIFLTILLFDRAKRDDDRCSSKYGKYWKIYCNKVPYRVIPGIY

SEQ ID NO: 10759 - DNA, 1272 bp, Zea mays subsp. mays
  misc_feature (1)..(1272): Ceres Seq. ID no. 13500491
  misc_feature (1)..(1272): Ortholog of  Ceres SEQ ID NO 14307484 as cited in SEQ ID NO 59427
atccatcagtgtggactgtcgaaccgggggatgggttgggacgttgggtcctggtccacgtgaccacgtctagcagtagcaggctctcgaaactcacgttcccgtgtcgctcaactggcacaggactggaccccgtcccgtacggcatcgcaccccgcagccgcaggccgcatcttcctcgcgtgctctgccctctgtgcctgcccattcgttgatcccatcggcttccccttcctcttccccgatccccttcctcccccgatcccatccaattccacttccacaccccgggcctcgccgccgacgccgacgccgacgccgccggccatgtccaagtacggcaccattcccacctcctcctccgcgggcggagggcccgtgcccctcggcggcgcctccccgctcgatttcatctcccgcgccaaggctcggggcgcctcggcgctggcgacgcgccggccctggcgcgagctcgtggacgtccacgccgtcggcctgcccccgagcctcggcgacgcgtacctccgcgtgcgcgccaacctcgcccacttcgccatgaactacgccatcgtcgtcctcgtcgtcgtcttcctctccctcctctggcaccccgtctccctcatcgtcttcctcgtctgcatgctcgcctggctcgtcctctacttcctccgcgacgagcccctcgtcctcttcggccgcgtcgtcgccgacggctacgtccttgccgtgctcgccgtcgtcacgctcgtcctgctgctcctcaccgacgccactgccaacatcctctcctcgctgctcatcggcctcgtcctcgtcctcgtccacgccgcgctgcacaaggcggaggacaacgccgccgacgaggccgaccgctggtacgcgccggtgtcacagcagccgtcgcactgaggatctgaatgtggccattcggcgccttggctgtgatcctattctgtactgtttccgagttcctccagctgcgcaagctgggccatccccatctcatctgcgatgaaaaccctgtccttgttgattgtgattcacttgctgccggttccatgggaagttttggatccagcgatgacgcagggctgttaaacttgttctccacgcccagcccatttctgtgatacgtttaaagcgtctcgttcacgtgtatcaaatccggactgaagtctagtgtacattttgagttggagaaatgtgatgccagggacctgcattcagattttatcgacgccatgcatgtaggcaagcgatgctgatatttct

SEQ ID NO: 10760 - protein, 193 aa, Zea mays subsp. mays; identical to SEQ ID NO: 9578
  peptide (1)..(193): Ceres Seq. ID no. 13500492

SEQ ID NO: 10761 - protein, 117 aa, Zea mays subsp. mays
  peptide (1)..(117): Ceres Seq. ID no. 13500493
MNYAIVVLVVVFLSLLWHPVSLIVFLVCMLAWLVLYFLRDEPLVLFGRVVADGYVLAVLAVVTLVLLLLTDATANILSSLLIGLVLVLVHAALHKAEDNAADEADRWYAPVSQQPSH

SEQ ID NO: 10762 - DNA, 1792 bp, Zea mays subsp. mays
  misc_feature (1)..(1792): Ceres Seq. ID no. 12412110
  misc_feature (1)..(1792): Ortholog of  Ceres SEQ ID NO 13594068 as cited in SEQ ID NO 58624
aaatcctcctcctcctcctgccgcagcccgcagggaggtggagttgtcaacgtgccgaggactggagcgcccgcgtccggcgtctctataaacgagaccgcccggccatttggtctgctcctctctgttctcccctgcctgcctgcttccagctgcatctctctccgccgagaccgagaggaggaggaggcaagggaggcatccctgacgtacggacggcggccatggggacgcaggcgccggagaactaccccgccgagaaggtacaggacgcgaggagcgcgcgggagaaggccatcgacgactggctcccgatcacctcgtcgcggaacgccaagtggtggtactccgccttccacaatgtcaccgccatggtcggcgccggcgtgctcagcctgccctacgccatgtccgagcttggctggggccctggcatcgcggtgctggtggtgtcgtgggtgatcacgctgtacacgctgtggcagatggtggagatgcacgagatggtccccgggaagcggttcgaccgttaccacgagctggggcagcacgcgttcggggaccggctgggcctgtggatcgtggtgccgcagcagctggtcgtcgaggtgggcgtgaacatcgtgtacatggtgaccggcggcaagtccctgaagaagttccacgacgtggctggtgtgcggcgacacgggggtgtgcgaggggaaggacaacatcaagaccacctacttcatcatgatcttcgcgtccgtccacttcgtcctctcgcagctccccaacttcaactccatctccggcgtctccctcgccgccgccgtcatgtcgctcagctactccaccatcgcgtggggcgcgtcggtgcacaaggggaggatgtcgggcgtcgactaccacctgcgcgcgaccaccacgccggggaaggtgttcggcttcttcggcgcgctgggggacgtggcgttcgcctacgccggccacaacgtggtgctggagatccaggccaccatcccgtccacccccgacaagccgtccaagaagcccatgtggaagggcgtggtggtcgcctacgtcgtggtggcgctctgctacttccccgtcgcgctcatcggctactgggcgttcggaaacacggtcgaggacaacatcctcatcacgctcagcaagcccaagtggctcatcgcgctcgccaacatgatggtcgtcgtccatgtcatcggcagctaccagatctatgccatgccggtgtttgacatgatagagaccgtgctggtgaagaagctgcgcttccctcccggcctcacgctgcgtctgatcgctcggaccctctatgttgcgttcacgatgttcatagccatcaccttccccttcttcggtgggctgctcggtttcttcggcgggttcgccttcgcgccgaccacctatttccttccctgcgtcatgtggctcgcaatctacaagcccaagaggttcagcctctcctggttgaccaactggatgtgcatcattcttggggtgctcctgatgattctgtcgcccatcggagggctccggcaaataataatggacgcgaaaacctaccagttctactcgtgagctaccaccagccatgacttgtaagcacgattggagaaatctgtcaaagcctcaaccacgagtttttgtttttgttttttgtcatgccaaacacatacatatacgtactgtttttttaatattcaaaggtgttcttcgtggcttgcgtgtgtacagtattatgtgtatgagggagacataagtttaatgatgctggctgtct

SEQ ID NO: 10763 - protein, 414 aa, Zea mays subsp. mays
  peptide (1)..(414): Ceres Seq. ID no. 12412111
ILLLLLPQPAGRWSCQRAEDWSARVRRLYKRDRPAIWSAPLCSPLPACFQLHLSPPRPRGGGGKGGIPDVRTAAMGTQAPENYPAEKVQDARSAREKAIDDWLPITSSRNAKWWYSAFHNVTAMVGAGVLSLPYAMSELGWGPGIAVLVVSWVITLYTLWQMVEMHEMVPGKRFDRYHELGQHAFGDRLGLWIVVPQQLVVEVGVNIVYMVTGGKSLKKFHDVAGVRRHGGVRGEGQHQDHLLHHDLRVRPLRPLAAPQLQLHLRRLPRRRRHVAQLLHHRVGRVGAQGEDVGRRLPPARDHHAGEGVRLLRRAGGRGVRLRRPQRGAGDPGHHPVHPRQAVQEAHVEGRGGRLRRGGALLLPRRAHRLLGVRKHGRGQHPHHAQQAQVAHRARQHDGRRPCHRQLPDLCHAGV

SEQ ID NO: 10764 - protein, 340 aa, Zea mays subsp. mays
  peptide (1)..(340): Ceres Seq. ID no. 12412112
MGTQAPENYPAEKVQDARSAREKAIDDWLPITSSRNAKWWYSAFHNVTAMVGAGVLSLPYAMSELGWGPGIAVLVVSWVITLYTLWQMVEMHEMVPGKRFDRYHELGQHAFGDRLGLWIVVPQQLVVEVGVNIVYMVTGGKSLKKFHDVAGVRRHGGVRGEGQHQDHLLHHDLRVRPLRPLAAPQLQLHLRRLPRRRRHVAQLLHHRVGRVGAQGEDVGRRLPPARDHHAGEGVRLLRRAGGRGVRLRRPQRGAGDPGHHPVHPRQAVQEAHVEGRGGRLRRGGALLLPRRAHRLLGVRKHGRGQHPHHAQQAQVAHRARQHDGRRPCHRQLPDLCHAGV

SEQ ID NO: 10765 - protein, 291 aa, Zea mays subsp. mays
  peptide (1)..(291): Ceres Seq. ID no. 12412113
MVGAGVLSLPYAMSELGWGPGIAVLVVSWVITLYTLWQMVEMHEMVPGKRFDRYHELGQHAFGDRLGLWIVVPQQLVVEVGVNIVYMVTGGKSLKKFHDVAGVRRHGGVRGEGQHQDHLLHHDLRVRPLRPLAAPQLQLHLRRLPRRRRHVAQLLHHRVGRVGAQGEDVGRRLPPARDHHAGEGVRLLRRAGGRGVRLRRPQRGAGDPGHHPVHPRQAVQEAHVEGRGGRLRRGGALLLPRRAHRLLGVRKHGRGQHPHHAQQAQVAHRARQHDGRRPCHRQLPDLCHAGV

SEQ ID NO: 10766 - DNA, 1836 bp, Zea mays subsp. mays
  misc_feature (1)..(1836): Ceres Seq. ID no. 12412106
  misc_feature (1)..(1836): Ortholog of  Ceres SEQ ID NO 14315146 as cited in SEQ ID NO 52929
  misc_feature (1)..(1836): Ortholog of  Ceres SEQ ID NO 14302263 as cited in SEQ ID NO 64701
  misc_feature (1)..(1836): Ortholog of  Ceres SEQ ID NO 13584538 as cited in SEQ ID NO 64739
  misc_feature (1)..(1836): Ortholog of  Ceres SEQ ID NO 15169643 as cited in SEQ ID NO 64826
  misc_feature (1)..(1836): Ortholog of  Ceres SEQ ID NO 15169647 as cited in SEQ ID NO 64930
aacacaactgcacaaaagcacaagcctccctcccggctccccacctcgcagcgtccgccggcacaccacctctgactcctctccctccgcggcctccgtttcttccctcattctccgcaaaccctaatcccaatggctgcctccgccaggactaccagctcgttgccctacctagtcgccgtctcctcccccgcggctcaccgccacggggccagccacccgatccgcgcctcggtgggggaggcgacaatggacgtggtgtcggaggcggagctgcgggagaaagggttcttggggatgcggaaaacgaaactggtgtgcacggtggggcccgcctgcgtcgaggcgctgccggcgctggcgcgcggcgggatgggcgtggcgcggatcaacctctgccacggtggccgggagtggcatcgtgccgccatgcgctctgtgcggaggctcaacgaggagggaggattctgcgtgacgcttatggtcgacaccgagggttcccagctcctcgtcgcggaccacggaggcgccacctcagtcaaggccgaggatgggtcagagtggatatttacaaacaaaaaagctgatgaagcccatcagttcacaatgcatgtgaattttgataagttttctgaaggcattttggttggtgatgagcttgtaatagatggtggaatggcaacatttgaagttactgagaaaataggaaatgatttgcgctgtaagtgcacggacccaggattgggctgacatcgaatttgggatagctgaaggagttgattgcattgctctatcatttgtaaatgatgctaatgatataaagcagttgaaagcttacctctctagaagatcgttagagcacatcaaagtatttgcaaagattgagagtctagaatctctcaagaacctgaaagacatcatagaggcatctgatggagttatggtagcacgaggggatcttggagttcagattcctcttgaacagatcccagccattcaagaatcaattgttaaactatgtagacacctgaacaagcctgtgatagttgcttctcagcttctcgaatcaatggttgaatacccaacaccaactcgagcagaggtggccgatgtttcggaagcagtgcggcaatatgcagacgctgtgatgctatcagcagagtcagctataggtgcatatccccaaaaagcgctatctgtacttcgtgcagccagtgaaaggatggaatcatggagccgtgaggaaaacatgcagaaacttcttccacggcatcagcttgcaattgcattgcctgaccggatctcagagcagatttgcagctgtgctgtagaaatggcaaacaaccttgctgtggatgccatatttgtctacacaaagcatggtcacatggcatcacttctatcgcgcaaccgacccaaccctcccatattcgcgttcactgataatgccaattcaagaaagagcatgaacctctactcgggagtgattccacttcatctaccattgtcaaatagcatggaggataacttcaacaaaaccatcagcctgatgaggtcgaagggttcagtgaaacccggagacacggtcttggtggtatcagattctgatctaaaccaaccttgtgctgccacctcggtgttccaatccattcaggtccggctagtggagtaggttccatgagatgagatcctactagccgtttggttggctaaaatgtaacgtaaccaactactactatgcgttaccattgcaaaccattcccaccgtctataattagatcctatttccatctccaaataaagattgaaccactgcgattacagtggtgtctgatt

SEQ ID NO: 10767 - protein, 320 aa, Zea mays subsp. mays
  peptide (1)..(320): Ceres Seq. ID no. 12412107
MICAVSARTQDWADIEFGIAEGVDCIALSFVNDANDIKQLKAYLSRRSLEHIKVFAKIESLESLKNLKDIIEASDGVMVARGDLGVQIPLEQIPAIQESIVKLCRHLNKPVIVASQLLESMVEYPTPTRAEVADVSEAVRQYADAVMLSAESAIGAYPQKALSVLRAASERMESWSREENMQKLLPRHQLAIALPDRISEQICSCAVEMANNLAVDAIFVYTKHGHMASLLSRNRPNPPIFAFTDNANSRKSMNLYSGVIPLHLPLSNSMEDNFNKTISLMRSKGSVKPGDTVLVVSDSDLNQPCAATSVFQSIQVRLVE

SEQ ID NO: 10768 - protein, 243 aa, Zea mays subsp. mays
  peptide (1)..(243): Ceres Seq. ID no. 12412108
MVARGDLGVQIPLEQIPAIQESIVKLCRHLNKPVIVASQLLESMVEYPTPTRAEVADVSEAVRQYADAVMLSAESAIGAYPQKALSVLRAASERMESWSREENMQKLLPRHQLAIALPDRISEQICSCAVEMANNLAVDAIFVYTKHGHMASLLSRNRPNPPIFAFTDNANSRKSMNLYSGVIPLHLPLSNSMEDNFNKTISLMRSKGSVKPGDTVLVVSDSDLNQPCAATSVFQSIQVRLVE

SEQ ID NO: 10769 - protein, 205 aa, Zea mays subsp. mays
  peptide (1)..(205): Ceres Seq. ID no. 12412109
MAASARTTSSLPYLVAVSSPAAHRHGASHPIRASVGEATMDVVSEAELREKGFLGMRKTKLVCTVGPACVEALPALARGGMGVARINLCHGGREWHRAAMRSVRRLNEEGGFCVTLMVDTEGSQLLVADHGGATSVKAEDGSEWIFTNKKADEAHQFTMHVNFDKFSEGILVGDELVIDGGMATFEVTEKIGNDLRCKCTDPGLG

SEQ ID NO: 10770 - DNA, 767 bp, Zea mays subsp. mays
  misc_feature (1)..(767): Ceres Seq. ID no. 12342167
  misc_feature (1)..(767): Ortholog of  Ceres SEQ ID NO 12626708 as cited in SEQ ID NO 67104
aagacctcctattcaccatgccgaccgaagagggttccgacggcggtggcggcgccggagccggagccggggagaagaagagctcgcaggcgcccgcaaagcctggagcgtgcggcgccgcaaagttcctcgcggggttgccgtcgcgcggcaacttctcttccggctccgccccctccaatctgggagggttcagggtttacgtctgcgagcacagcacagatcccccagaaggacaagttataaagacggattcaacgaatattttaatcaggcatctccagttgaacaagcagaagactgagggcaaagatgtggattccagaactgtcggcgaaaacaacagagggaaaagatctgctgccagaagtttggatgtcaacaattcagcaaagaaggctaacttgggtacttcatctggatcatcagcctatgaggaaatttctggcttttcacaacacacactgcagtcatttacagtggagagattgcgtgcacttctacgacaaagtggtcgatcgaccaaaggcaaaaaggatgaactgattgctcgcttacgggagtcgcagggttgacatgaatctggtacttgtttagtcaatcaaaccccttcaggcagggttacacgaccaaatgagtaccatgctgtacttgtcaatggctgctctgcctagatttaatacaatgtaatggcatatgtaggttgagactttgccggaccttattatactcagaatttgttaactagctgttacctgtcagtagtc

SEQ ID NO: 10771 - protein, 190 aa, Zea mays subsp. mays
  peptide (1)..(190): Ceres Seq. ID no. 12342168
DLLFTMPTEEGSDGGGGAGAGAGEKKSSQAPAKPGACGAAKFLAGLPSRGNFSSGSAPSNLGGFRVYVCEHSTDPPEGQVIKTDSTNILIRHLQLNKQKTEGKDVDSRTVGENNRGKRSAARSLDVNNSAKKANLGTSSGSSAYEEISGFSQHTLQSFTVERLRALLRQSGRSTKGKKDELIARLRESQG

SEQ ID NO: 10772 - protein, 185 aa, Zea mays subsp. mays
  peptide (1)..(185): Ceres Seq. ID no. 12342169
MPTEEGSDGGGGAGAGAGEKKSSQAPAKPGACGAAKFLAGLPSRGNFSSGSAPSNLGGFRVYVCEHSTDPPEGQVIKTDSTNILIRHLQLNKQKTEGKDVDSRTVGENNRGKRSAARSLDVNNSAKKANLGTSSGSSAYEEISGFSQHTLQSFTVERLRALLRQSGRSTKGKKDELIARLRESQG

SEQ ID NO: 10773 - protein, 100 aa, Zea mays subsp. mays
  peptide (1)..(100): Ceres Seq. ID no. 12342170
RPPIHHADRRGFRRRWRRRSRSRGEEELAGARKAWSVRRRKVPRGVAVARQLLFRLRPLQSGRVQGLRLRAQHRSPRRTSYKDGFNEYFNQASPVEQAED

SEQ ID NO: 10774 - DNA, 1273 bp, Zea mays subsp. mays
  misc_feature (1)..(1273): Ceres Seq. ID no. 12412098
  misc_feature (1)..(1273): Ortholog of  Ceres SEQ ID NO 15171508 as cited in SEQ ID NO 58526
  misc_feature (1)..(1273): Ortholog of  Ceres SEQ ID NO 15168378 as cited in SEQ ID NO 59129
  misc_feature (1)..(1273): Ortholog of  Ceres SEQ ID NO 13654989 as cited in SEQ ID NO 63117
  misc_feature (1)..(1273): Ortholog of  Ceres SEQ ID NO 13584744 as cited in SEQ ID NO 69137
aacatagtttcgtcgtggaacaagaggcggagaagcaggtcactcgaccagctaaatccctgggtgtacaagccggctgagctatggcaggcgaaggagcaggagcaccaccacccgccgcccaagaagcgcagctgcaccatggtgttcacgctcaaggagatggaggaggcgaccaacctgttcagcgaccgcaacctcatcggcaagggcggcttcggccgggtttacagaggcgtgctcaaggatggccagatcgtcgccgtcaagaagatggagctgccgacttgcaagcaggccgacggcgagcgcgagttccgggtggagatcgacatcctgagcaggctagaccaccccaacctggtcacgctcatcggctactgcgccgacggcaagcaccggttcgtggtgtacgagtacatgcccaggggcaacctccaggacatcctcaacggcattggggaggtgaggatggactggccgctgcgcctgcggatcgcgctgggagcggcgcgggcgctggcctacctgcactccagcacggccgtcggcgtccccgtcgtccacagggacttcaagtccagcaacatcctcctcaccgaccactacgaggcaaagatctcggacttcgggctcgccaagctgctgcagcaggaccaggacctgcacaccaccaccagggtgctgggcacgttcggctacttcgaccccgaatacgcgctgacagggaagctgacgctgcagagcgacgtgtacgcgttcggcgtggtgctgctgggagctgctgacggggcggcgggccatcgacctgagccaggggccgcaggagcagaacctcatcgtcggcatccaccaggtggtgggcgaccgcaagaagctgcgcaaggtggtggaccgggacatgcccaggggctcctacacgctggagtcggtgtccatgttcgccgcgctcgccgcgcgctgcgtctgcttcgacagcgccgcccgcccgcccatgcaggactgcgtcaaggagctccagttcatcatgtacgctaacatgaagatatgatcactctcgcgggtgcaaaccgcgcgtgggttttctttacttttgagacgggggcggggcatgcggacgatgctgctggattgcaagcaattgcaggtccgcagcttttgtttggttgatgaaacgaattgtctaaaaaggctttatacagttacttgctagtggtgctcgtttggtagagcttgtagctctagtcaaaccagttctactggtgatttctcc

SEQ ID NO: 10775 - protein, 345 aa, Zea mays subsp. mays
  peptide (1)..(345): Ceres Seq. ID no. 12412099
NIVSSWNKRRRSRSLDQLNPWVYKPAELWQAKEQEHHHPPPKKRSCTMVFTLKEMEEATNLFSDRNLIGKGGFGRVYRGVLKDGQIVAVKKMELPTCKQADGEREFRVEIDILSRLDHPNLVTLIGYCADGKHRFVVYEYMPRGNLQDILNGIGEVRMDWPLRLRIALGAARALAYLHSSTAVGVPVVHRDFKSSNILLTDHYEAKISDFGLAKLLQQDQDLHTTTRVLGTFGYFDPEYALTGKLTLQSDVYAFGVVLLGAADGAAGHRPEPGAAGAEPHRRHPPGGGRPQEAAQGGGPGHAQGLLHAGVGVHVRRARRALRLLRQRRPPAHAGLRQGAPVHHVR

SEQ ID NO: 10776 - protein, 298 aa, Zea mays subsp. mays
  peptide (1)..(298): Ceres Seq. ID no. 12412100
MVFTLKEMEEATNLFSDRNLIGKGGFGRVYRGVLKDGQIVAVKKMELPTCKQADGEREFRVEIDILSRLDHPNLVTLIGYCADGKHRFVVYEYMPRGNLQDILNGIGEVRMDWPLRLRIALGAARALAYLHSSTAVGVPVVHRDFKSSNILLTDHYEAKISDFGLAKLLQQDQDLHTTTRVLGTFGYFDPEYALTGKLTLQSDVYAFGVVLLGAADGAAGHRPEPGAAGAEPHRRHPPGGGRPQEAAQGGGPGHAQGLLHAGVGVHVRRARRALRLLRQRRPPAHAGLRQGAPVHHVR

SEQ ID NO: 10777 - protein, 291 aa, Zea mays subsp. mays
  peptide (1)..(291): Ceres Seq. ID no. 12412101
MEEATNLFSDRNLIGKGGFGRVYRGVLKDGQIVAVKKMELPTCKQADGEREFRVEIDILSRLDHPNLVTLIGYCADGKHRFVVYEYMPRGNLQDILNGIGEVRMDWPLRLRIALGAARALAYLHSSTAVGVPVVHRDFKSSNILLTDHYEAKISDFGLAKLLQQDQDLHTTTRVLGTFGYFDPEYALTGKLTLQSDVYAFGVVLLGAADGAAGHRPEPGAAGAEPHRRHPPGGGRPQEAAQGGGPGHAQGLLHAGVGVHVRRARRALRLLRQRRPPAHAGLRQGAPVHHVR

SEQ ID NO: 10778 - DNA, 1342 bp, Zea mays subsp. mays
  misc_feature (1)..(1342): Ceres Seq. ID no. 12412086
  misc_feature (1)..(1342): Ortholog of  Ceres SEQ ID NO 14307280 as cited in SEQ ID NO 59443
  misc_feature (1)..(1342): Ortholog of  Ceres SEQ ID NO 14316536 as cited in SEQ ID NO 60272
  misc_feature (1)..(1342): Ortholog of  Ceres SEQ ID NO 13598570 as cited in SEQ ID NO 65434
  misc_feature (1)..(1342): Ortholog of  Ceres SEQ ID NO 13660333 as cited in SEQ ID NO 67464
  misc_feature (1)..(1342): Ortholog of  Ceres SEQ ID NO 13596238 as cited in SEQ ID NO 68834
  misc_feature (1)..(1342): Ortholog of  Ceres SEQ ID NO 15174329 as cited in SEQ ID NO 0
atcgattaatctcctcccccctcaacaaccgcgagatcttcagctaccgctctctccggtcgcgtttgcatccgcattcctcagatccagattcgagccccagccccgcttcgagatccagctagctctctatcaagcatccggcggagcgagcagcggggggctcggcgagagagaagatgaagcggaagacgcggaacaagatcatcgtatggacactggccctggctgcagtggcgattctggtgggcggcacgattgcgctggtgctcacggcggggacgtggaaggccaagataaagaagtcgcaggagaagatctgtaacaaggggtgggagtgctcggggagcaagtactgctgcaacgacaccatcaccgacttcttcaaggtgtaccagttcgagaacctcttcgccaagcgcaacacccccgtcgcgcacgccgtcgggttctgggactaccaggccttcatcaccgccgcggccctcttcgagccccaggggttctgcaccaccggcggcaagcagatgcagatgatggagctctgcgccttcctcgggcacgtcggcgccaagacttcatgtgggtacggcgtggcgaccggcgggccgacggcatgggggctgtgctacaaccacgagatgagccccgaccagacctactgcgacaagacctacacccagtacccctgcgtcgagggcgccgagtactacggccgaggcgcgattcctgtctactggaactacaactacggcgctgccggtgacgggatcaaggcggatctgctccaccacccagagtacctggagcagaacgcgacgctggcattcatggcggcgatgtggcggtggatgacgccgatcaagaagagccagccgtcggcgcacgacgccttcgtgggcaactggaagccgaccaagaacgacacgctcagcaaacgcctgcctgggttcggcgccaccatgaacatactctacggcgagtcgatctgcggcaagggatacgtcgacgccatgaacgttataatctcgcactaccagtattaccttgacctcatgggcgtcggccgtgagcactctggcgacaaccgtgattgcgccgagcaggcaccgttcaacccctccagcccgacggatgaccagaagcagcagcaatcaggaagctaagacggacggactcattgcgccattgccactgatcaagcttccacagcgctagattgagctacagattcttcaggatgcgtgaagctgcatgcatcgtgttgatgttgttttgaatagactgtatgtactgtctatgtgaattgcgagatttgtggttatttactaccatgttgtcc

SEQ ID NO: 10779 - protein, 328 aa, Zea mays subsp. mays
  peptide (1)..(328): Ceres Seq. ID no. 12412087
MKRKTRNKIIVWTLALAAVAILVGGTIALVLTAGTWKAKIKKSQEKICNKGWECSGSKYCCNDTITDFFKVYQFENLFAKRNTPVAHAVGFWDYQAFITAAALFEPQGFCTTGGKQMQMMELCAFLGHVGAKTSCGYGVATGGPTAWGLCYNHEMSPDQTYCDKTYTQYPCVEGAEYYGRGAIPVYWNYNYGAAGDGIKADLLHHPEYLEQNATLAFMAAMWRWMTPIKKSQPSAHDAFVGNWKPTKNDTLSKRLPGFGATMNILYGESICGKGYVDAMNVIISHYQYYLDLMGVGREHSGDNRDCAEQAPFNPSSPTDDQKQQQSGS

SEQ ID NO: 10780 - protein, 212 aa, Zea mays subsp. mays
  peptide (1)..(212): Ceres Seq. ID no. 12412088
MQMMELCAFLGHVGAKTSCGYGVATGGPTAWGLCYNHEMSPDQTYCDKTYTQYPCVEGAEYYGRGAIPVYWNYNYGAAGDGIKADLLHHPEYLEQNATLAFMAAMWRWMTPIKKSQPSAHDAFVGNWKPTKNDTLSKRLPGFGATMNILYGESICGKGYVDAMNVIISHYQYYLDLMGVGREHSGDNRDCAEQAPFNPSSPTDDQKQQQSGS

SEQ ID NO: 10781 - protein, 210 aa, Zea mays subsp. mays
  peptide (1)..(210): Ceres Seq. ID no. 12412089
MMELCAFLGHVGAKTSCGYGVATGGPTAWGLCYNHEMSPDQTYCDKTYTQYPCVEGAEYYGRGAIPVYWNYNYGAAGDGIKADLLHHPEYLEQNATLAFMAAMWRWMTPIKKSQPSAHDAFVGNWKPTKNDTLSKRLPGFGATMNILYGESICGKGYVDAMNVIISHYQYYLDLMGVGREHSGDNRDCAEQAPFNPSSPTDDQKQQQSGS

SEQ ID NO: 10782 - DNA, 935 bp, Zea mays subsp. mays
  misc_feature (1)..(935): Ceres Seq. ID no. 12414433
  misc_feature (1)..(935): Ortholog of  Ceres SEQ ID NO 14305398 as cited in SEQ ID NO 60056
agtttatgggctggaatgggccgctcaaactggcccgttacgtgaatttggcggggctgccgctgggatccgagacgtggtggctgcacagcgacgtccgtgggagcgggcgggcgactgcaggcagagggtttcgtccgaaccctagtgtcctccacacgccgtcgccatggccgccgcccgcgccgccctccgcctgcagcgccagtgcctcgccgccaacccctttctcttctccgggcatggcctccgctaccgcaagcttgaggtcatcctcaccacgactattgataagctggggaaagcaggcgaggtggtcaaggtggcgcctggccacttccgcaaccaccttatgcccaagatgctcgcagtcccgaacctggacaaattcgccatactaatccgagagcagcgcaagctctatcaacgcgaagaggaggtcgcggtgaaacaagtcacggagaaagatgatgatgcacggctacaggaagaaagaatgaagcagtaccaaacggcagcaaagcggctagataacgcactcttggtgttgaggaggttcatctcgactggaaacgagctgcgtactcctgtaacaaaagacgaaattgtttccgaggtggcgaggcagctcaacatcaacatccatccggagaacctgcatctgcagtcacctttggcgtcgctcggcgaatttgagttgcccctccggttaccgcagaacataccgtgcccagaaggtaagctccagtggactctgaaggtgaagatcaggagaaaatgagcgcaggaactggggaagtttcttttgcccccccacaatctggtgtatggtaccaaaccattgttagctccgaaacaatggtaccaaaccattggttatgcaagtttagctccgaaacatttttttctgatgtataataaaagagtaaggttgc

SEQ ID NO: 10783 - protein, 203 aa, Zea mays subsp. mays
  peptide (1)..(203): Ceres Seq. ID no. 12414434
MAAARAALRLQRQCLAANPFLFSGHGLRYRKLEVILTTTIDKLGKAGEVVKVAPGHFRNHLMPKMLAVPNLDKFAILIREQRKLYQREEEVAVKQVTEKDDDARLQEERMKQYQTAAKRLDNALLVLRRFISTGNELRTPVTKDEIVSEVARQLNINIHPENLHLQSPLASLGEFELPLRLPQNIPCPEGKLQWTLKVKIRRK

SEQ ID NO: 10784 - protein, 142 aa, Zea mays subsp. mays
  peptide (1)..(142): Ceres Seq. ID no. 12414435
MPKMLAVPNLDKFAILIREQRKLYQREEEVAVKQVTEKDDDARLQEERMKQYQTAAKRLDNALLVLRRFISTGNELRTPVTKDEIVSEVARQLNINIHPENLHLQSPLASLGEFELPLRLPQNIPCPEGKLQWTLKVKIRRK

SEQ ID NO: 10785 - protein, 139 aa, Zea mays subsp. mays
  peptide (1)..(139): Ceres Seq. ID no. 12414436
MLAVPNLDKFAILIREQRKLYQREEEVAVKQVTEKDDDARLQEERMKQYQTAAKRLDNALLVLRRFISTGNELRTPVTKDEIVSEVARQLNINIHPENLHLQSPLASLGEFELPLRLPQNIPCPEGKLQWTLKVKIRRK

SEQ ID NO: 10786 - DNA, 1599 bp, Zea mays subsp. mays
  misc_feature (1)..(1599): Ceres Seq. ID no. 12340954
  misc_feature (1)..(1599): Ortholog of  Ceres SEQ ID NO 13654557 as cited in SEQ ID NO 68444
aggtcgatcactcgctgcgcgcctccacccttttccaccccgccgccgaagccaccgtgccgctagccttccccgccgccgcaaaatggccgcctccgcgcgacccctggttaccgtgagggccctggagggcgacatggccacggactccgccggtgttccgctggcggacgtcctccgcgcaccgatccgcccggacatcgttcgcttcgtccacaagctcctgtcctgcaacagccgccaaccctatgcggtgtcgcgtcgcgccggacaccagacctccgcggagtcctggggcacggggcgtgcggtatcccgtatcccccgcgttcctggcggtggtacccaccgcgccggccagggagcgttcggcaacatgtgtcgtggtggacgcatgttcgcgcccaccaagatctggcgccgctggcaccgtcgcgtcaacatacaccttcgccgtgtcgccatcgcctccgcactctccgccaccgccgttccgtcccttgttctcgcacgtggccaccgcgtggagtctgtgcccgagctcccgctggtcgtttcggactccgcggagtccattgagaagacagcccaggccatcaatatcctcaaacagctcggtgcctacgccgatgctgagaaggccaaggattctgttggcatccgccccggcaagggcaagatgcgcaaccgccgctacatcaatcgtaagggacccctcgttgtctacggcactgagggctctaaggtcgtcaaggcctttcgcaacctccctggcgttgatgttgccaatgtcgagcgcctcaacctgctcgatctcgcccctggtggccaccttggccggttcgtcatctggaccgagtgcgcattcaagaagctggatgaggtgtacggtaccttcaacgcaccatcagcgaagaagaagggtttcgtgctcccgaggcccaagatggcaaacgctgacctatccaggcttatcaactctgacgaggtgcaatctgtagtgaagcccatcaataaggatgtgaagcgtagggagcctaggaagaacccactgaataatatggctgcagtgctcaagctgaacccgtacctcggtactgcacgcaagatggcagccctagccgaggcagcgcgtgtcaaggccaggaagcagaagcttgattccaagaggaccaagctcagcccagaggaggcttctaaggtcaaggctgctggaaaggcgtggtacaagaccatggtttcagacagcgactacacagagtttgagaacttcaccaagtggcttggtgttacacagtgattgtctggtccaacccttattgttttgccaattcagagattatgattttgatcgctgttgtcaaatatcctttgttattggtatattctgacattagttttggctttggtagtttttttttaccgctggatgtttacttccagacacctattacaccttttatggaaacgaagtatatcgattctcaacactcaccgtgcttctgtttttggcagtattggttactcgagtattcatgttcagttgtattagtgtatgcattttctttgtgcccttctgtttgttgggtatataatagt

SEQ ID NO: 10787 - protein, 432 aa, Zea mays subsp. mays
  peptide (1)..(432): Ceres Seq. ID no. 12340955
GRSLAARLHPFPPRRRSHRAASLPRRRKMAASARPLVTVRALEGDMATDSAGVPLADVLRAPIRPDIVRFVHKLLSCNSRQPYAVSRRAGHQTSAESWGTGRAVSRIPRVPGGGTHRAGQGAFGNMCRGGRMFAPTKIWRRWHRRVNIHLRRVAIASALSATAVPSLVLARGHRVESVPELPLVVSDSAESIEKTAQAINILKQLGAYADAEKAKDSVGIRPGKGKMRNRRYINRKGPLVVYGTEGSKVVKAFRNLPGVDVANVERLNLLDLAPGGHLGRFVIWTECAFKKLDEVYGTFNAPSAKKKGFVLPRPKMANADLSRLINSDEVQSVVKPINKDVKRREPRKNPLNNMAAVLKLNPYLGTARKMAALAEAARVKARKQKLDSKRTKLSPEEASKVKAAGKAWYKTMVSDSDYTEFENFTKWLGVTQ

SEQ ID NO: 10788 - protein, 404 aa, Zea mays subsp. mays
  peptide (1)..(404): Ceres Seq. ID no. 12340956
MAASARPLVTVRALEGDMATDSAGVPLADVLRAPIRPDIVRFVHKLLSCNSRQPYAVSRRAGHQTSAESWGTGRAVSRIPRVPGGGTHRAGQGAFGNMCRGGRMFAPTKIWRRWHRRVNIHLRRVAIASALSATAVPSLVLARGHRVESVPELPLVVSDSAESIEKTAQAINILKQLGAYADAEKAKDSVGIRPGKGKMRNRRYINRKGPLVVYGTEGSKVVKAFRNLPGVDVANVERLNLLDLAPGGHLGRFVIWTECAFKKLDEVYGTFNAPSAKKKGFVLPRPKMANADLSRLINSDEVQSVVKPINKDVKRREPRKNPLNNMAAVLKLNPYLGTARKMAALAEAARVKARKQKLDSKRTKLSPEEASKVKAAGKAWYKTMVSDSDYTEFENFTKWLGVTQ

SEQ ID NO: 10789 - protein, 387 aa, Zea mays subsp. mays
  peptide (1)..(387): Ceres Seq. ID no. 12340957
MATDSAGVPLADVLRAPIRPDIVRFVHKLLSCNSRQPYAVSRRAGHQTSAESWGTGRAVSRIPRVPGGGTHRAGQGAFGNMCRGGRMFAPTKIWRRWHRRVNIHLRRVAIASALSATAVPSLVLARGHRVESVPELPLVVSDSAESIEKTAQAINILKQLGAYADAEKAKDSVGIRPGKGKMRNRRYINRKGPLVVYGTEGSKVVKAFRNLPGVDVANVERLNLLDLAPGGHLGRFVIWTECAFKKLDEVYGTFNAPSAKKKGFVLPRPKMANADLSRLINSDEVQSVVKPINKDVKRREPRKNPLNNMAAVLKLNPYLGTARKMAALAEAARVKARKQKLDSKRTKLSPEEASKVKAAGKAWYKTMVSDSDYTEFENFTKWLGVTQ

SEQ ID NO: 10790 - DNA, 645 bp, Zea mays subsp. mays
  misc_feature (1)..(645): Ceres Seq. ID no. 12405959
  misc_feature (1)..(645): Ortholog of  Ceres SEQ ID NO 15175545 as cited in SEQ ID NO 0
tatccagtcgcatctccctctccgaaatcaaggtagcgtacaccgctgcagtttctagagccctctctgccactcgtgatcccactagtcacaatgcctgccctcgccaagcccgcctcccgcaccgccaagcccgccgcggctccgaagccgaagcctgccgccgccaagccgaaggcggccaccgctggtgcctcccacccgccttacttcgagatgatcaaggaggctatcacggcgctcaaggagagggcaggcattgtgactagtgggatcccaaggtgtctggccatgatttggctcgttgggtcgaaaaggaaaagcaaatgattgacaaggagatggagcgaggggtggtctaccttatgggggaagccaatgtcattgcaggaccagaatcatctgccgcaaagaagatagtggtagactatgtctacgcattcttgaggaagaacttgacggagggggagaaggtgctctccattccgaaagaccaactactcaaagtagggataacatacgagatatagggattatgctgggcctcaagttacaatcctatgtatcaacttggcctttagtcataaagtttatgtatatcgagagattcaagattcaatgtaaattattcaattttattccttc

SEQ ID NO: 10791 - protein, 88 aa, Zea mays subsp. mays
  peptide (1)..(88): Ceres Seq. ID no. 12405960
SSRISLSEIKVAYTAAVSRALSATRDPTSHNACPRQARLPHRQARRGSEAEACRRQAEGGHRWCLPPALLRDDQGGYHGAQGEGRHCD

SEQ ID NO: 10792 - protein, 78 aa, Zea mays subsp. mays
  peptide (1)..(78): Ceres Seq. ID no. 12405961
MPALAKPASRTAKPAAAPKPKPAAAKPKAATAGASHPPYFEMIKEAITALKERAGIVTSGIPRCLAMIWLVGSKRKSK

SEQ ID NO: 10793 - protein, 67 aa, Zea mays subsp. mays
  peptide (1)..(67): Ceres Seq. ID no. 12405962
MIDKEMERGVVYLMGEANVIAGPESSAAKKIVVDYVYAFLRKNLTEGEKVLSIPKDQLLKVGITYEI

SEQ ID NO: 10794 - DNA, 1005 bp, Zea mays subsp. mays
  misc_feature (1)..(1005): Ceres Seq. ID no. 12413435
  misc_feature (1)..(1005): Ortholog of  Ceres SEQ ID NO 13594671 as cited in SEQ ID NO 51800
  misc_feature (1)..(1005): Ortholog of  Ceres SEQ ID NO 12784099 as cited in SEQ ID NO 66784
ctcgcatcgcatcgatcctcccatctgcgcacccgcaagcctattctccgcacctcctcaggtgaccgggaagatgatgccgttgagccaaaccgacttctcgccgtcgcagttcacctcctcccagaatgccgccgccgactccaccacgccttccaagatgcgcggcgcgtccagcaccatgccgctcaccgtgaagcaggtcgtcgacgcgcagcagtctggcacgggcgagaagggcgctccgttcatcgtcaatggcgtcgagatggctaacattcgacttgtggggatggtcaatgccaaggtggagcggacgaccgatgtgaccttcacgctcgacgatggcaccggccgcctcgatttcatcagatgggtgaatgatgcttcagattcttttgaaactgctgctattcagaatggtatgtacattgcggtcattggaagcctcaagggactgcaagagaggaagcgtgctactgctttctcaatcaggcctataaccgatttcaatgaggttacgctgcatttcattcagtgtgttcggatgcatatagagaacattgaattaaaggctggcagtcctgcacgaatcagttcttctatgggagtgtcattctcaaatggattcagtgaatcaagcacaccgacatctttgaaatccagtcccgcaccggtgaccagcgggtcatccgatactgatctgcacacgcaggtcctgaatttttttaatgaaccagcgaacctcgagagtgagcatggggtgcacgttgatgaagtactcaagcggttcaaacttttgccgaagaagcagatcacggatgctattgattacaatatggactcggggcgtctttactcaacaattgatgaattccactacaaggcaacttaaccgatttgaaggccagcctgctggaaatggcagaggactaagtatcacttgtactaaaccaaagtctggaaatgtcatgttgtgtcatgaaatgcatggttggtttatgg

SEQ ID NO: 10795 - protein, 297 aa, Zea mays subsp. mays
  peptide (1)..(297): Ceres Seq. ID no. 12413436
SHRIDPPICAPASLFSAPPQVTGKMMPLSQTDFSPSQFTSSQNAAADSTTPSKMRGASSTMPLTVKQVVDAQQSGTGEKGAPFIVNGVEMANIRLVGMVNAKVERTTDVTFTLDDGTGRLDFIRWVNDASDSFETAAIQNGMYIAVIGSLKGLQERKRATAFSIRPITDFNEVTLHFIQCVRMHIENIELKAGSPARISSSMGVSFSNGFSESSTPTSLKSSPAPVTSGSSDTDLHTQVLNFFNEPANLESEHGVHVDEVLKRFKLLPKKQITDAIDYNMDSGRLYSTIDEFHYKAT

SEQ ID NO: 10796 - protein, 273 aa, Zea mays subsp. mays
  peptide (1)..(273): Ceres Seq. ID no. 12413437
MMPLSQTDFSPSQFTSSQNAAADSTTPSKMRGASSTMPLTVKQVVDAQQSGTGEKGAPFIVNGVEMANIRLVGMVNAKVERTTDVTFTLDDGTGRLDFIRWVNDASDSFETAAIQNGMYIAVIGSLKGLQERKRATAFSIRPITDFNEVTLHFIQCVRMHIENIELKAGSPARISSSMGVSFSNGFSESSTPTSLKSSPAPVTSGSSDTDLHTQVLNFFNEPANLESEHGVHVDEVLKRFKLLPKKQITDAIDYNMDSGRLYSTIDEFHYKAT

SEQ ID NO: 10797 - protein, 272 aa, Zea mays subsp. mays
  peptide (1)..(272): Ceres Seq. ID no. 12413438
MPLSQTDFSPSQFTSSQNAAADSTTPSKMRGASSTMPLTVKQVVDAQQSGTGEKGAPFIVNGVEMANIRLVGMVNAKVERTTDVTFTLDDGTGRLDFIRWVNDASDSFETAAIQNGMYIAVIGSLKGLQERKRATAFSIRPITDFNEVTLHFIQCVRMHIENIELKAGSPARISSSMGVSFSNGFSESSTPTSLKSSPAPVTSGSSDTDLHTQVLNFFNEPANLESEHGVHVDEVLKRFKLLPKKQITDAIDYNMDSGRLYSTIDEFHYKAT

SEQ ID NO: 10798 - DNA, 957 bp, Zea mays subsp. mays
  misc_feature (1)..(957): Ceres Seq. ID no. 12345627
  misc_feature (1)..(957): Ortholog of  Ceres SEQ ID NO 14313362 as cited in SEQ ID NO 66766
aggagctgcccttcctcgtcttccacgctcgtcagtcatcagcatctcagcacccagagtcgacaaaattgaagaacatctagccggcgaaacatgagggggaagctcgacgagtgctgggacgagtgctgcgacaagtggggcgagtggaagtactgcctgctgtgcctcggcatcgtggtggccatcgtcctcatcgtggtgttcgtcgccgccttcggtttcgtgcgccacatcgacgtctccgtggacgacgcttcgctgacgcggttcgagctggcgacgtcgccggtgacgtcgctgtcgtacaacctgtccgtgaccctggtgatccgcaacccgaactgggccatgagcctcaagaacaccaagccgctggaggcgcagtacaagttcgacgaccagatgttcgaccgcttccagctggccgacaagggcgacaagcaccccgcccggcaagaccagagtgtaccacatcgcgcccccgggcacgacgagtagcgtcatgctcgggaacgccggcgaggccgagttccggaaggagaacgccacggggacgttccaggtggaggtggccgtcgacggggaggtgcgctacacggcgcgctacaccaagtgcaagatccaggcgtcgtgcccgctcaagctgcagctggcgccgccgggcaccgccgccgtcgtgttccagaaggtcacgtgcaagctcgccaaggcggagaagaactgttagatctagcttgcatagctggtggcatggcacacaagccttattgcattgcgttcgtgttgcgcggttttgtattcgtccatcggtggtggcgacgatttgattatgtttgttgacttttgttctgattgctgtgtgtggtgtgctcggttaatcaggatttctgctgtctgtacccgtgtgattgcaattttgcgcggaatgtgatctgtttcagctcagtttgtctg

SEQ ID NO: 10799 - protein, 135 aa, Zea mays subsp. mays
  peptide (1)..(135): Ceres Seq. ID no. 12345628
MRGKLDECWDECCDKWGEWKYCLLCLGIVVAIVLIVVFVAAFGFVRHIDVSVDDASLTRFELATSPVTSLSYNLSVTLVIRNPNWAMSLKNTKPLEAQYKFDDQMFDRFQLADKGDKHPARQDQSVPHRAPGHDE

SEQ ID NO: 10800 - protein, 74 aa, Zea mays subsp. mays
  peptide (1)..(74): Ceres Seq. ID no. 12345629
MLGNAGEAEFRKENATGTFQVEVAVDGEVRYTARYTKCKIQASCPLKLQLAPPGTAAVVFQKVTCKLAKAEKNC

SEQ ID NO: 10801 - DNA, 1462 bp, Zea mays subsp. mays
  misc_feature (1)..(1462): Ceres Seq. ID no. 13579635
  misc_feature (1)..(1462): Ortholog of  Ceres SEQ ID NO 13596039 as cited in SEQ ID NO 62117
cccaacctcatcttctctccctttgctcggaacgcacacaccgcccggtctccgatctccgatccccgatcccctcgtcgatccaagatgcagatcttcgtcaagactctcactggaaagactatcaccctcgaggtggagtcctctgacaccattgacaacgtcaaggccaagatccaggacaaggaaggcattcccccggaccagcagcggctcatcttcgctggcaagcagctcgaggacgggcgcacacttgccgactacaacatccagaaggagagcaccctccaccttgttctccgcctcaggggaggcatgcagatcttcgtcaagaccctcactggaaagactatcaccctcgaggtggagtcttctgacaccatcgacaacgtcaaggccaagatccaggacaaggaggggattcctccggaccagcagcgcctgatctttgctggcaagcagctcgaggacgggcgcacgctggccgactacaacattcagaaggagagcaccctccacttggtgttgcgtctcaggggcggcatgcagatcttcgtgaagactctgactggcaagactatcacccttgaggtcgagtcttctgataccattgacaatgtcaaggccaagatccaggacaaggagggcatccctccggaccagcagcggctcatttttgccggcaagcagctcgaggacgggcgcacgcttgccgactacaacattcagaaggagagcaccctccacttggtgctgcgtctcaggggtggcatgcagatcttcgtgaagacacttactggcaagacgatcacccttgaggtggagtcctcggacaccatcgacaatgtcaaggccaagatccaggacaaggagggcattccaccggaccagcagcgcctgatctttgctggcaagcagctggaggatggccgtaccctcgccgactacaacatccagaaggagagcaccctccacctggtcgtccgcttgcgaggtggtatgcagatctttgtgaagaccttgactggcaagaccataaccctggaggttgagagctccgacaccatcgacaacgtgaaggcgaagatccaggacaaagagggcatccctccagaccagcagcgtctgatctttgccggcaagcagctggaggatggccgcaccctagcagactacaacatccagaaggagagcactctccacctggtgctccgcctccgcggtggtcagtaagccatggttcatttaagctgctgctgtacctgggtatctgcgtcgtctggtgccctctggtgtacctctatatggatgtcgtcgtctaataaacatctgtggtttgtgtgtcatgaatcgtggttgtggcttcgttggtttaatggacctgttgtgtcctctgtgttgtacccaaaactcttctgcagcagtatggcttgaatccttatgaagtttgatatttgaactt

SEQ ID NO: 10802 - protein, 410 aa, Zea mays subsp. mays
  peptide (1)..(410): Ceres Seq. ID no. 13579636
PNLIFSPFARNAHTARSPISDPRSPRRSKMQIFVKTLTGKTITLEVESSDTIDNVKAKIQDKEGIPPDQQRLIFAGKQLEDGRTLADYNIQKESTLHLVLRLRGGMQIFVKTLTGKTITLEVESSDTIDNVKAKIQDKEGIPPDQQRLIFAGKQLEDGRTLADYNIQKESTLHLVLRLRGGMQIFVKTLTGKTITLEVESSDTIDNVKAKIQDKEGIPPDQQRLIFAGKQLEDGRTLADYNIQKESTLHLVLRLRGGMQIFVKTLTGKTITLEVESSDTIDNVKAKIQDKEGIPPDQQRLIFAGKQLEDGRTLADYNIQKESTLHLVVRLRGGMQIFVKTLTGKTITLEVESSDTIDNVKAKIQDKEGIPPDQQRLIFAGKQLEDGRTLADYNIQKESTLHLVLRLRGGQ

SEQ ID NO: 10803 - protein, 381 aa, Zea mays subsp. mays
  peptide (1)..(381): Ceres Seq. ID no. 13579637
MQIFVKTLTGKTITLEVESSDTIDNVKAKIQDKEGIPPDQQRLIFAGKQLEDGRTLADYNIQKESTLHLVLRLRGGMQIFVKTLTGKTITLEVESSDTIDNVKAKIQDKEGIPPDQQRLIFAGKQLEDGRTLADYNIQKESTLHLVLRLRGGMQIFVKTLTGKTITLEVESSDTIDNVKAKIQDKEGIPPDQQRLIFAGKQLEDGRTLADYNIQKESTLHLVLRLRGGMQIFVKTLTGKTITLEVESSDTIDNVKAKIQDKEGIPPDQQRLIFAGKQLEDGRTLADYNIQKESTLHLVVRLRGGMQIFVKTLTGKTITLEVESSDTIDNVKAKIQDKEGIPPDQQRLIFAGKQLEDGRTLADYNIQKESTLHLVLRLRGGQ

SEQ ID NO: 10804 - protein, 305 aa, Zea mays subsp. mays
  peptide (1)..(305): Ceres Seq. ID no. 13579638
MQIFVKTLTGKTITLEVESSDTIDNVKAKIQDKEGIPPDQQRLIFAGKQLEDGRTLADYNIQKESTLHLVLRLRGGMQIFVKTLTGKTITLEVESSDTIDNVKAKIQDKEGIPPDQQRLIFAGKQLEDGRTLADYNIQKESTLHLVLRLRGGMQIFVKTLTGKTITLEVESSDTIDNVKAKIQDKEGIPPDQQRLIFAGKQLEDGRTLADYNIQKESTLHLVVRLRGGMQIFVKTLTGKTITLEVESSDTIDNVKAKIQDKEGIPPDQQRLIFAGKQLEDGRTLADYNIQKESTLHLVLRLRGGQ

SEQ ID NO: 10805 - DNA, 1984 bp, Zea mays subsp. mays
  misc_feature (1)..(1984): Ceres Seq. ID no. 12405663
  misc_feature (1)..(1984): Ortholog of  Ceres SEQ ID NO 15172174 as cited in SEQ ID NO 60481
  misc_feature (1)..(1984): Ortholog of  Ceres SEQ ID NO 15176081 as cited in SEQ ID NO 65838
  misc_feature (1)..(1984): Ortholog of  Ceres SEQ ID NO 14302875 as cited in SEQ ID NO 66242
  misc_feature (1)..(1984): Ortholog of  Ceres SEQ ID NO 13660287 as cited in SEQ ID NO 67316
  misc_feature (1)..(1984): Ortholog of  Ceres SEQ ID NO 14307892 as cited in SEQ ID NO 67490
agtccgtagccgcttgccctgttcgcatcttcgcgcgtggcgcacaccgctccagctctccttcgacgggcacggccgagccgccttcgtcttggccgcagcggtgcgcgctctccatggcgtcctaattagcctagccgcaacgccgcgcccgtgcctgcgaagtagggtgtaaagttttgtatatgatgccaggcatggatgaaccccttcttggcaatggtcttaagaccagcgggaaaagagagagcctggtagtggccgaggtcagaaaacagatgtaccttgctgggccactcatcgctgcatggatcctacagaacattgtccagatgatatctatcatgtttgtcggtcaccttggtgagcttgccctctccagtgcctccatcgccacctcctttgcaggcgttactggcttcagcttattgtctggcatggcgagcagcttggacacactgtgtgggcaatcgttcggggcaaagcagtactatcttcttggcatctacaagcagagggcaatccttgtgctcactctagtcagccttgtggttgcgattatttggtcatacactggacagatccttctactctttggtcaggatccagagattgcagctggggcagggagctatatccggtggatgattcctgcgctatttgtgtatggtccactacagtgccatgtccggtttctgcaaacgcagaacatagtcctcccagtgatgctgagctcaggtgccacagcactgaaccatctgctggtgtgctggctgctggtgtacaagattggtatgggcaacaagggtgctgccttggccaatgccatctcatactttaccaatgtatcaatcctggcaatttacgtcaggcttgcaccagcctgtagaaacacctggagagggttctcaaaggaggcttttcatgacataaccagcttcttgaggcttggtattccatctgcgctgatggtttgcttggagtggtggtcatttgagctcctggtacttctttctggacttctccccaatccaaagcttgagacatcggttttgtccatttccttaaacacaggctctttagcgtttatgatcccttttgggcttagcgcagccataagcacccgtgtttcaaatgaacttggtgctgggcgaccccatgctgcccatctggctacccgtgtggtcatggtgctggccatcgtggttggcgtattaatcggactagctatgattttggtgcgcaatatctgggggtatgcatacagtaatgagaaggaggtggtcaaatacatctccaaaatgatgccgatcctagccgtgtcattcttgttcgattgcgtgcagtgtgttctttcaggtgttgctaggggctgtggatggcaaaagattggggcttgtgttaatcttggtgcatactaccttataggaattccagctgccttctgtttcgcctttatgtaccatctaggtggaatgggactttggttgggaataatctgcgcactcgtcatacagatgctattgcttctcacaattaccttgtgcagcaactgggagaaagaagctttgaaggcaaaggacagagtatttagtacatccgtaccagctgacatgatgacatgatatttctgaagatatttttttgaaggaaatgcccatgaaactttgccaaggaacatactaagaattggttgttcagattcaaggcctttctccatgccatcagaatgatgcttgggtctagtaatagctcctgagcagtctgttttttacttttggtcaatactcaatacatggaagatgtttggtttgaagaaccacgccatcctagatgaggtggtatattataagttgatataacggctccatactagttattgaggaatgagacgatgattatctcatgtaataataatgcttttccccctctagttattgatgtaagacaattgaggcaaatgaacaaaatgtcacatttgatt

SEQ ID NO: 10806 - protein, 479 aa, Zea mays subsp. mays
  peptide (1)..(479): Ceres Seq. ID no. 12405664
MMPGMDEPLLGNGLKTSGKRESLVVAEVRKQMYLAGPLIAAWILQNIVQMISIMFVGHLGELALSSASIATSFAGVTGFSLLSGMASSLDTLCGQSFGAKQYYLLGIYKQRAILVLTLVSLVVAIIWSYTGQILLLFGQDPEIAAGAGSYIRWMIPALFVYGPLQCHVRFLQTQNIVLPVMLSSGATALNHLLVCWLLVYKIGMGNKGAALANAISYFTNVSILAIYVRLAPACRNTWRGFSKEAFHDITSFLRLGIPSALMVCLEWWSFELLVLLSGLLPNPKLETSVLSISLNTGSLAFMIPFGLSAAISTRVSNELGAGRPHAAHLATRVVMVLAIVVGVLIGLAMILVRNIWGYAYSNEKEVVKYISKMMPILAVSFLFDCVQCVLSGVARGCGWQKIGACVNLGAYYLIGIPAAFCFAFMYHLGGMGLWLGIICALVIQMLLLLTITLCSNWEKEALKAKDRVFSTSVPADMMT

SEQ ID NO: 10807 - protein, 478 aa, Zea mays subsp. mays
  peptide (1)..(478): Ceres Seq. ID no. 12405665
MPGMDEPLLGNGLKTSGKRESLVVAEVRKQMYLAGPLIAAWILQNIVQMISIMFVGHLGELALSSASIATSFAGVTGFSLLSGMASSLDTLCGQSFGAKQYYLLGIYKQRAILVLTLVSLVVAIIWSYTGQILLLFGQDPEIAAGAGSYIRWMIPALFVYGPLQCHVRFLQTQNIVLPVMLSSGATALNHLLVCWLLVYKIGMGNKGAALANAISYFTNVSILAIYVRLAPACRNTWRGFSKEAFHDITSFLRLGIPSALMVCLEWWSFELLVLLSGLLPNPKLETSVLSISLNTGSLAFMIPFGLSAAISTRVSNELGAGRPHAAHLATRVVMVLAIVVGVLIGLAMILVRNIWGYAYSNEKEVVKYISKMMPILAVSFLFDCVQCVLSGVARGCGWQKIGACVNLGAYYLIGIPAAFCFAFMYHLGGMGLWLGIICALVIQMLLLLTITLCSNWEKEALKAKDRVFSTSVPADMMT

SEQ ID NO: 10808 - protein, 475 aa, Zea mays subsp. mays
  peptide (1)..(475): Ceres Seq. ID no. 12405666
MDEPLLGNGLKTSGKRESLVVAEVRKQMYLAGPLIAAWILQNIVQMISIMFVGHLGELALSSASIATSFAGVTGFSLLSGMASSLDTLCGQSFGAKQYYLLGIYKQRAILVLTLVSLVVAIIWSYTGQILLLFGQDPEIAAGAGSYIRWMIPALFVYGPLQCHVRFLQTQNIVLPVMLSSGATALNHLLVCWLLVYKIGMGNKGAALANAISYFTNVSILAIYVRLAPACRNTWRGFSKEAFHDITSFLRLGIPSALMVCLEWWSFELLVLLSGLLPNPKLETSVLSISLNTGSLAFMIPFGLSAAISTRVSNELGAGRPHAAHLATRVVMVLAIVVGVLIGLAMILVRNIWGYAYSNEKEVVKYISKMMPILAVSFLFDCVQCVLSGVARGCGWQKIGACVNLGAYYLIGIPAAFCFAFMYHLGGMGLWLGIICALVIQMLLLLTITLCSNWEKEALKAKDRVFSTSVPADMMT

SEQ ID NO: 10809 - DNA, 1867 bp, Zea mays subsp. mays; identical to SEQ ID NO: 5557
  misc_feature (1)..(1867): Ceres Seq. ID no. 12595058
  misc_feature (1)..(1867): Ortholog of  Ceres SEQ ID NO 15176433 as cited in SEQ ID NO 59539

SEQ ID NO: 10810 - protein, 245 aa, Zea mays subsp. mays; identical to SEQ ID NO: 5558
  peptide (1)..(245): Ceres Seq. ID no. 12595059

SEQ ID NO: 10811 - protein, 227 aa, Zea mays subsp. mays; identical to SEQ ID NO: 5559
  peptide (1)..(227): Ceres Seq. ID no. 12595060

SEQ ID NO: 10812 - protein, 214 aa, Zea mays subsp. mays; identical to SEQ ID NO: 5560
  peptide (1)..(214): Ceres Seq. ID no. 12595061

SEQ ID NO: 10813 - protein, 173 aa, Zea mays subsp. mays; identical to SEQ ID NO: 5561
  peptide (1)..(173): Ceres Seq. ID no. 12595062

SEQ ID NO: 10814 - DNA, 1711 bp, Zea mays subsp. mays
  misc_feature (1)..(1711): Ceres Seq. ID no. 12361402
  misc_feature (1)..(1711): Ortholog of  Ceres SEQ ID NO 12372734 as cited in SEQ ID NO 1206
  misc_feature (1)..(1711): Ortholog of  Ceres SEQ ID NO 13584160 as cited in SEQ ID NO 63677
aactaaccagctccggcccaaacacagccacgagcacctacacccccccgctgtcacctctccttccatcgccacaggcggcccttctccgcggaagccggcgggccgccgcctcccttacccctctcgctgtgctcctccgcaccgtcattccctagcattccccacgggcgaggtaaagaaacattctcccaccccctccagccccataggtgccaccgggatttctcttgcggttgcttggcccagatctgcggcgcattcggcgtttctgatctcgcgtgcacctcgtttccctcggcggtggatcagtggcggcttggtcgagatgggcgatgcggttgatgacatcatctgtgcaacggatgcggcggtcgccgtcgaggatgcggccagtgggaagcccgcaatgctctctagcttaggggggcagggtgaggaagagcatgaggagaaggacaatgaggacaagtcaggcgagagcgaggtgatcaacccgccagaagacgctggcggggaggccacctcacccctggaagggttgaagcctcgcctttccaaggggaatcaaagccatggacctaatgctgtcaaatcaaagagcccaacgagtggagacgaaggtcagacgaggaaaaaggctcccaattcttctcttcctaaggcacccattgtccaggtgtcccatggtgacgctggtgtcggcagtaataaagatggcaagaatgagtctcgctcatcttccgtggatgcaacattgctggatgactccaaggagaaaaggaaaactcaaaagccattagcacagctcttttccatcaaaagtgacgaagaacagtcaaatggtgagagtgcaaagcctcgaaaagttggcagcattccatcatatggtttcaccttcaagtgtgatgagagatctgaaaaaagaagagagttctattcgaagcttgaggagaagattcatgcaagagagttagaaataagcaatttgcaagcgaaatcaaaggaaactgaagaagcagaactcaaaatgctgagaaagagtttgaacttcaaggcaacaccaatgccaagcttctataaggaaccaactcctgtcaaggttgaattgaaaaagatccccccaacaagagccaaatcgccaaagtttggtcgttctaaaaacaagtccacaccagagactgaagaaaatgctaccgcggaccagcctgcccacctgagcctcgaggagaatgtttctcaaaccggtgtgaaaaaaccaaccccgttgaatccagcaaagaagccccagaggaagtcactccccagactgccatctgaagaaaccggtccgcttgatgccacctcaaggcaacttataaagagcgccaagctggatgcagttagtgctccggagacaggatcagctacaggacaggcacaactacaaggaagtcagacggaaacagattctggtcaggggccagttgaagctggagctaatcctgatgaacaagacgccagcgaacagagtgttgtttagtgaagatcacgatgaccaaaccagctgatttgtgatgtgcatggtgttcctcggctttgtataatattgtgcttgcctgctagagtaacctgtagtctgtattatgttatgtgatatatactactactcctggtttattttcctggaattgagccgtatgttgcttatcaatctagatagcttttgttc

SEQ ID NO: 10815 - protein, 506 aa, Zea mays subsp. mays
  peptide (1)..(506): Ceres Seq. ID no. 12361403
TNQLRPKHSHEHLHPPAVTSPSIATGGPSPRKPAGRRLPYPSRCAPPHRHSLAFPTGEVKKHSPTPSSPIGATGISLAVAWPRSAAHSAFLISRAPRFPRRWISGGLVEMGDAVDDIICATDAAVAVEDAASGKPAMLSSLGGQGEEEHEEKDNEDKSGESEVINPPEDAGGEATSPLEGLKPRLSKGNQSHGPNAVKSKSPTSGDEGQTRKKAPNSSLPKAPIVQVSHGDAGVGSNKDGKNESRSSSVDATLLDDSKEKRKTQKPLAQLFSIKSDEEQSNGESAKPRKVGSIPSYGFTFKCDERSEKRREFYSKLEEKIHARELEISNLQAKSKETEEAELKMLRKSLNFKATPMPSFYKEPTPVKVELKKIPPTRAKSPKFGRSKNKSTPETEENATADQPAHLSLEENVSQTGVKKPTPLNPAKKPQRKSLPRLPSEETGPLDATSRQLIKSAKLDAVSAPETGSATGQAQLQGSQTETDSGQGPVEAGANPDEQDASEQSVV

SEQ ID NO: 10816 - protein, 397 aa, Zea mays subsp. mays
  peptide (1)..(397): Ceres Seq. ID no. 12361404
MGDAVDDIICATDAAVAVEDAASGKPAMLSSLGGQGEEEHEEKDNEDKSGESEVINPPEDAGGEATSPLEGLKPRLSKGNQSHGPNAVKSKSPTSGDEGQTRKKAPNSSLPKAPIVQVSHGDAGVGSNKDGKNESRSSSVDATLLDDSKEKRKTQKPLAQLFSIKSDEEQSNGESAKPRKVGSIPSYGFTFKCDERSEKRREFYSKLEEKIHARELEISNLQAKSKETEEAELKMLRKSLNFKATPMPSFYKEPTPVKVELKKIPPTRAKSPKFGRSKNKSTPETEENATADQPAHLSLEENVSQTGVKKPTPLNPAKKPQRKSLPRLPSEETGPLDATSRQLIKSAKLDAVSAPETGSATGQAQLQGSQTETDSGQGPVEAGANPDEQDASEQSVV

SEQ ID NO: 10817 - protein, 370 aa, Zea mays subsp. mays
  peptide (1)..(370): Ceres Seq. ID no. 12361405
MLSSLGGQGEEEHEEKDNEDKSGESEVINPPEDAGGEATSPLEGLKPRLSKGNQSHGPNAVKSKSPTSGDEGQTRKKAPNSSLPKAPIVQVSHGDAGVGSNKDGKNESRSSSVDATLLDDSKEKRKTQKPLAQLFSIKSDEEQSNGESAKPRKVGSIPSYGFTFKCDERSEKRREFYSKLEEKIHARELEISNLQAKSKETEEAELKMLRKSLNFKATPMPSFYKEPTPVKVELKKIPPTRAKSPKFGRSKNKSTPETEENATADQPAHLSLEENVSQTGVKKPTPLNPAKKPQRKSLPRLPSEETGPLDATSRQLIKSAKLDAVSAPETGSATGQAQLQGSQTETDSGQGPVEAGANPDEQDASEQSVV

SEQ ID NO: 10818 - DNA, 1185 bp, Zea mays subsp. mays
  misc_feature (1)..(1185): Ceres Seq. ID no. 12412074
  misc_feature (1)..(1185): Ortholog of  Ceres SEQ ID NO 12607536 as cited in SEQ ID NO 55306
  misc_feature (1)..(1185): Ortholog of  Ceres SEQ ID NO 15168443 as cited in SEQ ID NO 57116
aattaggcccgcaaacaacaccgctagccatgtggcgccgcgcctcccacctcctcatccgcaccgccgccgccgccgccgccccgacccgccgcctcccacttcctcacccgccgctacccatcgccccaagagtggcctccgcatcctcatcctatgccacagcggtcgcggcgagggcaccgcggacggtagggaccctgctgcggctcaacgacctgtgtgacaacccgggcgcgcggaagcagaagacgcgcaagggacgcgggatcggctccggcaaggggaagacggcgggacgcgggccacaaggggcagaaagcgcgaggcaccgctaggttcggcttcgagggtggccagaccctgctccgccgccgcctgccccgccgtggattcaagaaccccttctcactcacatttcagccctgtggactggggaaaattgcaaaactcataaatgctgggaaaattgattcctctgaattgattaccatgaagacactaaaggaaacaggtgccattgggaagcaaataaaagattgaattcgtttaatgggccgtggagcagaagaaatcaaatggcctattcaccttgaggtgtcaagggcaactgcaagggccaaagctgccgtggaagctgctggtgggacagtaaggctggtgtactacaacaaacttggattccgggcactcctgaaacctgagtggtttgagaagaagggccgcctgttaccaaaagcagcaaggcctccacccaagcagcgagataaggtcgatagcattggccgcctgcccgcgccgacaaagccactccccttcacggtagaggagctggagtttgcagcccagcgtgaggctgcccgcgtgactgcataagatgggagcacgttggcagcacctttttttctgaaagcatgcgccactggatgtgtatcacattagctttagcaggacatgcataagaatggaccgttttgtcttttttttttcttttccctcaaggaatggactgttataaattaaatatccattcattggaatcagatgttgctgtaatttctgaacttaccttggggttttgattgataaatgccattttttctgaataggctcatgtatgatgtcattttacctgccaccttttgatcctgtaatgacaattgagaaatgccgtttatttctgtg

SEQ ID NO: 10819 - protein, 111 aa, Zea mays subsp. mays
  peptide (1)..(111): Ceres Seq. ID no. 12412075
LGPQTTPLAMWRRASHLLIRTAAAAAAPTRRLPLPHPPLPIAPRVASASSSYATAVAARAPRTVGTLLRLNDLCDNPGARKQKTRKGRGIGSGKGKTAGRGPQGAESARHR

SEQ ID NO: 10820 - protein, 107 aa, Zea mays subsp. mays
  peptide (1)..(107): Ceres Seq. ID no. 12412076
MGRGAEEIKWPIHLEVSRATARAKAAVEAAGGTVRLVYYNKLGFRALLKPEWFEKKGRLLPKAARPPPKQRDKVDSIGRLPAPTKPLPFTVEELEFAAQREAARVTA

SEQ ID NO: 10821 - protein, 102 aa, Zea mays subsp. mays
  peptide (1)..(102): Ceres Seq. ID no. 12412077
MWRRASHLLIRTAAAAAAPTRRLPLPHPPLPIAPRVASASSSYATAVAARAPRTVGTLLRLNDLCDNPGARKQKTRKGRGIGSGKGKTAGRGPQGAESARHR

SEQ ID NO: 10822 - DNA, 1606 bp, Zea mays subsp. mays
  misc_feature (1)..(1606): Ceres Seq. ID no. 12340958
  misc_feature (1)..(1606): Ortholog of  Ceres SEQ ID NO 14302251 as cited in SEQ ID NO 62093
attcggatcgtgccgctgccgctcttcccttctcgtctagtcttgtttttctttcctcctctgttactccacctacagacctactactgccatcgggagggtaagctcttcggagccggagccgggtccacgttaacgccatcgagcgctgcgatgggcagcttaggagggagcgccggtgctggggacggcggcaaggtcgggctgccggcgcttgacgtgacgctcgcgttcccgcaggccacgccctcatcgctcttcccgccagccgtttcggactactaccaatttgatgatttgctgactgatgaagagaaggcactcaggaagaaggtccgaggtatcatggaaaaggaaattgcgcccattatgactgagtactgggagaaggctgaattcccattccatgccattcccagccttgccagtcttggtttagctggtggtacaataaaggggtatgggtgccctggactctcgcttacagctagtgctatttcgatagcagaagttgcacgggtcgatgcgagctgctccacatttattctagtgcactcctcgttggctatgtccacaattgccctttgtggatctgaggctcaaaagcagaaatacttaccatctcttacccagttcaaaactattggttgctgggcattgacagagccagattatggaagtgatgcaagctccctaaggactgcagcaaccaaggtacctggtggttggcatttagatggacaaaaacgctggataggtaacagcacttttgcagatgtcctcatcattttggctaggaatgcagatacaaaccaactaaatggatttattgtaaagaaaggagctcccggtctaaaagccacaaaaattgaaaataaaattggactcagaatggttcaaaatggagacataattctaaataaagtatttgtccctgaggaagacagattaacaggcatcaattcatttcaggatataaacaaggtcctcgctatgtctcgaattatggtggcatggcaaccaataggcatatcaatgggagtttatgacatctgccatcggtatttgaaagaaagaaagcaatttggagctccactggcagcttttcagctcaatcaagaaaagcttgtccgcatgcttggcaacattcaggctatgcttctcgttggatggcgactgtgcaagctgtatgagtcaggcaaaatgacaccaggccggtctagtttaggcaaggcatggacgtccaagaaggccagggaggtggtttctcttgggcgagagctactgggtggcaatggcattttggttgattttcttgtcgccaaggcattttgtgacgtggagcccattttctcgtacgagggcacctatgacattaatagcctggtggctggcagagagatcaccgggatcgcgagcttcaagcctgctgtgtcagcaaaatcacgcctgtgaaagttgtttttttctttgttccccaatgaagacagtagaaatcaaccttatacattcagatgattgggaataagaacggtaggaaagctgtaaaactcgacgtgcttcctcgtatgtactgttctgtttcaaattattcgacgttttgtcg

SEQ ID NO: 10823 - protein, 484 aa, Zea mays subsp. mays
  peptide (1)..(484): Ceres Seq. ID no. 12340959
IRIVPLPLFPSRLVLFFFPPLLLHLQTYYCHREGKLFGAGAGSTLTPSSAAMGSLGGSAGAGDGGKVGLPALDVTLAFPQATPSSLFPPAVSDYYQFDDLLTDEEKALRKKVRGIMEKEIAPIMTEYWEKAEFPFHAIPSLASLGLAGGTIKGYGCPGLSLTASAISIAEVARVDASCSTFILVHSSLAMSTIALCGSEAQKQKYLPSLTQFKTIGCWALTEPDYGSDASSLRTAATKVPGGWHLDGQKRWIGNSTFADVLIILARNADTNQLNGFIVKKGAPGLKATKIENKIGLRMVQNGDIILNKVFVPEEDRLTGINSFQDINKVLAMSRIMVAWQPIGISMGVYDICHRYLKERKQFGAPLAAFQLNQEKLVRMLGNIQAMLLVGWRLCKLYESGKMTPGRSSLGKAWTSKKAREVVSLGRELLGGNGILVDFLVAKAFCDVEPIFSYEGTYDINSLVAGREITGIASFKPAVSAKSRL

SEQ ID NO: 10824 - protein, 433 aa, Zea mays subsp. mays
  peptide (1)..(433): Ceres Seq. ID no. 12340960
MGSLGGSAGAGDGGKVGLPALDVTLAFPQATPSSLFPPAVSDYYQFDDLLTDEEKALRKKVRGIMEKEIAPIMTEYWEKAEFPFHAIPSLASLGLAGGTIKGYGCPGLSLTASAISIAEVARVDASCSTFILVHSSLAMSTIALCGSEAQKQKYLPSLTQFKTIGCWALTEPDYGSDASSLRTAATKVPGGWHLDGQKRWIGNSTFADVLIILARNADTNQLNGFIVKKGAPGLKATKIENKIGLRMVQNGDIILNKVFVPEEDRLTGINSFQDINKVLAMSRIMVAWQPIGISMGVYDICHRYLKERKQFGAPLAAFQLNQEKLVRMLGNIQAMLLVGWRLCKLYESGKMTPGRSSLGKAWTSKKAREVVSLGRELLGGNGILVDFLVAKAFCDVEPIFSYEGTYDINSLVAGREITGIASFKPAVSAKSRL

SEQ ID NO: 10825 - protein, 369 aa, Zea mays subsp. mays
  peptide (1)..(369): Ceres Seq. ID no. 12340961
MEKEIAPIMTEYWEKAEFPFHAIPSLASLGLAGGTIKGYGCPGLSLTASAISIAEVARVDASCSTFILVHSSLAMSTIALCGSEAQKQKYLPSLTQFKTIGCWALTEPDYGSDASSLRTAATKVPGGWHLDGQKRWIGNSTFADVLIILARNADTNQLNGFIVKKGAPGLKATKIENKIGLRMVQNGDIILNKVFVPEEDRLTGINSFQDINKVLAMSRIMVAWQPIGISMGVYDICHRYLKERKQFGAPLAAFQLNQEKLVRMLGNIQAMLLVGWRLCKLYESGKMTPGRSSLGKAWTSKKAREVVSLGRELLGGNGILVDFLVAKAFCDVEPIFSYEGTYDINSLVAGREITGIASFKPAVSAKSRL

SEQ ID NO: 10826 - DNA, 1474 bp, Zea mays subsp. mays
  misc_feature (1)..(1474): Ceres Seq. ID no. 12408280
  misc_feature (1)..(1474): Ortholog of  Ceres SEQ ID NO 14314999 as cited in SEQ ID NO 52342
  misc_feature (1)..(1474): Ortholog of  Ceres SEQ ID NO 13585458 as cited in SEQ ID NO 60907
  misc_feature (1)..(1474): Ortholog of  Ceres SEQ ID NO 13598678 as cited in SEQ ID NO 61508
  misc_feature (1)..(1474): Ortholog of  Ceres SEQ ID NO 12625392 as cited in SEQ ID NO 63315
  misc_feature (1)..(1474): Ortholog of  Ceres SEQ ID NO 13598319 as cited in SEQ ID NO 68758
  misc_feature (1)..(1474): Ortholog of  Ceres SEQ ID NO 12589816 as cited in SEQ ID NO 0
atctagcaaactgcaaaccaggtcatctctgaatttccccaacaaagagcgagcataaaccccgctatacccgcttccttctctccaatctccggtgctcgcatcccgctccgcctccatgcgccgcggcagttccacgacgccagtcctctcacctctgtcctgacccaacacccgggcggctggaacccgcaggtgcgcttagtgccgctcgaggaggctcgccgtttgctggattcgttctgtcctttgccggccggcattgtgccctccgcggcggcgacaggggcgtgcgcggtgctgctgtaggggagggtgacggccatctccctggtcggccgcggcccgggctggtggcgtgcgaggaagacggattcacaaagcacggtgctccccaagtctagcagggtgtgttgtatggcttccacgctccagctgttgttttccattgccatcacagctttggcctttttcctccacccatgcgcatcgactgatgagttccaccgtgagctctacggttggtccaatggcatcgctacatggtatggcgcagctgatggcgctggaactgacggtggtgcgtgtggataccagaatgctgtggaccagccacctttctcatccatgattgccgctggctgctcttccatctacgactctggcaagggctgtggctcttgctatcaggctgtatgcaccggcaatgacgcttgctccggtaacccggtgactgtcgtcatcaccgacgagtgccccgattgcccgtgtcctgatgagcaggtccacttcgacatgagcgggacagcgttcggtgccttggcgaagcccgggcaggagagccagctgcgtggcgccggcgccatccaaatccagtatacccgggtgcagtgcgagtggcctggcgtggacgtgaccttctcggtggagccgggctccaacccgaactacctggccgtgctgatcgagtacgaggatagcgacagcgacctcgactccgtggacatgatgcagacgcagggcgggacgacggggcagtgggtgccgatgcagcagtcgtggggcgccgtgtggaagatcaactccggctccgtcctccagggccccttcaacatccgcctcaccttcagctctggcagggcgctcgtcgccagcaacgccatacctgcggggtggaacgccggcgtcgcgtaccggtctggcggcgtggctgtgacgagggccaggcccaggagcggtgcctgccggggctacgaggctgccgggacactggatggtttggtgcatcgtcacctcgtcgtgttgttgttactggtgttattgacgctgtgagccgagatgcgatgcaattttgctggttctgggagcgtgcgagtttgggctacatggactgagtagctctgtgtatttttcttgcatcgcatcgtagtggatggattactgcgtcgtattgtggacatgtctggtggttatc

SEQ ID NO: 10827 - protein, 304 aa, Zea mays subsp. mays
  peptide (1)..(304): Ceres Seq. ID no. 12408281
MASTLQLLFSIAITALAFFLHPCASTDEFHRELYGWSNGIATWYGAADGAGTDGGACGYQNAVDQPPFSSMIAAGCSSIYDSGKGCGSCYQAVCTGNDACSGNPVTVVITDECPDCPCPDEQVHFDMSGTAFGALAKPGQESQLRGAGAIQIQYTRVQCEWPGVDVTFSVEPGSNPNYLAVLIEYEDSDSDLDSVDMMQTQGGTTGQWVPMQQSWGAVWKINSGSVLQGPFNIRLTFSSGRALVASNAIPAGWNAGVAYRSGGVAVTRARPRSGACRGYEAAGTLDGLVHRHLVVLLLLVLLTL

SEQ ID NO: 10828 - protein, 234 aa, Zea mays subsp. mays
  peptide (1)..(234): Ceres Seq. ID no. 12408282
MIAAGCSSIYDSGKGCGSCYQAVCTGNDACSGNPVTVVITDECPDCPCPDEQVHFDMSGTAFGALAKPGQESQLRGAGAIQIQYTRVQCEWPGVDVTFSVEPGSNPNYLAVLIEYEDSDSDLDSVDMMQTQGGTTGQWVPMQQSWGAVWKINSGSVLQGPFNIRLTFSSGRALVASNAIPAGWNAGVAYRSGGVAVTRARPRSGACRGYEAAGTLDGLVHRHLVVLLLLVLLTL

SEQ ID NO: 10829 - protein, 178 aa, Zea mays subsp. mays
  peptide (1)..(178): Ceres Seq. ID no. 12408283
MSGTAFGALAKPGQESQLRGAGAIQIQYTRVQCEWPGVDVTFSVEPGSNPNYLAVLIEYEDSDSDLDSVDMMQTQGGTTGQWVPMQQSWGAVWKINSGSVLQGPFNIRLTFSSGRALVASNAIPAGWNAGVAYRSGGVAVTRARPRSGACRGYEAAGTLDGLVHRHLVVLLLLVLLTL

SEQ ID NO: 10830 - DNA, 1573 bp, Zea mays subsp. mays
  misc_feature (1)..(1573): Ceres Seq. ID no. 12412066
  misc_feature (1)..(1573): Ortholog of  Ceres SEQ ID NO 14313155 as cited in SEQ ID NO 54706
  misc_feature (1)..(1573): Ortholog of  Ceres SEQ ID NO 13639022 as cited in SEQ ID NO 59811
aacacactaggagaggtaaaaacgaacgaagttgcatctgggtagacggtagaggcaaccacacaattgccccaaaagtaaatgtcataataggagaaaacaactgtcttgcatcaccacgagcgtgggctctctccttctcgacgacgactgggccaccgtcgctgccgcctgccgccctacgccaggtgccaagcagccaggtgttcttggggcccttcgccggcgacgagcaccaccagctgaaagatggcgaggataccgtctctgaagagcctcaatgcgtttccacatgcggaagagcacttgttgaagaagacttactctggcgctgttgtgacaatttttgggctacttataatgattacactgtttgtgcatgagctgcagttttatcttaccacctacacggtgcatcagatgtctgtagatctgaaacgaggagaaactctgccaatccatatcaatatgtcatttccttctttgccatgtgaagtattgagtgtggatgcaattgacatgtctgggaaacatgaagttgatttgcatacaaatatttggaagcttcgcttggataagtatggccatatcatcggtacagagtacttgtctgacctagttgaaaaggggcatggggcacatcatgatcatgaccatgatcatgaccatcacgatgaacaaaagaagcatgaacaaaccttcaacgaagaagcagaaaaaatgatcaagagtgtgaaacaagcactcggaaatggtgaaggctgccgggtctatgggatgttggatgtgcagagggtggctggtaacttccatatctcagtgcatggtttgaacatttttgttgctgaaaagatttttgaagggtcaaaccatgtgaacgtcagtcatgttatccacgagctgtcatttggcccaaagtatccaggaattcataacccactggatgaaacttcaaggatacttcatgacacaagtggaaccttcaaatactatattaaggttgttccgactgagtataaatatctatcaaagaaagtattgccaacaaatcagttttctgtcactgagtattttcttcccatccgtccaactgacagggcctggccagcggtttacttcctgtatgatctgtcaccaattacagtcaccatcaaagaggaaagaaggaacttccttcattttgtaactcgtctatgtgcagttcttggtggcacatttgccatgacaggaatgcttgaccggtggatgtaccagcttatcaagacagtcaccaactcaaagaccagaagtgtactgcggtaattgcacaagtcacgatggatggaaaaccgttggaagtgtggtaccgtggctaatgaagcccatagatctttgcccgaagctaactgatcaagccatgttgatttttgcatgttttattttcttcgtacatggttaacttataatacgtcgttgtttttttttcatcaactatgttagattaacacagtccacggactacattgttaactatgttggtagtggaactgaaatgccaagccgatcttgatcaaccctatagtcccatcgtgcc

SEQ ID NO: 10831 - protein, 350 aa, Zea mays subsp. mays
  peptide (1)..(350): Ceres Seq. ID no. 12412067
MARIPSLKSLNAFPHAEEHLLKKTYSGAVVTIFGLLIMITLFVHELQFYLTTYTVHQMSVDLKRGETLPIHINMSFPSLPCEVLSVDAIDMSGKHEVDLHTNIWKLRLDKYGHIIGTEYLSDLVEKGHGAHHDHDHDHDHHDEQKKHEQTFNEEAEKMIKSVKQALGNGEGCRVYGMLDVQRVAGNFHISVHGLNIFVAEKIFEGSNHVNVSHVIHELSFGPKYPGIHNPLDETSRILHDTSGTFKYYIKVVPTEYKYLSKKVLPTNQFSVTEYFLPIRPTDRAWPAVYFLYDLSPITVTIKEERRNFLHFVTRLCAVLGGTFAMTGMLDRWMYQLIKTVTNSKTRSVLR

SEQ ID NO: 10832 - protein, 313 aa, Zea mays subsp. mays
  peptide (1)..(313): Ceres Seq. ID no. 12412068
MITLFVHELQFYLTTYTVHQMSVDLKRGETLPIHINMSFPSLPCEVLSVDAIDMSGKHEVDLHTNIWKLRLDKYGHIIGTEYLSDLVEKGHGAHHDHDHDHDHHDEQKKHEQTFNEEAEKMIKSVKQALGNGEGCRVYGMLDVQRVAGNFHISVHGLNIFVAEKIFEGSNHVNVSHVIHELSFGPKYPGIHNPLDETSRILHDTSGTFKYYIKVVPTEYKYLSKKVLPTNQFSVTEYFLPIRPTDRAWPAVYFLYDLSPITVTIKEERRNFLHFVTRLCAVLGGTFAMTGMLDRWMYQLIKTVTNSKTRSVLR

SEQ ID NO: 10833 - protein, 293 aa, Zea mays subsp. mays
  peptide (1)..(293): Ceres Seq. ID no. 12412069
MSVDLKRGETLPIHINMSFPSLPCEVLSVDAIDMSGKHEVDLHTNIWKLRLDKYGHIIGTEYLSDLVEKGHGAHHDHDHDHDHHDEQKKHEQTFNEEAEKMIKSVKQALGNGEGCRVYGMLDVQRVAGNFHISVHGLNIFVAEKIFEGSNHVNVSHVIHELSFGPKYPGIHNPLDETSRILHDTSGTFKYYIKVVPTEYKYLSKKVLPTNQFSVTEYFLPIRPTDRAWPAVYFLYDLSPITVTIKEERRNFLHFVTRLCAVLGGTFAMTGMLDRWMYQLIKTVTNSKTRSVLR

SEQ ID NO: 10834 - DNA, 1257 bp, Zea mays subsp. mays
  misc_feature (1)..(1257): Ceres Seq. ID no. 12412062
  misc_feature (1)..(1257): Ortholog of  Ceres SEQ ID NO 15177067 as cited in SEQ ID NO 52085
  misc_feature (1)..(1257): Ortholog of  Ceres SEQ ID NO 14309480 as cited in SEQ ID NO 0
  misc_feature (1)..(1257): Ortholog of  Ceres SEQ ID NO 14312472 as cited in SEQ ID NO 0
attgaaattttccgtttgcaccctaccgagaggtgacgacgagtgaggagtctgtgtgaccagtgctcggcgtcgtcccctgcctctgctagccgctaggcgacgggcccttcgccgggcgacgagcacaccggccctgttaccatggcagcgatgaatactggtatgggaggtttaggtggcaggccgatacatccacaagcaaatccttttggacctgctttgcagggtgctggaccaggattgatccgtactgggctagaaacatatggcggaaggattttagattcaagttctgagtttatgcagagcaatataacacaatatttgtccgaccctcagtactactttcaagtcaacagccagtatgtgaggaacaaactgaaggtcatcttgttccctttcttgcacaggggccactggacaagaataactgaaccagtaggaggaaggctatcctacaaacctccagtccaggatatcaatgcaccggacttgtacatccctttgatggcatttggcacctacattgtagctgctgggtatgccttgggtgttcttggaaggtttacccctgaggcactgaccctacagttttctaaagggatacttgggtggtttctgcaagtcgtcctcatcaaaggtctgctgtactccctgggaagcggtgaagctcccttgctggacatcgtggcgtatgctggatatggcttcgctggcacttcccttgcaatggtggcccgcatcttctggagctacctgtattacttcatcatgccatggttctgcctctgcacgggagtcttccctgtgaagaccatgaagagggttcttctgggcgggccaaggagctacgagagacaccccggccggaaccactacttcctgatcttcttggcggtcgtgcaattccccatgctgttctggctcggcaacatatgtggctgacctttgatcctattggtcgggccacagacctgtttcttcttcttcttcagaataggcatgtgctacttctggcttgctgatgaaacttaggtttatcgtggagatggtacagaactattagctatagatatctgggcaatcgaataaactgtttttgtttctgttagctatagaggcgaaagtaaaaacaatcgtttgggataggataaagatgaactgcttcgtgtgtacccttttgtgtcacgagcggctagccacgaccctgcaatctgatttgttttttaatgatcactgctacttgatctttcc

SEQ ID NO: 10835 - protein, 267 aa, Zea mays subsp. mays
  peptide (1)..(267): Ceres Seq. ID no. 12412063
MAAMNTGMGGLGGRPIHPQANPFGPALQGAGPGLIRTGLETYGGRILDSSSEFMQSNITQYLSDPQYYFQVNSQYVRNKLKVILFPFLHRGHWTRITEPVGGRLSYKPPVQDINAPDLYIPLMAFGTYIVAAGYALGVLGRFTPEALTLQFSKGILGWFLQVVLIKGLLYSLGSGEAPLLDIVAYAGYGFAGTSLAMVARIFWSYLYYFIMPWFCLCTGVFPVKTMKRVLLGGPRSYERHPGRNHYFLIFLAVVQFPMLFWLGNICG

SEQ ID NO: 10836 - protein, 264 aa, Zea mays subsp. mays
  peptide (1)..(264): Ceres Seq. ID no. 12412064
MNTGMGGLGGRPIHPQANPFGPALQGAGPGLIRTGLETYGGRILDSSSEFMQSNITQYLSDPQYYFQVNSQYVRNKLKVILFPFLHRGHWTRITEPVGGRLSYKPPVQDINAPDLYIPLMAFGTYIVAAGYALGVLGRFTPEALTLQFSKGILGWFLQVVLIKGLLYSLGSGEAPLLDIVAYAGYGFAGTSLAMVARIFWSYLYYFIMPWFCLCTGVFPVKTMKRVLLGGPRSYERHPGRNHYFLIFLAVVQFPMLFWLGNICG

SEQ ID NO: 10837 - protein, 260 aa, Zea mays subsp. mays
  peptide (1)..(260): Ceres Seq. ID no. 12412065
MGGLGGRPIHPQANPFGPALQGAGPGLIRTGLETYGGRILDSSSEFMQSNITQYLSDPQYYFQVNSQYVRNKLKVILFPFLHRGHWTRITEPVGGRLSYKPPVQDINAPDLYIPLMAFGTYIVAAGYALGVLGRFTPEALTLQFSKGILGWFLQVVLIKGLLYSLGSGEAPLLDIVAYAGYGFAGTSLAMVARIFWSYLYYFIMPWFCLCTGVFPVKTMKRVLLGGPRSYERHPGRNHYFLIFLAVVQFPMLFWLGNICG

SEQ ID NO: 10838 - DNA, 1602 bp, Zea mays subsp. mays
  misc_feature (1)..(1602): Ceres Seq. ID no. 12372680
  misc_feature (1)..(1602): Ortholog of  Ceres SEQ ID NO 15227226 as cited in SEQ ID NO 54691
  misc_feature (1)..(1602): Ortholog of  Ceres SEQ ID NO 14303169 as cited in SEQ ID NO 65741
tctcccaaagccatcttccttccgcggactagttttttctgaagattcggcgatggcggcgacgatccaatccgtgaaggcgcgccagatctttgacagccgcggcaaccctacagtcgaggtcgacgtgttttgctcagatggaacctttgcaagggcagctgttcccagtggagcatcaactggtgtatatgaagctctggagttgagggatggtggctctgactatttggggaagggtgtctccaaggctgtgaacaatgtgaattctgttattggacctgctctgattggcaaggaccctacagcacagactgagattgataacttcatggttcaacaacttgatgggaccaaaaatgagtggggatggtgcaagcaaaagcttggtgctaatgcgattctggctgtgtcattagctgtttgcaaagctggggctagcatcaagaggattcctttataccagcacattgccaacctagctgggaacaagcagttagtgttgcctgtccctgcattcaatgtcatcaacggtggttcccatgctggaaacaagcttgctatgcaggagtttatgatccttcctactggagctgcctcatttaaggaggctatgaagatgggtgttgaagtttatcaccacctgaagtccgttatcaaaaagaagtatgggcaagatgccacgaatgttggtgacgaaggtggttttgctccgaacatccaggagaacaaggaaggacttgagctcttgaaaactgcaattgagaaggctggatacactggcaaggttgtcatcggaatggatgttgcttcttcggagttttacagtgacaaggaccaaacctatgacctcaactttaaggaggagaataatgatggttcacagaagatatctggcgatagcttaaagaatgtatacaaatcttttgtgagcgaataccccattgtttcgattgaagatccttttgaccaggatgactgggttcactatgctaagatgactgaagaaattggagagcaagtgcagattgttggtgatgaccttctcgtcaccaaccccactagggttgctaaggctatcaaggagaaatcatgcaatgcccttctgctcaaggttaaccaaatcggatctgtgactgagagtattgaggctgtgaagatgtcaaagcgtgcgggctggggtgtgatgactagtcataggagtggtgagactgaggacactttcattgctgatctggcagttggtttgtccacgggtcagattaagactggagcaccctgcagatcagagcgtcttgccaaatacaaccagcttcttaggattgaagaagagcttggcgctattgctgtctacgcaggtgccaaattccgtgcacctgtggagccctactaaacgggcgggatgcaagtgcttttatgtctgcacaagtcctgtgaaactgtttactgcgacctgcagattttactcttggagtgccctgagtagattttagcaataatatccaacatgtaacatgttacggacatgtacccaaacgtgatccagttttagttaatgtgctccatgcttgacgtttaaaaaaaaaaaaaaaaaaaaagaaa

SEQ ID NO: 10839 - protein, 463 aa, Zea mays subsp. mays
  peptide (1)..(463): Ceres Seq. ID no. 12372681
LPKPSSFRGLVFSEDSAMAATIQSVKARQIFDSRGNPTVEVDVFCSDGTFARAAVPSGASTGVYEALELRDGGSDYLGKGVSKAVNNVNSVIGPALIGKDPTAQTEIDNFMVQQLDGTKNEWGWCKQKLGANAILAVSLAVCKAGASIKRIPLYQHIANLAGNKQLVLPVPAFNVINGGSHAGNKLAMQEFMILPTGAASFKEAMKMGVEVYHHLKSVIKKKYGQDATNVGDEGGFAPNIQENKEGLELLKTAIEKAGYTGKVVIGMDVASSEFYSDKDQTYDLNFKEENNDGSQKISGDSLKNVYKSFVSEYPIVSIEDPFDQDDWVHYAKMTEEIGEQVQIVGDDLLVTNPTRVAKAIKEKSCNALLLKVNQIGSVTESIEAVKMSKRAGWGVMTSHRSGETEDTFIADLAVGLSTGQIKTGAPCRSERLAKYNQLLRIEEELGAIAVYAGAKFRAPVEPY

SEQ ID NO: 10840 - protein, 446 aa, Zea mays subsp. mays
  peptide (1)..(446): Ceres Seq. ID no. 12372682
MAATIQSVKARQIFDSRGNPTVEVDVFCSDGTFARAAVPSGASTGVYEALELRDGGSDYLGKGVSKAVNNVNSVIGPALIGKDPTAQTEIDNFMVQQLDGTKNEWGWCKQKLGANAILAVSLAVCKAGASIKRIPLYQHIANLAGNKQLVLPVPAFNVINGGSHAGNKLAMQEFMILPTGAASFKEAMKMGVEVYHHLKSVIKKKYGQDATNVGDEGGFAPNIQENKEGLELLKTAIEKAGYTGKVVIGMDVASSEFYSDKDQTYDLNFKEENNDGSQKISGDSLKNVYKSFVSEYPIVSIEDPFDQDDWVHYAKMTEEIGEQVQIVGDDLLVTNPTRVAKAIKEKSCNALLLKVNQIGSVTESIEAVKMSKRAGWGVMTSHRSGETEDTFIADLAVGLSTGQIKTGAPCRSERLAKYNQLLRIEEELGAIAVYAGAKFRAPVEPY

SEQ ID NO: 10841 - protein, 353 aa, Zea mays subsp. mays
  peptide (1)..(353): Ceres Seq. ID no. 12372683
MVQQLDGTKNEWGWCKQKLGANAILAVSLAVCKAGASIKRIPLYQHIANLAGNKQLVLPVPAFNVINGGSHAGNKLAMQEFMILPTGAASFKEAMKMGVEVYHHLKSVIKKKYGQDATNVGDEGGFAPNIQENKEGLELLKTAIEKAGYTGKVVIGMDVASSEFYSDKDQTYDLNFKEENNDGSQKISGDSLKNVYKSFVSEYPIVSIEDPFDQDDWVHYAKMTEEIGEQVQIVGDDLLVTNPTRVAKAIKEKSCNALLLKVNQIGSVTESIEAVKMSKRAGWGVMTSHRSGETEDTFIADLAVGLSTGQIKTGAPCRSERLAKYNQLLRIEEELGAIAVYAGAKFRAPVEPY

SEQ ID NO: 10842 - DNA, 1529 bp, Zea mays subsp. mays
  misc_feature (1)..(1529): Ceres Seq. ID no. 12369098
  misc_feature (1)..(1529): Ortholog of  Ceres SEQ ID NO 15168355 as cited in SEQ ID NO 57246
  misc_feature (1)..(1529): Ortholog of  Ceres SEQ ID NO 13597094 as cited in SEQ ID NO 63626
acccgagaatactcgcgctcgcgcactcgacattcctcgccccccacgccggttcaccctgcgcgcacgcgctcagcatctcgcaatcccccgggcggaggcgtatgtcctgcgccgtggcgatgccgatcgacttgctccacgctccagctccgtgggaggaggaggtgaaggcggttgaggaggacgaggaggaggtggagggagtaggatgcggcggaggggccgtggtggtggtcgcggcggacgcggaggcggagggtcacccctacgacttccacgtgtccgggccgcgcaacctgccgccgcccaactggaaggagataatcagatcgagctggaaggatccaaattacaaaaggatggtaatggcctgcttcattcaagcagtctacctgcttgaactggacagacaggacaagaaaggcgaagaggatggccttgctccaaaatggtggagacccttcaagtacaaggtcactcagacattggtggatgagagagatggttccatctatggcgccatgctggagtgggatcgttcttctgccttgtgtgactttatcctcatgagaccaagcggggcaccgagggctgtgttagctctcagaggaaccctcctgcagaagccaactatgaagagagatctgcaggatgaccttcgcttcttggtatgggagagcctcaaaggttcagtgagatttgttggtgctttagcagcgctaaaatcagcagttgagaagtttggcagcgccaatgtttgtgttgccgggcactccttgggagctggctttgcactccaagtctgcaaggagcttgccaaacatggagtttttgtggagtgtcatcttttcaatccaccttctgtttcactggccatgggtgtaaggaccatgagtgagaaggccagctacctgtggaagaaagtcaaaggaagtctgccattgaaggaagacacaacaccaccacttgagactgctaaggctgatgcaagtgacaagaagagattgcgcgccgagaagaaatgggtgccacatttatatgtcaacaacagtgattacatctgctgccactacaacgctccatcctgctcgtccacaacaacagatggtgcttccaacgaacagcagcaacaacaacgcaaggctagtgaaattgccggtgatgtggtcgcaaagctctttgtgacatcaaaagggccacagaaattccttgaggcgcatgggctacagcagtggtggtcagatggcatggagctgcagctggctctctatgacagcaagctcataaacaggcagctgaaatccatctacgcaacaacaacagaaatgccatctcctgccaagtcctagacacggcttaagccgctgttgcatcggtcattagaaatactctttctaaccagtgtgtgttcctttatcaactgagaatgttttattactccagtgatgccccaaaacagtcgaataatttgattaaagggatagtgtgtgaacagtttcgacaaaacaacattgtatttcaactct

SEQ ID NO: 10843 - protein, 449 aa, Zea mays subsp. mays
  peptide (1)..(449): Ceres Seq. ID no. 12369099
PRILALAHSTFLAPHAGSPCAHALSISQSPGRRRMSCAVAMPIDLLHAPAPWEEEVKAVEEDEEEVEGVGCGGGAVVVVAADAEAEGHPYDFHVSGPRNLPPPNWKEIIRSSWKDPNYKRMVMACFIQAVYLLELDRQDKKGEEDGLAPKWWRPFKYKVTQTLVDERDGSIYGAMLEWDRSSALCDFILMRPSGAPRAVLALRGTLLQKPTMKRDLQDDLRFLVWESLKGSVRFVGALAALKSAVEKFGSANVCVAGHSLGAGFALQVCKELAKHGVFVECHLFNPPSVSLAMGVRTMSEKASYLWKKVKGSLPLKEDTTPPLETAKADASDKKRLRAEKKWVPHLYVNNSDYICCHYNAPSCSSTTTDGASNEQQQQQRKASEIAGDVVAKLFVTSKGPQKFLEAHGLQQWWSDGMELQLALYDSKLINRQLKSIYATTTEMPSPAKS

SEQ ID NO: 10844 - protein, 415 aa, Zea mays subsp. mays
  peptide (1)..(415): Ceres Seq. ID no. 12369100
MSCAVAMPIDLLHAPAPWEEEVKAVEEDEEEVEGVGCGGGAVVVVAADAEAEGHPYDFHVSGPRNLPPPNWKEIIRSSWKDPNYKRMVMACFIQAVYLLELDRQDKKGEEDGLAPKWWRPFKYKVTQTLVDERDGSIYGAMLEWDRSSALCDFILMRPSGAPRAVLALRGTLLQKPTMKRDLQDDLRFLVWESLKGSVRFVGALAALKSAVEKFGSANVCVAGHSLGAGFALQVCKELAKHGVFVECHLFNPPSVSLAMGVRTMSEKASYLWKKVKGSLPLKEDTTPPLETAKADASDKKRLRAEKKWVPHLYVNNSDYICCHYNAPSCSSTTTDGASNEQQQQQRKASEIAGDVVAKLFVTSKGPQKFLEAHGLQQWWSDGMELQLALYDSKLINRQLKSIYATTTEMPSPAKS

SEQ ID NO: 10845 - protein, 409 aa, Zea mays subsp. mays
  peptide (1)..(409): Ceres Seq. ID no. 12369101
MPIDLLHAPAPWEEEVKAVEEDEEEVEGVGCGGGAVVVVAADAEAEGHPYDFHVSGPRNLPPPNWKEIIRSSWKDPNYKRMVMACFIQAVYLLELDRQDKKGEEDGLAPKWWRPFKYKVTQTLVDERDGSIYGAMLEWDRSSALCDFILMRPSGAPRAVLALRGTLLQKPTMKRDLQDDLRFLVWESLKGSVRFVGALAALKSAVEKFGSANVCVAGHSLGAGFALQVCKELAKHGVFVECHLFNPPSVSLAMGVRTMSEKASYLWKKVKGSLPLKEDTTPPLETAKADASDKKRLRAEKKWVPHLYVNNSDYICCHYNAPSCSSTTTDGASNEQQQQQRKASEIAGDVVAKLFVTSKGPQKFLEAHGLQQWWSDGMELQLALYDSKLINRQLKSIYATTTEMPSPAKS

SEQ ID NO: 10846 - DNA, 909 bp, Zea mays subsp. mays
  misc_feature (1)..(909): Ceres Seq. ID no. 13499033
  misc_feature (1)..(909): Ortholog of  Ceres SEQ ID NO 13585373 as cited in SEQ ID NO 63789
atccatccaactcttcataacaggcgacctgagagcagagcagacagagagcgttctggcagccgttgcggagcttgaacctctgcaaccaccaacagctaaactaaaagcagcggcggacggcgcgcggtactggacgaccggccgacgatggctacgccggcgcagcagcagggtgaccagcaccagccgaggctgcagaaggtgatggtggctgtagacgagagcgagtgcagccggcacgcgctggagtgggcgctgcggaacctggcgcccacgctggccccaccgctactggtgctcaccgtgcagccgcacttcccgctcggatacgtctccgccgcgtccttcggcgcacccctgggcaccgtccctccggtggctccggagctcatcaggtcgatgcaggagcagcagagggagctcacgcaggagctcctcgacaaggccagggccatctgcgccgagcacggggttgctgtagaggcaattgtcgaggtcggagatgcaaaggaggtgatatgtgaagtggctgagaagaaaaatgtcgatctgctggttcttggaagccacagtcgtgggccaatacagaggttgttccttgggagcgtcagtaactactgtgtacatcattctaagtgtccagttcttgtggtgaagaaccaaggctgatgaaggattcaactcccagctgctagtcctaatcatgttcgggtatttgtcaacgtatttgtaatgtgtagtacttgctttagccaaacgcattggccaataaagtagcttgctttgcttcttggaagggccgaggctggactggaggagagttctttttctttttcttttttctggtcagtgtgcctttgctccggaatggcagagttgtaaataagaactacgaactttgtgcgc

SEQ ID NO: 10847 - protein, 173 aa, Zea mays subsp. mays
  peptide (1)..(173): Ceres Seq. ID no. 13499034
MATPAQQQGDQHQPRLQKVMVAVDESECSRHALEWALRNLAPTLAPPLLVLTVQPHFPLGYVSAASFGAPLGTVPPVAPELIRSMQEQQRELTQELLDKARAICAEHGVAVEAIVEVGDAKEVICEVAEKKNVDLLVLGSHSRGPIQRLFLGSVSNYCVHHSKCPVLVVKNQG

SEQ ID NO: 10848 - protein, 154 aa, Zea mays subsp. mays
  peptide (1)..(154): Ceres Seq. ID no. 13499035
MVAVDESECSRHALEWALRNLAPTLAPPLLVLTVQPHFPLGYVSAASFGAPLGTVPPVAPELIRSMQEQQRELTQELLDKARAICAEHGVAVEAIVEVGDAKEVICEVAEKKNVDLLVLGSHSRGPIQRLFLGSVSNYCVHHSKCPVLVVKNQG

SEQ ID NO: 10849 - protein, 89 aa, Zea mays subsp. mays
  peptide (1)..(89): Ceres Seq. ID no. 13499036
MQEQQRELTQELLDKARAICAEHGVAVEAIVEVGDAKEVICEVAEKKNVDLLVLGSHSRGPIQRLFLGSVSNYCVHHSKCPVLVVKNQG

SEQ ID NO: 10850 - DNA, 1238 bp, Zea mays subsp. mays
  misc_feature (1)..(1238): Ceres Seq. ID no. 12406405
  misc_feature (1)..(1238): Ortholog of  Ceres SEQ ID NO 13624427 as cited in SEQ ID NO 0
gcacgagaccattacctagaacatcctaatcgaaaaatcatcatcgactccacctggaactcgctcactggcaatggctaccaataccaagctcgtggcccttggcttggccgtcctcgtgagcgttgggttctccgatgcagcgagggtagttaggcttgggagctatgcgtctgccggaggaggcggcggcggtggaggcggcggctccggatcgaccggggctgctgggtacggcggtgggtctggcggtggcggtggctacggcataggcaagggtggcggggactggtggaacaatttcgtctccagcgtagcgggcggtggtggtgggggacagggcggagggggtggcaccaacggtggatccgggtccggcggtgggtcgggctatggttctggcaccagttccaccgcagcctctggccccagcagtggcaactacgccaacgctgagggcaagggcgccggtgggggcatgggcggcggtgccgatggcgcctacggttctggtgccggtggaggcgttggcaagggccagggcgagagtggcgtcgcattggcaccgtcgtccgatggctactacaatggcggcgccgctgatgctaccggtggtggttccggcgctggcggtggacatggcggtggcgccggagctccaagctacgggactggaggtggccttggcggaggcaagggcgaggccggcagcgacggtcctggggttcaggttacgcggcgggaatcggtgctggcactggcggcggcggtggcggcggattccaaggcgcctctggtggtggcggtggctctgggtccggatccggcagcggtggaatccactgagtttccctgcggcatgcagctggacggagcgctcggcgtgtagtgtcagtccattttggagtcggttcgtgtacctgagttttccttgaggagatgctgggtttcgcattctttgttgcaagaattattagtcaggaataatgggcttcgttcgtgattgtagttcgagtaggtaggtagtccagcatgcaactgacatgtaatggctacaggctactacgagtatatgcttgcatcgccatcttttgatgtgccccttgttgttactctcatcgatctttagaggtcgttgctaccggtttttatcttccaaaacacaaaatatactgggacgactcttgcagtctcttgctactgttgaatgtgactattgactagctatagtagtattt

SEQ ID NO: 10851 - protein, 271 aa, Zea mays subsp. mays
  peptide (1)..(271): Ceres Seq. ID no. 12406406
MATNTKLVALGLAVLVSVGFSDAARVVRLGSYASAGGGGGGGGGGSGSTGAAGYGGGSGGGGGYGIGKGGGDWWNNFVSSVAGGGGGGQGGGGGTNGGSGSGGGSGYGSGTSSTAASGPSSGNYANAEGKGAGGGMGGGADGAYGSGAGGGVGKGQGESGVALAPSSDGYYNGGAADATGGGSGAGGGHGGGAGAPSYGTGGGLGGGKGEAGSDGPGVQVTRRESVLALAAAVAADSKAPLVVAVALGPDPAAVESTEFPCGMQLDGALGV

SEQ ID NO: 10852 - protein, 180 aa, Zea mays subsp. mays
  peptide (1)..(180): Ceres Seq. ID no. 12406407
MVLAPVPPQPLAPAVATTPTLRARAPVGAWAAVPMAPTVLVPVEALARARARVASHWHRRPMATTMAAPLMLPVVVPALAVDMAVAPELQATGLEVALAEARARPAATVLGFRLRGGNRCWHWRRRWRRIPRRLWWWRWLWVRIRQRWNPLSFPAACSWTERSACSVSPFWSRFVYLSFP

SEQ ID NO: 10853 - protein, 146 aa, Zea mays subsp. mays
  peptide (1)..(146): Ceres Seq. ID no. 12406408
MAPTVLVPVEALARARARVASHWHRRPMATTMAAPLMLPVVVPALAVDMAVAPELQATGLEVALAEARARPAATVLGFRLRGGNRCWHWRRRWRRIPRRLWWWRWLWVRIRQRWNPLSFPAACSWTERSACSVSPFWSRFVYLSFP

SEQ ID NO: 10854 - DNA, 1376 bp, Zea mays subsp. mays
  misc_feature (1)..(1376): Ceres Seq. ID no. 12355631
  misc_feature (1)..(1376): Ortholog of  Ceres SEQ ID NO 14306781 as cited in SEQ ID NO 53019
  misc_feature (1)..(1376): Ortholog of  Ceres SEQ ID NO 15177237 as cited in SEQ ID NO 53825
  misc_feature (1)..(1376): Ortholog of  Ceres SEQ ID NO 15176012 as cited in SEQ ID NO 60374
  misc_feature (1)..(1376): Ortholog of  Ceres SEQ ID NO 13598643 as cited in SEQ ID NO 64307
aagggcggcggttacttgtcccgctccaactacaaagcccagactgcccagtccgcatccccagcagccgtgacaccgcgccacagcagcctcggcgctgcgtttctgccttcccggtgagacaaatggccgccagcgccaccgacgccgacgccggcgccgggctcagatcggagttcctgcaggtcctgctcagccgccgccgcgatctccaagtgcctctctcggtggagcaagggagtccggtgaaggacccgatgtaccagaatcctccgtccaccatggaggcaaatccgatggagtcgtgccccagtaaagatgtggagaacttgagggagaagctggttgaagaaaatttctacctaatcactgagctaggtgaacaaggacgagtacctgtacttctgctgaagcttgacgaccccgttcctagaagaaaaccagctatcgtgttcctgcacagctcttacaagtgcaaagagtggctgcgcccactgcttgaggcatatgcttccaagggctacgtctgtgtggctattgactcgcgctatcacggcgaaagggccagcaatgaaaccacttacatagaggcactgaaatcggcttggcggaatggggatacaatgcctttcatttttgacacggtgtgggacttggtaaagcttggagactacctcggcgagagggaggacgtggatccctctagggttgggatcacaggcgaatcgctgggagggatgcacgcgtggtttgctgcttttgtggacacacggtacagtgtcgtcgttcctatcatcggtgttcagggattcaggtgggccattgacaacaacaagtggctggctagggtgaatagcataaggcctttatttgaagaagcaggaattgacttaggaaagagcgaattagatacagaagttgttgaaaaggtttgggaaaagatagcaccaggtctggactcgcaatttgatgccccctattcacttcctttgcttgcaccacggccgctgctacttctaaatggcgctgaagatcctcattgcccaataagtggtttaggagaagctatttcaaaaactgctaaagcttacgaagaatctggttgcgcggagaagttcatgttcattgcagagcctggagtcggccataaaatcacaatcgacatggtgaaggcagcaagcgaatggttcgatcgcttcctgcatgcatgaatgcaaaagttattgtcgcccatcatttgttctatatcgattgtgatttgtcaacagcatccagtatgtatgtcctcgtctatgtaccttagtaattgcgggtcggacaaatatctgtatctatatctttagtatattaaagcactagttttgacggtcgtccgc

SEQ ID NO: 10855 - protein, 402 aa, Zea mays subsp. mays
  peptide (1)..(402): Ceres Seq. ID no. 12355632
GRRLLVPLQLQSPDCPVRIPSSRDTAPQQPRRCVSAFPVRQMAASATDADAGAGLRSEFLQVLLSRRRDLQVPLSVEQGSPVKDPMYQNPPSTMEANPMESCPSKDVENLREKLVEENFYLITELGEQGRVPVLLLKLDDPVPRRKPAIVFLHSSYKCKEWLRPLLEAYASKGYVCVAIDSRYHGERASNETTYIEALKSAWRNGDTMPFIFDTVWDLVKLGDYLGEREDVDPSRVGITGESLGGMHAWFAAFVDTRYSVVVPIIGVQGFRWAIDNNKWLARVNSIRPLFEEAGIDLGKSELDTEVVEKVWEKIAPGLDSQFDAPYSLPLLAPRPLLLLNGAEDPHCPISGLGEAISKTAKAYEESGCAEKFMFIAEPGVGHKITIDMVKAASEWFDRFLHA

SEQ ID NO: 10856 - protein, 361 aa, Zea mays subsp. mays
  peptide (1)..(361): Ceres Seq. ID no. 12355633
MAASATDADAGAGLRSEFLQVLLSRRRDLQVPLSVEQGSPVKDPMYQNPPSTMEANPMESCPSKDVENLREKLVEENFYLITELGEQGRVPVLLLKLDDPVPRRKPAIVFLHSSYKCKEWLRPLLEAYASKGYVCVAIDSRYHGERASNETTYIEALKSAWRNGDTMPFIFDTVWDLVKLGDYLGEREDVDPSRVGITGESLGGMHAWFAAFVDTRYSVVVPIIGVQGFRWAIDNNKWLARVNSIRPLFEEAGIDLGKSELDTEVVEKVWEKIAPGLDSQFDAPYSLPLLAPRPLLLLNGAEDPHCPISGLGEAISKTAKAYEESGCAEKFMFIAEPGVGHKITIDMVKAASEWFDRFLHA

SEQ ID NO: 10857 - protein, 317 aa, Zea mays subsp. mays
  peptide (1)..(317): Ceres Seq. ID no. 12355634
MYQNPPSTMEANPMESCPSKDVENLREKLVEENFYLITELGEQGRVPVLLLKLDDPVPRRKPAIVFLHSSYKCKEWLRPLLEAYASKGYVCVAIDSRYHGERASNETTYIEALKSAWRNGDTMPFIFDTVWDLVKLGDYLGEREDVDPSRVGITGESLGGMHAWFAAFVDTRYSVVVPIIGVQGFRWAIDNNKWLARVNSIRPLFEEAGIDLGKSELDTEVVEKVWEKIAPGLDSQFDAPYSLPLLAPRPLLLLNGAEDPHCPISGLGEAISKTAKAYEESGCAEKFMFIAEPGVGHKITIDMVKAASEWFDRFLHA

SEQ ID NO: 10858 - DNA, 1413 bp, Zea mays subsp. mays
  misc_feature (1)..(1413): Ceres Seq. ID no. 12345577
  misc_feature (1)..(1413): Ortholog of  Ceres SEQ ID NO 14316215 as cited in SEQ ID NO 53085
gactgcgaacccgatctcgattcgatccccaagccatcccatggcggctgccctctcctcgcggcgtgccctgcacagcctccaccgccgcctcctcttccacccctccccctcacccgccgccgcacgccgcgcgctacccacttccactcgcagccccatccccgcacactcccccaccttctccttctccttctactcctcctcccgcttcttcaccaccgcgcgccccgatgcgaggctgcggcacgggatgctgccgcagcggctgataggcggggtcaggtcggtggcgaacggtgggtcgaaactgggaccgctgggtcagggggtcaaggggctggggcggcccatggaggcggcgaggagccgcggccgcgcggtaccgcgcggccgtcggcctgcaggtcgaggccttctggcggcgcaactccatgatcctcgtcggtgcggggggagtcatcgtctgtttcttgctctggaggatcatgttcggcatcgccagcaccttcgtcggcctctccgagggtatggccaagtacggcttcctcgcccttgccaccgccattgtcgcctttgccggtatgtatgcccgggcaaggttaaccataaaccctgacaaggtttaccggctggctatgacaaaactcaatacatctgctgccatccttgaagttatgggtgcgcccctaactggtactgatgtcagagcatatgttatgtctggaggaggcccgaaactgaaggacttcaaatttaagattggcagtaaacggtgcttcctcattttccccatcaaaggatcagaaagaaggggcctcgtaagtgttgaggccaagaagaaaaatggacagtatgacatgaagctactagctgttgacataccaatggcatcaggtcctgaccagcggctgttcctcgtcggtgatgaacaagagtacaaggtgggcgggggcttgatatctgagctgcgagacccgatcgtaaaagctatggccgcggagaaggagtttgactatctcgacgagagagaggatgaggaggacgagcggagggagcgtgaggaggcggagcaagaggaagcggaagcattgaggcgcgaggaggaaaggctgcgccaggagggtgaagagcgtaggcggcgggaggaggctgagagcctggagaaagctacgtgacatgacttactgtactgactttccaccttgccttgtgcattgtcttctacctctgtctctaccggagtgtagcgatcagcggtttccacagcaggagattgcttccgagttcacttgagtttctggtggtcagttcggcgtcactagtctcaaagttgttgagaagaaaggaataattttgacggttacgcgacaggtcacttcggcgaagcaatgtaatttatagtggttgatc

SEQ ID NO: 10859 - protein, 247 aa, Zea mays subsp. mays
  peptide (1)..(247): Ceres Seq. ID no. 12345578
MILVGAGGVIVCFLLWRIMFGIASTFVGLSEGMAKYGFLALATAIVAFAGMYARARLTINPDKVYRLAMTKLNTSAAILEVMGAPLTGTDVRAYVMSGGGPKLKDFKFKIGSKRCFLIFPIKGSERRGLVSVEAKKKNGQYDMKLLAVDIPMASGPDQRLFLVGDEQEYKVGGGLISELRDPIVKAMAAEKEFDYLDEREDEEDERREREEAEQEEAEALRREEERLRQEGEERRRREEAESLEKAT

SEQ ID NO: 10860 - protein, 229 aa, Zea mays subsp. mays
  peptide (1)..(229): Ceres Seq. ID no. 12345579
MFGIASTFVGLSEGMAKYGFLALATAIVAFAGMYARARLTINPDKVYRLAMTKLNTSAAILEVMGAPLTGTDVRAYVMSGGGPKLKDFKFKIGSKRCFLIFPIKGSERRGLVSVEAKKKNGQYDMKLLAVDIPMASGPDQRLFLVGDEQEYKVGGGLISELRDPIVKAMAAEKEFDYLDEREDEEDERREREEAEQEEAEALRREEERLRQEGEERRRREEAESLEKAT

SEQ ID NO: 10861 - protein, 215 aa, Zea mays subsp. mays
  peptide (1)..(215): Ceres Seq. ID no. 12345580
MAKYGFLALATAIVAFAGMYARARLTINPDKVYRLAMTKLNTSAAILEVMGAPLTGTDVRAYVMSGGGPKLKDFKFKIGSKRCFLIFPIKGSERRGLVSVEAKKKNGQYDMKLLAVDIPMASGPDQRLFLVGDEQEYKVGGGLISELRDPIVKAMAAEKEFDYLDEREDEEDERREREEAEQEEAEALRREEERLRQEGEERRRREEAESLEKAT

SEQ ID NO: 10862 - DNA, 1003 bp, Zea mays subsp. mays
  misc_feature (1)..(1003): Ceres Seq. ID no. 12363103
  misc_feature (1)..(1003): Ortholog of  Ceres SEQ ID NO 14315063 as cited in SEQ ID NO 52256
  misc_feature (1)..(1003): Ortholog of  Ceres SEQ ID NO 14310736 as cited in SEQ ID NO 52901
  misc_feature (1)..(1003): Ortholog of  Ceres SEQ ID NO 15172325 as cited in SEQ ID NO 54668
  misc_feature (1)..(1003): Ortholog of  Ceres SEQ ID NO 13594345 as cited in SEQ ID NO 58043
  misc_feature (1)..(1003): Ortholog of  Ceres SEQ ID NO 14308594 as cited in SEQ ID NO 60384
  misc_feature (1)..(1003): Ortholog of  Ceres SEQ ID NO 12614112 as cited in SEQ ID NO 60891
  misc_feature (1)..(1003): Ortholog of  Ceres SEQ ID NO 13662880 as cited in SEQ ID NO 65422
  misc_feature (1)..(1003): Ortholog of  Ceres SEQ ID NO 12779098 as cited in SEQ ID NO 67698
gatggctgcgttcttgggctgggaaccaatggccaaaggcccaaaggccaaagctgaagaatggtgcgcgtgcgtgcaggagctccagtgaagctggagaaccactcgttccggctggccgagtcgatgccccccatggacgccgtcttcctggcgtggaactacatgggcaaccgcgacgtcgagcgcatggtcttccactacctgaccaccactgcgtgggccgccgtggctaaggcggacgtcgtcctctgcaacaccttcgaggacctcgagccggacatcttcggcgcccactccccggcggccgcctccatcctcccgatcggcccgctgcgcacctggcagcgccggacgagcgaggcgccggccgggcacttttggcgcgccgacgacgaggcctgcgcgtccttcctggacgcgcagccccgtgggtccgtgacgtacgtggcgttcgggagcctgacggtcatgagccccgcgcagctccaggagctcgcgctggccctgctggcctccgcccgccccttcctgtgggtgttccggccagggctggcggccgagctcccgcccgcgttcacggatctcctgccacgccatgcgaggggcaaggtggtggagtgggcgccgcaggagaaagtgctcgcgcaccctgctgtcggctgcttcctgacgcattgcgggtggaactcgacgctggagggcgtccgccatggcgtgcctttgctttgctggccctactttagcgaccagttcacgaaccaggcatacatttgtgatatctggaaggtggggttaagggtggtgcccgacggtggtgatggcattgtcgccaaggaaaggatcatggagaggttgacgagcctaatgggtgacagtggtgtgaaggaaagggtgaaaagattgaaggaattggcagagaggagcatggggcctgagggcaaatctttgaagaacatcaacgccttcatggaatccatgacgaagtgattgttattgtgtt

SEQ ID NO: 10863 - protein, 309 aa, Zea mays subsp. mays
  peptide (1)..(309): Ceres Seq. ID no. 12363104
MVRVRAGAPVKLENHSFRLAESMPPMDAVFLAWNYMGNRDVERMVFHYLTTTAWAAVAKADVVLCNTFEDLEPDIFGAHSPAAASILPIGPLRTWQRRTSEAPAGHFWRADDEACASFLDAQPRGSVTYVAFGSLTVMSPAQLQELALALLASARPFLWVFRPGLAAELPPAFTDLLPRHARGKVVEWAPQEKVLAHPAVGCFLTHCGWNSTLEGVRHGVPLLCWPYFSDQFTNQAYICDIWKVGLRVVPDGGDGIVAKERIMERLTSLMGDSGVKERVKRLKELAERSMGPEGKSLKNINAFMESMTK

SEQ ID NO: 10864 - protein, 287 aa, Zea mays subsp. mays
  peptide (1)..(287): Ceres Seq. ID no. 12363105
MPPMDAVFLAWNYMGNRDVERMVFHYLTTTAWAAVAKADVVLCNTFEDLEPDIFGAHSPAAASILPIGPLRTWQRRTSEAPAGHFWRADDEACASFLDAQPRGSVTYVAFGSLTVMSPAQLQELALALLASARPFLWVFRPGLAAELPPAFTDLLPRHARGKVVEWAPQEKVLAHPAVGCFLTHCGWNSTLEGVRHGVPLLCWPYFSDQFTNQAYICDIWKVGLRVVPDGGDGIVAKERIMERLTSLMGDSGVKERVKRLKELAERSMGPEGKSLKNINAFMESMTK

SEQ ID NO: 10865 - protein, 284 aa, Zea mays subsp. mays
  peptide (1)..(284): Ceres Seq. ID no. 12363106
MDAVFLAWNYMGNRDVERMVFHYLTTTAWAAVAKADVVLCNTFEDLEPDIFGAHSPAAASILPIGPLRTWQRRTSEAPAGHFWRADDEACASFLDAQPRGSVTYVAFGSLTVMSPAQLQELALALLASARPFLWVFRPGLAAELPPAFTDLLPRHARGKVVEWAPQEKVLAHPAVGCFLTHCGWNSTLEGVRHGVPLLCWPYFSDQFTNQAYICDIWKVGLRVVPDGGDGIVAKERIMERLTSLMGDSGVKERVKRLKELAERSMGPEGKSLKNINAFMESMTK

SEQ ID NO: 10866 - DNA, 1753 bp, Zea mays subsp. mays
  misc_feature (1)..(1753): Ceres Seq. ID no. 12413795
  misc_feature (1)..(1753): Ortholog of  Ceres SEQ ID NO 14301420 as cited in SEQ ID NO 56580
ccccctgccccacactttagcccaaggaggccggcctcgcctcgcctcgcttcatacgcccgcccgcccctgccgatccatccacctaataaagcgcctgtacagatccaacccttaggatccggatcgccttacccccccgcgacgatttgcgcgattcgattcgattatcctccgattttccccggtttttgtaggtttcctctctttttcgatcggtgtgctagggtttggacgcgcggaggcgtcgcattccagggtaatcattggttcgacgggctagggtgctttctcacccggggaacggaagcgaatccagacgatggagaagaagaaggtggcgataccgctggtgtgccacggccactcgcggccggtggtggacctcttctacagccccgtcacacccgatggctacttcctcatcagcgccagcaaggatacaaatccaatgcttcgtaatggtgagactggcgactggattgggacttttcaaggtcataaaggagctgtttggagctgttgccttgacaggaatgctctgagggctgcatctgcttctgctgacttttcagctaaagtatgggatgcacttactggggatgagctacattcatttgaacacaagcatatagttcgggcgtgtgccttctctgaggatacacaccttttactcactggaggcatggaaaagattttgcgtgtgtatgatatgaatcgtcctgatgcagctccaagagagcttgacaaatcacctggttccgttcgaactgctgcttggcttcatagtgaccaaactatattgagttcctgcactgacatgggtggagtaaggctgtgggatgtgagaactggaaaaaatgtccaaactcttgaaaccaaggcttctgtcactagtgcagaagtaagccaggatggcaggttcatcactactgctgatggctcaagtgtaaaattctgggacgcgaatcactttggccttgttaaaagctatgatatgccatgcaatgtggaatcggcttcacttgaacctaagtctgggagtaaatttgtcgctggaggagaagatttatgggttcatgtatttgatttcttcactggtgaagaaatagcttgtaacaaaggacatcatggtccagtccactgtgtccggtttgcaccttgtggtgaatcatacgcatcgggttcagaagatggcaccattcggatctggcagcttagcccggctaatgctgatgacaatgaggtggccaatgcaaatggcaagacaactgctggggtaaacgaagttacaaccaagatcgaaggcttccacattcccaaggaggggcagaccgaggggtaggatctcatgtgttttgtggtgcttgtggttcttattgcgaggagattgccaccagagctgcagtggtcattcagtttccctctgcggagtcatcatgtctgcgatccaagggtatcctggcttcatgagtcatcatccactggggaaaaacaagcaagcaaatggtggtgggtttttggatggggccctcgctttgatagaacatagcaattgtagcgtcaaaaataaacaatagttgggtagtttaggtaccgtgtttgcgttcattaaagtgaagtattctgtatcccctaaaaaaaacacttgaggccttcatcgttggaacaccgaccttcaaagctgtagaccacttcttgatcctgaggtagttctggagcgtcatgcctatcaaatgacagatttctgtcc

SEQ ID NO: 10867 - protein, 340 aa, Zea mays subsp. mays
  peptide (1)..(340): Ceres Seq. ID no. 12413796
MEKKKVAIPLVCHGHSRPVVDLFYSPVTPDGYFLISASKDTNPMLRNGETGDWIGTFQGHKGAVWSCCLDRNALRAASASADFSAKVWDALTGDELHSFEHKHIVRACAFSEDTHLLLTGGMEKILRVYDMNRPDAAPRELDKSPGSVRTAAWLHSDQTILSSCTDMGGVRLWDVRTGKNVQTLETKASVTSAEVSQDGRFITTADGSSVKFWDANHFGLVKSYDMPCNVESASLEPKSGSKFVAGGEDLWVHVFDFFTGEEIACNKGHHGPVHCVRFAPCGESYASGSEDGTIRIWQLSPANADDNEVANANGKTTAGVNEVTTKIEGFHIPKEGQTEG

SEQ ID NO: 10868 - protein, 297 aa, Zea mays subsp. mays
  peptide (1)..(297): Ceres Seq. ID no. 12413797
MLRNGETGDWIGTFQGHKGAVWSCCLDRNALRAASASADFSAKVWDALTGDELHSFEHKHIVRACAFSEDTHLLLTGGMEKILRVYDMNRPDAAPRELDKSPGSVRTAAWLHSDQTILSSCTDMGGVRLWDVRTGKNVQTLETKASVTSAEVSQDGRFITTADGSSVKFWDANHFGLVKSYDMPCNVESASLEPKSGSKFVAGGEDLWVHVFDFFTGEEIACNKGHHGPVHCVRFAPCGESYASGSEDGTIRIWQLSPANADDNEVANANGKTTAGVNEVTTKIEGFHIPKEGQTEG

SEQ ID NO: 10869 - protein, 219 aa, Zea mays subsp. mays
  peptide (1)..(219): Ceres Seq. ID no. 12413798
MEKILRVYDMNRPDAAPRELDKSPGSVRTAAWLHSDQTILSSCTDMGGVRLWDVRTGKNVQTLETKASVTSAEVSQDGRFITTADGSSVKFWDANHFGLVKSYDMPCNVESASLEPKSGSKFVAGGEDLWVHVFDFFTGEEIACNKGHHGPVHCVRFAPCGESYASGSEDGTIRIWQLSPANADDNEVANANGKTTAGVNEVTTKIEGFHIPKEGQTEG

SEQ ID NO: 10870 - DNA, 1957 bp, Zea mays subsp. mays
  misc_feature (1)..(1957): Ceres Seq. ID no. 12423946
  misc_feature (1)..(1957): Ortholog of  Ceres SEQ ID NO 14315253 as cited in SEQ ID NO 52508
  misc_feature (1)..(1957): Ortholog of  Ceres SEQ ID NO 12627566 as cited in SEQ ID NO 62753
aagcgtcctcggatccacgtccaccgcgtcgccgtagtccgtagaggtcgccgccgccgagcaagctgctgtcaccaacgacagcgaggccgccacgctccgcagcgaggttgagcgcctcgagggtctcctcgccgcggagaaggctagccatgaggaggagatgcgcaggggtgcatggctcggggaccagctgcagaccgcgtaccaggagaaggccgccctcgaggaggagatcgagaccctgaagggttccgccactgccgagggcaagggcatggaagagggatgtgattctgttgctgctagggccaggacgcctaaggatcagggcgtggtgcctcccgcactggtccgcggctgctggagcagctgccacggctggcatcgcagtggtcttgtttaacctcaagaggtaatctggtggtccgatgcgcggaagttttgatctgctgctatggcctatatgagaataggcctacatgtatggcaagtacctttactttctgaagttttcaatggtaataagagtcgtgaacacaaacatgaggtataattgagttcttgtctgatcttttgagttgcacctgatcttttgagttcttgtcttggttcgttcttgattcttggacgaggtgggatttggagagccaagggcggcgcggcagcagcgggtttctcggtcggactagattgtttccatcgagatggtgggcggcggagggcattcgtcgatggaccaccctggcgccaaggacctcgagcgcggcgagctgcgccgtggcgcgcctgagtttgcggacggcgacgatggagacggggaagaaagccagtacttctcggacgcggaggaccggttcgtggccgtcgcactcgcgccacgactccaccgcctacgaggactacgtctcgctgtgcgtgtccgcccgcgcgagctccgtcgacgccgacgccgatgccgacggcgaggccgtcagacaacactgcaggaagtcgtcgtgcgtgtcagagggctcgctggacgacgttgacctggaggccggactgagcgagatcatcaaggccagccctgagaaggccgaacagaactgtcgcatttgccaccttggcctggagagcacggcggtcgagtccggtgccggcatcacgctcggctgctcctgcaagggggacttatcctacgcccacaagcagtgcgccgacacctggttcaagatcagaggcaacaaatgccaatcggctggagtagacaccctgtttgtggaaggaggtaccatttcataattcggaatgaatacaaaacctgcaagcattgtgaccattgtgggcttatggcccagtcgtttggaacacggtgctcgacatgcaaatatgtgatctcctctgatgatccggaagattgggactataggcagttggataatccacgtcacttgctgcatgcaaatcagaacattcatccagatgaggactaacttgaaggtggtcgataactctggggccaagtgagtgatgtgcatccagtccctgagggggaagaaaggagcaaggctcggggacatgatcatcggatccgtaaaggaggcccagcctcgtggcaaggtcaagaaagaagacgtagtctacggcgtggtcgtccgcgccgccatgaagaaagggcgcagcgacggcagcgaggtccagttcgacgacaacgaggtggtcctcgtgaacaagaagggtgagctgatcggcacccgcgtcttcggccccgtcccccacgagctgaggaagaagaagcacctcaagatcctggccctggctgaacacatcgtttgaggtgtgtcgcagagccaagagccaagtgtttatgggaatgtttttttgtctgtgttctctgtttgaataatgcattgtgaaacgatagcatggaccgtttgaactattttgatgatattgctcgcccatttggatggtc

SEQ ID NO: 10871 - protein, 157 aa, Zea mays subsp. mays
  peptide (1)..(157): Ceres Seq. ID no. 12423947
METGKKASTSRTRRTGSWPSHSRHDSTAYEDYVSLCVSARASSVDADADADGEAVRQHCRKSSCVSEGSLDDVDLEAGLSEIIKASPEKAEQNCRICHLGLESTAVESGAGITLGCSCKGDLSYAHKQCADTWFKIRGNKCQSAGVDTLFVEGGTIS

SEQ ID NO: 10872 - protein, 107 aa, Zea mays subsp. mays
  peptide (1)..(107): Ceres Seq. ID no. 12423948
MVGGGGHSSMDHPGAKDLERGELRRGAPEFADGDDGDGEESQYFSDAEDRFVAVALAPRLHRLRGLRLAVRVRPRELRRRRRRCRRRGRQTTLQEVVVRVRGLAGRR

SEQ ID NO: 10873 - protein, 101 aa, Zea mays subsp. mays
  peptide (1)..(101): Ceres Seq. ID no. 12423949
MCIQSLRGKKGARLGDMIIGSVKEAQPRGKVKKEDVVYGVVVRAAMKKGRSDGSEVQFDDNEVVLVNKKGELIGTRVFGPVPHELRKKKHLKILALAEHIV

SEQ ID NO: 10874 - DNA, 1880 bp, Zea mays subsp. mays
  misc_feature (1)..(1880): Ceres Seq. ID no. 13498503
  misc_feature (1)..(1880): Ortholog of  Ceres SEQ ID NO 12465151 as cited in SEQ ID NO 67782
ccagcccaacttacagaagcccacaaagtattcacttaacgtctgtaactaccggcccatcccaggaagaggccccgctcctctccctgctcgctgcacagggactcggcctccgggacggcagacccacaagcgccagcacgctcgagactgtgccgtgggagtgggaggttcctcaggtgctgagcagtcgccggcggcgaccgccggtgtcggagatgaaggagagaagcggctccagggcggcggtggacgagcgctacgcgcagtggaagtcgctcatccccgtcctctacgactggtttgccaaccacaacctcgtctggccatccctctcctgccggtgggggccacagtttgagaaagctacctacaagaatcgtcagcgcctgtacctatctgaacagacggatgggagtgtgcctaatactctggttatcgcaaattgtgaagttgtgaaacctagggttgcagctgctgaacatatctcacagttcaatgaggaagcacggtcaccttttgtaaagaagtacaaaactatagttcatcctggtgaggttaacagaatcagggaacttccacagaacagtaagatcatagccactcacactgacagtccagatgtacttatttgggatgttgaagcacaaccaaatagacatgctgtcctaggagcaagcgagtctcgccctgatctgatattaacaggacataaggaaaatgcggaatttgcgcttgccatgtgtccagcagaaccatatgtcctatcaggaggaaaggacaaatctgttgtcttgtggagcatccaagaccatatatctgcccttggggattcctcgtcttctcctggagcatctggcagcaagcagtctattaaaactgcaaatgaaaaggagagccctaaagttgatcctagaggtatatttcatggacatgacagcacggttgaagatgttcagttctgcccttccagtgcgcaggagttttgtagtgtgggtgatgatgcttgtcttattctgtgggatgctcgaactggcactgccccagctgttaaggttgagaaagctcacagtggagatgttcattgtgttgattggaatccccttgatgttaactatatcttaactgggtctgccgataactctgtccgaatgtgggatcgtcggaatctgggttcaggaggagctggttctccaattcacaaatttgaaggccataaagctgctgttctttgtgttcagtggtcacctgacagagcatctgtttttggaagttctgcagaagatggtttcttaaacgtgtgggatcatgagaaggtggggaagaagaaaaattctaatgtcccagccgggcttttctttcagcacgctggtcatagggataagattgtagacttccactggaattcgtcagatccttggacaattgtcagtgtctctgatgatggcgagagcactggtggaggtggaacactgcagatttggcgcatgagtgatttgatctaccgcccagaggatgaagttcttgcagagctggagaatttcaaggctcatttggccagctgtgcaccgaagaattgagtcatgtgggttacctgcggaatgcaatcctgtggaaactgagtaggtgatgtagtttcatggccataagtatgagccccagttgacattgaatctgtcctctgatgctcctagagctgtacccttgaggggcttgtgcttttgtgagcttgtgttaaacctgctgtacgagtaaactagtatgtccgcaaacgcgtcagagccggatgtctgtgggccagctattgggatactgccggatatcgtcaacaattgttccagattggtgtattggatctaatgagattgtcagcaattgct

SEQ ID NO: 10875 - protein, 525 aa, Zea mays subsp. mays
  peptide (1)..(525): Ceres Seq. ID no. 13498504
SPTYRSPQSIHLTSVTTGPSQEEAPLLSLLAAQGLGLRDGRPTSASTLETVPWEWEVPQVLSSRRRRPPVSEMKERSGSRAAVDERYAQWKSLIPVLYDWFANHNLVWPSLSCRWGPQFEKATYKNRQRLYLSEQTDGSVPNTLVIANCEVVKPRVAAAEHISQFNEEARSPFVKKYKTIVHPGEVNRIRELPQNSKIIATHTDSPDVLIWDVEAQPNRHAVLGASESRPDLILTGHKENAEFALAMCPAEPYVLSGGKDKSVVLWSIQDHISALGDSSSSPGASGSKQSIKTANEKESPKVDPRGIFHGHDSTVEDVQFCPSSAQEFCSVGDDACLILWDARTGTAPAVKVEKAHSGDVHCVDWNPLDVNYILTGSADNSVRMWDRRNLGSGGAGSPIHKFEGHKAAVLCVQWSPDRASVFGSSAEDGFLNVWDHEKVGKKKNSNVPAGLFFQHAGHRDKIVDFHWNSSDPWTIVSVSDDGESTGGGGTLQIWRMSDLIYRPEDEVLAELENFKAHLASCAPKN

SEQ ID NO: 10876 - protein, 453 aa, Zea mays subsp. mays
  peptide (1)..(453): Ceres Seq. ID no. 13498505
MKERSGSRAAVDERYAQWKSLIPVLYDWFANHNLVWPSLSCRWGPQFEKATYKNRQRLYLSEQTDGSVPNTLVIANCEVVKPRVAAAEHISQFNEEARSPFVKKYKTIVHPGEVNRIRELPQNSKIIATHTDSPDVLIWDVEAQPNRHAVLGASESRPDLILTGHKENAEFALAMCPAEPYVLSGGKDKSVVLWSIQDHISALGDSSSSPGASGSKQSIKTANEKESPKVDPRGIFHGHDSTVEDVQFCPSSAQEFCSVGDDACLILWDARTGTAPAVKVEKAHSGDVHCVDWNPLDVNYILTGSADNSVRMWDRRNLGSGGAGSPIHKFEGHKAAVLCVQWSPDRASVFGSSAEDGFLNVWDHEKVGKKKNSNVPAGLFFQHAGHRDKIVDFHWNSSDPWTIVSVSDDGESTGGGGTLQIWRMSDLIYRPEDEVLAELENFKAHLASCAPKN

SEQ ID NO: 10877 - protein, 279 aa, Zea mays subsp. mays
  peptide (1)..(279): Ceres Seq. ID no. 13498506
MCPAEPYVLSGGKDKSVVLWSIQDHISALGDSSSSPGASGSKQSIKTANEKESPKVDPRGIFHGHDSTVEDVQFCPSSAQEFCSVGDDACLILWDARTGTAPAVKVEKAHSGDVHCVDWNPLDVNYILTGSADNSVRMWDRRNLGSGGAGSPIHKFEGHKAAVLCVQWSPDRASVFGSSAEDGFLNVWDHEKVGKKKNSNVPAGLFFQHAGHRDKIVDFHWNSSDPWTIVSVSDDGESTGGGGTLQIWRMSDLIYRPEDEVLAELENFKAHLASCAPKN

SEQ ID NO: 10878 - DNA, 1236 bp, Zea mays subsp. mays
  misc_feature (1)..(1236): Ceres Seq. ID no. 12412058
  misc_feature (1)..(1236): Ortholog of  Ceres SEQ ID NO 13594548 as cited in SEQ ID NO 51267
  misc_feature (1)..(1236): Ortholog of  Ceres SEQ ID NO 12614847 as cited in SEQ ID NO 61970
aataaagctcgcgccacgggagccacgcacgcggacgccggcatattcgccaaacgcatcgcatcggcctcggccaccggcgcggctgccctcctcctcttctccgtcgatccggagaggactttctctcgcctgctcgtcccttccgcccccgccggccggccggtcctcttcccggcccactccgttccgatcgaccatggcggctaccgcccccaacggcaatcccactgtcagctccctcgcggcaaccgttccggtccaggcggttctgttcgacatcgacgggaccctgtgcgactcggatcccctccaccacgtcgctttccaagagatgcttctcgagatcgggtacaacaatggcgtgccgatagacgaggagttcttcatcaagaacatcgctgggaggagtgacgtcgaagctgcccagaacctgttcccggactgggagcttgagaaggggctcaaattcctagaggacaaggaagcaaaatacaggagtctggcaaaagagcgcttggtgcctgtgaaaggcctcgcgaaggtggtccagtgggtgaaagaccacgggtacaagcgcgcggcggtgaccaacgcccccaggatcaacgcggagctgatgatctcgctcctgggcctctcggacttcttccaggccgtcatcgtcggaggcgagtgcgagcagccaaagcccgcgccgtacccttacctcagggccctcaaggagctccaggtgtccgcagagcacagcttcgtcttcgaggattctcctgctggtatccgggctggcgtcgcggcggggatgcctgtcgtcggtgtggcgacgaggaacccggagaagtccttggtggaagcaggagccgcgttgctcgtcaaggactacgaagatcctaagctctgggcagcgcttgaggaggtcgacggagaggaagctaagctgaagaaggccggcgaatgatctgatatgacgatgagccattgattagatttattgcagattaattctgcctccagcatgattctgttcctagttatgcgctgcggagagagctcacctcatcagggtatttatgagattctagcttcgtatattgtttttcttcttcttgattgaactgagatcaaataagacaaagctgctgtgccttgttgtgtgccatctgtgtatgaacttttcggttcagcctccagcagtctttaatctgaaagaaagacgaggtaggaattctctccccc

SEQ ID NO: 10879 - protein, 318 aa, Zea mays subsp. mays
  peptide (1)..(318): Ceres Seq. ID no. 12412059
IKLAPREPRTRTPAYSPNASHRPRPPARLPSSSSPSIRRGLSLACSSLPPPPAGRSSSRPTPFRSTMAATAPNGNPTVSSLAATVPVQAVLFDIDGTLCDSDPLHHVAFQEMLLEIGYNNGVPIDEEFFIKNIAGRSDVEAAQNLFPDWELEKGLKFLEDKEAKYRSLAKERLVPVKGLAKVVQWVKDHGYKRAAVTNAPRINAELMISLLGLSDFFQAVIVGGECEQPKPAPYPYLRALKELQVSAEHSFVFEDSPAGIRAGVAAGMPVVGVATRNPEKSLVEAGAALLVKDYEDPKLWAALEEVDGEEAKLKKAGE

SEQ ID NO: 10880 - protein, 252 aa, Zea mays subsp. mays
  peptide (1)..(252): Ceres Seq. ID no. 12412060
MAATAPNGNPTVSSLAATVPVQAVLFDIDGTLCDSDPLHHVAFQEMLLEIGYNNGVPIDEEFFIKNIAGRSDVEAAQNLFPDWELEKGLKFLEDKEAKYRSLAKERLVPVKGLAKVVQWVKDHGYKRAAVTNAPRINAELMISLLGLSDFFQAVIVGGECEQPKPAPYPYLRALKELQVSAEHSFVFEDSPAGIRAGVAAGMPVVGVATRNPEKSLVEAGAALLVKDYEDPKLWAALEEVDGEEAKLKKAGE

SEQ ID NO: 10881 - protein, 207 aa, Zea mays subsp. mays
  peptide (1)..(207): Ceres Seq. ID no. 12412061
MLLEIGYNNGVPIDEEFFIKNIAGRSDVEAAQNLFPDWELEKGLKFLEDKEAKYRSLAKERLVPVKGLAKVVQWVKDHGYKRAAVTNAPRINAELMISLLGLSDFFQAVIVGGECEQPKPAPYPYLRALKELQVSAEHSFVFEDSPAGIRAGVAAGMPVVGVATRNPEKSLVEAGAALLVKDYEDPKLWAALEEVDGEEAKLKKAGE

SEQ ID NO: 10882 - DNA, 1220 bp, Zea mays subsp. mays
  misc_feature (1)..(1220): Ceres Seq. ID no. 12412054
  misc_feature (1)..(1220): Ortholog of  Ceres SEQ ID NO 13655656 as cited in SEQ ID NO 63731
atccccaaccccgtcagcccgtgcggccgtgccctctgcctcctctgccactcctcgcccaaagcgccagaggcgcagcccgagccacaggttgcctcctctccctctcctcgtggcctcgtccttctcgttcaagacgaaaccgtacgcgagcgagctggtgagggaggaagagcagggaggtgggatcaggccggctccatggacgccacgctcctcctcctccccgccaactgcacggccgccgccagcgggcggatgcggcctcgactgcctgcaggcccacatgtggcttcccctggtccctccgcgcggccaaggacctccatccgggcctcagccgtgtccgcagccctcgccgttcgtggcctcccgcaacacgcttccgtggccgggcaaagcactggaagttatagggttggtgatgttatgaccaaaagggaagagctccatgttgtgaaaccaacaacttcagttgatgacgcccttgagatgctggtgaagcataggatctctggctttcctgttattgatgatgactggaatttggttggcgttgtgtcagattatgatttattggcactggatacaatatcaggagctggaccggctgaagcagacatatttcctgaggtggatagcacttggaagacatttcatgagatacagaagcttttgagcaaaaccaacgggaaggttattgctgatgttatgaccccagcgcctctcgtggtgcgtgaaacaactaaccttgaagatgctgcaaggttactccttgtgactaagtaccgcaggcttccagtggtcgatagctcaggcaaactggttgggatcattacaagagggaacgtcgtccaagccgccctcgaaatcaagaaaaaggttgaagggacactctgagatgactacctccaggtatcctttttgctgccacatggggggcttaggacttggacacatctctagttggcaactgatcaatcaaagcgactgtcagagtgagcgatgaaagtcgctatgtttatgaagatttgcccggagaagcacaggtgtatgtgtagtgtttgttatatatgctgatgcagtccttgctggccaaaacacaggttaccgattgttctggtttcctgggcttctttggacaccaaattcttaacctaggtcttgtttgggtgcacacgtatctagttcaacttacttgtattgaggttcattgaagt

SEQ ID NO: 10883 - protein, 299 aa, Zea mays subsp. mays
  peptide (1)..(299): Ceres Seq. ID no. 12412055
IPNPVSPCGRALCLLCHSSPKAPEAQPEPQVASSPSPRGLVLLVQDETVRERAGEGGRAGRWDQAGSMDATLLLLPANCTAAASGRMRPRLPAGPHVASPGPSARPRTSIRASAVSAALAVRGLPQHASVAGQSTGSYRVGDVMTKREELHVVKPTTSVDDALEMLVKHRISGFPVIDDDWNLVGVVSDYDLLALDTISGAGPAEADIFPEVDSTWKTFHEIQKLLSKTNGKVIADVMTPAPLVVRETTNLEDAARLLLVTKYRRLPVVDSSGKLVGIITRGNVVQAALEIKKKVEGTL

SEQ ID NO: 10884 - protein, 232 aa, Zea mays subsp. mays; identical to SEQ ID NO: 6465
  peptide (1)..(232): Ceres Seq. ID no. 12412056

SEQ ID NO: 10885 - protein, 213 aa, Zea mays subsp. mays; identical to SEQ ID NO: 6466
  peptide (1)..(213): Ceres Seq. ID no. 12412057

SEQ ID NO: 10886 - DNA, 1310 bp, Zea mays subsp. mays
  misc_feature (1)..(1310): Ceres Seq. ID no. 12358780
  misc_feature (1)..(1310): Ortholog of  Ceres SEQ ID NO 13654209 as cited in SEQ ID NO 62121
  misc_feature (1)..(1310): Ortholog of  Ceres SEQ ID NO 13596965 as cited in SEQ ID NO 63363
atatcgatttccgccagcggttttcctcatttttttctctccctctcttgcccggtgatcggtcgggatcgattcgagcagatggcggcggcatgggcagtgctggcggcggtcctcgtcgcggcgcaggtggcgtctgcggcgccggtcacggcgccagcgttcctctgggcgcctaagaactacggattccgctctgatgatgctaaggaggtagtccattatcaaacaatctcaccaaagaacttagctaaatctgttcttgaggaaggtggctggtcaacctttatgtgttcaagggaggatactgagaagcatgttgatgttgccattgtttttattggctcaaagctacaatcatcagacatatcgaaagataagcaagttgatccagctttagcagatacattgaagctctccttcacagaatcagagttttctatggcattcccctacgtttccacatcagacgatgagaaactggaggagtcattgctatcaggcttcactgagaactgtaaaagtggttttggaagaaaccgtatcacctacacagacacgtgcgccgtgagtggccaagatctgaagacgtatcacaacatggatgctatcaatgacttggtagtgtcaggaagaaccaacccgagtggacagactgatgtaatcgtcttctgcagcggcgggttcgagaagttaggcaccacggaatcggaaggggagctgctttcccagcttgtcgacttgctgaagctgtctggggctagacacacgattctctacgcttcccagccatctggttatctactggagaacccttccggctcgccagtggctaggcaccttgcggagaggactaacggtacaaaaactggcctactgagcaaatgtgacggagagtgcctagtcaaatcaactcttcttgaaggaacctttgtcggaatagtgctccttatcatcttgatatcagggctcatgtgtatgatgggaatcgatactccctccaagtttgaagctccccaggagtcttgatctcccttcgaagcagaacccttgttttgttggtctgcactgtggatagatattattcagtttccccctttgaaagcgcctttcgtataattattattatttttttactgagccatctgttatttacgatgtgctcaaacttttgacaccaaacgaatgcatgtgtgtgaggcttgtgctgtgaccagacatagcattgcctccaggtgttttctgtgaataacctggaatttcaggtgggtactgtgcatcaaataaaaaagatgaaatcttgctgttgc

SEQ ID NO: 10887 - protein, 342 aa, Zea mays subsp. mays
  peptide (1)..(342): Ceres Seq. ID no. 12358781
ISISASGFPHFFLSLSCPVIGRDRFEQMAAAWAVLAAVLVAAQVASAAPVTAPAFLWAPKNYGFRSDDAKEVVHYQTISPKNLAKSVLEEGGWSTFMCSREDTEKHVDVAIVFIGSKLQSSDISKDKQVDPALADTLKLSFTESEFSMAFPYVSTSDDEKLEESLLSGFTENCKSGFGRNRITYTDTCAVSGQDLKTYHNMDAINDLVVSGRTNPSGQTDVIVFCSGGFEKLGTTESEGELLSQLVDLLKLSGARHTILYASQPSGYLLENPSGSPVARHLAERTNGTKTGLLSKCDGECLVKSTLLEGTFVGIVLLIILISGLMCMMGIDTPSKFEAPQES

SEQ ID NO: 10888 - protein, 315 aa, Zea mays subsp. mays; identical to SEQ ID NO: 5023
  peptide (1)..(315): Ceres Seq. ID no. 12358782

SEQ ID NO: 10889 - protein, 246 aa, Zea mays subsp. mays; identical to SEQ ID NO: 5024
  peptide (1)..(246): Ceres Seq. ID no. 12358783

SEQ ID NO: 10890 - DNA, 1495 bp, Zea mays subsp. mays
  misc_feature (1)..(1495): Ceres Seq. ID no. 12412050
  misc_feature (1)..(1495): Ortholog of  Ceres SEQ ID NO 14311882 as cited in SEQ ID NO 51638
  misc_feature (1)..(1495): Ortholog of  Ceres SEQ ID NO 14314567 as cited in SEQ ID NO 52335
  misc_feature (1)..(1495): Ortholog of  Ceres SEQ ID NO 14308803 as cited in SEQ ID NO 55038
  misc_feature (1)..(1495): Ortholog of  Ceres SEQ ID NO 14315985 as cited in SEQ ID NO 57720
ggaaaaggaaaaacaaacaaaatagtaaggggaatttggtacctgggtgtttgctgttccttgagttggtgaatctttggagtgcctggctccgacgagatcgaaaggagggacctttccttggttcctctgctggagctgtgattgcagaggtgaaccatgtcagcgatggcggcggcgggtgaagcggagtatggtgaatgcgtgcagaaggggtccctgcagcagcaccaggcgcctcaacccagccccggcgctctattctacacccatgatggcgtcgccgtctacaggaatccggtcatgccggcgttctaccaacagcccgcgggcagcaatgtcgtcgtgccggcggctccagggccagctcattcccctgccagctctgagcccttcaagcgcaagcgcgggcgcccccgcaagtacgcccccgcagacggcgccgtgccgctggctatcgtgcccccatcgcagccacccactgctcgtgccccagctacctctgaggcctcacccacggttcctcctggcttctctccaagtccgcagagtggtggcgtggtgagtcggcaggcctcgccggcgccggcgccggcgtcaggtgctcccgatgtcaagaagcggggccggccgtcgggcccctccagcaagaagcagcagccgcaggcggcagcgcctggaccaggctggactggattgaagcctcatattttcacagttcaagctggagaggatgtagcatcaagagccatgtcattttctgggaatggatgggctgtttgtatcctgacagccaatggcactgtatctaatgtgaccctgcgtcaaggagagtcttctggtggaacagtaacttatgagggccgttttgagattctctctttggctgggtcatatcttctgtctgaaagtactggcatgagcagtcgaacgggtggacttagtgtttctcttgctagtcctgatgggcatgttttaggtggtgctgtcgcaggacctctaaccgcagcttcgccagttcaggtggtcattgggagctttctggctgatacaaaaatggagcttgaccctggatcagcacctgagaaacatgttttcagcaggtttcaaactaccagcagtccatctaggggtaccgaatcctcgggtgggcatgcaagcccaccaaacaccacaggctccttcagcaccagcacacagccaggcttcccaagctttcccacatggaaatgagtttacctgctatggtggagtgggaccgtggcctctggggatgaggagggaggaatttggaactgacagtcctcgagcgtcgtcgctgtagtttcatgagatgttatgagagtcaatcctatttaggtacttctaactggttacaatgaagttccggtttgctgcttgtcttgacattttgcatcattgaggcacttcaaactccaaagtggtggtaacatacagtatattagatgattccccctatcaaatgccttttgtc

SEQ ID NO: 10891 - protein, 357 aa, Zea mays subsp. mays
  peptide (1)..(357): Ceres Seq. ID no. 12412051
MSAMAAAGEAEYGECVQKGSLQQHQAPQPSPGALFYTHDGVAVYRNPVMPAFYQQPAGSNVVVPAAPGPAHSPASSEPFKRKRGRPRKYAPADGAVPLAIVPPSQPPTARAPATSEASPTVPPGFSPSPQSGGVVSRQASPAPAPASGAPDVKKRGRPSGPSSKKQQPQAAAPGPGWTGLKPHIFTVQAGEDVASRAMSFSGNGWAVCILTANGTVSNVTLRQGESSGGTVTYEGRFEILSLAGSYLLSESTGMSSRTGGLSVSLASPDGHVLGGAVAGPLTAASPVQVVIGSFLADTKMELDPGSAPEKHVFSRFQTTSSPSRGTESSGGHASPPNTTGSFSTSTQPGFPSFPTWK

SEQ ID NO: 10892 - protein, 354 aa, Zea mays subsp. mays
  peptide (1)..(354): Ceres Seq. ID no. 12412052
MAAAGEAEYGECVQKGSLQQHQAPQPSPGALFYTHDGVAVYRNPVMPAFYQQPAGSNVVVPAAPGPAHSPASSEPFKRKRGRPRKYAPADGAVPLAIVPPSQPPTARAPATSEASPTVPPGFSPSPQSGGVVSRQASPAPAPASGAPDVKKRGRPSGPSSKKQQPQAAAPGPGWTGLKPHIFTVQAGEDVASRAMSFSGNGWAVCILTANGTVSNVTLRQGESSGGTVTYEGRFEILSLAGSYLLSESTGMSSRTGGLSVSLASPDGHVLGGAVAGPLTAASPVQVVIGSFLADTKMELDPGSAPEKHVFSRFQTTSSPSRGTESSGGHASPPNTTGSFSTSTQPGFPSFPTWK

SEQ ID NO: 10893 - protein, 309 aa, Zea mays subsp. mays
  peptide (1)..(309): Ceres Seq. ID no. 12412053
MPAFYQQPAGSNVVVPAAPGPAHSPASSEPFKRKRGRPRKYAPADGAVPLAIVPPSQPPTARAPATSEASPTVPPGFSPSPQSGGVVSRQASPAPAPASGAPDVKKRGRPSGPSSKKQQPQAAAPGPGWTGLKPHIFTVQAGEDVASRAMSFSGNGWAVCILTANGTVSNVTLRQGESSGGTVTYEGRFEILSLAGSYLLSESTGMSSRTGGLSVSLASPDGHVLGGAVAGPLTAASPVQVVIGSFLADTKMELDPGSAPEKHVFSRFQTTSSPSRGTESSGGHASPPNTTGSFSTSTQPGFPSFPTWK

SEQ ID NO: 10894 - DNA, 1385 bp, Zea mays subsp. mays
  misc_feature (1)..(1385): Ceres Seq. ID no. 12374161
  misc_feature (1)..(1385): Ortholog of  Ceres SEQ ID NO 14307670 as cited in SEQ ID NO 59594
accgaaacgaaatcctcaaaccccaaacctctctcggaagttcctctcgcgtggccggtttcctcaacctccgtgtcggctcgatagtttcgcaagcgggcggggcgggggtctgagctcgatggccacttctggcgagcaatcggctggcggtgggtctgcggcgagggcgtcgaagctgcgctacccgctgcggtcggcgagcaaggggaaggccgcggccgttttctcggcggcggatgcgcctcccaccaccatatctgcaccgcgtcgggcaaaaccatcttcagatgtcagcaagagcatgtgtttaggcctttctgtgaaggataagtttgtcaagcctccacggaggcactcaatacaaaccaagccaggagctagcccaaggccaataccttctggaactgtgactccggtgtctggggttcggtcaaagagatcggacagccaggggaggtttgatactccgacatcagaagtgtccatgtccatgtcaaggcgcaagttcagcacgctttcttcaatctcgtactggatgacacagatcaggcttgcagaggctgcttccaaacactcagtttctctgggcttctttaagcttgctcttgaatcagaatgtgagcctttggaccggatgagggaagaactcaagtcctatgtagcccgccattgcctagcgacagaattggaggacccagtcaaggacattcttcaggtttatgatattgtggacgattttgagaagctgaagatctctgcagagccctcagagcaaccaaaaaagtctgacaaggctgctcgtactgtctccaatgtgtcagccaattgtgatctgaagccaaggtcactaaactctggtgctactgaaagtaaggaagctgggaagaaagagggcattcagaaagcgaaacctgatgcaagggtcagaggctccaataacaggaatccagtaaaatgcaccaccgcaaaggaagtagttgctaagaacactggtaagaaaaccaagaaagaggccaagggtcaggaggaagttagcaatggagatagcgatgcatcctcagcccttccagatcaggaatctgttgatgttgtgaaggagatcacccatgaagataaagagaacatgggcgacaatgaaatggctatggatgttgccatagcgcaaggtatctagaacagccggaccaacttcagattcaatcgttttttattgctgaagatgaagtattagtgtgtggttgcttattttggttttcattgttaatatgatagtagagcttgtctgtgtgattgctgaaccatatacgctcctgaagagtgagtgtgtcataagttgatgattgcctgtattcctttttcaagtttgcagctttgcatgtggt

SEQ ID NO: 10895 - protein, 391 aa, Zea mays subsp. mays
  peptide (1)..(391): Ceres Seq. ID no. 12374162
PKRNPQTPNLSRKFLSRGRFPQPPCRLDSFASGRGGGLSSMATSGEQSAGGGSAARASKLRYPLRSASKGKAAAVFSAADAPPTTISAPRRAKPSSDVSKSMCLGLSVKDKFVKPPRRHSIQTKPGASPRPIPSGTVTPVSGVRSKRSDSQGRFDTPTSEVSMSMSRRKFSTLSSISYWMTQIRLAEAASKHSVSLGFFKLALESECEPLDRMREELKSYVARHCLATELEDPVKDILQVYDIVDDFEKLKISAEPSEQPKKSDKAARTVSNVSANCDLKPRSLNSGATESKEAGKKEGIQKAKPDARVRGSNNRNPVKCTTAKEVVAKNTGKKTKKEAKGQEEVSNGDSDASSALPDQESVDVVKEITHEDKENMGDNEMAMDVAIAQGI

SEQ ID NO: 10896 - protein, 351 aa, Zea mays subsp. mays
  peptide (1)..(351): Ceres Seq. ID no. 12374163
MATSGEQSAGGGSAARASKLRYPLRSASKGKAAAVFSAADAPPTTISAPRRAKPSSDVSKSMCLGLSVKDKFVKPPRRHSIQTKPGASPRPIPSGTVTPVSGVRSKRSDSQGRFDTPTSEVSMSMSRRKFSTLSSISYWMTQIRLAEAASKHSVSLGFFKLALESECEPLDRMREELKSYVARHCLATELEDPVKDILQVYDIVDDFEKLKISAEPSEQPKKSDKAARTVSNVSANCDLKPRSLNSGATESKEAGKKEGIQKAKPDARVRGSNNRNPVKCTTAKEVVAKNTGKKTKKEAKGQEEVSNGDSDASSALPDQESVDVVKEITHEDKENMGDNEMAMDVAIAQGI

SEQ ID NO: 10897 - protein, 290 aa, Zea mays subsp. mays
  peptide (1)..(290): Ceres Seq. ID no. 12374164
MCLGLSVKDKFVKPPRRHSIQTKPGASPRPIPSGTVTPVSGVRSKRSDSQGRFDTPTSEVSMSMSRRKFSTLSSISYWMTQIRLAEAASKHSVSLGFFKLALESECEPLDRMREELKSYVARHCLATELEDPVKDILQVYDIVDDFEKLKISAEPSEQPKKSDKAARTVSNVSANCDLKPRSLNSGATESKEAGKKEGIQKAKPDARVRGSNNRNPVKCTTAKEVVAKNTGKKTKKEAKGQEEVSNGDSDASSALPDQESVDVVKEITHEDKENMGDNEMAMDVAIAQGI

SEQ ID NO: 10898 - DNA, 1635 bp, Zea mays subsp. mays
  misc_feature (1)..(1635): Ceres Seq. ID no. 12363343
  misc_feature (1)..(1635): Ortholog of  Ceres SEQ ID NO 13596509 as cited in SEQ ID NO 62004
  misc_feature (1)..(1635): Ortholog of  Ceres SEQ ID NO 13659971 as cited in SEQ ID NO 67565
  misc_feature (1)..(1635): Ortholog of  Ceres SEQ ID NO 13500385 as cited in SEQ ID NO 67583
gcacgagaccattacctagaacatcctaatcaaaaccccttcttccccgactcgcccggcgctgaataagattcccctgtattctgttccagagatgagctgatcgagcagcccgtcgccaagccaaccggacatggtgagcgacggcgcgcgcgggctgctgggcgcgtacgagctcgggcggacgctcggggagggcaacttcgggaaggtgaagcaggcgcggcaccgcggcagcggcgggcagtttgccgtgaagatcatggagcgcgccagggtgctgtcgcagcgcgcggacgagcagatatgccgcgagatcgccacgctcaagctgctcgcgcaccccaacgtcgtccgcctccacgaggtggctgccagcaagacgaagatctacatggtgcttgagctcgtcaacggcggcgagctgctggacaggattgcggccagtgagggaaagctcccggagcaggaggcaaggaggctcttccagcagctggttgatggtgtaagctactgccatgaaaagggcgtctgtcacagagacctcaagctggagaacgttcttgtcgaccggaagggaaacatcaagatctctgatttcgggctcagcgctttaccgcaacatctcgggaacgatgggttgctgcacacgacctgcggtagccccaactacattgcccctgaggttctgcagaacagagggtacgacgggtcgctatcggacatctggtcatgcggggtgattctctacgtgatgctcgtagggcacctcccgttcgacgaccggaacatcgtcgttctctaccagaagattttcaagggcgatgctcagatcccggagtggctctctcccggcgcacggaaccttctccggaggatccttgagccctacccggcggagcggatcgccatggcagagatcaaggcgcacccatggttccaggagcactacgtccctgtccttcctccgtacgacgacgacgacgattcagtgaagcaaatcggtgcgggtagtaaaaccactcatcacatcaacgcgtttcagttgatcggaatggcgtcgtccctagacctatcagggttttttgaggaagaggacgtgtcccaaaggaagatcaggttcacgtccgcacaaccgcctgaggatttgttcgccgagatcgaacgctctgcgactgacatgggcttccatgttcacagagggcatagtaagcttaggctgacgcgaaactgcgaccggtcgaagaatcagaagaaccctatgtcgtcgtcgtcgtcgtcgtttctagtctgcaccgaggtttttgagcttagcccctctttgtacgtcgtggagctcaacaagtcccatggcgaccctgcactgtacaggcagtgaggttacgagtcacctgatgagcaagttggtacctagaatctcaagtcccaggtcaagaacaggtaccacaggatgaggcgcatggaggatgctgcgatgtgttcgtgagaggtctagaacatcgtctcccagtcaactttgggttgttggatcgttgtctccttacgatgtaatttatttattttgttttgtacataactcctattatatagtaaagttgtaacattcgtttctgtaccatgattcatcatatgtgt

SEQ ID NO: 10899 - protein, 414 aa, Zea mays subsp. mays
  peptide (1)..(414): Ceres Seq. ID no. 12363344
MVSDGARGLLGAYELGRTLGEGNFGKVKQARHRGSGGQFAVKIMERARVLSQRADEQICREIATLKLLAHPNVVRLHEVAASKTKIYMVLELVNGGELLDRIAASEGKLPEQEARRLFQQLVDGVSYCHEKGVCHRDLKLENVLVDRKGNIKISDFGLSALPQHLGNDGLLHTTCGSPNYIAPEVLQNRGYDGSLSDIWSCGVILYVMLVGHLPFDDRNIVVLYQKIFKGDAQIPEWLSPGARNLLRRILEPYPAERIAMAEIKAHPWFQEHYVPVLPPYDDDDDSVKQIGAGSKTTHHINAFQLIGMASSLDLSGFFEEEDVSQRKIRFTSAQPPEDLFAEIERSATDMGFHVHRGHSKLRLTRNCDRSKNQKNPMSSSSSSFLVCTEVFELSPSLYVVELNKSHGDPALYRQ

SEQ ID NO: 10900 - protein, 371 aa, Zea mays subsp. mays
  peptide (1)..(371): Ceres Seq. ID no. 12363345
MERARVLSQRADEQICREIATLKLLAHPNVVRLHEVAASKTKIYMVLELVNGGELLDRIAASEGKLPEQEARRLFQQLVDGVSYCHEKGVCHRDLKLENVLVDRKGNIKISDFGLSALPQHLGNDGLLHTTCGSPNYIAPEVLQNRGYDGSLSDIWSCGVILYVMLVGHLPFDDRNIVVLYQKIFKGDAQIPEWLSPGARNLLRRILEPYPAERIAMAEIKAHPWFQEHYVPVLPPYDDDDDSVKQIGAGSKTTHHINAFQLIGMASSLDLSGFFEEEDVSQRKIRFTSAQPPEDLFAEIERSATDMGFHVHRGHSKLRLTRNCDRSKNQKNPMSSSSSSFLVCTEVFELSPSLYVVELNKSHGDPALYRQ

SEQ ID NO: 10901 - protein, 327 aa, Zea mays subsp. mays
  peptide (1)..(327): Ceres Seq. ID no. 12363346
MVLELVNGGELLDRIAASEGKLPEQEARRLFQQLVDGVSYCHEKGVCHRDLKLENVLVDRKGNIKISDFGLSALPQHLGNDGLLHTTCGSPNYIAPEVLQNRGYDGSLSDIWSCGVILYVMLVGHLPFDDRNIVVLYQKIFKGDAQIPEWLSPGARNLLRRILEPYPAERIAMAEIKAHPWFQEHYVPVLPPYDDDDDSVKQIGAGSKTTHHINAFQLIGMASSLDLSGFFEEEDVSQRKIRFTSAQPPEDLFAEIERSATDMGFHVHRGHSKLRLTRNCDRSKNQKNPMSSSSSSFLVCTEVFELSPSLYVVELNKSHGDPALYRQ

SEQ ID NO: 10902 - DNA, 1272 bp, Zea mays subsp. mays
  misc_feature (1)..(1272): Ceres Seq. ID no. 12462451
  misc_feature (1)..(1272): Ortholog of  Ceres SEQ ID NO 13658132 as cited in SEQ ID NO 66758
aacgccctcgaacgcgccactttaccaccagtccccctcaccgccgcccgtctccgcctccgccgacaaccggagccagggccctcgccacccacccgattgagccaccccatgcctcctcccactgcgacgatgtcccccgcagctggcggttcctttcctgagctcacctgtcccgcggactttgccaccgtcgccgcccccggcggccgcttctccgtcgtcggcttcggatccctcctctccgagcggagcgcgaggagcacgttcccggagctggagggcttccgggtcgcggtgctgcgggggttccgtcgagtcttcgcccacgctgcccccatcttcttcgagcgcggcatcgccatcgaggccaccaaggaattctcaagcttgagcgtggagccatgcgacagtgaactgatagtagtcacggttttcgaaatcaaggaggaagaggtcccggcatttattgagagggaacatgagtttagatttcttgcggttgtccctgaaggattggatggggtaccttttacaaatcgagcagtaagtactctgcatttgaaatcataattttagttttgcctttgctctttgctgctgcttcccacaacaagaattatttttctttgtcttgttggtatttggtggttaggttgtctgtgcacgctacagcaatgaagaatatttccaagagagatgccgaggaagcaaggaaatatataacaagtactatggacggtacaatattgacaaaatatggagagatgatatcttaccatgtcgcttatacctcaggcattgtgttcttgctgcgaaaaatcttggagaaccagcatacagcaacttcttagaccacacctatcttggtgatcggaaaactacaataagggaatacttggccactaccgctgctggactcatggaagaggagcctcccgagtcgctaaaaagtcgctacggtggctgattcgatggctgactctcatatccaccacaggttgagctatcatgcgctcgcagtttatcatattaacagttactgaattaggatttagtagtagtgttccaggatgttcgaaataatgcatggtgctccgttgcagaagatctaggattctggtttgttcggcaggtggcgccaaaacatgtgatatgtgaccaaattgtgattgatgtgcatctataatttgcgactgtttgctacaacaacagaaattcagggccagacacccaaaaatgaggacaaaatgcatctttcccccctttttc

SEQ ID NO: 10903 - protein, 190 aa, Zea mays subsp. mays
  peptide (1)..(190): Ceres Seq. ID no. 12462452
NALERATLPPVPLTAARLRLRRQPEPGPSPPTRLSHPMPPPTATMSPAAGGSFPELTCPADFATVAAPGGRFSVVGFGSLLSERSARSTFPELEGFRVAVLRGFRRVFAHAAPIFFERGIAIEATKEFSSLSVEPCDSELIVVTVFEIKEEEVPAFIEREHEFRFLAVVPEGLDGVPFTNRAVSTLHLKS

SEQ ID NO: 10904 - protein, 153 aa, Zea mays subsp. mays
  peptide (1)..(153): Ceres Seq. ID no. 12462453
MPPPTATMSPAAGGSFPELTCPADFATVAAPGGRFSVVGFGSLLSERSARSTFPELEGFRVAVLRGFRRVFAHAAPIFFERGIAIEATKEFSSLSVEPCDSELIVVTVFEIKEEEVPAFIEREHEFRFLAVVPEGLDGVPFTNRAVSTLHLKS

SEQ ID NO: 10905 - protein, 146 aa, Zea mays subsp. mays
  peptide (1)..(146): Ceres Seq. ID no. 12462454
MSPAAGGSFPELTCPADFATVAAPGGRFSVVGFGSLLSERSARSTFPELEGFRVAVLRGFRRVFAHAAPIFFERGIAIEATKEFSSLSVEPCDSELIVVTVFEIKEEEVPAFIEREHEFRFLAVVPEGLDGVPFTNRAVSTLHLKS

SEQ ID NO: 10906 - DNA, 1639 bp, Zea mays subsp. mays
  misc_feature (1)..(1639): Ceres Seq. ID no. 12412046
  misc_feature (1)..(1639): Ortholog of  Ceres SEQ ID NO 13655988 as cited in SEQ ID NO 65557
agctttgcgtctgtggccaaccaggcgcctccctggctccctcccaccacccggctctccacgccgccgccgccgccgccgccacaagcgaccgcgcatccgctcttctccctcccttcgctctcggcggccggcgatgggggagaccgtacgggcgggcgacgttgcaatcacgactcacgagatggagagccacaacccatcgcactctcagatcgccgaagtgacgatggacatcgcagcgtcagcttctggagcggcagggagcaagttctgcaagggcgcagcctgcgacttctccgacgccagcaactcctcgaaggacgccagggagaggtcggcgtcgatgaggaagctgatagtcgcggtggtcctctgcgtcgtattcatggcggtggaggtggtggggggcatcaaggcgaacagcctggccatcctgaccgacgcggcgcacctcctgtcggacgtggcggcgttcgccatctcgctgttctcgctctgggccgccgggtgggaggcgacgccgcggcagtcgtacgggttcttccgggtggagatcctcggcgccctcgtctccatccagctcatctggctgctcgccggcatactggtgtacgaggccgtcgtgaggctcgtcggcgagagcggcgacgtgcgggggtcgctcatgttcgccgtgtcggcgttcgggctggccgtcaacgttctcatggccgtgttgctgggccatgaccacgggcacggccacggccatggacatggacattcgcatgaccatggccacggccatggggattcggacgatggccattcccaccacgacgacgaggagcaagaacagggccgtgtccatcaccacgagcacggccatggaggcgctatcactgtcacaacccaccaccaccaccatcatcacgatcacgatgttgaggaggcgctgatcaagcatgagggtacccagtctgctggcagagctggtaagaagcctcggcggaacatcaacgtgcacagcgcatacctccacgtgctcggggactccgtccagagcgtcggggtcatggtgggcggggcgatcatctggtacaagccggagtggaaggtcatcgacctcatctgcacgctcgtcttctcggtggtggtgctgttcaccacgatccggatgctgcgcagcatcctcgaagtgttgatggagagcacgccccgcgaggtcgacgccaccaggctggagagcgggctctgcgggatggagggcgtggtggccgtccacgagctgcacatctgggccatcacggtgggcaaggtgctgctggcgtgccatgtgaccatcgccagggatgcggacgctgatgagatccttgacaaggtgatcgggtacatcaagacggagtacaacatcagccatgtgaccatccaggtcgagcgcgagtagggagctctgtctttggctgctgtcttgggcataaatggctggcgccattcgagctctggtgtgctcggtggtgttgtctattgctagtctattaggcaggcgggggaattgtttgcgtcgaggtggtggtggtggtcgtcagtaagtcagtcggtgcataaacaaggatgtaattttcggtaatgctattgacagcatcgtggttcattg

SEQ ID NO: 10907 - protein, 475 aa, Zea mays subsp. mays
  peptide (1)..(475): Ceres Seq. ID no. 12412047
ALRLWPTRRLPGSLPPPGSPRRRRRRRHKRPRIRSSPSLRSRRPAMGETVRAGDVAITTHEMESHNPSHSQIAEVTMDIAASASGAAGSKFCKGAACDFSDASNSSKDARERSASMRKLIVAVVLCVVFMAVEVVGGIKANSLAILTDAAHLLSDVAAFAISLFSLWAAGWEATPRQSYGFFRVEILGALVSIQLIWLLAGILVYEAVVRLVGESGDVRGSLMFAVSAFGLAVNVLMAVLLGHDHGHGHGHGHGHSHDHGHGHGDSDDGHSHHDDEEQEQGRVHHHEHGHGGAITVTTHHHHHHHDHDVEEALIKHEGTQSAGRAGKKPRRNINVHSAYLHVLGDSVQSVGVMVGGAIIWYKPEWKVIDLICTLVFSVVVLFTTIRMLRSILEVLMESTPREVDATRLESGLCGMEGVVAVHELHIWAITVGKVLLACHVTIARDADADEILDKVIGYIKTEYNISHVTIQVERE

SEQ ID NO: 10908 - protein, 430 aa, Zea mays subsp. mays
  peptide (1)..(430): Ceres Seq. ID no. 12412048
MGETVRAGDVAITTHEMESHNPSHSQIAEVTMDIAASASGAAGSKFCKGAACDFSDASNSSKDARERSASMRKLIVAVVLCVVFMAVEVVGGIKANSLAILTDAAHLLSDVAAFAISLFSLWAAGWEATPRQSYGFFRVEILGALVSIQLIWLLAGILVYEAVVRLVGESGDVRGSLMFAVSAFGLAVNVLMAVLLGHDHGHGHGHGHGHSHDHGHGHGDSDDGHSHHDDEEQEQGRVHHHEHGHGGAITVTTHHHHHHHDHDVEEALIKHEGTQSAGRAGKKPRRNINVHSAYLHVLGDSVQSVGVMVGGAIIWYKPEWKVIDLICTLVFSVVVLFTTIRMLRSILEVLMESTPREVDATRLESGLCGMEGVVAVHELHIWAITVGKVLLACHVTIARDADADEILDKVIGYIKTEYNISHVTIQVERE

SEQ ID NO: 10909 - protein, 414 aa, Zea mays subsp. mays
  peptide (1)..(414): Ceres Seq. ID no. 12412049
MESHNPSHSQIAEVTMDIAASASGAAGSKFCKGAACDFSDASNSSKDARERSASMRKLIVAVVLCVVFMAVEVVGGIKANSLAILTDAAHLLSDVAAFAISLFSLWAAGWEATPRQSYGFFRVEILGALVSIQLIWLLAGILVYEAVVRLVGESGDVRGSLMFAVSAFGLAVNVLMAVLLGHDHGHGHGHGHGHSHDHGHGHGDSDDGHSHHDDEEQEQGRVHHHEHGHGGAITVTTHHHHHHHDHDVEEALIKHEGTQSAGRAGKKPRRNINVHSAYLHVLGDSVQSVGVMVGGAIIWYKPEWKVIDLICTLVFSVVVLFTTIRMLRSILEVLMESTPREVDATRLESGLCGMEGVVAVHELHIWAITVGKVLLACHVTIARDADADEILDKVIGYIKTEYNISHVTIQVERE

SEQ ID NO: 10910 - DNA, 948 bp, Zea mays subsp. mays
  misc_feature (1)..(948): Ceres Seq. ID no. 12344862
  misc_feature (1)..(948): Ortholog of  Ceres SEQ ID NO 12608429 as cited in SEQ ID NO 60231
atattagtggcatttccctttcttcactggttcacccggcatactctcactcactctctccctcggtccctcctcgtcgttctcccgtgtccgccgtgcactgtctgtctctggtggcggcgactgggcggcctccgccgctgccctacgccaggatcccaggctgcatcttccgtacgccaggagggcctcgccgcaggttgggtgggaggcagagatgagccgggggcggtcgccggagccgctggatttcttcatctggactgtgcaggatgtagggttatggttggaggaaataaatcttggaagctaccgccaggcttttgaagaaaatggtgtcaatggagagtatctagaaagcctgtcggtgttcaccactgagcagattctccgctttataagacgatgccatatgaaatggggagattttatcaccctctgtaaagagttgagacgcatcaaagttgcctgcctgaaaggggagcaggaggtccgcaggccgtggtgggcgccgtcatgcctgtcggtcgtgttcacgcgggtggccaggcacaaccggcagtcccgggtcgtctccttgaagctggaagcttagcaagttagcaggctcgccctcagccagtggaactggcagagtcccgcgtcgtctcctgatgccggaagcttagtagcaggctcgccgtcagccaccttgcctcgcgcgctgccatccccgtcgttccagtgccgtagggcacacaaggggcgcctctctctgtgtaccatatagcaagcaatgggtctcagtgttcttgaaaggtgctctcgcgttacagtcgtcgtgtgttggcatgcgtgtgttttcgttgatttgtttattttcttcacgtataggggttgtgggtttgagttcgagatggtaagatgttgtactgtagacgatgaatatacgtatgctttgcgtgttgt

SEQ ID NO: 10911 - protein, 125 aa, Zea mays subsp. mays
  peptide (1)..(125): Ceres Seq. ID no. 12344863
MSRGRSPEPLDFFIWTVQDVGLWLEEINLGSYRQAFEENGVNGEYLESLSVFTTEQILRFIRRCHMKWGDFITLCKELRRIKVACLKGEQEVRRPWWAPSCLSVVFTRVARHNRQSRVVSLKLEA

SEQ ID NO: 10912 - protein, 108 aa, Zea mays subsp. mays
  peptide (1)..(108): Ceres Seq. ID no. 12344864
ILVAFPFLHWFTRHTLTHSLPRSLLVVLPCPPCTVCLWWRRLGGLRRCPTPGSQAASSVRQEGLAAGWVGGRDEPGAVAGAAGFLHLDCAGCRVMVGGNKSWKLPPGF

SEQ ID NO: 10913 - protein, 72 aa, Zea mays subsp. mays
  peptide (1)..(72): Ceres Seq. ID no. 12344865
ISGISLSSLVHPAYSHSLSPSVPPRRSPVSAVHCLSLVAATGRPPPLPYARIPGCIFRTPGGPRRRLGGRQR

SEQ ID NO: 10914 - DNA, 1466 bp, Zea mays subsp. mays
  misc_feature (1)..(1466): Ceres Seq. ID no. 12412035
  misc_feature (1)..(1466): Ortholog of  Ceres SEQ ID NO 14308278 as cited in SEQ ID NO 55403
  misc_feature (1)..(1466): Ortholog of  Ceres SEQ ID NO 12618176 as cited in SEQ ID NO 64489
  misc_feature (1)..(1466): Ortholog of  Ceres SEQ ID NO 15179231 as cited in SEQ ID NO 0
gatccagcaatacccgacgcgcaagccagtgccgcgcccagatctccgcgacagatcagtcgttcgtccagctaactgcactgcacgcaatggccaccacggcgaccaagacgactgcaccggcgcaggagcagcaggccaacggcaacggcaacggcgagcagaagacgcgccactccgaggtcggccacaagagcctgctcaagagcgacgacctctaccagtacatcctggacacgagcgtgtacccgcgggagccggagagcatgaaggagctgcgcgagatcaccgccaagcacccatggaacctgatgaccacctccgccgacgagggccagttcctcaacatgctcatcaagctcatcggcgccaagaagaccatggagatcggcgtctacaccggctactcgctcctcgccaccgcgctcgcactcccggaggacggcacgatcttggccatggacatcaaccgcgagaactacgagctaggcctgccctgcatcaacaaggccggcgtgggccacaagatcgacttccgcgagggccccgcgctccccgtcctggacgacctcgtggcggacaaggagcagcacgggtcgttcgacttcgccttcgtggacgccgacaaggacaactacctcagctaccacgagcggctcctgaagctggtgaggcccggcggcctcatcggctacgacaacacgctgtggaacggctccgtcgtgctccccgacgacgcgcccatgcgcaagtacatccgcttctaccgcgacttcgtgctcgccctcaacagcgcgctcgccgccgacgaccgcgtcgagatctgccagctccccgtcggcgacggcgtcacgctctgccgccgcgtcaagtgaaaaaaaaaacacacatactccctccggtgcagtaaaagaagtcatcctgcgcgtgagcgagagtgcacaaaagaagtcgtagcgcacgtgggtctgggatttttgacgtcgctgcccctgagtaattgcatcgggaaaaaaaaaagctgcgctcaagggaaatcgagcttgagacctccaatctagaatgcctcgggaggtactgcaacaaccaatcgaacttgattgttttggtgatgttaatgcactcatatccctatttaataagggcaaacatagaaaactccatgataattaatcactccttggtatgcacaatcatgtcctaaacgactacctttactgcaccggagggagtaccctgcgttcctgccccggctgtctggcccccactgccaccgacggcgccgcaccccccgttccaatcatatcgtagacgacgcgcagcattaaattatcaatcaccggctctggctctttcttggccctgtactgtactgatgttccttcttgtttttttttcttgggaattgtcgccgtttcagtatacgtaaaatctcgaggtcgataatacagtaatactaccaattt

SEQ ID NO: 10915 - protein, 302 aa, Zea mays subsp. mays
  peptide (1)..(302): Ceres Seq. ID no. 12412036
IQQYPTRKPVPRPDLRDRSVVRPANCTARNGHHGDQDDCTGAGAAGQRQRQRRAEDAPLRGRPQEPAQERRPLPVHPGHERVPAGAGEHEGAARDHRQAPMEPDDHLRRRGPVPQHAHQAHRRQEDHGDRRLHRLLAPRHRARTPGGRHDLGHGHQPRELRARPALHQQGRRGPQDRLPRGPRAPRPGRPRGGQGAARVVRLRLRGRRQGQLPQLPRAAPEAGEARRPHRLRQHAVERLRRAPRRRAHAQVHPLLPRLRARPQQRARRRRPRRDLPAPRRRRRHALPPRQVKKKTHILPPVQ

SEQ ID NO: 10916 - protein, 290 aa, Zea mays subsp. mays
  peptide (1)..(290): Ceres Seq. ID no. 12412037
SSNTRRASQCRAQISATDQSFVQLTALHAMATTATKTTAPAQEQQANGNGNGEQKTRHSEVGHKSLLKSDDLYQYILDTSVYPREPESMKELREITAKHPWNLMTTSADEGQFLNMLIKLIGAKKTMEIGVYTGYSLLATALALPEDGTILAMDINRENYELGLPCINKAGVGHKIDFREGPALPVLDDLVADKEQHGSFDFAFVDADKDNYLSYHERLLKLVRPGGLIGYDNTLWNGSVVLPDDAPMRKYIRFYRDFVLALNSALAADDRVEICQLPVGDGVTLCRRVK

SEQ ID NO: 10917 - protein, 261 aa, Zea mays subsp. mays
  peptide (1)..(261): Ceres Seq. ID no. 12412038
MATTATKTTAPAQEQQANGNGNGEQKTRHSEVGHKSLLKSDDLYQYILDTSVYPREPESMKELREITAKHPWNLMTTSADEGQFLNMLIKLIGAKKTMEIGVYTGYSLLATALALPEDGTILAMDINRENYELGLPCINKAGVGHKIDFREGPALPVLDDLVADKEQHGSFDFAFVDADKDNYLSYHERLLKLVRPGGLIGYDNTLWNGSVVLPDDAPMRKYIRFYRDFVLALNSALAADDRVEICQLPVGDGVTLCRRVK

SEQ ID NO: 10918 - DNA, 937 bp, Zea mays subsp. mays
  misc_feature (1)..(937): Ceres Seq. ID no. 12355635
  misc_feature (1)..(937): Ortholog of  Ceres SEQ ID NO 14301656 as cited in SEQ ID NO 61394
cgaaagtcgaaacacagcacagcacaacaggagccaccgccccctttttccttccccccgtctcttcaattcaattcgtacggcacggccaccgggtcaccgcagcaacagaatgcggcgaatctgcatccccaagcttgtgattcttctgctgctctgcaccaggacgctgccggcgggcgtatcctctgcaaagatccatgggaacccagccaacgacctcgtggccctcatcaacggcaagagggaggcgagcaggctgcctgcgctgcgcaacagcagaggcctcgggtgcatggcgctgcagtacatctccgagtgcatggcggccaccacgggcggcgccgcctgcagcagcggcaacacgatggcgtgccagacccccgaggcccacatcacggaggtctacggccgccaactgcggcgtggagctccccacggtggacgtcatctccggccgcctcttcggctgccaccgggaccgcgacggcccggaggacgcgctggcatcagccaccgcgctctcggtgatccgcggcaaggagcacacccaggtaggcgccggcttcgaccgccgcgggcccttcttctggtgcctcctcttcagcagcggcagccccaactccacctttctcctggaggccggcggcaagggcatcgaccagacccatggctgcttcagcgctccggatcgcccctcgtgcaacgccacgccgccgcgccccggccagctcatgtgcaccattaccgcagcggcggctgtgctgctcttccgttgccttgtctccacctagctactccgaccggagtatcctactagcagcagctatgagcttcctggatgatgatattgtattgtattgcaaatctcggaccaatgtcatattccattcattcctggaactggaccagtgtcatattgtatttgcttacgccg

SEQ ID NO: 10919 - protein, 272 aa, Zea mays subsp. mays
  peptide (1)..(272): Ceres Seq. ID no. 12355636
ESRNTAQHNRSHRPLFPSPRLFNSIRTARPPGHRSNRMRRICIPKLVILLLLCTRTLPAGVSSAKIHGNPANDLVALINGKREASRLPALRNSRGLGCMALQYISECMAATTGGAACSSGNTMACQTPEAHITEVYGRQLRRGAPHGGRHLRPPLRLPPGPRRPGGRAGISHRALGDPRQGAHPGRRRLRPPRALLLVPPLQQRQPQLHLSPGGRRQGHRPDPWLLQRSGSPLVQRHAAAPRPAHVHHYRSGGCAALPLPCLHLATPTGVSY

SEQ ID NO: 10920 - protein, 235 aa, Zea mays subsp. mays
  peptide (1)..(235): Ceres Seq. ID no. 12355637
MRRICIPKLVILLLLCTRTLPAGVSSAKIHGNPANDLVALINGKREASRLPALRNSRGLGCMALQYISECMAATTGGAACSSGNTMACQTPEAHITEVYGRQLRRGAPHGGRHLRPPLRLPPGPRRPGGRAGISHRALGDPRQGAHPGRRRLRPPRALLLVPPLQQRQPQLHLSPGGRRQGHRPDPWLLQRSGSPLVQRHAAAPRPAHVHHYRSGGCAALPLPCLHLATPTGVSY

SEQ ID NO: 10921 - protein, 197 aa, Zea mays subsp. mays
  peptide (1)..(197): Ceres Seq. ID no. 12355638
MGTQPTTSWPSSTARGRRAGCLRCATAEASGAWRCSTSPSAWRPPRAAPPAAAATRWRARPPRPTSRRSTAANCGVELPTVDVISGRLFGCHRDRDGPEDALASATALSVIRGKEHTQVGAGFDRRGPFFWCLLFSSGSPNSTFLLEAGGKGIDQTHGCFSAPDRPSCNATPPRPGQLMCTITAAAAVLLFRCLVST

SEQ ID NO: 10922 - DNA, 1232 bp, Zea mays subsp. mays
  misc_feature (1)..(1232): Ceres Seq. ID no. 12341884
  misc_feature (1)..(1232): Ortholog of  Ceres SEQ ID NO 14309755 as cited in SEQ ID NO 20741
  misc_feature (1)..(1232): Ortholog of  Ceres SEQ ID NO 13594727 as cited in SEQ ID NO 52169
  misc_feature (1)..(1232): Ortholog of  Ceres SEQ ID NO 14310369 as cited in SEQ ID NO 54765
  misc_feature (1)..(1232): Ortholog of  Ceres SEQ ID NO 13638746 as cited in SEQ ID NO 59296
  misc_feature (1)..(1232): Ortholog of  Ceres SEQ ID NO 14314050 as cited in SEQ ID NO 59952
  misc_feature (1)..(1232): Ortholog of  Ceres SEQ ID NO 13596474 as cited in SEQ ID NO 62169
  misc_feature (1)..(1232): Ortholog of  Ceres SEQ ID NO 13598714 as cited in SEQ ID NO 62656
  misc_feature (1)..(1232): Ortholog of  Ceres SEQ ID NO 13596969 as cited in SEQ ID NO 63375
  misc_feature (1)..(1232): Ortholog of  Ceres SEQ ID NO 14302434 as cited in SEQ ID NO 63410
  misc_feature (1)..(1232): Ortholog of  Ceres SEQ ID NO 15225685 as cited in SEQ ID NO 63616
  misc_feature (1)..(1232): Ortholog of  Ceres SEQ ID NO 13584480 as cited in SEQ ID NO 64751
  misc_feature (1)..(1232): Ortholog of  Ceres SEQ ID NO 13597519 as cited in SEQ ID NO 64759
  misc_feature (1)..(1232): Ortholog of  Ceres SEQ ID NO 13656123 as cited in SEQ ID NO 65212
  misc_feature (1)..(1232): Ortholog of  Ceres SEQ ID NO 14302388 as cited in SEQ ID NO 65655
  misc_feature (1)..(1232): Ortholog of  Ceres SEQ ID NO 15170183 as cited in SEQ ID NO 65667
  misc_feature (1)..(1232): Ortholog of  Ceres SEQ ID NO 13596362 as cited in SEQ ID NO 67877
  misc_feature (1)..(1232): Ortholog of  Ceres SEQ ID NO 13587054 as cited in SEQ ID NO 0
atccacaagaggagaagaaacaatcaaccagcaacactcttctcttataacatagtacagcgaaggtaactcacatggcaacttccatgggttgtctcgtcttgctctgccttgtttcttctctccttcccagtgccgtccttggccacccatggggtggcttgttcccacagttctatgaccattcgtgccccaaggcgaaggagattgtgcagtccattgtggcacaggctgtggccaaggagaccaggatggcggcatctttagtcagactgcatttccatgactgctttgtcaagggctgcgatgcttcggtgctgttggacaacagcagcagcatagttagtgagaaagggtccaacccgaacaggaactccctcagggggtttgaggtgatcgaccagattaaggctgctcttgaggctgcctgcccaggcacagtctcctgtgccgacattgttgcccttgcggctcgtgattccaccgccctggttggtggaccatactgggacgtgccacttggccggagagactcgctcggtgcaagcatccagggctccaacaatgacatcccagcccccaacaacacactccccactatcatcaccaagttcaagcgccagggcctcaatgttgttgatgttgtcgccctctcaggtggtcacaccattggtatgtctcggtgcactagtttccggcagaggctatacaaccagacaggcaatggcatggctgacagcacactggatgtatcctacgccgcaaagctgaggcagggatgcccccgctctggtggtgacaacaacctcttccccttggacttcatcacccctgccaagtttgacaatttttactacaagaacctcctggccggcaagggccttctaagctctgatgagattctgttaaccaagagcgctgagacagcggccctcgtgaaggcatatgctgctgatgtcaatctcttcttccagcactttgcacagtctatggtgaatatgggaaacatctcgccactgacagggtcacaaggtgagatcaggaagaactgcaggaggctcaacaatgaccactgagggcactgaagtcgcttgatgtgctgaattgtttgtgatgttggtggcgtattttgtttaaataagtaagcatggctgtgattttatcatatgatcgatctttggggttttatttaacacattgtaaaatgtgtatctattaataactcaatgtat

SEQ ID NO: 10923 - protein, 333 aa, Zea mays subsp. mays
  peptide (1)..(333): Ceres Seq. ID no. 12341885
MATSMGCLVLLCLVSSLLPSAVLGHPWGGLFPQFYDHSCPKAKEIVQSIVAQAVAKETRMAASLVRLHFHDCFVKGCDASVLLDNSSSIVSEKGSNPNRNSLRGFEVIDQIKAALEAACPGTVSCADIVALAARDSTALVGGPYWDVPLGRRDSLGASIQGSNNDIPAPNNTLPTIITKFKRQGLNVVDVVALSGGHTIGMSRCTSFRQRLYNQTGNGMADSTLDVSYAAKLRQGCPRSGGDNNLFPLDFITPAKFDNFYYKNLLAGKGLLSSDEILLTKSAETAALVKAYAADVNLFFQHFAQSMVNMGNISPLTGSQGEIRKNCRRLNNDH

SEQ ID NO: 10924 - protein, 329 aa, Zea mays subsp. mays
  peptide (1)..(329): Ceres Seq. ID no. 12341886
MGCLVLLCLVSSLLPSAVLGHPWGGLFPQFYDHSCPKAKEIVQSIVAQAVAKETRMAASLVRLHFHDCFVKGCDASVLLDNSSSIVSEKGSNPNRNSLRGFEVIDQIKAALEAACPGTVSCADIVALAARDSTALVGGPYWDVPLGRRDSLGASIQGSNNDIPAPNNTLPTIITKFKRQGLNVVDVVALSGGHTIGMSRCTSFRQRLYNQTGNGMADSTLDVSYAAKLRQGCPRSGGDNNLFPLDFITPAKFDNFYYKNLLAGKGLLSSDEILLTKSAETAALVKAYAADVNLFFQHFAQSMVNMGNISPLTGSQGEIRKNCRRLNNDH

SEQ ID NO: 10925 - protein, 274 aa, Zea mays subsp. mays
  peptide (1)..(274): Ceres Seq. ID no. 12341887
MAASLVRLHFHDCFVKGCDASVLLDNSSSIVSEKGSNPNRNSLRGFEVIDQIKAALEAACPGTVSCADIVALAARDSTALVGGPYWDVPLGRRDSLGASIQGSNNDIPAPNNTLPTIITKFKRQGLNVVDVVALSGGHTIGMSRCTSFRQRLYNQTGNGMADSTLDVSYAAKLRQGCPRSGGDNNLFPLDFITPAKFDNFYYKNLLAGKGLLSSDEILLTKSAETAALVKAYAADVNLFFQHFAQSMVNMGNISPLTGSQGEIRKNCRRLNNDH

SEQ ID NO: 10926 - DNA, 1495 bp, Zea mays subsp. mays
  misc_feature (1)..(1495): Ceres Seq. ID no. 12566151
  misc_feature (1)..(1495): Ortholog of  Ceres SEQ ID NO 13594163 as cited in SEQ ID NO 60426
gcacgagaccattacctagaacatcctaatcgaaaaaacgacagcgcgcacttggattcggcgaccaccggagcgcggaggaggcacaggcgccgatctaaagacgatggccgccgcgggctcctcgccgtccttctcctcctcgagtaagcggtgcgtgccctgcttctttcttcaattttcccccgatccatggctcgtgcgtgggttccctgctcctagctccactcccccgtccatggcttgcatctatgctgcacagctcggttgctgttgcagttcaacctacttgttactccaaaaagaaggcgggcttatccaagatattgatcaaaatttccaccttttcgcgtcgaagggcgatgaattgaaggatccacccaggccaagcactggtgctctgtgcttatcttttagcgagcgaagtggtcatttccccctctcttctttatgggaggaaaataggaaatggtgtgccaagtgtatcctcaaccattctactgttccaaacgtgcagtatacatcggcatacagtcgatccagttgcaacaccatagctggaagggaaggtggccctcgtcactggtggcgccaccggcatcggtgaggccatcgttcgcctcttcatggagcacggcgccaaggtctgcatcgcggacatccaggatgaggctgggcagcagctgcgcgacgccctgggaggtgacgcgcagggcgccatgttcgtccactgcgacgtgacgtcggaggaggacgtgagccgcgccgtggacgctgcggcggagcggttcggcgcgctggacgtgatggtgaacaacgccggcgtgacgggcaccaaggtgacggacatccgcaacgtggacttcgcggaggcgcgcagggtgctcgacgtcaacgtgcacggcgtgttcctggggatgaagcacgcggcgcgcgctatgatcccgcggaagcggggctccatcgtgtcgctggccagcgtggccagcgccatcggcgggacgggcccgcacgtctacacggcgtccaagcacgccgtggtcgggctcaccaagagcgtcgccgcggagctcggccgccacggggtgcgcgtcaactgcgtgtccccctatgccgtgcccacggcgctgtcgatgccgcacctgccccagggcgcgcgcgcagatgacgcgctcaaggacttcctggcctttgtcggcggcgaggccaacctcaagggcgtcgacgccatgcccgaggacgtcgcccaggcggtgctctacctggccagcgacgaggcgaggtacgtcagcgcggtcaacctcatggtggacggaggcttcacagccgtaaacaataacctcagggcgtttgaggattagttgaggcatttatgccagctctgggattgggagggagtattaccgctatttcttctgctgttgtgacaagtgtgtgcaagactaataaaccgcagcatgttcatgtagccaacagatgattgaacattccaagt

SEQ ID NO: 10927 - protein, 244 aa, Zea mays subsp. mays
  peptide (1)..(244): Ceres Seq. ID no. 12566152
MEHGAKVCIADIQDEAGQQLRDALGGDAQGAMFVHCDVTSEEDVSRAVDAAAERFGALDVMVNNAGVTGTKVTDIRNVDFAEARRVLDVNVHGVFLGMKHAARAMIPRKRGSIVSLASVASAIGGTGPHVYTASKHAVVGLTKSVAAELGRHGVRVNCVSPYAVPTALSMPHLPQGARADDALKDFLAFVGGEANLKGVDAMPEDVAQAVLYLASDEARYVSAVNLMVDGGFTAVNNNLRAFED

SEQ ID NO: 10928 - protein, 213 aa, Zea mays subsp. mays
  peptide (1)..(213): Ceres Seq. ID no. 12566153
MFVHCDVTSEEDVSRAVDAAAERFGALDVMVNNAGVTGTKVTDIRNVDFAEARRVLDVNVHGVFLGMKHAARAMIPRKRGSIVSLASVASAIGGTGPHVYTASKHAVVGLTKSVAAELGRHGVRVNCVSPYAVPTALSMPHLPQGARADDALKDFLAFVGGEANLKGVDAMPEDVAQAVLYLASDEARYVSAVNLMVDGGFTAVNNNLRAFED

SEQ ID NO: 10929 - protein, 184 aa, Zea mays subsp. mays
  peptide (1)..(184): Ceres Seq. ID no. 12566154
MVNNAGVTGTKVTDIRNVDFAEARRVLDVNVHGVFLGMKHAARAMIPRKRGSIVSLASVASAIGGTGPHVYTASKHAVVGLTKSVAAELGRHGVRVNCVSPYAVPTALSMPHLPQGARADDALKDFLAFVGGEANLKGVDAMPEDVAQAVLYLASDEARYVSAVNLMVDGGFTAVNNNLRAFED

SEQ ID NO: 10930 - DNA, 1122 bp, Zea mays subsp. mays
  misc_feature (1)..(1122): Ceres Seq. ID no. 12413380
  misc_feature (1)..(1122): Ortholog of  Ceres SEQ ID NO 12635167 as cited in SEQ ID NO 0
acggacgcttccacgcgaccaagcagccagagccacgcggcgctggtctggccagccatgtcctgcctcgcggcgccgccggctgcaccgccaaaggcgggggaacgcatgctccgcgccgtcgctcctttgcgctcgccttcgccgtgccggggcctgcattacgcggtgcgggggactggagggcgagaagccgggtgcggccggcggcagctggcgctgctgcgggtgctccccagctggcgagtccagggcgtccggggacggcggcctttccagcttctgtataattgaaggtccagagacgatcgaggactttgctcaaatgcaatcgcaggagattgaagacaacatcatgagccgacgcaacaaaattttccttctgatggaagaggttagacggttgcgagtgcagcagcgtatccgaacttctgaaagcaaagatgccaacactgaaggaaatgaaatgcctgagattccatcaactattccatttatgcctgatgcgtcaccaaagactatgaagcaactctatatgacatcgttctctgtcatatctgggataatcatttttggaggcttgatagccccagtacttgaactgaaactagggctgggtggcacatcttatgaagattttataaggaccttgcacttacctcttcaattgagtcaggtagatcctatagtggcatcattttcaggtggcgcagttggtgttatctcagctttaatgttggtcgaagtgagaaatgtcaggcagcaagagaagaaaagatgcacatattgtcatgggactgggtacttgccatgtgctcgctgttctgctagtgggatgttattgaacacaaagcacttttcattattggggcataatatgtggtcaatgaaaggaaggtgtcagaattgttctggagctggaaaggtgatgtgtccgacgtgcttgtgcacaggaatggcgatggcaagtgagcatgatccacggattgacccttttgattagtttgatatgacaatacgctttttgtctgtttcttggaaaatatgttgccgataacagcaataaactcatgtttgtatgtacgttatgtttgttactgcgtgatcacttgagataagttg

SEQ ID NO: 10931 - protein, 333 aa, Zea mays subsp. mays
  peptide (1)..(333): Ceres Seq. ID no. 12413381
RTLPRDQAARATRRWSGQPCPASRRRRLHRQRRGNACSAPSLLCARLRRAGACITRCGGLEGEKPGAAGGSWRCCGCSPAGESRASGDGGLSSFCIIEGPETIEDFAQMQSQEIEDNIMSRRNKIFLLMEEVRRLRVQQRIRTSESKDANTEGNEMPEIPSTIPFMPDASPKTMKQLYMTSFSVISGIIIFGGLIAPVLELKLGLGGTSYEDFIRTLHLPLQLSQVDPIVASFSGGAVGVISALMLVEVRNVRQQEKKRCTYCHGTGYLPCARCSASGMLLNTKHFSLLGHNMWSMKGRCQNCSGAGKVMCPTCLCTGMAMASEHDPRIDPFD

SEQ ID NO: 10932 - protein, 225 aa, Zea mays subsp. mays
  peptide (1)..(225): Ceres Seq. ID no. 12413382
MQSQEIEDNIMSRRNKIFLLMEEVRRLRVQQRIRTSESKDANTEGNEMPEIPSTIPFMPDASPKTMKQLYMTSFSVISGIIIFGGLIAPVLELKLGLGGTSYEDFIRTLHLPLQLSQVDPIVASFSGGAVGVISALMLVEVRNVRQQEKKRCTYCHGTGYLPCARCSASGMLLNTKHFSLLGHNMWSMKGRCQNCSGAGKVMCPTCLCTGMAMASEHDPRIDPFD

SEQ ID NO: 10933 - protein, 215 aa, Zea mays subsp. mays
  peptide (1)..(215): Ceres Seq. ID no. 12413383
MSRRNKIFLLMEEVRRLRVQQRIRTSESKDANTEGNEMPEIPSTIPFMPDASPKTMKQLYMTSFSVISGIIIFGGLIAPVLELKLGLGGTSYEDFIRTLHLPLQLSQVDPIVASFSGGAVGVISALMLVEVRNVRQQEKKRCTYCHGTGYLPCARCSASGMLLNTKHFSLLGHNMWSMKGRCQNCSGAGKVMCPTCLCTGMAMASEHDPRIDPFD

SEQ ID NO: 10934 - DNA, 1030 bp, Zea mays subsp. mays
  misc_feature (1)..(1030): Ceres Seq. ID no. 12412023
  misc_feature (1)..(1030): Ortholog of  Ceres SEQ ID NO 14316316 as cited in SEQ ID NO 57165
  misc_feature (1)..(1030): Ortholog of  Ceres SEQ ID NO 15170682 as cited in SEQ ID NO 64885
ataaatatagcttggagcaaatctttcagccacccgatccccaaccgcccggcccgacattccctccaaccgccgctgcggctgcgccgcccaccgccgacaggcgcagcagtcaacaggaaccgagccatggcgagcgcggatctgctgcggagggaggaggagttctactcctccctgtttgattccgccaaaggcgatggcgccaggtcgcgctcacagctgatcgagaggaagatcgaggccctggaggacatggccaccagggtcagtaaccggagatcgcggaagtggtttaacgaccgtttgctgattgaactcgtcccgcgtctttacgttgaagagatcaaaggcctattcgctcctccgccgtggggtgagcaagtgcccttgtcagcattctacagggcaaatgttggtgaatgggattccttcaggagcattgacatggatgctgaggcaagattgatgcagcatatgaaaaaatcattggaaaaacccaggaatcatgtcgatgaaggggaatcgattgcgctgaatgcttggcatcgaatagatcgacacactagagaagcaataaagagaaatttccttcctgatctgcttggaatatatgaagaacgcgttagggccttcattgaagacgctagtgacaaagatgctcttgtgctgaatgttcaggacccatttcagagactactgctccacggtgtttgtgagttctacaacgtgagctcgacaaccaccagcagtgtgagagaagatgggaggccttggaaggcaaccaccatcaagaagaggcagggcaccggcgttccctctagaatcacactagttagctttctgagaatgaagaagaatggatcgcagtaacgttagttagcgttcaagaatacaacaaaattgctttagattccgtttaggctgttgcaagacaagtgagtggtcactggcaatgtgttcttatatcgcatcagcctgctggctacggtttggaacttcctgacagaaagtagaaacttccggttct

SEQ ID NO: 10935 - protein, 290 aa, Zea mays subsp. mays
  peptide (1)..(290): Ceres Seq. ID no. 12412024
INIAWSKSFSHPIPNRPARHSLQPPLRLRRPPPTGAAVNRNRAMASADLLRREEEFYSSLFDSAKGDGARSRSQLIERKIEALEDMATRVSNRRSRKWFNDRLLIELVPRLYVEEIKGLFAPPPWGEQVPLSAFYRANVGEWDSFRSIDMDAEARLMQHMKKSLEKPRNHVDEGESIALNAWHRIDRHTREAIKRNFLPDLLGIYEERVRAFIEDASDKDALVLNVQDPFQRLLLHGVCEFYNVSSTTTSSVREDGRPWKATTIKKRQGTGVPSRITLVSFLRMKKNGSQ

SEQ ID NO: 10936 - protein, 247 aa, Zea mays subsp. mays
  peptide (1)..(247): Ceres Seq. ID no. 12412025
MASADLLRREEEFYSSLFDSAKGDGARSRSQLIERKIEALEDMATRVSNRRSRKWFNDRLLIELVPRLYVEEIKGLFAPPPWGEQVPLSAFYRANVGEWDSFRSIDMDAEARLMQHMKKSLEKPRNHVDEGESIALNAWHRIDRHTREAIKRNFLPDLLGIYEERVRAFIEDASDKDALVLNVQDPFQRLLLHGVCEFYNVSSTTTSSVREDGRPWKATTIKKRQGTGVPSRITLVSFLRMKKNGSQ

SEQ ID NO: 10937 - protein, 205 aa, Zea mays subsp. mays
  peptide (1)..(205): Ceres Seq. ID no. 12412026
MATRVSNRRSRKWFNDRLLIELVPRLYVEEIKGLFAPPPWGEQVPLSAFYRANVGEWDSFRSIDMDAEARLMQHMKKSLEKPRNHVDEGESIALNAWHRIDRHTREAIKRNFLPDLLGIYEERVRAFIEDASDKDALVLNVQDPFQRLLLHGVCEFYNVSSTTTSSVREDGRPWKATTIKKRQGTGVPSRITLVSFLRMKKNGSQ

SEQ ID NO: 10938 - DNA, 1316 bp, Zea mays subsp. mays
  misc_feature (1)..(1316): Ceres Seq. ID no. 12412019
  misc_feature (1)..(1316): Ortholog of  Ceres SEQ ID NO 15176333 as cited in SEQ ID NO 52787
  misc_feature (1)..(1316): Ortholog of  Ceres SEQ ID NO 15170403 as cited in SEQ ID NO 53457
  misc_feature (1)..(1316): Ortholog of  Ceres SEQ ID NO 14303479 as cited in SEQ ID NO 54254
  misc_feature (1)..(1316): Ortholog of  Ceres SEQ ID NO 14312047 as cited in SEQ ID NO 55656
  misc_feature (1)..(1316): Ortholog of  Ceres SEQ ID NO 12611392 as cited in SEQ ID NO 56826
  misc_feature (1)..(1316): Ortholog of  Ceres SEQ ID NO 14315846 as cited in SEQ ID NO 58094
  misc_feature (1)..(1316): Ortholog of  Ceres SEQ ID NO 13660872 as cited in SEQ ID NO 60830
  misc_feature (1)..(1316): Ortholog of  Ceres SEQ ID NO 15226831 as cited in SEQ ID NO 62916
  misc_feature (1)..(1316): Ortholog of  Ceres SEQ ID NO 12616221 as cited in SEQ ID NO 63291
  misc_feature (1)..(1316): Ortholog of  Ceres SEQ ID NO 14302355 as cited in SEQ ID NO 65830
ccaagaccaagaccaacaccactccactccctccatttccctcacctcccgcagcagctagccgccagccaacaaccgaaccaaccaaccaacccacaggccacagcgagcgagtaaagcgtccaatggtagcgatggcggccgtgcagcagcagcagcagcagcagcgccgcgacgcggaggcggagctcaacctgcccccgggcttccggttccacccgacggacgaggagctggtggcgcactacctctgcgcgcgcgccgcggggcgccgcccgccggtgtccatcatcgccgaggtcgacctgtaccgcttcgacccctgggacctgccggagcgcgccctcttcgggcgccgcaagtggtacttcttcacgccgcgggaccgcaagtaccccaacggctcccgccccaaccgcgccgccgggtcgggctactggaaggccacgggcgcggacaagcccgtggagcacgagggccggacggcggggatcaagaaggcgctcgtgttctaccacggcaagccgccgcgcggggtcaagacggagtggatcatgcacgagtaccgcctcgccgaagccggcggcgcccgcgccaagaagtccggcgccggcacgctcaggctggatgactgggtgctgtgccgcctgtacaacaagaagaacgagtgggagaagatgcagcagcagaaggagaaggagaagaaggcgatggagtcggaggcgtcgctctcgcactcccactccgacacgcggacgccggaatcggagatcgacgacgaccccgttcccggagctgggctctctaccggcgttcgacgacatgggcgcagcccccagcccctgccggcgtcgtcctgcccaaggaggaggtggaggacttcggcgacctcggcggcgacgactggctcgcgggcatcaacctcgacgacctgcagatgccgggggacgccgccgatttctacggctccatgctcgtctcgccgatggccgccaagatggagccggacggcggcttccccttcttctgagatccttcggcgactccggggacgaccggatgcagcgcaacgcaaactgtgtatagttcagattttcttcatggaaccaacaacaacaaaaaaagttcttgctaatatcttgttctagtggtgtagtgcagaagtagcagcaacatgattgaagttccattgtagtactgatgttcatcgccacttgagctgtgacaagtgacgacattctttcgtttcttggctgcaaattcttcgttgtccagaatataatttcagatgggtaatgccaattcgggacgtgttg

SEQ ID NO: 10939 - protein, 381 aa, Zea mays subsp. mays
  peptide (1)..(381): Ceres Seq. ID no. 12412020
KTKTNTTPLPPFPSPPAAASRQPTTEPTNQPTGHSERVKRPMVAMAAVQQQQQQQRRDAEAELNLPPGFRFHPTDEELVAHYLCARAAGRRPPVSIIAEVDLYRFDPWDLPERALFGRRKWYFFTPRDRKYPNGSRPNRAAGSGYWKATGADKPVEHEGRTAGIKKALVFYHGKPPRGVKTEWIMHEYRLAEAGGARAKKSGAGTLRLDDWVLCRLYNKKNEWEKMQQQKEKEKKAMESEASLSHSHSDTRTPESEIDDDPVPGAGLSTGVRRHGRSPQPLPASSCPRRRWRTSATSAATTGSRASTSTTCRCRGTPPISTAPCSSRRWPPRWSRTAASPSSEILRRLRGRPDAAQRKLCIVQIFFMEPTTTKKVLANILF

SEQ ID NO: 10940 - protein, 340 aa, Zea mays subsp. mays
  peptide (1)..(340): Ceres Seq. ID no. 12412021
MVAMAAVQQQQQQQRRDAEAELNLPPGFRFHPTDEELVAHYLCARAAGRRPPVSIIAEVDLYRFDPWDLPERALFGRRKWYFFTPRDRKYPNGSRPNRAAGSGYWKATGADKPVEHEGRTAGIKKALVFYHGKPPRGVKTEWIMHEYRLAEAGGARAKKSGAGTLRLDDWVLCRLYNKKNEWEKMQQQKEKEKKAMESEASLSHSHSDTRTPESEIDDDPVPGAGLSTGVRRHGRSPQPLPASSCPRRRWRTSATSAATTGSRASTSTTCRCRGTPPISTAPCSSRRWPPRWSRTAASPSSEILRRLRGRPDAAQRKLCIVQIFFMEPTTTKKVLANILF

SEQ ID NO: 10941 - protein, 337 aa, Zea mays subsp. mays
  peptide (1)..(337): Ceres Seq. ID no. 12412022
MAAVQQQQQQQRRDAEAELNLPPGFRFHPTDEELVAHYLCARAAGRRPPVSIIAEVDLYRFDPWDLPERALFGRRKWYFFTPRDRKYPNGSRPNRAAGSGYWKATGADKPVEHEGRTAGIKKALVFYHGKPPRGVKTEWIMHEYRLAEAGGARAKKSGAGTLRLDDWVLCRLYNKKNEWEKMQQQKEKEKKAMESEASLSHSHSDTRTPESEIDDDPVPGAGLSTGVRRHGRSPQPLPASSCPRRRWRTSATSAATTGSRASTSTTCRCRGTPPISTAPCSSRRWPPRWSRTAASPSSEILRRLRGRPDAAQRKLCIVQIFFMEPTTTKKVLANILF

SEQ ID NO: 10942 - DNA, 1516 bp, Zea mays subsp. mays
  misc_feature (1)..(1516): Ceres Seq. ID no. 12340974
  misc_feature (1)..(1516): Ortholog of  Ceres SEQ ID NO 12372734 as cited in SEQ ID NO 1206
  misc_feature (1)..(1516): Ortholog of  Ceres SEQ ID NO 13584160 as cited in SEQ ID NO 63677
aaccagctccggcccaaacacagccacgagcacctacacccccccgctgtcacctctccttccatcgccgcctcccttacccctctcgctgtgctcctccgcaccgtcattccctagcattccccacgggcgagtggcggcttggtcgagatgggcgatgcggttgatgacatcatctgtgcaacggatgcggcggtcgccgtcgaggatgcggccagtgggaagcccgcaatgctctctagcttaggggggcagggtgaggaagagcatgaggagaaggacaatgaggacaagtcaggcgagagcgaggtgatcaacccgccagaagacgctggcggggaggccacctcacccctggaagggttgaagcctcgcctttccaaggggaatcaaagccatggacctaatgctgtcaaatcaaagagcccaacgagtggagacgaaggtcagacgaggaaaaaggctcccaattcttctcttcctaaggcacccattgtccaggtgtcccatggtgacgctggtgtcggcagtaataaagatggcaagaatgagtctcgctcatcttccgtggatgcaacattgctggatgactccaaggagaaaaggaaaactcaaaagccattagcacagctcttttccatcaaaagtgacgaagaacagtcaaatggtgagagtgcaaagcctcgaaaagttggcagcattccatcatatggtttcaccttcaagtgtgatgagagatctgaaaaaagaagagagttctattcgaagcttgaggagaagattcatgcaagagagttagaaataagcaatttgcaagcgaaatcaaaggaaactgaagaagcagaactcaaaatgctgagaaagagtttgaacttcaaggcaacaccaatgccaagcttctataaggaaccaactcctgtcaaggttgaattgaaaaagatccccccaacaagagccaaatcgccaaagtttggtcgttctaaaaacaagtccacaccagagactgaagaaaatgctaccgcggaccagcctgcccacctgagcctcgaggagaatgtttctcaaaccggtgtgaaaaaaccaaccccgttgaatccagcaaagaagccccagaggaagtcactccccagactgccatctgaagaaaccggtccgcttgatgccacctcaaggcaacttataaagagcgccaagctggatgcagttagtgctccggagacaggatcagctacaggacaggcacaactacaaggaagtcagacggaaacagattctggtcaggggccagttgaagctggagctaatcctgatgaacaagacgccagcgaacagagtgttgtttagtgaagatcacgatgaccaaaccagctgatttgtgatgtgcatggtgttcctcggctttgtataatatattgtgcttgcctgctagagtaacctgtagtctgtattatgttatgtgatatatactactactcctggtttattttcctggaattgagccgtatgttgcttatcg

SEQ ID NO: 10943 - protein, 397 aa, Zea mays subsp. mays; identical to SEQ ID NO: 10816
  peptide (1)..(397): Ceres Seq. ID no. 12340975

SEQ ID NO: 10944 - protein, 370 aa, Zea mays subsp. mays; identical to SEQ ID NO: 10817
  peptide (1)..(370): Ceres Seq. ID no. 12340976

SEQ ID NO: 10945 - DNA, 1309 bp, Zea mays subsp. mays
  misc_feature (1)..(1309): Ceres Seq. ID no. 12412015
  misc_feature (1)..(1309): Ortholog of  Ceres SEQ ID NO 12593170 as cited in SEQ ID NO 63263
  misc_feature (1)..(1309): Ortholog of  Ceres SEQ ID NO 14301882 as cited in SEQ ID NO 64381
  misc_feature (1)..(1309): Ortholog of  Ceres SEQ ID NO 13597851 as cited in SEQ ID NO 64869
  misc_feature (1)..(1309): Ortholog of  Ceres SEQ ID NO 13662420 as cited in SEQ ID NO 68680
aggacgccattagcagcggttggccaccagcccaccacccgacgccggaggcccggaggaggaggcggcgatggcggggaagcacgggcgcaacggcttcgacgacgacaacgtcaaccctttcgcgggaggaagtgttccacctgccaccaattctcgtctctcacctctatcacatgaaccggctgatttctacaatgtggacattcctctcgactcatcaaaggatctgaagaaaaaggagaaagaactccaggctatggaggctgagctaaacaaaagagaacgggaattgaaaaggaaggaagaggcggcatcccgagctggcgttgtgatagaagagaaaaactggcctccctttttccccctcatccaccacgacatttccaatgaaatacctatccatctacaaaggatgcagtaccttgcattctcatcattcttgggattgatagcgtgtctcttttggaatgtcatagcaactacaacagcatggattaaaggggaaggtgttatgatctggctgcttgccattatctacttcatatctggtgcgcctggggcttatgtgttatggtatcgacctctttataatgcaatgagaactgagagcgctttgaagtttgggtggtttttcctattttacatgattcatataatattctgtgtgtgggcagctgtggctcctccattccctttcaaaggaaaatctttggctgggattttaccagcaattgatgtcataagcaagaatgctattgtcgggatattttacttcgttggatttggcttgttctgccttgaatcacttctgagcatcggtgtcattcagcaagtctacatgtatttccgtggaagtggaaaagctgcagagatgaaacgtgaggcagcacgtagtgctctaagttcagccttctgatgaacatagggcggtctgattagagcagtagatggataagggaagggaacgagatgtgccaattaagccacgcggtcttgtacatcactgcagtacgtggatttggatcgctgaaagcgtacagctgatcgtctttttgctcttctgtaaaatatgaacaatcatcatatggtccggatgcgtcagggtgttggtttcatttcttgccatggtttagatgtggttgatagggaaaacggtgaagtatttttttggagcagcgaatataatgtatcttcatcgtacttttacatgtgagtgtaatagcttatttcttgtggtaggaatacagctttgctgtgttttcgggaatgacatttgttgtgtaaggttattcacaatggctatttc

SEQ ID NO: 10946 - protein, 282 aa, Zea mays subsp. mays
  peptide (1)..(282): Ceres Seq. ID no. 12412016
MAGKHGRNGFDDDNVNPFAGGSVPPATNSRLSPLSHEPADFYNVDIPLDSSKDLKKKEKELQAMEAELNKRERELKRKEEAASRAGVVIEEKNWPPFFPLIHHDISNEIPIHLQRMQYLAFSSFLGLIACLFWNVIATTTAWIKGEGVMIWLLAIIYFISGAPGAYVLWYRPLYNAMRTESALKFGWFFLFYMIHIIFCVWAAVAPPFPFKGKSLAGILPAIDVISKNAIVGIFYFVGFGLFCLESLLSIGVIQQVYMYFRGSGKAAEMKREAARSALSSAF

SEQ ID NO: 10947 - protein, 219 aa, Zea mays subsp. mays
  peptide (1)..(219): Ceres Seq. ID no. 12412017
MEAELNKRERELKRKEEAASRAGVVIEEKNWPPFFPLIHHDISNEIPIHLQRMQYLAFSSFLGLIACLFWNVIATTTAWIKGEGVMIWLLAIIYFISGAPGAYVLWYRPLYNAMRTESALKFGWFFLFYMIHIIFCVWAAVAPPFPFKGKSLAGILPAIDVISKNAIVGIFYFVGFGLFCLESLLSIGVIQQVYMYFRGSGKAAEMKREAARSALSSAF

SEQ ID NO: 10948 - protein, 167 aa, Zea mays subsp. mays
  peptide (1)..(167): Ceres Seq. ID no. 12412018
MQYLAFSSFLGLIACLFWNVIATTTAWIKGEGVMIWLLAIIYFISGAPGAYVLWYRPLYNAMRTESALKFGWFFLFYMIHIIFCVWAAVAPPFPFKGKSLAGILPAIDVISKNAIVGIFYFVGFGLFCLESLLSIGVIQQVYMYFRGSGKAAEMKREAARSALSSAF

SEQ ID NO: 10949 - DNA, 1433 bp, Zea mays subsp. mays
  misc_feature (1)..(1433): Ceres Seq. ID no. 12413803
  misc_feature (1)..(1433): Ortholog of  Ceres SEQ ID NO 15169515 as cited in SEQ ID NO 60939
  misc_feature (1)..(1433): Ortholog of  Ceres SEQ ID NO 13584665 as cited in SEQ ID NO 65545
atgcctctcatcttcttctccgccgcagcccccctcgtcgccgtctccctgctgcccctccccacccactgctgcctccgcctcaccgccacccgcgcggccgccacgagcacaaccgccaccccgggtcccgctcccgcgagcaccttcgccgtcgaggactacctcatcgccagctgccacctcaccccaccgcaggcgctcaaggcgtccaagagcctggcgcacctcaagtccgcatccaacgcggacgcggtgctcgccttccttgcggacctcgggctctccccaaaggaggtggccgccgttgtggcgtccaatccgcgtgtcctctgcgctcgcatcgaccgttccctggctcctatctccacggagctccgcgcgctcggcctctccccgtcccagatcgcgcgcctcgcgcagatcgccggccgctacttcctctgccgcagcttcgtctccaaggtacggttctggctcccgctcttcggctcccccgagcggctcctccaggccagcgactggaactactggctcctcagctccgacctcgagaaggtggtggagcccaacgtggccttcctcaggaagtgcggcctcagcgcagtcgacatcgccaagctgctcgtggccgcgccgcggctcgtcaccatgcctccggagtatgtccaggacgcggtgcggcgtgccacgcagctcggcgtggcgccgggctcccagatgtttcgccacgcgctctccaccgcgggatgtatcgggcaggagaaggtcgactccaaggtcgccgtcctcaaggagacgctcgggtggtcgcaggaggaggtgagcctggccatcagtaaggcgccgcggatcctggttgcgtccgaggagaggctgcgccggaacgcggagttcctgctcaatgaggtcgggctgccgccgcagtacatcgcccgccgttcggtgcttctcatgtacagcctggagaggcggatagtgccccggcacctcgtgctggtggttctcaaagagaaggggttggttgagcaggaccggtgcttcttcaacgtggtggcaccaacagaagagaaattcttggagaaattcgttgctccctacgaggaatccatccctggtcttgccgatgcttacgagtctgcttgtatggggaaagtgacccggggtctatgactggaatgtcgaggagaatttcgaaggtgtgtgttccctccattgtgcatttgtgtaacctcattctactgatctcgcttcaacagaaaaattattccactgatgaactatcgaagacaaaggcagtttcgtggacattagcttaggtccacactagtaacagcataaattcatgttatagccatgaaaatgttcatttctaacttaaggatcgtttcatatgaaagtgcaagcaataaaattttttcccatgagatttt

SEQ ID NO: 10950 - protein, 390 aa, Zea mays subsp. mays
  peptide (1)..(390): Ceres Seq. ID no. 12413804
MPLIFFSAAAPLVAVSLLPLPTHCCLRLTATRAAATSTTATPGPAPASTFAVEDYLIASCHLTPPQALKASKSLAHLKSASNADAVLAFLADLGLSPKEVAAVVASNPRVLCARIDRSLAPISTELRALGLSPSQIARLAQIAGRYFLCRSFVSKVRFWLPLFGSPERLLQASDWNYWLLSSDLEKVVEPNVAFLRKCGLSAVDIAKLLVAAPRLVTMPPEYVQDAVRRATQLGVAPGSQMFRHALSTAGCIGQEKVDSKVAVLKETLGWSQEEVSLAISKAPRILVASEERLRRNAEFLLNEVGLPPQYIARRSVLLMYSLERRIVPRHLVLVVLKEKGLVEQDRCFFNVVAPTEEKFLEKFVAPYEESIPGLADAYESACMGKVTRGL

SEQ ID NO: 10951 - protein, 279 aa, Zea mays subsp. mays
  peptide (1)..(279): Ceres Seq. ID no. 12413805
ASHLLLRRSPPRRRLPAAPPHPLLPPPHRHPRGRHEHNRHPGSRSREHLRRRGLPHRQLPPHPTAGAQGVQEPGAPQVRIQRGRGARLPCGPRALPKGGGRRCGVQSACPLRSHRPFPGSYLHGAPRARPLPVPDRAPRADRRPLLPLPQLRLQGTVLAPALRLPRAAPPGQRLELLAPQLRPREGGGAQRGLPQEVRPQRSRHRQAARGRAAARHHASGVCPGRGAACHAARRGAGLPDVSPRALHRGMYRAGEGRLQGRRPQGDARVVAGGGEPGHQ

SEQ ID NO: 10952 - protein, 274 aa, Zea mays subsp. mays
  peptide (1)..(274): Ceres Seq. ID no. 12413806
CLSSSSPPQPPSSPSPCCPSPPTAASASPPPARPPRAQPPPRVPLPRAPSPSRTTSSPAATSPHRRRSRRPRAWRTSSPHPTRTRCSPSLRTSGSPQRRWPPLWRPIRVSSALASTVPWLLSPRSSARSASPRPRSRASRRSPAATSSAAASSPRYGSGSRSSAPPSGSSRPATGTTGSSAPTSRRWWSPTWPSSGSAASAQSTSPSCSWPRRGSSPCLRSMSRTRCGVPRSSAWRRAPRCFATRSPPRDVSGRRRSTPRSPSSRRRSGGRRRR

SEQ ID NO: 10953 - DNA, 1360 bp, Zea mays subsp. mays
  misc_feature (1)..(1360): Ceres Seq. ID no. 12412012
  misc_feature (1)..(1360): Ortholog of  Ceres SEQ ID NO 13598511 as cited in SEQ ID NO 64088
  misc_feature (1)..(1360): Ortholog of  Ceres SEQ ID NO 15179110 as cited in SEQ ID NO 0
atcagggccggacactacactaccatttttcctttcgcagcgtcccgtctgtctgtctgtctgcctccctccgctcacctcctctgcttcttctcgctttcttccatcttggtccagcctccactcttcctgctgagccatggcggctgccgaagaagggccagagccactcaggtatcagactctggccctgagggtgagcatccactgcgagggttgcaagaagaaggtgaagaaggtgctccacagcatagaaggggtgtacaagacggacatagacacgcagcagcagaaggtggtggtcataggcaacgtctctgcagacgcgctcgtcaagaagctcctcaagtccgggaagcacgcggagccgtggccggagcctgctccagccccaccggccgccgacagcccgcccgggcccgacggatctcccggcagcgcaggcaagaagaagaaaaagaagaagggcaacaagagccccgaggcggcgaacaacaagcccgccgatccggcgccagcgcccgcgcccgcgccggcggagggcaacggcggacccaaccccccggagcagcacgacaaggctgacggcggcgcctcgtgcgatgaggcatcggatggtgagcaggataagcctgaggctggcggtggcggcggcaacggctcccctgacgccggagaagccaacgagggcggcaaggtggccccttccgccatgacgccgcacggcccgcagcccatcgcggctgccaccaacagcaatggtggtggtggtggtggcggcggcggcggcaagaagaaaggcaagaaaggtggccacggcaatgccaacagagacggcgccgggccaatcgtcgaggtccagcccccgccggacgcacccacgaagccggccgccggcaactccggccctctcactgtcatcgacgcgggaccgtacccaccaccggcagcggcggcgatgagctacccagggtactacgccgccggggtccacccgccggcgtacgtcatgagctacagcacggcgcacccgagctctgcgctccggagcagcgcgtactaccacccgatggccggtgcgccgtacacaccagggagcggcggcgggtacttctactcgacggcgccggcgccggcgccggcggcgcccggatcgtactacatgttcagcgaggagaacgccaacgcatgcagcgtcatgtgagaagattagacggttaataatcaactcaactcaattattaactgcaagaagatgttgcagagagtggatgtgctagtcattatgctcttgttgtgcccaagaactggttgtcattgcaacgttattttgctgtatctgcaaaatacatggattttg

SEQ ID NO: 10954 - protein, 354 aa, Zea mays subsp. mays
  peptide (1)..(354): Ceres Seq. ID no. 12412013
MAAAEEGPEPLRYQTLALRVSIHCEGCKKKVKKVLHSIEGVYKTDIDTQQQKVVVIGNVSADALVKKLLKSGKHAEPWPEPAPAPPAADSPPGPDGSPGSAGKKKKKKKGNKSPEAANNKPADPAPAPAPAPAEGNGGPNPPEQHDKADGGASCDEASDGEQDKPEAGGGGGNGSPDAGEANEGGKVAPSAMTPHGPQPIAAATNSNGGGGGGGGGGKKKGKKGGHGNANRDGAGPIVEVQPPPDAPTKPAAGNSGPLTVIDAGPYPPPAAAAMSYPGYYAAGVHPPAYVMSYSTAHPSSALRSSAYYHPMAGAPYTPGSGGGYFYSTAPAPAPAAPGSYYMFSEENANACSVM

SEQ ID NO: 10955 - protein, 194 aa, Zea mays subsp. mays
  peptide (1)..(194): Ceres Seq. ID no. 12412014
IRAGHYTTIFPFAASRLSVCLPPSAHLLCFFSLSSILVQPPLFLLSHGGCRRRARATQVSDSGPEGEHPLRGLQEEGEEGAPQHRRGVQDGHRHAAAEGGGHRQRLCRRARQEAPQVREARGAVAGACSSPTGRRQPARARRISRQRRQEEEKEEGQQEPRGGEQQARRSGASARARAGGGQRRTQPPGAARQG

SEQ ID NO: 10956 - DNA, 1546 bp, Zea mays subsp. mays
  misc_feature (1)..(1546): Ceres Seq. ID no. 12412008
  misc_feature (1)..(1546): Ortholog of  Ceres SEQ ID NO 14314464 as cited in SEQ ID NO 52405
  misc_feature (1)..(1546): Ortholog of  Ceres SEQ ID NO 15177592 as cited in SEQ ID NO 58436
  misc_feature (1)..(1546): Ortholog of  Ceres SEQ ID NO 13655251 as cited in SEQ ID NO 62888
  misc_feature (1)..(1546): Ortholog of  Ceres SEQ ID NO 13597194 as cited in SEQ ID NO 63661
  misc_feature (1)..(1546): Ortholog of  Ceres SEQ ID NO 14302883 as cited in SEQ ID NO 66384
  misc_feature (1)..(1546): Ortholog of  Ceres SEQ ID NO 13662855 as cited in SEQ ID NO 69059
atactgcatcataccgcaccggcagtggcggagaaaagagatgagccagccggggccgggagccatcgccgcctcatgcctcccgactccgtgacggcccgcagccacaggccaccggataacgcacacagcggaaccatccaaaaacgcgggagctttcccccgtcaaagcccccaccctaatcccccgtctcgcgcgccaatcaaccagcaccgggagcaggagcaagagcaactcaccctcccctccggcttccgcggaactaggagctgccatgcagcccgacgccaacgctccctcgcaccgcctcgcccgcgtcgccgcgcacctaaacccccagcggccgcagatggaggaaggcgcgtccgcactgaggctcgtggtgtgccgcgccaagggcggcgcgccggggttcaaggtcgcgatcctgggcgccgcgggcgggatcggacagccgctgtcactgctcatgaagatgaatcctctcgtgtccgtgctgcacctctacgatgtcgtcaacacgccccggggtcacggccgatgtcagccacatggacaccagcgctgtggtccgcggcttccttggggcacagcagcttgatgccgcacttacaggaatggaccttgtaatcatacccgctggactccctaggaaaccaggaatgacaagagatgatttattcaacaaaaatgctgggattgttcgtacactatgtgaaggcgttgcaagatgctgtcctaatgcaattgtgaatctgatcagcaacccagtgaactcaactgtccccattgctgctgaggttttcaagaaagctggaacttatgatcccaagcggcttcttggagtgacaacactcgatgttgcgagggctaacacctttgtggccgaagtgcttggagttgatccaagagatgtcagtgttcctgttgttggagggcatgctgggataactatattgcccctcctctcccaggttacacctccgagctcattcactcaggatgaaaccagatatttgacagaccgcatacagaatggtggcacagaagttgtggaggcaaaggctggatcaggctccgcgactctgtcaatggcttttgctgcttctaaattcgctgacgcatgcttgcaagctatgcggggcgaagctggaatcgtggaatgctcatatgttgcatccgaggtgacagaactgccgttctttgcaacgaaagtgaggcttggccgtggtggagccgaggagatcctcccgcttggccctttgaatgatttcgagagagctggtctggaagcggcaaagaaggaactgggcgagagcattcagaagggcatcgctttcatgagcaagtgaagtggtacggagggagatcgtccctgagtcagatccggaccatacgtagtaacgtagatgtagggtgttgtgatatagtgctcctacctatacttgtaaggccacggtaaaaagaaggctaattaccctttagcaactgtgaccatctacttggcataatggcatggaataaatctttcgtcttcggtggcgg

SEQ ID NO: 10957 - protein, 280 aa, Zea mays subsp. mays
  peptide (1)..(280): Ceres Seq. ID no. 12412009
MSSTRPGVTADVSHMDTSAVVRGFLGAQQLDAALTGMDLVIIPAGLPRKPGMTRDDLFNKNAGIVRTLCEGVARCCPNAIVNLISNPVNSTVPIAAEVFKKAGTYDPKRLLGVTTLDVARANTFVAEVLGVDPRDVSVPVVGGHAGITILPLLSQVTPPSSFTQDETRYLTDRIQNGGTEVVEAKAGSGSATLSMAFAASKFADACLQAMRGEAGIVECSYVASEVTELPFFATKVRLGRGGAEEILPLGPLNDFERAGLEAAKKELGESIQKGIAFMSK

SEQ ID NO: 10958 - protein, 266 aa, Zea mays subsp. mays
  peptide (1)..(266): Ceres Seq. ID no. 12412010
MDTSAVVRGFLGAQQLDAALTGMDLVIIPAGLPRKPGMTRDDLFNKNAGIVRTLCEGVARCCPNAIVNLISNPVNSTVPIAAEVFKKAGTYDPKRLLGVTTLDVARANTFVAEVLGVDPRDVSVPVVGGHAGITILPLLSQVTPPSSFTQDETRYLTDRIQNGGTEVVEAKAGSGSATLSMAFAASKFADACLQAMRGEAGIVECSYVASEVTELPFFATKVRLGRGGAEEILPLGPLNDFERAGLEAAKKELGESIQKGIAFMSK

SEQ ID NO: 10959 - protein, 244 aa, Zea mays subsp. mays
  peptide (1)..(244): Ceres Seq. ID no. 12412011
MDLVIIPAGLPRKPGMTRDDLFNKNAGIVRTLCEGVARCCPNAIVNLISNPVNSTVPIAAEVFKKAGTYDPKRLLGVTTLDVARANTFVAEVLGVDPRDVSVPVVGGHAGITILPLLSQVTPPSSFTQDETRYLTDRIQNGGTEVVEAKAGSGSATLSMAFAASKFADACLQAMRGEAGIVECSYVASEVTELPFFATKVRLGRGGAEEILPLGPLNDFERAGLEAAKKELGESIQKGIAFMSK

SEQ ID NO: 10960 - DNA, 1709 bp, Zea mays subsp. mays
  misc_feature (1)..(1709): Ceres Seq. ID no. 12360736
  misc_feature (1)..(1709): Ortholog of  Ceres SEQ ID NO 15179593 as cited in SEQ ID NO 1057
  misc_feature (1)..(1709): Ortholog of  Ceres SEQ ID NO 14306904 as cited in SEQ ID NO 53566
  misc_feature (1)..(1709): Ortholog of  Ceres SEQ ID NO 13658640 as cited in SEQ ID NO 66419
gcacgagaccattacctagaacatcctaatcgaaaaaacccccagcagccgcgtgacacggtcactcgcgccacccgttctgcacctcggcccttctcatggcgacgcccgcctccgcgccggccacaccaaaccctaaccccgtctccggcgacccgccgtcgctgctgctacagcagcagcaggaggaagaggtgccagcgccggtcccggagacggcgccgacgcccctcaccacctcgatcgaccccaccccctccggcggcgaggagggcgaaagcgatgactcctcgtccgtctggtcggcgccctcctccgcgcccacccccgtcctcgcccccgcccccgcccccgcggcgccctcccccgcggccaaggacatcctccacatctccttcaaccaggactacggctgcttcgcagcgggcaccaagtcgggcttccgcatctacaactgcgaccccttccgagagatcttccgccgggacctcgccgccgagggcggagtcggcgccgggggagggggtatcggcgtcgtcgagatgctgttccgctgcaacatactcgcgctcgtcggcggcggagataacccccactacccgcccaacaaggtcatgatctgggacgatcaccagagccgctgcatcggggagctctccttccgctcccccgtccggggcgttcgtctccggcgcgagcgcatcatcgtggtgctcgagaacaaaatcttcgtctacaacttcgcggaccttaagctgttgcaccagatcgacactttgagcaaccccaagggcctctgcgccgtgtcacagcagcccgggtccattgtgcttgtttgccctggtgcccagaaggggcaggttagggtggaacactataagacaaggaagaccaagtttatcaatgcacacacttcccgcgtcgcgtgctttgcgttgtcgcaggatgggaggctcattgcgactgctagcaccaaggggactcttgttagaatctacaatgcagctgaaggcaatctcttgcaggaagtaaggagaggtgctgatagagcagaaatatatagcttggctttctcgaatgatttgcagtatttggctgtctccagtgataaaggaacaatacatgtcttcaacttaaagataaatgtgggatcaactgcaaatgacaagcctatgccttctccggatcctgaagttcctcacataaggccctctctttcattcattaagggtgtgctgccaaaatattttcactctgaatggtcagtagcccaattcaggctgcaggagggtgaacactatattgttgcatttggacatgagaagaatactgtggcagtcgttggcatggatggaagcttctacagatgccggtttgatccagtcaacggaggagaaatgctgcagctggattgctacagtttcctgaaaccgtcggatcaaccgtagtcactagtccgtagcaacgcaacatactgtcagcatcaccctcaatctattcatgcccactaccgcggtaccaggattgtacattatctttgtgtgccttcgttgactcgtgggtttagcaaaaataataatagtttatttgtaaatatatatttcttgttggctctgctgtttgttctgcggaagggctaaatcacccgtctgcagacgaacgtagtagaatgcatcgttatttatttcatgaataaaataaagtagccg

SEQ ID NO: 10961 - protein, 449 aa, Zea mays subsp. mays
  peptide (1)..(449): Ceres Seq. ID no. 12360737
MATPASAPATPNPNPVSGDPPSLLLQQQQEEEVPAPVPETAPTPLTTSIDPTPSGGEEGESDDSSSVWSAPSSAPTPVLAPAPAPAAPSPAAKDILHISFNQDYGCFAAGTKSGFRIYNCDPFREIFRRDLAAEGGVGAGGGGIGVVEMLFRCNILALVGGGDNPHYPPNKVMIWDDHQSRCIGELSFRSPVRGVRLRRERIIVVLENKIFVYNFADLKLLHQIDTLSNPKGLCAVSQQPGSIVLVCPGAQKGQVRVEHYKTRKTKFINAHTSRVACFALSQDGRLIATASTKGTLVRIYNAAEGNLLQEVRRGADRAEIYSLAFSNDLQYLAVSSDKGTIHVFNLKINVGSTANDKPMPSPDPEVPHIRPSLSFIKGVLPKYFHSEWSVAQFRLQEGEHYIVAFGHEKNTVAVVGMDGSFYRCRFDPVNGGEMLQLDCYSFLKPSDQP

SEQ ID NO: 10962 - protein, 301 aa, Zea mays subsp. mays
  peptide (1)..(301): Ceres Seq. ID no. 12360738
MLFRCNILALVGGGDNPHYPPNKVMIWDDHQSRCIGELSFRSPVRGVRLRRERIIVVLENKIFVYNFADLKLLHQIDTLSNPKGLCAVSQQPGSIVLVCPGAQKGQVRVEHYKTRKTKFINAHTSRVACFALSQDGRLIATASTKGTLVRIYNAAEGNLLQEVRRGADRAEIYSLAFSNDLQYLAVSSDKGTIHVFNLKINVGSTANDKPMPSPDPEVPHIRPSLSFIKGVLPKYFHSEWSVAQFRLQEGEHYIVAFGHEKNTVAVVGMDGSFYRCRFDPVNGGEMLQLDCYSFLKPSDQP

SEQ ID NO: 10963 - protein, 277 aa, Zea mays subsp. mays
  peptide (1)..(277): Ceres Seq. ID no. 12360739
MIWDDHQSRCIGELSFRSPVRGVRLRRERIIVVLENKIFVYNFADLKLLHQIDTLSNPKGLCAVSQQPGSIVLVCPGAQKGQVRVEHYKTRKTKFINAHTSRVACFALSQDGRLIATASTKGTLVRIYNAAEGNLLQEVRRGADRAEIYSLAFSNDLQYLAVSSDKGTIHVFNLKINVGSTANDKPMPSPDPEVPHIRPSLSFIKGVLPKYFHSEWSVAQFRLQEGEHYIVAFGHEKNTVAVVGMDGSFYRCRFDPVNGGEMLQLDCYSFLKPSDQP

SEQ ID NO: 10964 - DNA, 1594 bp, Zea mays subsp. mays
  misc_feature (1)..(1594): Ceres Seq. ID no. 12408178
  misc_feature (1)..(1594): Ortholog of  Ceres SEQ ID NO 13599520 as cited in SEQ ID NO 633
  misc_feature (1)..(1594): Ortholog of  Ceres SEQ ID NO 13595142 as cited in SEQ ID NO 56671
  misc_feature (1)..(1594): Ortholog of  Ceres SEQ ID NO 15168569 as cited in SEQ ID NO 58123
  misc_feature (1)..(1594): Ortholog of  Ceres SEQ ID NO 15226382 as cited in SEQ ID NO 63295
  misc_feature (1)..(1594): Ortholog of  Ceres SEQ ID NO 13598460 as cited in SEQ ID NO 63382
attttttccgcgccgccggttcgtgccaaaaccctactccctagaaaatgcagcggcgcctaagctgaaatcagtgaatcgtgcgccgcggcgaagagagaactcgaactcggcaggacttgtgcgggaggaggaggggagcgggggtcagagagggagatagagatcatcaggtttgccatgtcctccagggctggcggcggcaagccgttgtggtctgcctccaccatcgtcgccaaagtcgcgagtgggtaccacatcctcaggatcgatggctactccaggaccatggagacccccacaggagagtccatcgcgtccctcccgttctcggtgggcggccgttgctggcgcattcgctactaccccaacggcgacaagttggagaataaagaatacatctcgctttatctttatctccacgacagaagcgtcgaggcagagaaggcgcagttaatgttccgtttcgtcggtgacgtagcggagcagccgttgattctgggaagactgcataccttcgaaaagcaaggttgggggtacgccaagttcatcaaaaggaaagatttggaagagtcgaagcatctcgtggacgattctttttccatcaggtgcgatgtggccgtgcgcttcaacgatgtccgcgtggagaaggcgccggaagccgctgctgcagcatctatgatttccgtgcaaccatctgacctgcaccagcacctcggcagtctcctgctgacccagaagggcgccgatgtggtgttcgacgtcgccggtgagacgttcgccgcgcaccggtgcgtgctcgcagcccgctctcctgtcttcactgcagagctctttggtgcgatgaaagagggccacaccggaggcgtggtgcgcatagaggacatggaacctcgggcgttcaaggcattgctctacttcctttacaccgatttactattcccaaagacaatggcaacgacgatgaatcaagctgaagacggagacgtaggcgacgacgatgaagacgttctgtgtcagcacctactggtcgctgcagacaaatacaacttggagaggctgaaatcgctatgtgaaaagaagctgtctgagtgcatccatgtgggcacggtagcaatcatcctgacgctagctgagcaacaccgctgccctggactgaagaaggtgtgcctccattttctcagatctcctgcaaatttgagggcagtcgcctccagcgacgcctttaagcatctgagcagcagctgcccctctgttatggtggagttggttgccatgcttggcaactcagcgtagaccttcatctaagcaggaaactgcacttggtgtttttttctggatcgacttgtattatcaagcggtcttggaaaaaatgctactagttcatagtgtccacttccagtagctatgcatcctaagtttcaagtagattctgaagtagttgaatccgttggcgcttttggtacaccatttcgcagcggatgattttggtatctggtagctagctttgaatgtctgccagaagtccgtctatgatgtccttaacatacaattctcagacgttggaaacttggaatgcaatgcagttcttgtt

SEQ ID NO: 10965 - protein, 371 aa, Zea mays subsp. mays
  peptide (1)..(371): Ceres Seq. ID no. 12408179
MSSRAGGGKPLWSASTIVAKVASGYHILRIDGYSRTMETPTGESIASLPFSVGGRCWRIRYYPNGDKLENKEYISLYLYLHDRSVEAEKAQLMFRFVGDVAEQPLILGRLHTFEKQGWGYAKFIKRKDLEESKHLVDDSFSIRCDVAVRFNDVRVEKAPEAAAAASMISVQPSDLHQHLGSLLLTQKGADVVFDVAGETFAAHRCVLAARSPVFTAELFGAMKEGHTGGVVRIEDMEPRAFKALLYFLYTDLLFPKTMATTMNQAEDGDVGDDDEDVLCQHLLVAADKYNLERLKSLCEKKLSECIHVGTVAIILTLAEQHRCPGLKKVCLHFLRSPANLRAVASSDAFKHLSSSCPSVMVELVAMLGNSA

SEQ ID NO: 10966 - protein, 335 aa, Zea mays subsp. mays
  peptide (1)..(335): Ceres Seq. ID no. 12408180
METPTGESIASLPFSVGGRCWRIRYYPNGDKLENKEYISLYLYLHDRSVEAEKAQLMFRFVGDVAEQPLILGRLHTFEKQGWGYAKFIKRKDLEESKHLVDDSFSIRCDVAVRFNDVRVEKAPEAAAAASMISVQPSDLHQHLGSLLLTQKGADVVFDVAGETFAAHRCVLAARSPVFTAELFGAMKEGHTGGVVRIEDMEPRAFKALLYFLYTDLLFPKTMATTMNQAEDGDVGDDDEDVLCQHLLVAADKYNLERLKSLCEKKLSECIHVGTVAIILTLAEQHRCPGLKKVCLHFLRSPANLRAVASSDAFKHLSSSCPSVMVELVAMLGNSA

SEQ ID NO: 10967 - protein, 279 aa, Zea mays subsp. mays
  peptide (1)..(279): Ceres Seq. ID no. 12408181
MFRFVGDVAEQPLILGRLHTFEKQGWGYAKFIKRKDLEESKHLVDDSFSIRCDVAVRFNDVRVEKAPEAAAAASMISVQPSDLHQHLGSLLLTQKGADVVFDVAGETFAAHRCVLAARSPVFTAELFGAMKEGHTGGVVRIEDMEPRAFKALLYFLYTDLLFPKTMATTMNQAEDGDVGDDDEDVLCQHLLVAADKYNLERLKSLCEKKLSECIHVGTVAIILTLAEQHRCPGLKKVCLHFLRSPANLRAVASSDAFKHLSSSCPSVMVELVAMLGNSA

SEQ ID NO: 10968 - DNA, 1233 bp, Zea mays subsp. mays
  misc_feature (1)..(1233): Ceres Seq. ID no. 12423932
  misc_feature (1)..(1233): Ortholog of  Ceres SEQ ID NO 13597757 as cited in SEQ ID NO 65472
ctctctcaaattcacaaggccccgccgccgccgcctcgtcccccattcatcttcgccgaaaccctaaccctagtcgccgcggccacccttcccggcgacgccatgtcgaacccgaagggctccaagatgctccagttcatcaactaccgcatgcgggtgacgatccaggacgggcgccaacttgtgggcaagttcatggcgttcgaccgccacatgaacctcgtcctcggcgattgcgaggagtttcgccgcctcccgccctccaagtcctccaagactaccggtgaacgcgaagagcgccgcacgctcggcctcctcctcctccgcggcgaggaggtagtatccatgaccgtcgagggcccaccaccgcccgacgagtcccgcgccaaggccgcggcggcgggcggagccctcgccggccctggcatcggccgcgccgctgggcgcggtgtgcccaccggcccgctgctccaggcagctcctgggctcgctggtcctgtacgtggggttggtggacccgcccccggcatgatgcagccccagatctngcggccgccgatgcccaacctgtcggcccagccggtgtngtatccgcaggtcgtgcgcccgccgcaggggatgcctcccccaatgcgtcctggaatgccgccgcagatgcagatgccgttccgcccgcctggagcgccgcctgctccgttccctggggcaccgccacaacagttcatgaggggaccaccgccgatggggccgccacaagtgaggcccgggatgccggggccaccacctcctggaatgaggcctggaatgcctccgccaccattcggacagccgaggccagggatgccacctccgccacctggcccgcagcagcctggacagaacccgcctcagtagttccttacctggataagcttcttgcagatacacctatgggagatttttttgtatcgcgagaaaggatcataaatcacacctatggaagacgaagacctgtgaattgcaccaatgctttcaccattctgtctcatatcagggtatctagtgtgtaccactcatcctttgatgtgagaggggactttgtatgtaaagaggccaggactttaactgttggtattggttaagttaggaaatatggataacttatttcatcgttgtcttaattctggacccacccttttccgtgtgtgtcgatgaagcgaggtaattgacttgtagaaattactttctggtttc

SEQ ID NO: 10969 - protein, 297 aa, Zea mays subsp. mays
  peptide (1)..(297): Ceres Seq. ID no. 12423933
  misc_feature (183)..(183): Xaa is any aa, unknown or other
  misc_feature (196)..(196): Xaa is any aa, unknown or other
LSQIHKAPPPPPRPPFIFAETLTLVAAATLPGDAMSNPKGSKMLQFINYRMRVTIQDGRQLVGKFMAFDRHMNLVLGDCEEFRRLPPSKSSKTTGEREERRTLGLLLLRGEEVVSMTVEGPPPPDESRAKAAAAGGALAGPGIGRAAGRGVPTGPLLQAAPGLAGPVRGVGGPAPGMMQPQIXRPPMPNLSAQPVXYPQVVRPPQGMPPPMRPGMPPQMQMPFRPPGAPPAPFPGAPPQQFMRGPPPMGPPQVRPGMPGPPPPGMRPGMPPPPFGQPRPGMPPPPPGPQQPGQNPPQ

SEQ ID NO: 10970 - protein, 263 aa, Zea mays subsp. mays
  peptide (1)..(263): Ceres Seq. ID no. 12423934
  misc_feature (149)..(149): Xaa is any aa, unknown or other
  misc_feature (162)..(162): Xaa is any aa, unknown or other
MSNPKGSKMLQFINYRMRVTIQDGRQLVGKFMAFDRHMNLVLGDCEEFRRLPPSKSSKTTGEREERRTLGLLLLRGEEVVSMTVEGPPPPDESRAKAAAAGGALAGPGIGRAAGRGVPTGPLLQAAPGLAGPVRGVGGPAPGMMQPQIXRPPMPNLSAQPVXYPQVVRPPQGMPPPMRPGMPPQMQMPFRPPGAPPAPFPGAPPQQFMRGPPPMGPPQVRPGMPGPPPPGMRPGMPPPPFGQPRPGMPPPPPGPQQPGQNPPQ

SEQ ID NO: 10971 - protein, 255 aa, Zea mays subsp. mays
  peptide (1)..(255): Ceres Seq. ID no. 12423935
  misc_feature (141)..(141): Xaa is any aa, unknown or other
  misc_feature (154)..(154): Xaa is any aa, unknown or other
MLQFINYRMRVTIQDGRQLVGKFMAFDRHMNLVLGDCEEFRRLPPSKSSKTTGEREERRTLGLLLLRGEEVVSMTVEGPPPPDESRAKAAAAGGALAGPGIGRAAGRGVPTGPLLQAAPGLAGPVRGVGGPAPGMMQPQIXRPPMPNLSAQPVXYPQVVRPPQGMPPPMRPGMPPQMQMPFRPPGAPPAPFPGAPPQQFMRGPPPMGPPQVRPGMPGPPPPGMRPGMPPPPFGQPRPGMPPPPPGPQQPGQNPPQ

SEQ ID NO: 10972 - DNA, 554 bp, Zea mays subsp. mays
  misc_feature (1)..(554): Ceres Seq. ID no. 12414961
  misc_feature (1)..(554): Ortholog of  Ceres SEQ ID NO 13596609 as cited in SEQ ID NO 63070
gttgctttcgttgagatcttaattaccagcccccaacttcgcgtgcagaccgcgagagaatacaagctcgcggacctcactcccatggagtcgggttgctgccgcccgccagcagagtgcgggttcccagctctgaacgcgtcctatttcgatctgagctatcacccggcgagcgccaacgccgactgcaaactgtacaggaacgcgcgctctgtccggtgctacgactgcagctcttgcaaagctggtgtcgcgcagtacatgaagacggagtggcgagtggtggctatcttcaacgtgatattgttcgtcatcctgtcgttcgtgtacttcgttggctgctgcgcgcggcgaaacgctggaggaggcgacgcgaaaggccgtggcaggtgacgggatcacttcttcgaggtgaagtgaagcgcttggccatcctatgtggagttagttaagcttagtatcaacaccccccctgtaaaattgttccatcaaaatattcaaagttcctttgatgaagtaccaggacctgtcgctgcctagtaatactctgttgc

SEQ ID NO: 10973 - protein, 130 aa, Zea mays subsp. mays
  peptide (1)..(130): Ceres Seq. ID no. 12414962
VAFVEILITSPQLRVQTAREYKLADLTPMESGCCRPPAECGFPALNASYFDLSYHPASANADCKLYRNARSVRCYDCSSCKAGVAQYMKTEWRVVAIFNVILFVILSFVYFVGCCARRNAGGGDAKGRGR

SEQ ID NO: 10974 - protein, 102 aa, Zea mays subsp. mays
  peptide (1)..(102): Ceres Seq. ID no. 12414963
MESGCCRPPAECGFPALNASYFDLSYHPASANADCKLYRNARSVRCYDCSSCKAGVAQYMKTEWRVVAIFNVILFVILSFVYFVGCCARRNAGGGDAKGRGR

SEQ ID NO: 10975 - DNA, 1368 bp, Zea mays subsp. mays
  misc_feature (1)..(1368): Ceres Seq. ID no. 12343891
  misc_feature (1)..(1368): Ortholog of  Ceres SEQ ID NO 15170609 as cited in SEQ ID NO 52683
agagggggcagtgcagaaggcatgtttccgatggcgtcttcctcactgtcgtcgccgccgctatcacttatcctcctccggccgctcccgtgcatacccgtcctcctcttgagacaaaggaagccattcccagctgtccgcgtagaagcaaggtctcagcagcggttgcagcggaggccggtgactggccagtggaggaggagctgcagaaggggcggaggctacgcgtgtttctcctacaatgccaagaacaagacgcccccgccttcagataagagttcagacgagtgggcgatcgttcgccgatgggatgtgccatgggaatggcaaactgttgtgctcagcatggtaggctgtggagtaagctttgttctgacaggattggttgagcaattggctttgcaagaactgggatttaaagctgtggaggcaactatagatgagaaggcagaaatactcttctttgggcagctgagtgtgacagtagtagtgcttggtgttatatttggcatcaccaacacttttcgaccattcccagatgatgtgtttcgttatcatattaaagaaccgttcaagctgcaaaatggatggcttttgtgggctggaattggtctctttggagcagtaatttctattgccttagccggagctgctatgacttatctgaatggtgaaactccagcgagagagactgattcactagtccttttgttgccgctgattggctcatccactaccagtactgcctttttggtgggaatcactggagttctagcaccacttctcgaggagacactgtttcgaggatttctaatggtgtccttgactaagtggtttcctactccagcttgtgtacttgtcagtgctgctgtatttgcccttgctcatctgactcctggacaatttccgcagctgtttatacttggtgttgcattgggattttcatatgctcagacccgcaatcttctaactccgatcacaattcatgcattttggaactcaggagtaatacttctgctaacctttcttcagctgcaaggatatgatctcaaggagctcttgggagcatcgtgaaggtttgaacgaaccaggcacatataatttgtgcataatatatatggtatcaaggagatccgttgggtatgtgctcttgtacacctgatgccaacaaaactacgtgaaaggaaatatgagtcttcaagttagctgatggttgcgtttccagaagtgttacgaggcatcactagtctgtaaagctgtttatacagtataagatggcagattgaacttaacgtaagaacagctgcccttttgagagtgtttcttacaactggagtactcgattaaattgtgctgatattgtttgtt

SEQ ID NO: 10976 - protein, 357 aa, Zea mays subsp. mays
  peptide (1)..(357): Ceres Seq. ID no. 12343892
RGGSAEGMFPMASSSLSSPPLSLILLRPLPCIPVLLLRQRKPFPAVRVEARSQQRLQRRPVTGQWRRSCRRGGGYACFSYNAKNKTPPPSDKSSDEWAIVRRWDVPWEWQTVVLSMVGCGVSFVLTGLVEQLALQELGFKAVEATIDEKAEILFFGQLSVTVVVLGVIFGITNTFRPFPDDVFRYHIKEPFKLQNGWLLWAGIGLFGAVISIALAGAAMTYLNGETPARETDSLVLLLPLIGSSTTSTAFLVGITGVLAPLLEETLFRGFLMVSLTKWFPTPACVLVSAAVFALAHLTPGQFPQLFILGVALGFSYAQTRNLLTPITIHAFWNSGVILLLTFLQLQGYDLKELLGAS

SEQ ID NO: 10977 - protein, 350 aa, Zea mays subsp. mays
  peptide (1)..(350): Ceres Seq. ID no. 12343893
MFPMASSSLSSPPLSLILLRPLPCIPVLLLRQRKPFPAVRVEARSQQRLQRRPVTGQWRRSCRRGGGYACFSYNAKNKTPPPSDKSSDEWAIVRRWDVPWEWQTVVLSMVGCGVSFVLTGLVEQLALQELGFKAVEATIDEKAEILFFGQLSVTVVVLGVIFGITNTFRPFPDDVFRYHIKEPFKLQNGWLLWAGIGLFGAVISIALAGAAMTYLNGETPARETDSLVLLLPLIGSSTTSTAFLVGITGVLAPLLEETLFRGFLMVSLTKWFPTPACVLVSAAVFALAHLTPGQFPQLFILGVALGFSYAQTRNLLTPITIHAFWNSGVILLLTFLQLQGYDLKELLGAS

SEQ ID NO: 10978 - protein, 347 aa, Zea mays subsp. mays
  peptide (1)..(347): Ceres Seq. ID no. 12343894
MASSSLSSPPLSLILLRPLPCIPVLLLRQRKPFPAVRVEARSQQRLQRRPVTGQWRRSCRRGGGYACFSYNAKNKTPPPSDKSSDEWAIVRRWDVPWEWQTVVLSMVGCGVSFVLTGLVEQLALQELGFKAVEATIDEKAEILFFGQLSVTVVVLGVIFGITNTFRPFPDDVFRYHIKEPFKLQNGWLLWAGIGLFGAVISIALAGAAMTYLNGETPARETDSLVLLLPLIGSSTTSTAFLVGITGVLAPLLEETLFRGFLMVSLTKWFPTPACVLVSAAVFALAHLTPGQFPQLFILGVALGFSYAQTRNLLTPITIHAFWNSGVILLLTFLQLQGYDLKELLGAS

SEQ ID NO: 10979 - DNA, 875 bp, Zea mays subsp. mays
  misc_feature (1)..(875): Ceres Seq. ID no. 12404015
  misc_feature (1)..(875): Ortholog of  Ceres SEQ ID NO 13661089 as cited in SEQ ID NO 61053
accacgcaaaaaacaaacacactcgaaggcagcgaagcccgagccttcccttccctccaatcgatcacccgcttcgatccgctagctagctagcagcgcgatggcttccctcaccgtgtccacgaagaccgcggcggccggcggcaacaagcagcgcgagggcgcggaggtcatcacgggcgcggaggcctgcttcgcgcactccaagcagatgctccaggcgctgggcttcccgggcggcgtgatgccgctgcgggggctggaggagtgcggctgggtgcgcgagaccgggttcgtgtggatgcggcagaaggccccctacgagcactacttccgcggcacgggcacgcgggtgcgctacgacgccgaggtcaccgcgtacgtggaggacggccggatgaagcgcatgaccggggtgcgcagcaagccaggtcatgctctgggtgcccatcgtcgagatgagcctcgacggagagaagcgcgacaagatctacttcaagtccaacgtcgggatcggccgctcgttccccgcctccgccttcgctgacgaggacgagcaagcggaggaggaggagaagaagaagaatgagaacaaggaggagaacggcgacaagccagccgccgccgccgccgatgccgccggcaagtgagacggagacccgagcgcgcgcgtgttgtcgtcgtgccgggtactgtgcgcggttgcagggcaccgttgcgcgacgcatctcgcgcgtaaccacgcgtgaagatgcacgtatctatcgtctttctttgctactttgtattgcttgtcctttttcctccttttttttctttcaaaaaatgtattattgcctgtatctatcgatcgttgcatgtttaccgcgtttgat

SEQ ID NO: 10980 - protein, 148 aa, Zea mays subsp. mays
  peptide (1)..(148): Ceres Seq. ID no. 12404016
MASLTVSTKTAAAGGNKQREGAEVITGAEACFAHSKQMLQALGFPGGVMPLRGLEECGWVRETGFVWMRQKAPYEHYFRGTGTRVRYDAEVTAYVEDGRMKRMTGVRSKPGHALGAHRRDEPRRREARQDLLQVQRRDRPLVPRLRLR

SEQ ID NO: 10981 - protein, 111 aa, Zea mays subsp. mays
  peptide (1)..(111): Ceres Seq. ID no. 12404017
MLQALGFPGGVMPLRGLEECGWVRETGFVWMRQKAPYEHYFRGTGTRVRYDAEVTAYVEDGRMKRMTGVRSKPGHALGAHRRDEPRRREARQDLLQVQRRDRPLVPRLRLR

SEQ ID NO: 10982 - protein, 100 aa, Zea mays subsp. mays
  peptide (1)..(100): Ceres Seq. ID no. 12404018
MPLRGLEECGWVRETGFVWMRQKAPYEHYFRGTGTRVRYDAEVTAYVEDGRMKRMTGVRSKPGHALGAHRRDEPRRREARQDLLQVQRRDRPLVPRLRLR

SEQ ID NO: 10983 - DNA, 798 bp, Zea mays subsp. mays
  misc_feature (1)..(798): Ceres Seq. ID no. 12579040
  misc_feature (1)..(798): Ortholog of  Ceres SEQ ID NO 15173873 as cited in SEQ ID NO 62620
  misc_feature (1)..(798): Ortholog of  Ceres SEQ ID NO 13655610 as cited in SEQ ID NO 64148
  misc_feature (1)..(798): Ortholog of  Ceres SEQ ID NO 14302675 as cited in SEQ ID NO 0
atttttcgaccgccgccgcccccagtccccgatccgaagctgtgcctcgtaccatttcgatccaatggcgccgacgtcgaagctgtcgacgggcatcaagcgcgcttcgcggtcgcacacgtaccatcgccgtgggctgtgggccatcaaggccaagaacggcggcgccttccccaaggccgacaaggccgccgccgccgtggaacccaatttctaccctgccgacgacgtcaagccccgcgttcccagcacccgcaagcctaagcctaccaagctcaggtcgagcatcacgcctgggacggtgctgatcctcctcgcagggcgcttcatggggaagagagtggtgtttctcaagcagctcaagtctggcctgctccttatctctgggcctttcaagatcaatggagtaccgatccgccgtgtgaaccagacctatggagaagaagcagaaggtgaagaagaccgagggcgagctttttgagacagaaaaggaggcatccaagtcactgcctgacttcaagaaggatgaccagaaggctgtggattctgctctgatcaaggctatcgaggctgtcctggagctgaaaacctatcttggcgcccggttctctctcagggatggtgacaagccccatgagatggtattctaagtttctagttttggagttcgtaggaagctgttttgtctgtgttcttgtacttctgagttttgtaccagtagcgaacgtttcattgtgattgaagtcttcctgccaaatattataagatctaagaaagttctatccgtgttggtggtcc

SEQ ID NO: 10984 - protein, 159 aa, Zea mays subsp. mays
  peptide (1)..(159): Ceres Seq. ID no. 12579041
FFDRRRPQSPIRSCASYHFDPMAPTSKLSTGIKRASRSHTYHRRGLWAIKAKNGGAFPKADKAAAAVEPNFYPADDVKPRVPSTRKPKPTKLRSSITPGTVLILLAGRFMGKRVVFLKQLKSGLLLISGPFKINGVPIRRVNQTYGEEAEGEEDRGRAF

SEQ ID NO: 10985 - protein, 138 aa, Zea mays subsp. mays
  peptide (1)..(138): Ceres Seq. ID no. 12579042
MAPTSKLSTGIKRASRSHTYHRRGLWAIKAKNGGAFPKADKAAAAVEPNFYPADDVKPRVPSTRKPKPTKLRSSITPGTVLILLAGRFMGKRVVFLKQLKSGLLLISGPFKINGVPIRRVNQTYGEEAEGEEDRGRAF

SEQ ID NO: 10986 - protein, 101 aa, Zea mays subsp. mays
  peptide (1)..(101): Ceres Seq. ID no. 12579043
FSTAAAPSPRSEAVPRTISIQWRRRRSCRRASSALRGRTRTIAVGCGPSRPRTAAPSPRPTRPPPPWNPISTLPTTSSPAFPAPASLSLPSSGRASRLGRC

SEQ ID NO: 10987 - DNA, 1654 bp, Zea mays subsp. mays
  misc_feature (1)..(1654): Ceres Seq. ID no. 12351319
  misc_feature (1)..(1654): Ortholog of  Ceres SEQ ID NO 14316017 as cited in SEQ ID NO 67028
gcgcctggccagtggccatccatcccttcccttcgcttcgacgcaccaatcttgtcccggcgcctgccaaatccagcaaggccacacagcccgaggcaggaagggcagcgcaggaacagggagcgagcagcgcaccggcaatggcggcttcttccgggacgcgctccgtgcgcctgctgctgctgctgctctgcctgctcgggttctgcgtcgcgctgagccaccaggagtcgtcggcggactcgtgcgccagggccaaggtcgcggtcgccagcctcgtgcccttcgactccacgtccttccgctgcaccgccgcctggaagcagcaggacttcgtcctcaggtacaagaacacggggcccagcgagtggagcttcatcctctcggcgccggacaggggctcgtacgtggcggtcggcttctcgggcaagggcgccatggtggggagcagcgccgtcgtcgggtgggtggcccaacggcaggggcaccgtcaagcagtactacctcggcgggaagagccccgaggagtgcgcccccaacaggggcctcctcaagctcgtcaggaacaggaccgccgtcgcctcgcgctccggccgcctctacctcgccttccagctcagcaccgactacccgcagccgtacctgatctacgccgtcgggccagacggcagcctgccgcagtccgactcgctgcggctgccggcgcaccagaacatggcctcccgctccttcaactacacctccgggctgtcgtacaacgtcgccgggtccggcgacgccgcgttcccgccggagaggaagcacgggctgctgggcatgatggggtggggcgtgctgatgcccatcggcatgatcaccgcgcgctacttccggcagctggacccgtgctggttctacacccacatggccatccaggtggctggctacgccgtcggcatcgcgggcatcgtcctcggcttccgcctcagcgaggacgggctcaggaacgtggacgtgcacaaggcgctcggcatcgccatcttggccatggcgtctcttcaggtgatggcgatcctggcgcggccggacaagacgtccaaggtgcggcggttctggaactggtaccaccacaacatcgggcgcgcggcgatcctgctggccatcggcaacatcttcctgggcctctccatcgcgcaggagaccagcgcctacatcgtctcctacggcgtgttcgtcgccgtctgggtgctcgccgtcgccgccttcgagatgaagcgctgctacgccgacgacgactgatgagctagcgacacgtaagagtcacagttcggtcccaacagctgacggcgaagtttggtgtcgttaaactgagcgttccacggccagctgggacgtgacagacacacgagctccgagcgcgcgcgcgcacacacacacaacattcttgttgttccgtagctcgcagctggacagtgcattattggttcggggaggtcgtgctttggttggctaatttaaaaaaaaaattgtttttttttgaggtataggatgtgaggaaggggacggtctgctgtttctaggctagctggacgctctgattcataaatttgtacattgattggtacgtggtcgtgttgtgttgtaccctttttggacgatagcatgttcttcgccc

SEQ ID NO: 10988 - protein, 427 aa, Zea mays subsp. mays
  peptide (1)..(427): Ceres Seq. ID no. 12351320
AWPVAIHPFPSLRRTNLVPAPAKSSKATQPEAGRAAQEQGASSAPAMAASSGTRSVRLLLLLLCLLGFCVALSHQESSADSCARAKVAVASLVPFDSTSFRCTAAWKQQDFVLRYKNTGPSEWSFILSAPDRGSYVAVGFSGKGAMVGSSAVVGWVAQRQGHRQAVLPRREEPRGVRPQQGPPQARQEQDRRRLALRPPLPRLPAQHRLPAAVPDLRRRARRQPAAVRLAAAAGAPEHGLPLLQLHLRAVVQRRRVRRRRVPAGEEARAAGHDGVGRADAHRHDHRALLPAAGPVLVLHPHGHPGGWLRRRHRGHRPRLPPQRGRAQERGRAQGARHRHLGHGVSSGDGDPGAAGQDVQGAAVLELVPPQHRARGDPAGHRQHLPGPLHRAGDQRLHRLLRRVRRRLGARRRRLRDEALLRRRRLMS

SEQ ID NO: 10989 - protein, 381 aa, Zea mays subsp. mays
  peptide (1)..(381): Ceres Seq. ID no. 12351321
MAASSGTRSVRLLLLLLCLLGFCVALSHQESSADSCARAKVAVASLVPFDSTSFRCTAAWKQQDFVLRYKNTGPSEWSFILSAPDRGSYVAVGFSGKGAMVGSSAVVGWVAQRQGHRQAVLPRREEPRGVRPQQGPPQARQEQDRRRLALRPPLPRLPAQHRLPAAVPDLRRRARRQPAAVRLAAAAGAPEHGLPLLQLHLRAVVQRRRVRRRRVPAGEEARAAGHDGVGRADAHRHDHRALLPAAGPVLVLHPHGHPGGWLRRRHRGHRPRLPPQRGRAQERGRAQGARHRHLGHGVSSGDGDPGAAGQDVQGAAVLELVPPQHRARGDPAGHRQHLPGPLHRAGDQRLHRLLRRVRRRLGARRRRLRDEALLRRRRLMS

SEQ ID NO: 10990 - protein, 282 aa, Zea mays subsp. mays
  peptide (1)..(282): Ceres Seq. ID no. 12351322
MVGSSAVVGWVAQRQGHRQAVLPRREEPRGVRPQQGPPQARQEQDRRRLALRPPLPRLPAQHRLPAAVPDLRRRARRQPAAVRLAAAAGAPEHGLPLLQLHLRAVVQRRRVRRRRVPAGEEARAAGHDGVGRADAHRHDHRALLPAAGPVLVLHPHGHPGGWLRRRHRGHRPRLPPQRGRAQERGRAQGARHRHLGHGVSSGDGDPGAAGQDVQGAAVLELVPPQHRARGDPAGHRQHLPGPLHRAGDQRLHRLLRRVRRRLGARRRRLRDEALLRRRRLMS

SEQ ID NO: 10991 - DNA, 1507 bp, Zea mays subsp. mays
  misc_feature (1)..(1507): Ceres Seq. ID no. 12413799
  misc_feature (1)..(1507): Ortholog of  Ceres SEQ ID NO 13664178 as cited in SEQ ID NO 61247
  misc_feature (1)..(1507): Ortholog of  Ceres SEQ ID NO 15179290 as cited in SEQ ID NO 0
ctcactactttgagctgcaaggtccgaactaaaaagcacaagaaatggcggccgccttctcctccaccgtcggagctccggcctccaccccgaccaggagcagcttcctcgggaagaagctcaacaagccgcaggtgtccgcggccgtgacctaccatggcaagagctccagcagcaacagcaggttcaaggcgatggctgccaaggaggtggacgagacgaagcagaccgacgaggacaggtggaagggcctggcctacgacatctcggacgaccagcaggacatcaccaggggcaagggcctcgtcgacaacctcttccaggcgcctatgggggacggcacccacgtcgccgtgctcagctcctacgactacatcagccagggccaaaagtcttacaacttcgacaacatgatggatggcttctacatagccaagggcttcatggacaagctcgtcgtccacctctccaagaacttcatgaccctgccaaacatcaaggttcccctcatcctgggtatctggggaggcaaaggccagggaaaatcgttccaatgcgagctggtcttcgccaagatgggcatcacccccatcatgatgagcgccggcgagctggagagcggcaacgccggagagcccgccaagctcatcaggcagcgctaccgtgaggcctccgacctcatcaagaagggcaagatgtcctgcctcttcatcaacgacttggacgccggcgcgggtcgcatgggcggcaccacccagtacacggtgaacaaccagatggtcaacgccaccctgatgaacatcgccgacaaccccaccaacgtgcagctcccggggatgtacaacaaggaggacaacccccgcgtgcccatcatcgtcaccggcaacgacttctccacgctctacgcgccgctcatccgcgacggccgcatggagaagttctactgggcgcccacccgcgaggaccgcatcggcgtctgcaagggcatcttccgcaccgacggcgtcgacgaggagcacgtcgtccagctggtcgacaccttccctggccagtccatcgatttcttcggcgcgctgcgtgcccgggtctacgacgacgaggtccgacggtgggtgagcgagaccggcgtcgagaacatcgccaggaagctcgtcaactccaaggagggcccgcccacgttcgagcagcccaagataacgatcgagaagctcttggagtacggacacatgctggtggcggagcaggagaacgtcaagcgtgtgcagcttgctgacaagtacctcaacgaggctgctcttggtgaagccaacgaggacgccatgaagactggctccttcttcaagtagaaagcaactctttgctattgctagctaggcgcgaggccggcataggatcgaggaggtgaatatatatattacttggatagttttgtaatatataattgcagctgaacgaggacatgcatacatatattcgtctatataatggatcatatatatttcatttc

SEQ ID NO: 10992 - protein, 433 aa, Zea mays subsp. mays
  peptide (1)..(433): Ceres Seq. ID no. 12413800
MAAAFSSTVGAPASTPTRSSFLGKKLNKPQVSAAVTYHGKSSSSNSRFKAMAAKEVDETKQTDEDRWKGLAYDISDDQQDITRGKGLVDNLFQAPMGDGTHVAVLSSYDYISQGQKSYNFDNMMDGFYIAKGFMDKLVVHLSKNFMTLPNIKVPLILGIWGGKGQGKSFQCELVFAKMGITPIMMSAGELESGNAGEPAKLIRQRYREASDLIKKGKMSCLFINDLDAGAGRMGGTTQYTVNNQMVNATLMNIADNPTNVQLPGMYNKEDNPRVPIIVTGNDFSTLYAPLIRDGRMEKFYWAPTREDRIGVCKGIFRTDGVDEEHVVQLVDTFPGQSIDFFGALRARVYDDEVRRWVSETGVENIARKLVNSKEGPPTFEQPKITIEKLLEYGHMLVAEQENVKRVQLADKYLNEAALGEANEDAMKTGSFFK

SEQ ID NO: 10993 - protein, 383 aa, Zea mays subsp. mays
  peptide (1)..(383): Ceres Seq. ID no. 12413801
MAAKEVDETKQTDEDRWKGLAYDISDDQQDITRGKGLVDNLFQAPMGDGTHVAVLSSYDYISQGQKSYNFDNMMDGFYIAKGFMDKLVVHLSKNFMTLPNIKVPLILGIWGGKGQGKSFQCELVFAKMGITPIMMSAGELESGNAGEPAKLIRQRYREASDLIKKGKMSCLFINDLDAGAGRMGGTTQYTVNNQMVNATLMNIADNPTNVQLPGMYNKEDNPRVPIIVTGNDFSTLYAPLIRDGRMEKFYWAPTREDRIGVCKGIFRTDGVDEEHVVQLVDTFPGQSIDFFGALRARVYDDEVRRWVSETGVENIARKLVNSKEGPPTFEQPKITIEKLLEYGHMLVAEQENVKRVQLADKYLNEAALGEANEDAMKTGSFFK

SEQ ID NO: 10994 - protein, 338 aa, Zea mays subsp. mays
  peptide (1)..(338): Ceres Seq. ID no. 12413802
MGDGTHVAVLSSYDYISQGQKSYNFDNMMDGFYIAKGFMDKLVVHLSKNFMTLPNIKVPLILGIWGGKGQGKSFQCELVFAKMGITPIMMSAGELESGNAGEPAKLIRQRYREASDLIKKGKMSCLFINDLDAGAGRMGGTTQYTVNNQMVNATLMNIADNPTNVQLPGMYNKEDNPRVPIIVTGNDFSTLYAPLIRDGRMEKFYWAPTREDRIGVCKGIFRTDGVDEEHVVQLVDTFPGQSIDFFGALRARVYDDEVRRWVSETGVENIARKLVNSKEGPPTFEQPKITIEKLLEYGHMLVAEQENVKRVQLADKYLNEAALGEANEDAMKTGSFFK

SEQ ID NO: 10995 - DNA, 1191 bp, Zea mays subsp. mays
  misc_feature (1)..(1191): Ceres Seq. ID no. 12374274
  misc_feature (1)..(1191): Ortholog of  Ceres SEQ ID NO 12472003 as cited in SEQ ID NO 143
aatatctcaaaaagcccatcttctcttcctctctcgcagcaccgcctctcaacctccgccgccgctcgcccggggcgtcacccacccgcgcagaaggcccccgccgctcaaactaccggtgccctaaaccccgatattcttcttcgcctccctttcctcctcagcacccaaaccccgaccttcagggttccgccgccatgccgcagggagaccacatcgagcttcaccagaagcgccatggcaagcgcctggaccacgaggagcgcaagcgcaagcgcgaggcgcgcgaggtgcacaggcgctcgaaggacgcccgcaatttgattggtgctaagggcaagaggttcgccaagaaacgctatgctgagaaggcgcagatgaagaagaccctgaaaatgcacgatgaatcaaataagcgacagaaggttgatgatgatgtccaagagggtgctcttcctccgtatctactggatcgtgatcagacacagcgtgctaaggtactcagcaacacaatcaagcaaaagaggaaggaaaaggctggcaaatgggatgttccgctgccaaaggtcagacctgttgctgaagaagaaatgttcaaggtgctacgaactggcaagcgaaaaaccaagcagtggaagagaatggttaccaaagccacttttgttggagctggatttacaaggaaaccaccaaagtatgagcggttcattcgaccaactggtctgcgtttcaccaaagctcatgtgactcacccagaactgaagtgcactttcaaccttgacataatttctgtgaagaaaaacccaaatggtccgatgtacacttctcttggtgttatgacaaggggaacaatcattgaggtaaatgtcagtgagcttggtctggtaactcccgctggaaaagttgtttgggggaaatatgctcaagttacaaacaacccggagaatgatgggtgtatcaatgctgttttgctagtgtagaaccatagtgagattttgtttatggtgatgaatcgtcccatttgtatctgctcttgataagatgctcccttttgaccgatctcatggctattcccaggagtttgttttgcaccgtggtccatgggcgagcattctatatccttgctatgtgcgacaagccgacaaatgacttggctattatagcctgctataaagttgactaatacaaatt

SEQ ID NO: 10996 - protein, 325 aa, Zea mays subsp. mays
  peptide (1)..(325): Ceres Seq. ID no. 12374275
YLKKPIFSSSLAAPPLNLRRRSPGASPTRAEGPRRSNYRCPKPRYSSSPPFPPQHPNPDLQGSAAMPQGDHIELHQKRHGKRLDHEERKRKREAREVHRRSKDARNLIGAKGKRFAKKRYAEKAQMKKTLKMHDESNKRQKVDDDVQEGALPPYLLDRDQTQRAKVLSNTIKQKRKEKAGKWDVPLPKVRPVAEEEMFKVLRTGKRKTKQWKRMVTKATFVGAGFTRKPPKYERFIRPTGLRFTKAHVTHPELKCTFNLDIISVKKNPNGPMYTSLGVMTRGTIIEVNVSELGLVTPAGKVVWGKYAQVTNNPENDGCINAVLLV

SEQ ID NO: 10997 - protein, 260 aa, Zea mays subsp. mays; identical to SEQ ID NO: 7113
  peptide (1)..(260): Ceres Seq. ID no. 12374276

SEQ ID NO: 10998 - protein, 200 aa, Zea mays subsp. mays; identical to SEQ ID NO: 7114
  peptide (1)..(200): Ceres Seq. ID no. 12374277

SEQ ID NO: 10999 - DNA, 997 bp, Zea mays subsp. mays
  misc_feature (1)..(997): Ceres Seq. ID no. 12413811
  misc_feature (1)..(997): Ortholog of  Ceres SEQ ID NO 13598422 as cited in SEQ ID NO 68856
caggagggagcggatgagatagacaaacagaaagagcccgtgtgcgtgacgcacggacgccgtgactccgccgcaaagagagggagtccacggtctgaagaagcaacggcgacgcccccgacgacgagcatagctgccccgcaaactagcagcgccctcgtcagttccgtctcgttcccaacctctcccggattcgattcgattgacccgtccgctccaaatcgaatctaatcagcagttttggagttgcggaagggagaaagagagaggagagggggcatggatcaggtgctaaacaaggtggggagctactggttcagcaaaagggccagcaaggaaatcgactccatcggcgacgacatcagctcgatctcaagcagcattggagggtcagccaaatggatggtgaacaaaattaaagggaagatgcagaaagcacttccagatctcctcaaggaatatgacatgccagcagggctcttcccacgggacacgactaactatgagttcaatgaagagacaaagaagctgacagtgtacatcccgtcagcctgtgatgttggttacaaggactcgtcagtgctgcggttcttcacctgtgtgaccggctaccttgaaaaggggaagttttccgacatcgagggcatgaagaccaaagtgctggtctggaccaaggtgactgccatcaagaccgagggcccaaaggtccatttcactgcaggcgtgaagaagactcggagccgtgatgcctatgaggtcgtcagagatggtatcaccatagacaagttctagagcatatacctggcatgaaaaatgtgacgcggttattcatatatgcttctctcctctcagttggtacaccgaaattcatacaatatcgtgggctaattctgcatttgtatgaaagtttaatatgcttgacgtgttaatcacactgctagagcatgcgataaatcgcagttggttcattattaggaaattgcattgagctgtaatc

SEQ ID NO: 11000 - protein, 170 aa, Zea mays subsp. mays
  peptide (1)..(170): Ceres Seq. ID no. 12413812
MDQVLNKVGSYWFSKRASKEIDSIGDDISSISSSIGGSAKWMVNKIKGKMQKALPDLLKEYDMPAGLFPRDTTNYEFNEETKKLTVYIPSACDVGYKDSSVLRFFTCVTGYLEKGKFSDIEGMKTKVLVWTKVTAIKTEGPKVHFTAGVKKTRSRDAYEVVRDGITIDKF

SEQ ID NO: 11001 - protein, 129 aa, Zea mays subsp. mays
  peptide (1)..(129): Ceres Seq. ID no. 12413813
MVNKIKGKMQKALPDLLKEYDMPAGLFPRDTTNYEFNEETKKLTVYIPSACDVGYKDSSVLRFFTCVTGYLEKGKFSDIEGMKTKVLVWTKVTAIKTEGPKVHFTAGVKKTRSRDAYEVVRDGITIDKF

SEQ ID NO: 11002 - protein, 121 aa, Zea mays subsp. mays
  peptide (1)..(121): Ceres Seq. ID no. 12413814
MQKALPDLLKEYDMPAGLFPRDTTNYEFNEETKKLTVYIPSACDVGYKDSSVLRFFTCVTGYLEKGKFSDIEGMKTKVLVWTKVTAIKTEGPKVHFTAGVKKTRSRDAYEVVRDGITIDKF

SEQ ID NO: 11003 - DNA, 1253 bp, Zea mays subsp. mays
  misc_feature (1)..(1253): Ceres Seq. ID no. 12374278
  misc_feature (1)..(1253): Ortholog of  Ceres SEQ ID NO 14302021 as cited in SEQ ID NO 68979
  misc_feature (1)..(1253): Ortholog of  Ceres SEQ ID NO 14309296 as cited in SEQ ID NO 0
acgctggccccccgccccgccgcgggatcaaatacgccgcctccgcccgtccactccctcgccgcccccgtctcctctcctctcctctcccccgcatccacggccgcaggccgcagccagccactcgacgatctagtcgtctctctctccccgctctgccgcctcgctgccgcggcttcccgtcggctggaggatgaaggtcacggtcgtgtcccggagcggccgggaggtcgtcaagggcggcatcgacctcaaggactcggccaaggtcgcggacctgcaggaggccatccatgccaggactaagaagtattatccttctaggcagcggctcaccctcccccttcaacctggaaaaggcgggaagccagttgtcctcagtccgaaggccagcctgctagaatactgcgagaagggttctgggtcactgacagtggtcttcaaagatttagggccacaggtctactacagcacactgttcttcttcgagtacctgggtcctctcatcatctaccccatgttctactatctgcctgtctacaaatacttcgggtacgagggggagcgggccatgcaccctgtccagacctacgccatgtactactggtgcttccactacttcaagcggatcatggagacattcttcgtgcaccgcttcagccacgcgacgtcgccgctctcgaacgtcttcaggaactgtgcctactactggaccttcggcgcctacattgcttactactgcaaccacccgctgtacaccccagtgagtgatctgcagatgaagattgggtttggttttggggtcgtctgccaggtcgcgaacttctactgccacatcctgctgcggaacctcaggagcccaagcggcagcggcgggtaccagatcccccgcggtttcttgttcaacatcgtgacctgcgccaattacaccaccgagatctatcagtgggtcggcttcaacatcgccacgcagaccgtggcaggttacgtcttccttgtcgtggcggcaggcatcatgaccaactgggcgctcggcaagcacagccgtctgaagaagctgtttgacggcaaggatgggaggcccaagtaccctcgccggtgggtgattctccctccgttcctgtgaagaggtggtggtggtcggcctattgtgattcgatgtctacagacagttgtactgtactaatcgtgcctgtttagcggttgaacttggattccgttgtccgaaatttctaatccgaaagatggattcc

SEQ ID NO: 11004 - protein, 310 aa, Zea mays subsp. mays; identical to SEQ ID NO: 2382
  peptide (1)..(310): Ceres Seq. ID no. 12374279

SEQ ID NO: 11005 - protein, 202 aa, Zea mays subsp. mays; identical to SEQ ID NO: 2383
  peptide (1)..(202): Ceres Seq. ID no. 12374280

SEQ ID NO: 11006 - protein, 184 aa, Zea mays subsp. mays; identical to SEQ ID NO: 2384
  peptide (1)..(184): Ceres Seq. ID no. 12374281

SEQ ID NO: 11007 - DNA, 1228 bp, Zea mays subsp. mays
  misc_feature (1)..(1228): Ceres Seq. ID no. 12353392
  misc_feature (1)..(1228): Ortholog of  Ceres SEQ ID NO 13594560 as cited in SEQ ID NO 51329
  misc_feature (1)..(1228): Ortholog of  Ceres SEQ ID NO 12613701 as cited in SEQ ID NO 67983
aaacggacgcagattgccgttcatgatccggctctttaaaataacgcagtagaaacggagagcgatctgaacacggtctgcagatttcaacgaggtgtggtgtgagcgcgatgagcgttcatggcccgtaatccgacgggatatccgacatttgtgccgtatccagcgcatgccgacaatccgtccggagatccctctccctctctctcatggcattcatgttttaaaccaaccaagccgcctctgctgctccgatccgtctccctctgttccagcagtcaggatggaggccgccgcaacacttccgccgctgctgctcctcatcctccttgctgcgactgcggtgccggctccgtcgcacgcatggggagtcgacggccatctcatggtctgccagatcgcacagggccgtctgagtggcgcggcggccgcggcggtgaaggacctgctgccgtcctacgccggcaacaacctgagcagcctctgctcctgggcggacgacgtcaagttcaggtacccctggtcgtcgccgctccactacatcgacacccccgacggcctctgcacctaccgctacgacagggactgcaaggacgaggacggcgtcgagggccggtgcgtcgcgggcgccatcaacaactacacctcccagctcctcgcctaccggagatcttcacccactgagtataacctaacgcaagcgctcctcttcctctcgcacttcatcggagacatacaccagccacttcacgtggggttcacctccgacaaaggagggaacaccattgacgtccactggtacacaaggaagactgttctacaccatgtttgggacgccagcatcatccagacggccgaagatgacttctacggcgacagcgtagccgggtatatcgacaccctgaagaaaaatataacgcagggagaatggtcggagcaagtgtctagctgggaagcgtgcggtacgaaccagactgcatgtccagacatatatgcgtctgagagcgtcgctgcagcatgcgactgggcgtacaagggagtcgaggaagactcaaccctacaagatccctatttctccagcaggctgccggtagtcagcctgaggctagcgcaaggcggcgtcagattagccgccactctgaacaggatttttggataatggtggagtacatttactatacatggaactattatggaattaaatgatatatataactattggtttccc

SEQ ID NO: 11008 - protein, 329 aa, Zea mays subsp. mays
  peptide (1)..(329): Ceres Seq. ID no. 12353393
MPTIRPEIPLPLSHGIHVLNQPSRLCCSDPSPSVPAVRMEAAATLPPLLLLILLAATAVPAPSHAWGVDGHLMVCQIAQGRLSGAAAAAVKDLLPSYAGNNLSSLCSWADDVKFRYPWSSPLHYIDTPDGLCTYRYDRDCKDEDGVEGRCVAGAINNYTSQLLAYRRSSPTEYNLTQALLFLSHFIGDIHQPLHVGFTSDKGGNTIDVHWYTRKTVLHHVWDASIIQTAEDDFYGDSVAGYIDTLKKNITQGEWSEQVSSWEACGTNQTACPDIYASESVAAACDWAYKGVEEDSTLQDPYFSSRLPVVSLRLAQGGVRLAATLNRIFG

SEQ ID NO: 11009 - protein, 291 aa, Zea mays subsp. mays
  peptide (1)..(291): Ceres Seq. ID no. 12353394
MEAAATLPPLLLLILLAATAVPAPSHAWGVDGHLMVCQIAQGRLSGAAAAAVKDLLPSYAGNNLSSLCSWADDVKFRYPWSSPLHYIDTPDGLCTYRYDRDCKDEDGVEGRCVAGAINNYTSQLLAYRRSSPTEYNLTQALLFLSHFIGDIHQPLHVGFTSDKGGNTIDVHWYTRKTVLHHVWDASIIQTAEDDFYGDSVAGYIDTLKKNITQGEWSEQVSSWEACGTNQTACPDIYASESVAAACDWAYKGVEEDSTLQDPYFSSRLPVVSLRLAQGGVRLAATLNRIFG

SEQ ID NO: 11010 - protein, 257 aa, Zea mays subsp. mays
  peptide (1)..(257): Ceres Seq. ID no. 12353395
MVCQIAQGRLSGAAAAAVKDLLPSYAGNNLSSLCSWADDVKFRYPWSSPLHYIDTPDGLCTYRYDRDCKDEDGVEGRCVAGAINNYTSQLLAYRRSSPTEYNLTQALLFLSHFIGDIHQPLHVGFTSDKGGNTIDVHWYTRKTVLHHVWDASIIQTAEDDFYGDSVAGYIDTLKKNITQGEWSEQVSSWEACGTNQTACPDIYASESVAAACDWAYKGVEEDSTLQDPYFSSRLPVVSLRLAQGGVRLAATLNRIFG

SEQ ID NO: 11011 - DNA, 541 bp, Zea mays subsp. mays
  misc_feature (1)..(541): Ceres Seq. ID no. 13564049
  misc_feature (1)..(541): Ortholog of  Ceres SEQ ID NO 14312180 as cited in SEQ ID NO 59480
aagacgatacaggaatgtgatggacatgaatgcggggataggtggctttgcagctgcattgatgaagtaccctctttgggtgatgaatgttgtgccttcaggcttggcccatgacaccctgggtgttatttacgaacgagggtttattggcacgtaccatgattggtgtgaggctttctcaacgtacccgaggacctacgacctcatccatgctgataaagttttcagcagttaccaggacaggtgtgacataacgtacatcctactggagatggaccgaattctaaggcctgaggggactgtgatcatcagggacaacgtagaggtgttggtgaaggtacaagctatcactggaggcatgaggtggaagagccaaatcatggaccatgagtccggtccattcaacaccgacaagatcctagtggctgtcaagacttactggaccgggaagctcgtgcaaaaacaataatcgtcgccttgttactgtttttcgtctgcgaaaatgtaggcatgacttgcctgtcagttctgtcttcattgc

SEQ ID NO: 11012 - protein, 155 aa, Zea mays subsp. mays
  peptide (1)..(155): Ceres Seq. ID no. 13564050
RRYRNVMDMNAGIGGFAAALMKYPLWVMNVVPSGLAHDTLGVIYERGFIGTYHDWCEAFSTYPRTYDLIHADKVFSSYQDRCDITYILLEMDRILRPEGTVIIRDNVEVLVKVQAITGGMRWKSQIMDHESGPFNTDKILVAVKTYWTGKLVQKQ

SEQ ID NO: 11013 - protein, 149 aa, Zea mays subsp. mays
  peptide (1)..(149): Ceres Seq. ID no. 13564051
MDMNAGIGGFAAALMKYPLWVMNVVPSGLAHDTLGVIYERGFIGTYHDWCEAFSTYPRTYDLIHADKVFSSYQDRCDITYILLEMDRILRPEGTVIIRDNVEVLVKVQAITGGMRWKSQIMDHESGPFNTDKILVAVKTYWTGKLVQKQ

SEQ ID NO: 11014 - protein, 147 aa, Zea mays subsp. mays
  peptide (1)..(147): Ceres Seq. ID no. 13564052
MNAGIGGFAAALMKYPLWVMNVVPSGLAHDTLGVIYERGFIGTYHDWCEAFSTYPRTYDLIHADKVFSSYQDRCDITYILLEMDRILRPEGTVIIRDNVEVLVKVQAITGGMRWKSQIMDHESGPFNTDKILVAVKTYWTGKLVQKQ

SEQ ID NO: 11015 - DNA, 1307 bp, Zea mays subsp. mays
  misc_feature (1)..(1307): Ceres Seq. ID no. 12361396
  misc_feature (1)..(1307): Ortholog of  Ceres SEQ ID NO 15171606 as cited in SEQ ID NO 57214
  misc_feature (1)..(1307): Ortholog of  Ceres SEQ ID NO 13600673 as cited in SEQ ID NO 0
agaagccccctgtgccttgctcctcggtgtttcctccagatagtagtgtttcctcagtggactagtgtgaagctgtgcttagcgtagcggaagggaggaaggacaaggcaaggcaactgatggcggcgggcggcggaggcggctcggcggcgccgttcgtgtggaagacgtacacgatggtggaggaccccgggacggcaggggtgatcggctggggcagcggcaacaacagcttcgtcgtcgccgaccccttcgtcttctcgcagacgctgctccccgcgcacttcaagcacaacaacttctccagcttcgtccgccagctcaacacctatggcttccgcaaggttgatccggaccggtgggagttcgcccacgcgtcgttcctgcgcggccagacgcacctcctgcgcaacatcgtccgccgcggcagcagcgccgcccggtgccggaggcggaaagaggaaggacgccagccccacggagctggcctccggggacgacatgaccatggtggccacggaggtggtgcgcctcaagcaagagcagcgcgccatcgacgaccgcgtcgcctccatgtggcgccgcgtgcaggagacggagcgcaggcccaagcagatgctcgcgttcctcctcaaggtcgtcggcgaccgcgacaggctgcaccgcctcgtcggcgacgcccccgtgccagataacgggttcgcctccggcggtgccgccgagccgcccgccgcggaggtcggcgagaagcgggccaggctgctgctcgacggtgacagcatggtggcgctcggtcccgaggccgtcgacttcgccgggttctacagcggcggcggtgcgttcggcgatgttgccgtggatgctgccgctgggtcccgcggaggcgggttctcgtttgcgttcggcgtggacgcggggtactgaatgacgagcaggcgccgccattgtcagcagcttggcccgcttatgctgctgtcgagcttcctgccaatgccattgcgctgagcggcggcagccgtcacatggaagcatggcaggggatggatgataatgatgttaagttctatccctgctacatggataggatgtgtgtctgatgctgcttttcgtggatctatatgggcggggagcgactactccgtcgagatctaaaaataaggggatatactgtcatggagtgtgaccttcgaagttcccaatatgagtaggtttgatgttgtacatgaccagtgcagcagcactaatatttcaatctcctgcggatacgcagctggaaaattggcatcgctattatttagcccttttct

SEQ ID NO: 11016 - protein, 197 aa, Zea mays subsp. mays
  peptide (1)..(197): Ceres Seq. ID no. 12361397
MASARLIRTGGSSPTRRSCAARRTSCATSSAAAAAPPGAGGGKRKDASPTELASGDDMTMVATEVVRLKQEQRAIDDRVASMWRRVQETERRPKQMLAFLLKVVGDRDRLHRLVGDAPVPDNGFASGGAAEPPAAEVGEKRARLLLDGDSMVALGPEAVDFAGFYSGGGAFGDVAVDAAAGSRGGGFSFAFGVDAGY

SEQ ID NO: 11017 - protein, 191 aa, Zea mays subsp. mays
  peptide (1)..(191): Ceres Seq. ID no. 12361398
MAAGGGGGSAAPFVWKTYTMVEDPGTAGVIGWGSGNNSFVVADPFVFSQTLLPAHFKHNNFSSFVRQLNTYGFRKVDPDRWEFAHASFLRGQTHLLRNIVRRGSSAARCRRRKEEGRQPHGAGLRGRHDHGGHGGGAPQARAARHRRPRRLHVAPRAGDGAQAQADARVPPQGRRRPRQAAPPRRRRPRAR

SEQ ID NO: 11018 - protein, 172 aa, Zea mays subsp. mays
  peptide (1)..(172): Ceres Seq. ID no. 12361399
MVEDPGTAGVIGWGSGNNSFVVADPFVFSQTLLPAHFKHNNFSSFVRQLNTYGFRKVDPDRWEFAHASFLRGQTHLLRNIVRRGSSAARCRRRKEEGRQPHGAGLRGRHDHGGHGGGAPQARAARHRRPRRLHVAPRAGDGAQAQADARVPPQGRRRPRQAAPPRRRRPRAR

SEQ ID NO: 11019 - DNA, 1367 bp, Zea mays subsp. mays
  misc_feature (1)..(1367): Ceres Seq. ID no. 12341058
  misc_feature (1)..(1367): Ortholog of  Ceres SEQ ID NO 13582281 as cited in SEQ ID NO 51014
  misc_feature (1)..(1367): Ortholog of  Ceres SEQ ID NO 14315606 as cited in SEQ ID NO 53515
  misc_feature (1)..(1367): Ortholog of  Ceres SEQ ID NO 12617417 as cited in SEQ ID NO 65089
  misc_feature (1)..(1367): Ortholog of  Ceres SEQ ID NO 13596180 as cited in SEQ ID NO 67941
  misc_feature (1)..(1367): Ortholog of  Ceres SEQ ID NO 13591190 as cited in SEQ ID NO 68044
  misc_feature (1)..(1367): Ortholog of  Ceres SEQ ID NO 13595961 as cited in SEQ ID NO 68223
agcagtctcgatggccgccgccgactcctccccgctccacatcgtcattttcccttggctcgcgttcggccacttgatccccggcctcgagttcgccgagcgcctcgctcatcgacttggtggccctcccgttcccgcgcattgacggcctccccgatggcgccgaggccactagcgacctcccgcccggcacggccgagctccacgtgcaggccatggaccgcctcgccccggccttctccgccttcctcggtgccgcctgcgccgacgggagcgaccgtaaggtggactgggtgctcctcgacaacttccacgcgtccatggcggacgtcgccagcgagcacaaggttccctgcatactgaacatgccctactcctcggcgacgacagaggatttcggcattccagacccgtcggttctaccaatgttccggccatttgtcgagaccttcaagagatgcaaagtcatcgctgctcgtagcagcttcgagttggaaccggagtccctgcctctcatgacaaagatcctcgggaagccggtcatccccgtgggcctacttcctccggcgcccgccggaggcaacacgcagcgcgacgacagcgcagccctgtcgtggctcgacgagcagccgtccaagtccgtggtctacgtcgccttcgggagcgagtacccgatgaccgtcaagcagctgcacgagatcgcgcgcgggctggagctcgccgggacgcgcttcctctgggccctcaagaggcctagcgtcgcccaccccgacgaggacctcctgccgccaggtttcgaggagcgcacgcgcggccgtggctccgtcgtcacgggctgggttcctcagaccagcatactggggcatggcgccgtcgccgcgttcatgatgcactgcggctggggctccaccatcgaggcgcttcagtacggccatcctctggtcatgatgccagttctcgtcgaccacctgtccaccgcgcgggtgatggagcagcggaaggtcggagtcaaggtgcggaaggagaagagtgacgaagcgttccttggtgacaacatcgccacagcgatacgggctgtcatgtgcgaagaagagagcaagaggatctttgtggccaatgctaagaggatgcaggagattgtggcagacgacgagtgccacaagaggtacatagacgaattcgttcagagcctgagaacctacaagaactgaaacatgcatggtattggtcagtgcactcagcatacttggcattggcgttacacaagtgattcgctggactccagcttatacgatgtatcttattttgctgcaatatgcaactttatcattgtttggttgtaaaaagatttgaatttgtttctcgtg

SEQ ID NO: 11020 - protein, 331 aa, Zea mays subsp. mays
  peptide (1)..(331): Ceres Seq. ID no. 12341059
MDRLAPAFSAFLGAACADGSDRKVDWVLLDNFHASMADVASEHKVPCILNMPYSSATTEDFGIPDPSVLPMFRPFVETFKRCKVIAARSSFELEPESLPLMTKILGKPVIPVGLLPPAPAGGNTQRDDSAALSWLDEQPSKSVVYVAFGSEYPMTVKQLHEIARGLELAGTRFLWALKRPSVAHPDEDLLPPGFEERTRGRGSVVTGWVPQTSILGHGAVAAFMMHCGWGSTIEALQYGHPLVMMPVLVDHLSTARVMEQRKVGVKVRKEKSDEAFLGDNIATAIRAVMCEEESKRIFVANAKRMQEIVADDECHKRYIDEFVQSLRTYKN

SEQ ID NO: 11021 - protein, 296 aa, Zea mays subsp. mays
  peptide (1)..(296): Ceres Seq. ID no. 12341060
MADVASEHKVPCILNMPYSSATTEDFGIPDPSVLPMFRPFVETFKRCKVIAARSSFELEPESLPLMTKILGKPVIPVGLLPPAPAGGNTQRDDSAALSWLDEQPSKSVVYVAFGSEYPMTVKQLHEIARGLELAGTRFLWALKRPSVAHPDEDLLPPGFEERTRGRGSVVTGWVPQTSILGHGAVAAFMMHCGWGSTIEALQYGHPLVMMPVLVDHLSTARVMEQRKVGVKVRKEKSDEAFLGDNIATAIRAVMCEEESKRIFVANAKRMQEIVADDECHKRYIDEFVQSLRTYKN

SEQ ID NO: 11022 - protein, 281 aa, Zea mays subsp. mays
  peptide (1)..(281): Ceres Seq. ID no. 12341061
MPYSSATTEDFGIPDPSVLPMFRPFVETFKRCKVIAARSSFELEPESLPLMTKILGKPVIPVGLLPPAPAGGNTQRDDSAALSWLDEQPSKSVVYVAFGSEYPMTVKQLHEIARGLELAGTRFLWALKRPSVAHPDEDLLPPGFEERTRGRGSVVTGWVPQTSILGHGAVAAFMMHCGWGSTIEALQYGHPLVMMPVLVDHLSTARVMEQRKVGVKVRKEKSDEAFLGDNIATAIRAVMCEEESKRIFVANAKRMQEIVADDECHKRYIDEFVQSLRTYKN

SEQ ID NO: 11023 - DNA, 1408 bp, Zea mays subsp. mays
  misc_feature (1)..(1408): Ceres Seq. ID no. 12383163
  misc_feature (1)..(1408): Ortholog of  Ceres SEQ ID NO 14302514 as cited in SEQ ID NO 65814
gcacgagaccattacctagaacatcctaatcgaaaaaagaacagtagaccaaagacaaaggaactaaggaaggcgagggccaccatccccaaaacccgtaaaaaaacccgaattgacaaattgagtcgacggggaaggaaataaagaaggggaagagcacgcgccgccgccagcaccgcgtccgccatggccgcctcctcccgccgcgcgtctcaattgctggggtccgcggcctcccgcctcctcatcgggcggggcttcgccgcggcagccgccgcgccctcgccggcggtcttcgtcgacaagagcacccgtgtgatctgccagggcatcacggggaagaacggcaccttccacaccgagcaggccatcgagtacggcaccaacatggttggtggagtgactcctaagaaaggtggaactgaacatttagggctcccagtgtttaactctgtagcagaagctaaggctgaaacaaaagctaatgcatctgttatatatgttccaccaccatttgctgccgccgctataatggagtcaatggaggctgagctcgaccttgttgtctgcattacggaaggaattccccagcatgacatggtgaaagtgaaggctgcactaaatagacaatctaaaactcgattgattgggccaaattgccctggtatcattaagcctggtgagtgtaaaattggaatcatgccaggttacatccacaagcctgggcgtattgggattgtatctcgttctggtaccttgacatatgaagcggtgtttcaaacaacagctgtaggcttggggcagtcaacttgtgtaggcattggtggtgacccattcaatggcacaaattttgttgattgccttgaaaaatttgtcgatgaccctcagacagaaggcattgttctcattggtgaaattggaggtacggctgaggaggatgctgcaacgttcatccaggaaagcaaaacacaaaagcctgttgttgcattcattgctggacttacggcacccccaggccgtcgcatgggtcatgctggagctatcgtggcaggaggaaagggtactgcccaggacaaaatcaaggcactcagagaggctggtgttaccgttgtcgagtcaccagcgaagattggttctaccatgtttgaaatcttcaaacagcgtggaatggtagaatagacagtggtacatagagagacattgagaaaccgctttttgatgcttgcgggcaatcgcgagcaattcctcggtagatccgtctccctggccacaaacaaaactactgaggttttcttttcgtacgtgtcttatctttggaagatggcctggccttcttcacttggataacctttcgatgagctcgtttcaataagacgtttcggagccatggaaatgctatgtcgcttgg

SEQ ID NO: 11024 - protein, 330 aa, Zea mays subsp. mays
  peptide (1)..(330): Ceres Seq. ID no. 12383164
MAASSRRASQLLGSAASRLLIGRGFAAAAAAPSPAVFVDKSTRVICQGITGKNGTFHTEQAIEYGTNMVGGVTPKKGGTEHLGLPVFNSVAEAKAETKANASVIYVPPPFAAAAIMESMEAELDLVVCITEGIPQHDMVKVKAALNRQSKTRLIGPNCPGIIKPGECKIGIMPGYIHKPGRIGIVSRSGTLTYEAVFQTTAVGLGQSTCVGIGGDPFNGTNFVDCLEKFVDDPQTEGIVLIGEIGGTAEEDAATFIQESKTQKPVVAFIAGLTAPPGRRMGHAGAIVAGGKGTAQDKIKALREAGVTVVESPAKIGSTMFEIFKQRGMVE

SEQ ID NO: 11025 - protein, 263 aa, Zea mays subsp. mays
  peptide (1)..(263): Ceres Seq. ID no. 12383165
MVGGVTPKKGGTEHLGLPVFNSVAEAKAETKANASVIYVPPPFAAAAIMESMEAELDLVVCITEGIPQHDMVKVKAALNRQSKTRLIGPNCPGIIKPGECKIGIMPGYIHKPGRIGIVSRSGTLTYEAVFQTTAVGLGQSTCVGIGGDPFNGTNFVDCLEKFVDDPQTEGIVLIGEIGGTAEEDAATFIQESKTQKPVVAFIAGLTAPPGRRMGHAGAIVAGGKGTAQDKIKALREAGVTVVESPAKIGSTMFEIFKQRGMVE

SEQ ID NO: 11026 - protein, 215 aa, Zea mays subsp. mays
  peptide (1)..(215): Ceres Seq. ID no. 12383166
MESMEAELDLVVCITEGIPQHDMVKVKAALNRQSKTRLIGPNCPGIIKPGECKIGIMPGYIHKPGRIGIVSRSGTLTYEAVFQTTAVGLGQSTCVGIGGDPFNGTNFVDCLEKFVDDPQTEGIVLIGEIGGTAEEDAATFIQESKTQKPVVAFIAGLTAPPGRRMGHAGAIVAGGKGTAQDKIKALREAGVTVVESPAKIGSTMFEIFKQRGMVE

SEQ ID NO: 11027 - DNA, 1680 bp, Zea mays subsp. mays
  misc_feature (1)..(1680): Ceres Seq. ID no. 12351340
  misc_feature (1)..(1680): Ortholog of  Ceres SEQ ID NO 13662745 as cited in SEQ ID NO 66320
  misc_feature (1)..(1680): Ortholog of  Ceres SEQ ID NO 13660029 as cited in SEQ ID NO 67353
ggcccaccaacctgttcatcgatcttctttcttctcaagaaaagaaaacaaaccgcttgtttgcccttccgactacgtctctccctgactcggcttctctttttcggcggcgacggctggtcgagttgcggcgctctgttcagtgttcattgtgcccttcgccacgacgattatcctccagtagtaagtcaccatgtcttcgtccatgcaatcttcataccttcctgctaccactgagtccgtagccaaggctcaggaggccaaggacgcttctgagtccatctcaatcctctaccacgtgcttgaggatccctcttcatctgcggatgcactgagagtaaaagagcttgccatcacgaatctcacaaactacctcacaaaagagaacagagctgaagacctcaggaaccttttgacccagctcaggcccttttttgcattgatccccaaggcgaagactgcgaagattgtgcgtggcatcattgatgccgttgccaaggtgcctggaacatctcagcttcagatctcactgtgcaaggagatggtagaatggacccgtgcagagaagcgaaccttcctcaggcagcgtgtggaagcaaggctggcagcccttctgttggagaatcaggagtatactgaggctcttacactcctttctggactcatcaaggaagttaggaggctggatgacaagttgcttcttgtggacatcgaccttttggagagcaagctccatttctctctgagaaaccttccaaaggccaaagcttctctgactgctgccagaactgcagccaatgccatttatgtgccgccatctcagcagggcacaattgatctgcagagtgggatccttcatgctgaagagaaggattacaagactgcttacagctacttcttcgaagcatttgaagctttcagttcactggaagatcccaaggctatcttcagcttgaagtacatgcttctgtgcaagataatggtcaaccaagctgatgatgttgcaggaatcatctcatcgaaggctggcctcaagtatctgggtcctgatgttgatgctatgaaagctgtggccgatgcctactccaaaaggtctctgaagtacttcgaaactgctctccgtgattacaaagctcagctggaagaagatcctattgtccacaggcacctttcctcgctgtatgacactctcttggagcagaacctctgcaggctgattgagccctactcaagggtggagattgctcacatagcagagatgattgagctgccaatgaaccatgttgagaagaagctgtcccagatgatcctcgacaagaaattcgcagggacacttgatcaaggcgctggctgcctcatcatcttcgaggacagcaagactgaggagatcttccctgccacacttgaaacgatcacgaatgttggcaaggttgtggacagcctgtacatgagatcggccaagatcatggcctgaaagatgcagtgggaggcctaggtgtcgtcagcttcttttcttggtctattgtcagttcagttaaccaaactttagctgtccaagagacatcttattgtggatttttttttatttgtggttttgggtggcagactgtttgcgttacaatttggtcatgttgctcatgaatactcatgtttctgtttgatggaagtactgttaaggct

SEQ ID NO: 11028 - protein, 426 aa, Zea mays subsp. mays
  peptide (1)..(426): Ceres Seq. ID no. 12351341
MSSSMQSSYLPATTESVAKAQEAKDASESISILYHVLEDPSSSADALRVKELAITNLTNYLTKENRAEDLRNLLTQLRPFFALIPKAKTAKIVRGIIDAVAKVPGTSQLQISLCKEMVEWTRAEKRTFLRQRVEARLAALLLENQEYTEALTLLSGLIKEVRRLDDKLLLVDIDLLESKLHFSLRNLPKAKASLTAARTAANAIYVPPSQQGTIDLQSGILHAEEKDYKTAYSYFFEAFEAFSSLEDPKAIFSLKYMLLCKIMVNQADDVAGIISSKAGLKYLGPDVDAMKAVADAYSKRSLKYFETALRDYKAQLEEDPIVHRHLSSLYDTLLEQNLCRLIEPYSRVEIAHIAEMIELPMNHVEKKLSQMILDKKFAGTLDQGAGCLIIFEDSKTEEIFPATLETITNVGKVVDSLYMRSAKIMA

SEQ ID NO: 11029 - protein, 422 aa, Zea mays subsp. mays
  peptide (1)..(422): Ceres Seq. ID no. 12351342
MQSSYLPATTESVAKAQEAKDASESISILYHVLEDPSSSADALRVKELAITNLTNYLTKENRAEDLRNLLTQLRPFFALIPKAKTAKIVRGIIDAVAKVPGTSQLQISLCKEMVEWTRAEKRTFLRQRVEARLAALLLENQEYTEALTLLSGLIKEVRRLDDKLLLVDIDLLESKLHFSLRNLPKAKASLTAARTAANAIYVPPSQQGTIDLQSGILHAEEKDYKTAYSYFFEAFEAFSSLEDPKAIFSLKYMLLCKIMVNQADDVAGIISSKAGLKYLGPDVDAMKAVADAYSKRSLKYFETALRDYKAQLEEDPIVHRHLSSLYDTLLEQNLCRLIEPYSRVEIAHIAEMIELPMNHVEKKLSQMILDKKFAGTLDQGAGCLIIFEDSKTEEIFPATLETITNVGKVVDSLYMRSAKIMA

SEQ ID NO: 11030 - protein, 310 aa, Zea mays subsp. mays
  peptide (1)..(310): Ceres Seq. ID no. 12351343
MVEWTRAEKRTFLRQRVEARLAALLLENQEYTEALTLLSGLIKEVRRLDDKLLLVDIDLLESKLHFSLRNLPKAKASLTAARTAANAIYVPPSQQGTIDLQSGILHAEEKDYKTAYSYFFEAFEAFSSLEDPKAIFSLKYMLLCKIMVNQADDVAGIISSKAGLKYLGPDVDAMKAVADAYSKRSLKYFETALRDYKAQLEEDPIVHRHLSSLYDTLLEQNLCRLIEPYSRVEIAHIAEMIELPMNHVEKKLSQMILDKKFAGTLDQGAGCLIIFEDSKTEEIFPATLETITNVGKVVDSLYMRSAKIMA

SEQ ID NO: 11031 - DNA, 1686 bp, Zea mays subsp. mays
  misc_feature (1)..(1686): Ceres Seq. ID no. 12406705
  misc_feature (1)..(1686): Ortholog of  Ceres SEQ ID NO 14314896 as cited in SEQ ID NO 54010
  misc_feature (1)..(1686): Ortholog of  Ceres SEQ ID NO 14308813 as cited in SEQ ID NO 55485
aaggtatcaccacgttcactgtcgctcgacctctgttcttgagctgcttcatgcgatagcgactggaccaaagttgtactctgctgcctccccgtgcctttagtgattcggtcctcgggtttgcgtgcaatttttaatcttcgcctccagccatgggtaaggagaagtctcacatcaacattgtggttattggccacgtcgactctggcaagtcgacaaccaccggccacctgatctacaagcttggaggcattgacaagcgtgtgatcgagaggtttgagaaggaggccgctgaaatgaacaagcggtcctttaagtatgcttgggtgcttgacaagctcaaggctgagcgtgagaggggtatcaccattgatattgctctgtggaagtttgagaccaccaagtactattgcaccgttattgatgcccctggacaccgtgactttatcaagaacatgatcactggtacctcccaggctgactgtgctgtccttatcattgactccaccactggtggttttgaggctggtatctccaaggatggccagacacgtgagcatgctctccttgcgttcacacttggagtgaagcagatgatttgctgctgcaacaagatggatgcaaccactcccaaatactccaaggcacgttatgatgagattgtgaaggaagtctcatcttacctcaagaaagttgggtacaaccctgataagatagcatttgttcccatctctggttttgagggtgacaacatgattgagaggtccaccaaccttgactggtacaaaggcccaaccctgcttgaggctcttgaccagatcaccgagcccaagagaccctcggacaagcccctgcgtctccccctccaggatgtgtacaagattggtggtattggaactgtgccagttggtcgtgtggagactggtgtcatcaagcctggtatggttgtcacctttggtccaactggcctgactactgaggtgaagtctgttgagatgcaccatgaggctcttcaggaggcccttcctggtgacaatgttggcttcaacgtgaagaacgtcgctgtgaaggatatcaagcgtggttatgtggcctccaactccaaggatgaccctgccaaggaggctgccagcttcacctcccaggtcatcatcatgaaccaccctgggcagatcggtaacggttatgccccagtgctggactgccacacctcccatattgctgtcaagtttgctgagctcattaccaagatcgacaggcgttctggcaaggagcttgagaaagagcccaagttcttgaagaacggtgatgctggtatggtgaagatgattcccaccaagcccatggtggtggagacattctcgcagtatcctcccctgggtaggtttgctgtccgtgacatgagacagacggttgctgttggagtcatcaagagtgtggagaagaaggacccgaccggtgccaaggtgaccaaggctgctgccaagaagaaatgatgcgacctgtcgttgatgcagcgtctgcttttccaatacgtagctgagatgttccattttgacataagttttgtatgctgtggttgctgtttaccttgtgaactgttgagctctactattgggtgtccgtttatctgtttatgtagcatcttgttatttcacctattgcaatacaagaatgctatatgac

SEQ ID NO: 11032 - protein, 447 aa, Zea mays subsp. mays
  peptide (1)..(447): Ceres Seq. ID no. 12406706
MGKEKSHINIVVIGHVDSGKSTTTGHLIYKLGGIDKRVIERFEKEAAEMNKRSFKYAWVLDKLKAERERGITIDIALWKFETTKYYCTVIDAPGHRDFIKNMITGTSQADCAVLIIDSTTGGFEAGISKDGQTREHALLAFTLGVKQMICCCNKMDATTPKYSKARYDEIVKEVSSYLKKVGYNPDKIAFVPISGFEGDNMIERSTNLDWYKGPTLLEALDQITEPKRPSDKPLRLPLQDVYKIGGIGTVPVGRVETGVIKPGMVVTFGPTGLTTEVKSVEMHHEALQEALPGDNVGFNVKNVAVKDIKRGYVASNSKDDPAKEAASFTSQVIIMNHPGQIGNGYAPVLDCHTSHIAVKFAELITKIDRRSGKELEKEPKFLKNGDAGMVKMIPTKPMVVETFSQYPPLGRFAVRDMRQTVAVGVIKSVEKKDPTGAKVTKAAAKKK

SEQ ID NO: 11033 - protein, 399 aa, Zea mays subsp. mays
  peptide (1)..(399): Ceres Seq. ID no. 12406707
MNKRSFKYAWVLDKLKAERERGITIDIALWKFETTKYYCTVIDAPGHRDFIKNMITGTSQADCAVLIIDSTTGGFEAGISKDGQTREHALLAFTLGVKQMICCCNKMDATTPKYSKARYDEIVKEVSSYLKKVGYNPDKIAFVPISGFEGDNMIERSTNLDWYKGPTLLEALDQITEPKRPSDKPLRLPLQDVYKIGGIGTVPVGRVETGVIKPGMVVTFGPTGLTTEVKSVEMHHEALQEALPGDNVGFNVKNVAVKDIKRGYVASNSKDDPAKEAASFTSQVIIMNHPGQIGNGYAPVLDCHTSHIAVKFAELITKIDRRSGKELEKEPKFLKNGDAGMVKMIPTKPMVVETFSQYPPLGRFAVRDMRQTVAVGVIKSVEKKDPTGAKVTKAAAKKK

SEQ ID NO: 11034 - protein, 346 aa, Zea mays subsp. mays
  peptide (1)..(346): Ceres Seq. ID no. 12406708
MITGTSQADCAVLIIDSTTGGFEAGISKDGQTREHALLAFTLGVKQMICCCNKMDATTPKYSKARYDEIVKEVSSYLKKVGYNPDKIAFVPISGFEGDNMIERSTNLDWYKGPTLLEALDQITEPKRPSDKPLRLPLQDVYKIGGIGTVPVGRVETGVIKPGMVVTFGPTGLTTEVKSVEMHHEALQEALPGDNVGFNVKNVAVKDIKRGYVASNSKDDPAKEAASFTSQVIIMNHPGQIGNGYAPVLDCHTSHIAVKFAELITKIDRRSGKELEKEPKFLKNGDAGMVKMIPTKPMVVETFSQYPPLGRFAVRDMRQTVAVGVIKSVEKKDPTGAKVTKAAAKKK

SEQ ID NO: 11035 - DNA, 1318 bp, Zea mays subsp. mays
  misc_feature (1)..(1318): Ceres Seq. ID no. 12406702
  misc_feature (1)..(1318): Ortholog of  Ceres SEQ ID NO 12364737 as cited in SEQ ID NO 51089
  misc_feature (1)..(1318): Ortholog of  Ceres SEQ ID NO 14311515 as cited in SEQ ID NO 51680
  misc_feature (1)..(1318): Ortholog of  Ceres SEQ ID NO 12581561 as cited in SEQ ID NO 53617
  misc_feature (1)..(1318): Ortholog of  Ceres SEQ ID NO 14316263 as cited in SEQ ID NO 55294
  misc_feature (1)..(1318): Ortholog of  Ceres SEQ ID NO 13582301 as cited in SEQ ID NO 56509
  misc_feature (1)..(1318): Ortholog of  Ceres SEQ ID NO 13595567 as cited in SEQ ID NO 56760
  misc_feature (1)..(1318): Ortholog of  Ceres SEQ ID NO 14315035 as cited in SEQ ID NO 56880
  misc_feature (1)..(1318): Ortholog of  Ceres SEQ ID NO 15176751 as cited in SEQ ID NO 59719
  misc_feature (1)..(1318): Ortholog of  Ceres SEQ ID NO 13655302 as cited in SEQ ID NO 63307
  misc_feature (1)..(1318): Ortholog of  Ceres SEQ ID NO 13597380 as cited in SEQ ID NO 64054
  misc_feature (1)..(1318): Ortholog of  Ceres SEQ ID NO 12625474 as cited in SEQ ID NO 64169
  misc_feature (1)..(1318): Ortholog of  Ceres SEQ ID NO 13597502 as cited in SEQ ID NO 64681
  misc_feature (1)..(1318): Ortholog of  Ceres SEQ ID NO 15180805 as cited in SEQ ID NO 0
gcacgagaccattacctagaacatcctaatcgaaaagtacttggcaatcctctctagctagctcagcatccgacgacgggacttgcacgatggatgctgctctgctcgtcgtctccctcgtcctctgcctgctggcggctgcccctgcggcgtccgcggcgcgggccttcttcgtcttcggcgactccctcgtcgacaacggcaacaacaactacctgctgaccacggcgcgcgccgacgcgcccccctacggcatcgacttccccacgcaccaagccacgggccgcttctccaacgggcttaacatccccgacatcatcagcgagcacctcggggccgaacctgcgctgccgtacctgagccccgagctccgaggggagaagctgctcgtcggcgccaacttcgcgtcggccggcgtcgggatcctcaacgacacaggaatacagtttgtgaacatcatcaggatcggcgaccagctgcagtacttccgggagtaccagcggaagctgcgagccctcgtcggcgagccgcaggcgacgcagctcgtgaaccaggccctcgtgctcatcacgctcggcggcaacgacttcgtgaacaactactacctggtgcccatgtccgtgcggtcgcgccagtacgcactcccggactacgtccgcttcatcgtctccgagtacaggaagatcctctcgaggctgtacgagctgggcgcgcggcgcgtgatcgtgacggggacggggccgctggggtgcgtcccggccgagctggcgctacacagccagaacggcgagtgcgcggcggagctgacgcgcgccgtgaacctcttcaacccgcagatggtggacatggtgcgcggcatcaaccgcgccatcggcgccgacgtcttcgtcaccgccaacacctaccgcatgaacttcgactacctcgcaaacccgcaggacttcgggttcacgaacgtgcaggtggcgtgctgcggccagggcccgtacaacgggatcgggctgtgcacggcggcgtcgaacgtgtgcgacaaccgcgacgtgttcgcgttctgggacgcgttccaccccacggagagggcaaaccgcatcatcgtcgcccagttcatgcacggngacacggactacatgcaccccatgaacctnancaccatnctngccacggaccaggagggcctctagactatagcttgatcagccggacacgattatacgtacatgcgtgatgtgtctcacgtgcctagcacgttagccatgtgttggatgatggcagcccaatttgccaataatattcgtgcctcgatccaagtttcaccttc

SEQ ID NO: 11036 - protein, 363 aa, Zea mays subsp. mays
  peptide (1)..(363): Ceres Seq. ID no. 12406703
  misc_feature (342)..(342): Xaa is any aa, unknown or other
  misc_feature (352)..(352): Xaa is any aa, unknown or other
  misc_feature (353)..(353): Xaa is any aa, unknown or other
  misc_feature (355)..(355): Xaa is any aa, unknown or other
  misc_feature (356)..(356): Xaa is any aa, unknown or other
MDAALLVVSLVLCLLAAAPAASAARAFFVFGDSLVDNGNNNYLLTTARADAPPYGIDFPTHQATGRFSNGLNIPDIISEHLGAEPALPYLSPELRGEKLLVGANFASAGVGILNDTGIQFVNIIRIGDQLQYFREYQRKLRALVGEPQATQLVNQALVLITLGGNDFVNNYYLVPMSVRSRQYALPDYVRFIVSEYRKILSRLYELGARRVIVTGTGPLGCVPAELALHSQNGECAAELTRAVNLFNPQMVDMVRGINRAIGADVFVTANTYRMNFDYLANPQDFGFTNVQVACCGQGPYNGIGLCTAASNVCDNRDVFAFWDAFHPTERANRIIVAQFMHXDTDYMHPMNXXTXXATDQEGL

SEQ ID NO: 11037 - protein, 188 aa, Zea mays subsp. mays
  peptide (1)..(188): Ceres Seq. ID no. 12406704
  misc_feature (167)..(167): Xaa is any aa, unknown or other
  misc_feature (177)..(177): Xaa is any aa, unknown or other
  misc_feature (178)..(178): Xaa is any aa, unknown or other
  misc_feature (180)..(180): Xaa is any aa, unknown or other
  misc_feature (181)..(181): Xaa is any aa, unknown or other
MSVRSRQYALPDYVRFIVSEYRKILSRLYELGARRVIVTGTGPLGCVPAELALHSQNGECAAELTRAVNLFNPQMVDMVRGINRAIGADVFVTANTYRMNFDYLANPQDFGFTNVQVACCGQGPYNGIGLCTAASNVCDNRDVFAFWDAFHPTERANRIIVAQFMHXDTDYMHPMNXXTXXATDQEGL

SEQ ID NO: 11038 - DNA, 1807 bp, Zea mays subsp. mays
  misc_feature (1)..(1807): Ceres Seq. ID no. 12343300
  misc_feature (1)..(1807): Ortholog of  Ceres SEQ ID NO 15177012 as cited in SEQ ID NO 56256
  misc_feature (1)..(1807): Ortholog of  Ceres SEQ ID NO 14314300 as cited in SEQ ID NO 57386
  misc_feature (1)..(1807): Ortholog of  Ceres SEQ ID NO 14311993 as cited in SEQ ID NO 60371
  misc_feature (1)..(1807): Ortholog of  Ceres SEQ ID NO 13596509 as cited in SEQ ID NO 62004
  misc_feature (1)..(1807): Ortholog of  Ceres SEQ ID NO 13500385 as cited in SEQ ID NO 67583
agcgaattagtgaaaagaagacaataaataaatacaacgaatgcagcgagcgaggtggaggtggggggaaaagggcgaggtgacaccgtgacagagagaaggcgagggagggatcacgaggtgtgcttcctcctccgcccaatcctgcccaaccaaatccgccagcgccgcctcctttacactcccacctctgtcccggagcaaaaaagggagggagaggctcgcttcttggatcgcggggtcacgggacgcgcgccgcgggccggtacgctgctgctggcggactgctcgacccttgcctaccagctgctgcctgctgctgcttccttggctggcgccggcgagagacggaggcgaggcgacgacgatggaccgggcggcgctcaccgtgggcccggggatggacatgcccataatgcacgacggcgaccgctacgagctcgtccgcgacatcggctccggcaacttcggcgtcgcgcgcctcatgcgcaaccgcgccgacggccagctcgtcgccgtcaagtacatcgagcgaggcgagaagattgacgagaacgtgcagcgggagatcatcaaccaccgctccctgcggcaccccaacatcatccgcttcaaggaggtcatcctcaccccgacgcacctcgccatcgtcatggagtacgcctccggcggggagctcttcgagcgcatctgcaacgctggcaggttcagcgaggacgaggcgcgtttctttttccagcaactcatatcaggggtcagctactgccattccatgcaagtatgccatcgcgacttgaagctagagaacaccctgttggacgggagcaccgcgcctcgcctcaagatatgtgattttggctactcaaagtcatcagttctacactcgcagccgaaatctacagtgggaactcctgcatacattgctcctgaggttcttctgaagaaggaatacgatggaaaggtcgctgatgtgtggtcatgtggagtaacgctgtacgtgatgctggtcggtgcatatccgtttgaggacccagattagcctaagaatttcaggaagacaattcagagaatattgggtgtgcagtactcaattccagactatgtccacatatctccagagtgccaaaatcttgtctctaggattttcgtcgccgacccagccaccaggatcaccatccctgagataaggaaccatccatggttcttgaagaacctgccagctgacctaatggatgacagcacgatgagcaagcagtacgaggagcctgagcaaccgatgcagagcatggatgagatcatgcagatcctggccgaggcgaccattccagcagctggtccccgtggactcaatcagttcctgaacgacggccttgacctcgacgatgacatggacgacctggactcagataccgatcttgacctggaaagcagtggggaaatcgtgtatgctatttgacagcagcgaggcaatgtgtatcatcagtcgtgctcagatcgtttgttgcgccataggttaccgagataattagagagacaggggggaggtatctgctggagatgctgctcgtgtctgatgccgtgatgcccccttttttcatcctgttatgtttggctgttgtttggttgtggtgcacctccagtgttttacaacagtttggcccttcggaattggttgtgctagaacctcgtccatctaagaagaccctttgtttttgcatccccagctaagagacagtgaagtacttgtataattatactgtttgtgtcatatgtatttggtgtaggaaaataaagaaactccattgcc

SEQ ID NO: 11039 - protein, 223 aa, Zea mays subsp. mays
  peptide (1)..(223): Ceres Seq. ID no. 12343301
MDRAALTVGPGMDMPIMHDGDRYELVRDIGSGNFGVARLMRNRADGQLVAVKYIERGEKIDENVQREIINHRSLRHPNIIRFKEVILTPTHLAIVMEYASGGELFERICNAGRFSEDEARFFFQQLISGVSYCHSMQVCHRDLKLENTLLDGSTAPRLKICDFGYSKSSVLHSQPKSTVGTPAYIAPEVLLKKEYDGKVADVWSCGVTLYVMLVGAYPFEDPD

SEQ ID NO: 11040 - protein, 212 aa, Zea mays subsp. mays
  peptide (1)..(212): Ceres Seq. ID no. 12343302
MDMPIMHDGDRYELVRDIGSGNFGVARLMRNRADGQLVAVKYIERGEKIDENVQREIINHRSLRHPNIIRFKEVILTPTHLAIVMEYASGGELFERICNAGRFSEDEARFFFQQLISGVSYCHSMQVCHRDLKLENTLLDGSTAPRLKICDFGYSKSSVLHSQPKSTVGTPAYIAPEVLLKKEYDGKVADVWSCGVTLYVMLVGAYPFEDPD

SEQ ID NO: 11041 - protein, 210 aa, Zea mays subsp. mays
  peptide (1)..(210): Ceres Seq. ID no. 12343303
MPIMHDGDRYELVRDIGSGNFGVARLMRNRADGQLVAVKYIERGEKIDENVQREIINHRSLRHPNIIRFKEVILTPTHLAIVMEYASGGELFERICNAGRFSEDEARFFFQQLISGVSYCHSMQVCHRDLKLENTLLDGSTAPRLKICDFGYSKSSVLHSQPKSTVGTPAYIAPEVLLKKEYDGKVADVWSCGVTLYVMLVGAYPFEDPD

SEQ ID NO: 11042 - DNA, 1293 bp, Zea mays subsp. mays
  misc_feature (1)..(1293): Ceres Seq. ID no. 12353343
  misc_feature (1)..(1293): Ortholog of  Ceres SEQ ID NO 13596030 as cited in SEQ ID NO 62043
gtcccgctggtggcgtcctttttttccgccgggagataaaccgaccggacccctgactgcgacccgcagctgctcctgcttccgatccgaacttctctcgcccgccggttcttcgcgagcaattcttataaagcatcatcatcaccacttgtgatgggtggaagccagtacgatgatgaatgggtgttgcccagtgccgatatcactcttgttcttgttgggaaacttggctatggaaagagtgcaactggaaatagcatccttggacgggaagcatttgtatcagaatattcacattctggtgttactaatacttgtcagctgggaagcactaccctgatggacggccggaccatcaatgttattgatacaccagggttatttgatatgagcattgcatcagacgatgctggtaaagagattgttaaatgtatgaacatggctaaagatgggatacatgcagttctaatggtttttagtggcacatctcggttttctcgagaggatgcaagtacaattgagactattaaggtcttttttggagaaaagattgttgaccacatggttttagtttttacttatggtgatctagttggtgaatctaagttgaagaacatgctcaatgatgcgccagagtatttgcagaatgttgttgagctatgccaaaacagagttgtcgtcttcgataacaggaccaaggaccgaaggctccaagcgcagcaacttgacaaattgctctatgtagtggactcggtttgtgcaaacaatggaggaaaaccatttacagatcaaatgttcactcgcatcaaggaggtgcatgatagggaaaaagaggtgcataccttgggatattcagatgagcagatatctgagttgaaggaggagattcatagaactagggatgaacagcttgcacagataaccagcatggtcgaggaaaagctaaaccgcactgtggagaagctgcaacagcagctcatggaggaacagaacgcaaggctggaggccgagaaggtggcgcatgaagctatgcggaaatcagaagcgcagatccaggagctgaaggagagactcgagaaggctcgactggaaaacgaggagttccggaggatggcgcagagcagtaaatgtgctatcctatagtacttgctagaaaaactctgtgcggctatcgtgctgacgcgtctcttttttttttttgtctgtagcacctttttttaacagtttatttattacgcgacaactgttatgaagacactgctttgcttccgtatattatcttcttttttgcgc

SEQ ID NO: 11043 - protein, 329 aa, Zea mays subsp. mays
  peptide (1)..(329): Ceres Seq. ID no. 12353344
MGGSQYDDEWVLPSADITLVLVGKLGYGKSATGNSILGREAFVSEYSHSGVTNTCQLGSTTLMDGRTINVIDTPGLFDMSIASDDAGKEIVKCMNMAKDGIHAVLMVFSGTSRFSREDASTIETIKVFFGEKIVDHMVLVFTYGDLVGESKLKNMLNDAPEYLQNVVELCQNRVVVFDNRTKDRRLQAQQLDKLLYVVDSVCANNGGKPFTDQMFTRIKEVHDREKEVHTLGYSDEQISELKEEIHRTRDEQLAQITSMVEEKLNRTVEKLQQQLMEEQNARLEAEKVAHEAMRKSEAQIQELKERLEKARLENEEFRRMAQSSKCAIL

SEQ ID NO: 11044 - protein, 267 aa, Zea mays subsp. mays
  peptide (1)..(267): Ceres Seq. ID no. 12353345
MDGRTINVIDTPGLFDMSIASDDAGKEIVKCMNMAKDGIHAVLMVFSGTSRFSREDASTIETIKVFFGEKIVDHMVLVFTYGDLVGESKLKNMLNDAPEYLQNVVELCQNRVVVFDNRTKDRRLQAQQLDKLLYVVDSVCANNGGKPFTDQMFTRIKEVHDREKEVHTLGYSDEQISELKEEIHRTRDEQLAQITSMVEEKLNRTVEKLQQQLMEEQNARLEAEKVAHEAMRKSEAQIQELKERLEKARLENEEFRRMAQSSKCAIL

SEQ ID NO: 11045 - protein, 251 aa, Zea mays subsp. mays
  peptide (1)..(251): Ceres Seq. ID no. 12353346
MSIASDDAGKEIVKCMNMAKDGIHAVLMVFSGTSRFSREDASTIETIKVFFGEKIVDHMVLVFTYGDLVGESKLKNMLNDAPEYLQNVVELCQNRVVVFDNRTKDRRLQAQQLDKLLYVVDSVCANNGGKPFTDQMFTRIKEVHDREKEVHTLGYSDEQISELKEEIHRTRDEQLAQITSMVEEKLNRTVEKLQQQLMEEQNARLEAEKVAHEAMRKSEAQIQELKERLEKARLENEEFRRMAQSSKCAIL

SEQ ID NO: 11046 - DNA, 1612 bp, Zea mays subsp. mays
  misc_feature (1)..(1612): Ceres Seq. ID no. 12374154
  misc_feature (1)..(1612): Ortholog of  Ceres SEQ ID NO 14312212 as cited in SEQ ID NO 54399
  misc_feature (1)..(1612): Ortholog of  Ceres SEQ ID NO 15225341 as cited in SEQ ID NO 55222
  misc_feature (1)..(1612): Ortholog of  Ceres SEQ ID NO 13653980 as cited in SEQ ID NO 69253
gcactgttcaaacaaaccctccactgccctccccactctccccttcaccgcgccgcactcccaagtcccaacaggcctaaatggcggcggccggaacaattcccggcgccgccgcagccattggcgcttctgtgtcccaacgccaacgtcgcgtcggcgctccttctttcgtagctgcctacgtctccgagggcacccgcctcgtctgccggaggcagctccgtccggctccggtcctcgcttcttccttcatctccctttctcatccagcgaggcggcggttcctctgcgatgctgcggccggagcctcctcaggtcccgctggagaagccaagccccagggatttgcagagagatacccagctcttgtcacaggtttcttcttcttcttgtggtattttctgaatgtaatatttaacatcctcaacaagaagatcttcgactacttcccctatccatattttgtgtcagtgagccatctttttattggagtactatactgccttattggctggagcttcggcatcccaaagcgcgcgccaatcaactcaacacttctgaagcagcttgttccagttgcggtttgcccatgccattggccatgtaacaagcactgtgtcatttgctgctgtagctgtgtcatttgcccacactattaaagctctcgagccattcttcaatgcggctgcttcccagtttatccttggacaaccagttccattgacactctggctgtctcttgttccagtggtgattggtgtctcggtagcatccctcactgaactctcatttaattggactggcttcattaatgccatgatctcaaatatttctttcacctaccgaagcatctattctaagaaggctatgactgacatggatagtaccaacttgtatgcatacatatcaataattgctctctttgtctgcatcccccctgcaattattattgaaggacctcaattagtgcagcatggttttaaagatgcaattgccaaagttggattaacaaagttgatttctaatttttttgtggtgggcttattctatcacctttataaccaggttgctacaaacacattggagcgggtagcccctttaacacatgccatcggcaatgtgttgaaacgtgttttcgtcattggcttttccatcatcgcattcggcaacaagatcaccacacagactggaattggcacttccattgctgtttctggtgttgccctctactcatttataaaggctaagattgaggagaaaaagcaaataaagagtgcataaggtgttggctgatgtggatgcggttggtttgtcgctttgatggacctctattctctcggtgaacgaacaaacttgcaagatggataaaatcttgctatctcctagtacatttgattgttattcccagtctggtactgaggtgtgcggttgttgttggctaacttgtttatttgaagcaaatttgagcaatgctcagtggcatggaatttccatttctgttttccttcgctcatttattctgacttgacatggtgctattgtaatcttaagcagtagtgtctctagaatgttttccccaaggagatttcagtaccaaatttgaacaatcctc

SEQ ID NO: 11047 - protein, 192 aa, Zea mays subsp. mays
  peptide (1)..(192): Ceres Seq. ID no. 12374155
MAAAGTIPGAAAAIGASVSQRQRRVGAPSFVAAYVSEGTRLVCRRQLRPAPVLASSFISLSHPARRRFLCDAAAGASSGPAGEAKPQGFAERYPALVTGFFFFLWYFLNVIFNILNKKIFDYFPYPYFVSVSHLFIGVLYCLIGWSFGIPKRAPINSTLLKQLVPVAVCPCHWPCNKHCVICCCSCVICPHY

SEQ ID NO: 11048 - protein, 154 aa, Zea mays subsp. mays
  peptide (1)..(154): Ceres Seq. ID no. 12374156
MISNISFTYRSIYSKKAMTDMDSTNLYAYISIIALFVCIPPAIIIEGPQLVQHGFKDAIAKVGLTKLISNFFVVGLFYHLYNQVATNTLERVAPLTHAIGNVLKRVFVIGFSIIAFGNKITTQTGIGTSIAVSGVALYSFIKAKIEEKKQIKSA

SEQ ID NO: 11049 - protein, 138 aa, Zea mays subsp. mays
  peptide (1)..(138): Ceres Seq. ID no. 12374157
HCSNKPSTALPTLPFTAPHSQVPTGLNGGGRNNSRRRRSHWRFCVPTPTSRRRSFFRSCLRLRGHPPRLPEAAPSGSGPRFFLHLPFSSSEAAVPLRCCGRSLLRSRWRSQAPGICREIPSSCHRFLLLLVVFSECNI

SEQ ID NO: 11050 - DNA, 1081 bp, Zea mays subsp. mays
  misc_feature (1)..(1081): Ceres Seq. ID no. 12411966
  misc_feature (1)..(1081): Ortholog of  Ceres SEQ ID NO 15177842 as cited in SEQ ID NO 51547
  misc_feature (1)..(1081): Ortholog of  Ceres SEQ ID NO 13594859 as cited in SEQ ID NO 51974
  misc_feature (1)..(1081): Ortholog of  Ceres SEQ ID NO 13597887 as cited in SEQ ID NO 64295
agcagttgggctctctcggcccgcctccttcccgagcacgcacgccgcctcgcttccaattcttccccccctctcctcgtccgctccgctccgctcctgcgttgccgtggagtgccgcccggggctccattccattccacccgtagcccggtccccccgcgccgccggcgcgccggttccttcggttcccgggatcaagatgattggttcattcattaccggaatgctaacgcttgttctcggatacgcgtaccctgcatacgactgctacaagacagtggagctgaacaggcctgaggtcgagcagctgcggttctggtgtcagtactggattttactcgcgtttctcaccgtactggagagagttggggaaagtttcgtatcatggttgccaatgtatagtgaagcaaagctcgcatttatcgtgtacttgtggtatccaaagacacgggggactgcctatgtatacgagtcattcttcaagccatacattgcaaaacatgaaactgagattgatcgaaatctgcttgagttgaggacaagggccggtgacatggcagttctttatttccagagggttacaaactatgctcagacaaggtcttatgaaatcttgcagtatattgcctcacagtcaccgactcaaagacaggcacatcagcagcagcaacgcccaccaccgccacggactcggcaggtcaaccctgcacctccacctattcccgcttggctgggggatctggaccaccgcaaaattagcgtcgatcaagatttccatctcacgcgaattgcaccacactggtctggttcttggtgattgactgagaagagggggaatgctgagttggttgaacagagtttgggtttcctcgcatgcgttctccgttgtacgaactggaaccggtttggtctcgaattgtgaatagtatcccagaaacagaagtggatgatcatttcaattcacagtgtagcgctaggaaatatggttgggaaccatcttctgcaagacgcgaaggcgcgacatgtcatgagcatttagcaacgatgatactactggtcacagtagtgtagtctggaattc

SEQ ID NO: 11051 - protein, 271 aa, Zea mays subsp. mays
  peptide (1)..(271): Ceres Seq. ID no. 12411967
AVGLSRPASFPSTHAASLPILPPLSSSAPLRSCVAVECRPGLHSIPPVARSPRAAGAPVPSVPGIKMIGSFITGMLTLVLGYAYPAYDCYKTVELNRPEVEQLRFWCQYWILLAFLTVLERVGESFVSWLPMYSEAKLAFIVYLWYPKTRGTAYVYESFFKPYIAKHETEIDRNLLELRTRAGDMAVLYFQRVTNYAQTRSYEILQYIASQSPTQRQAHQQQQRPPPPRTRQVNPAPPPIPAWLGDLDHRKISVDQDFHLTRIAPHWSGSW

SEQ ID NO: 11052 - protein, 205 aa, Zea mays subsp. mays
  peptide (1)..(205): Ceres Seq. ID no. 12411968
MIGSFITGMLTLVLGYAYPAYDCYKTVELNRPEVEQLRFWCQYWILLAFLTVLERVGESFVSWLPMYSEAKLAFIVYLWYPKTRGTAYVYESFFKPYIAKHETEIDRNLLELRTRAGDMAVLYFQRVTNYAQTRSYEILQYIASQSPTQRQAHQQQQRPPPPRTRQVNPAPPPIPAWLGDLDHRKISVDQDFHLTRIAPHWSGSW

SEQ ID NO: 11053 - protein, 197 aa, Zea mays subsp. mays
  peptide (1)..(197): Ceres Seq. ID no. 12411969
MLTLVLGYAYPAYDCYKTVELNRPEVEQLRFWCQYWILLAFLTVLERVGESFVSWLPMYSEAKLAFIVYLWYPKTRGTAYVYESFFKPYIAKHETEIDRNLLELRTRAGDMAVLYFQRVTNYAQTRSYEILQYIASQSPTQRQAHQQQQRPPPPRTRQVNPAPPPIPAWLGDLDHRKISVDQDFHLTRIAPHWSGSW

SEQ ID NO: 11054 - DNA, 1191 bp, Zea mays subsp. mays
  misc_feature (1)..(1191): Ceres Seq. ID no. 13634967
  misc_feature (1)..(1191): Ortholog of  Ceres SEQ ID NO 13581804 as cited in SEQ ID NO 51424
  misc_feature (1)..(1191): Ortholog of  Ceres SEQ ID NO 13663874 as cited in SEQ ID NO 67003
agctccctttaatacctcaccctcctctcctcccttctctggactggccggatctcttccctgcagatcgagaggcactgccacaccaccatcaccccatgctcaacatgatgactgatctgagctgcgggccgtcgtccaaggtcaaggagcaggtggcggcggcgcgacgggctccggcgacaggcaggggcaggggagaggcaagatcgagatcaagcgcatcgagaacacgacgagccggcaggtgaccttctgcaagcgccgcaacggcctgctcaagaaggcgtacgagctctcggtgctctgcgacgccgaggtcgcgctcgtcgtcttctccagccgcggccgcctctacgagtacgccaacaacagtgtgaagtccaccattgagaggtacaagaaggccaacagtgactcctccaactctgggcacagttgcagaagtcaatgcccagtactaccagcaggagtcctccaagctgcgacagatgatccacagcttgcaaaacgcaaacactaggaacatagtgggagattccatccacaccatgggcctcagggatcttaaacaaatggagggcaagctggagaaagccataatcaagattagagctagaaagaatgagctgctatacgctgaagttgactatatgcaaaaaagggagatggatctgcagactgacaacatgtacctgaggagcaagatcgctgagagtaatgaaacggggcagccggcgatgcacatgacgatgggagcgccgccgacgagcgagtacgaccacatggcccctttcgactcgagaaactttctgcaagtgagcatgcctcagcactactcccatcagctgcaacctacaaccctccagctcggatgatgaaatcagcgctatacctggcggcgcccggcccccaatcgagatagatcacgcatgcagttatatcatgtgccaaatcgagatctcaagtaactctacgtacgtttgcttaattattaataattgtgattagtgcaactgttagggtatatatatttgtgagtgccaccactgtgtgcgtgcatttgtacgtgtgaatttagctgttgcatctactactattgtaccctccggccaggccatatcatcagaaacgcgggtttatttacgcatacttatatatatatatgatttgtgtgctttatatagattg

SEQ ID NO: 11055 - protein, 128 aa, Zea mays subsp. mays
  peptide (1)..(128): Ceres Seq. ID no. 13634968
MIHSLQNANTRNIVGDSIHTMGLRDLKQMEGKLEKAIIKIRARKNELLYAEVDYMQKREMDLQTDNMYLRSKIAESNETGQPAMHMTMGAPPTSEYDHMAPFDSRNFLQVSMPQHYSHQLQPTTLQLG

SEQ ID NO: 11056 - protein, 108 aa, Zea mays subsp. mays
  peptide (1)..(108): Ceres Seq. ID no. 13634969
MGLRDLKQMEGKLEKAIIKIRARKNELLYAEVDYMQKREMDLQTDNMYLRSKIAESNETGQPAMHMTMGAPPTSEYDHMAPFDSRNFLQVSMPQHYSHQLQPTTLQLG

SEQ ID NO: 11057 - protein, 100 aa, Zea mays subsp. mays
  peptide (1)..(100): Ceres Seq. ID no. 13634970
MEGKLEKAIIKIRARKNELLYAEVDYMQKREMDLQTDNMYLRSKIAESNETGQPAMHMTMGAPPTSEYDHMAPFDSRNFLQVSMPQHYSHQLQPTTLQLG

SEQ ID NO: 11058 - DNA, 1623 bp, Zea mays subsp. mays
  misc_feature (1)..(1623): Ceres Seq. ID no. 12373419
  misc_feature (1)..(1623): Ortholog of  Ceres SEQ ID NO 14311025 as cited in SEQ ID NO 53369
  misc_feature (1)..(1623): Ortholog of  Ceres SEQ ID NO 13596872 as cited in SEQ ID NO 62785
aatcgcttccccagaccccagtccccagtccccttttcccaacggccacactttcatcagttcccctttccacggcgccgccggaatccccacaaagccccaaaaccctacggccacctcgccacccccaacgaaaacccagaccacgagatggcccccggtggagagggcaagccaagcacgggcggcggcggcggcggcgggaggaagcgcaagttccttccccacgggaagccggtgcggaagggggcctacccgctgcgccccggcgtgcagggcttcttcatcacctgcgacggcggccgcgagcaccaggccacccgcgaggcgctctccctcctcgactccttctatgaagacctggtggatgggaaaggatcggatgagaagcctaaaaacattccagagaagccactgaacaaaaagataaagtttgaggactctgattcctcagatgatgaggatgaagacaactctggtgaggaagccgacaatgggaatgtgaatgatgtggagaaaggtgaaaccgctccatctgagaagcaacaggaggtgcttgatacctctaataccgcaagcaaggacaatactgctctatctgagaagaaagaggaggtgcttgatacctctgataccgtgagtaaggacaatgaggaacaagcagtcactgctgatgaaccaagagaaaagaagcaacgagtggaagatcctccagtttttgagcaggccgtgcaaaaagagactgctgatgaaccaaaggagtccactgataaaccaaaggagtccagtgaaaaaaatattgacgatttaattgatgaggacctgaaagaaataggggacaggaaaaagaggctctttgcaagcctcgagacaggctgcaatggatgcatattcattcaaatgcataaaagagcaggagaccctggtccagttgagattgtacaaaacatgatgtcatctgctgcattgactcgtaaacatatgtcaagatttattctgcgagttttgcctgttgaggtggcatgctatgcatctgaagaggaaataacaaaggcaattagtccccttattgaaaagtacttcccaaaagaatgctcctcaggtcataagtttgcagtgttatatgaagcaaggtcaaacacaggaattgatagaatgaaaatcataaacgcagcagcgaaatctgtaccacaacctcataaagttgacctgaagaacccagacaagactattgttgtccagattgcaaagaccatatgcatgattggagttgtggaaaggtacaaagagctctcgaagttcaacctaaggcagctgacctcaccggagtcggagaagtaagcctatgagtgacaaaatcttccaggcaaaacgtggaccaacttaaatcagcagcagcgtcaggtggttaggcgctagcgaattaaattatggccggccgaacctcactgtcttgaaagattcagatgttctaatgtttaatgctttaccaccagtggttagtggttgctggttcatgcttcccaggttagattcacggtttttttttgaggctgtagaaagatctgacgatacttcatgtgtgctttctctctgacgatggttccatacaggggcttaccg

SEQ ID NO: 11059 - protein, 446 aa, Zea mays subsp. mays
  peptide (1)..(446): Ceres Seq. ID no. 12373420
NRFPRPQSPVPFSQRPHFHQFPFPRRRRNPHKAPKPYGHLATPNENPDHEMAPGGEGKPSTGGGGGGGRKRKFLPHGKPVRKGAYPLRPGVQGFFITCDGGREHQATREALSLLDSFYEDLVDGKGSDEKPKNIPEKPLNKKIKFEDSDSSDDEDEDNSGEEADNGNVNDVEKGETAPSEKQQEVLDTSNTASKDNTALSEKKEEVLDTSDTVSKDNEEQAVTADEPREKKQRVEDPPVFEQAVQKETADEPKESTDKPKESSEKNIDDLIDEDLKEIGDRKKRLFASLETGCNGCIFIQMHKRAGDPGPVEIVQNMMSSAALTRKHMSRFILRVLPVEVACYASEEEITKAISPLIEKYFPKECSSGHKFAVLYEARSNTGIDRMKIINAAAKSVPQPHKVDLKNPDKTIVVQIAKTICMIGVVERYKELSKFNLRQLTSPESEK

SEQ ID NO: 11060 - protein, 396 aa, Zea mays subsp. mays
  peptide (1)..(396): Ceres Seq. ID no. 12373421
MAPGGEGKPSTGGGGGGGRKRKFLPHGKPVRKGAYPLRPGVQGFFITCDGGREHQATREALSLLDSFYEDLVDGKGSDEKPKNIPEKPLNKKIKFEDSDSSDDEDEDNSGEEADNGNVNDVEKGETAPSEKQQEVLDTSNTASKDNTALSEKKEEVLDTSDTVSKDNEEQAVTADEPREKKQRVEDPPVFEQAVQKETADEPKESTDKPKESSEKNIDDLIDEDLKEIGDRKKRLFASLETGCNGCIFIQMHKRAGDPGPVEIVQNMMSSAALTRKHMSRFILRVLPVEVACYASEEEITKAISPLIEKYFPKECSSGHKFAVLYEARSNTGIDRMKIINAAAKSVPQPHKVDLKNPDKTIVVQIAKTICMIGVVERYKELSKFNLRQLTSPESEK

SEQ ID NO: 11061 - DNA, 1419 bp, Zea mays subsp. mays
  misc_feature (1)..(1419): Ceres Seq. ID no. 12566155
  misc_feature (1)..(1419): Ortholog of  Ceres SEQ ID NO 14303487 as cited in SEQ ID NO 54521
  misc_feature (1)..(1419): Ortholog of  Ceres SEQ ID NO 14316302 as cited in SEQ ID NO 55232
  misc_feature (1)..(1419): Ortholog of  Ceres SEQ ID NO 14308274 as cited in SEQ ID NO 55597
  misc_feature (1)..(1419): Ortholog of  Ceres SEQ ID NO 13659710 as cited in SEQ ID NO 60808
gcacgagaccattacctagaacatcctaatcgaaaaatcagccgcagtcgcgtcgcgtcgcgtcgcgtccagtccaatcctcggagcctcacacgggcggacgagcgggagcttctcccaatctcccctgcccagccctgccctgccgccgcgcttagcttcgcatcttcccctcctcctcctcctccttcctcggccaagcgaggagcgaggcgcgggcgcgagcgcgtcgttgagatggattcggaggcggtgcagcacggctgcgcgcattacagccgtgggtgcagcgtcgtggcgccctgctgcggccaggccttcggctgccgccattgccacaacgacgccaaggttcggtggtttccctcctcccgttttcgcttcggctccggttcagcagatgttctgaaacaaccctgtcccgtgccccggcagaactcgctggaggtcgacccgcgcgaccggcacgagatcccccgccacgaaataaagaaggtgatctgttctctctgctccaaggaacaggacgtgcaacagaactgctccagctgtggggcctgcatgggcaagtacttctgtaaagtatgcaagttcttcgatgatgatgtctcaaagggccagtaccactgtgacggatgtggaatatgtagaactggcggcgtggagaactttttccactgtgataaatgtgggtgttgttacagcaatgtcttgaaggattcccaccactgcgtggaaagagcaatgcatcacaactgccccgtctgcttcgagtatctgttcgactccacaaaggacatcagtgtgctgcaatgtgggcataccatccatttggagtgcatgaacgaaatgagagcacaccatcacttctcatgcccagtgtgctcgaggtccgcctgcgacatgtcggccacgtggcggaaactcgacgaggaggtcgcggccacgccgatgcctgacatctaccagaagcacatggtgtggatcctgtgcaacgactgcagcgcgacctcgagcgtgcggttccacgtgctggggcacaagtgccccgcgtgcagttcgtacaacacccgggagacgagggttgcgtgccccaggatctgaggcgaacgagaggccatgtcacaaaatgccagggagatgccgtccaacgactggtggagatcatctgtctgcaggacgttgctgcgcttaaggttaaaggctagcgcgagaccatgcctggtagtccagtcttgagtctggtgctgtccaggcacacctgtggatcggggccggctcaggattagtggggctgttcatgtttagggcgcgaatgcaacgatatttcacgtgggccgtgggctcggtatgtaactgaaccgattatttctattgcaataataacatgcagttctattgggccgagcctaatcagcc

SEQ ID NO: 11062 - protein, 367 aa, Zea mays subsp. mays
  peptide (1)..(367): Ceres Seq. ID no. 12566156
ARDHYLEHPNRKISRSRVASRRVQSNPRSLTRADERELLPISPAQPCPAAALSFASSPPPPPPSSAKRGARRGRERVVEMDSEAVQHGCAHYSRGCSVVAPCCGQAFGCRHCHNDAKVRWFPSSRFRFGSGSADVLKQPCPVPRQNSLEVDPRDRHEIPRHEIKKVICSLCSKEQDVQQNCSSCGACMGKYFCKVCKFFDDDVSKGQYHCDGCGICRTGGVENFFHCDKCGCCYSNVLKDSHHCVERAMHHNCPVCFEYLFDSTKDISVLQCGHTIHLECMNEMRAHHHFSCPVCSRSACDMSATWRKLDEEVAATPMPDIYQKHMVWILCNDCSATSSVRFHVLGHKCPACSSYNTRETRVACPRI

SEQ ID NO: 11063 - protein, 288 aa, Zea mays subsp. mays
  peptide (1)..(288): Ceres Seq. ID no. 12566157
MDSEAVQHGCAHYSRGCSVVAPCCGQAFGCRHCHNDAKVRWFPSSRFRFGSGSADVLKQPCPVPRQNSLEVDPRDRHEIPRHEIKKVICSLCSKEQDVQQNCSSCGACMGKYFCKVCKFFDDDVSKGQYHCDGCGICRTGGVENFFHCDKCGCCYSNVLKDSHHCVERAMHHNCPVCFEYLFDSTKDISVLQCGHTIHLECMNEMRAHHHFSCPVCSRSACDMSATWRKLDEEVAATPMPDIYQKHMVWILCNDCSATSSVRFHVLGHKCPACSSYNTRETRVACPRI

SEQ ID NO: 11064 - DNA, 1332 bp, Zea mays subsp. mays
  misc_feature (1)..(1332): Ceres Seq. ID no. 12387152
  misc_feature (1)..(1332): Ortholog of  Ceres SEQ ID NO 12633565 as cited in SEQ ID NO 1190
  misc_feature (1)..(1332): Ortholog of  Ceres SEQ ID NO 15171390 as cited in SEQ ID NO 51650
  misc_feature (1)..(1332): Ortholog of  Ceres SEQ ID NO 13594845 as cited in SEQ ID NO 51940
aatcccattccagtgcccgtaccgcgccgtccctatcgtgccggatcgccacccgctcgctgcgcccccacctcccccccctcgccggttcgccacttcgccccacctccgcgcctcagatccatccccaatccggcaaccctagcgccgggttcctcctcctcgtctccgcccgccgccgcctccattgccagaggtgatcgagggggagagacagagcttgggtggtcggattagggagagagggaggggaggatgtccagaaggtcggtgaacccgagccggcgggtggcggacgggggcttgccgtccttcggcggcccgttccaccctaagtcacgctcgcctcccgtgctcaccattgccctcgtcgtcctgggtgtcatttttctcattgcctacttcaacagcagcccaggtgtaactgttacgagcaaagagactgtgaccagatctgaaggttcttgcacatcagaagttatgcgggcgcttccatatcttaagaaggcatatggcaatgccatgcaaaaggttctccatgtaggccctgatagttgtacagtagtttctaacctgttgaaagaaggaaaggttgaagcatggggagtggagccttatgatttggaggatactgacagtacttgcaaaagactcgtgcgcaagggctttgtccgtatgtctgatattaagttcccccttccataccgtccagattcttttaatcttgttattgtgtcagatgctttagattatctgaccccaaggtatctgaacaaaacgcttcccggtttagcaagggtttccacagatggccttgtgatttttgctggcaatcctggtcaacagaaagctaaggtctcagaactaccaaaatttggaagaccggcaaaattgcggagttcatcgtggtggacaagatactttgtccagactggcttaacagagaacgaagggccactgaagaaatttgaagaggctacatcccagaacaaataccaaccagattgtcagatcttccacttaagttcgccaaggtgatgcgcatccagaacaccttgggttgttgtcacaccagttctgtaagcagcacctttgcttacccctgttgacttgcgcatctttcgtgcggaggaatggtcacacaaacagagccagccatcagcagtaggttagcttgtgtagagagggagagagagagagaggcctcgacacttgttcctagaaaatccttctggaaattaaattatgtgttaccaatgactgcaaactggagcccgctgggatatatatatgtaagaacttcacgctgttgtactactaagctatgagctg

SEQ ID NO: 11065 - protein, 260 aa, Zea mays subsp. mays
  peptide (1)..(260): Ceres Seq. ID no. 12387153
MSRRSVNPSRRVADGGLPSFGGPFHPKSRSPPVLTIALVVLGVIFLIAYFNSSPGVTVTSKETVTRSEGSCTSEVMRALPYLKKAYGNAMQKVLHVGPDSCTVVSNLLKEGKVEAWGVEPYDLEDTDSTCKRLVRKGFVRMSDIKFPLPYRPDSFNLVIVSDALDYLTPRYLNKTLPGLARVSTDGLVIFAGNPGQQKAKVSELPKFGRPAKLRSSSWWTRYFVQTGLTENEGPLKKFEEATSQNKYQPDCQIFHLSSPR

SEQ ID NO: 11066 - protein, 185 aa, Zea mays subsp. mays
  peptide (1)..(185): Ceres Seq. ID no. 12387154
MRALPYLKKAYGNAMQKVLHVGPDSCTVVSNLLKEGKVEAWGVEPYDLEDTDSTCKRLVRKGFVRMSDIKFPLPYRPDSFNLVIVSDALDYLTPRYLNKTLPGLARVSTDGLVIFAGNPGQQKAKVSELPKFGRPAKLRSSSWWTRYFVQTGLTENEGPLKKFEEATSQNKYQPDCQIFHLSSPR

SEQ ID NO: 11067 - protein, 171 aa, Zea mays subsp. mays
  peptide (1)..(171): Ceres Seq. ID no. 12387155
MQKVLHVGPDSCTVVSNLLKEGKVEAWGVEPYDLEDTDSTCKRLVRKGFVRMSDIKFPLPYRPDSFNLVIVSDALDYLTPRYLNKTLPGLARVSTDGLVIFAGNPGQQKAKVSELPKFGRPAKLRSSSWWTRYFVQTGLTENEGPLKKFEEATSQNKYQPDCQIFHLSSPR

SEQ ID NO: 11068 - DNA, 981 bp, Zea mays subsp. mays
  misc_feature (1)..(981): Ceres Seq. ID no. 12414420
  misc_feature (1)..(981): Ortholog of  Ceres SEQ ID NO 12474640 as cited in SEQ ID NO 129
  misc_feature (1)..(981): Ortholog of  Ceres SEQ ID NO 12627370 as cited in SEQ ID NO 61162
  misc_feature (1)..(981): Ortholog of  Ceres SEQ ID NO 13598268 as cited in SEQ ID NO 69313
cttacactctccttttgtcaccttctcttcgttcccctcctcggctcctcgcgatccttctttactgcccgagagttctgactagccacatccagtcaagcagtaaaggcgcaccatggaggcggcggcggagaataaggaggccgagcaggaggagcagcagctaccgcacgcgcagaaggataacgcgcccgccgccgccgaggaagacgaagcggattcggaggagaccgagcgccgcaaccgcgacctcaagtccggccttcacccccttaggcacaaactcgtgctctggtacactcgccggacgcctggagcgaggtcgcagtcgtacgaggacaacatcaagaagatcatcgatttcagcacagtcgaatcgttctgggtttgctactgccaccttgcgcgcccttcttccctgccgagccccactgaccttcatctcttcaaggatggcatccgtcccctctgggaggatcctgcaaaccagaatggtggcaagtggataattagattcaaaaaggcagtttcaggtcgattttgggaggatttggtgctagtggtagtaggcgaccagcttgagtatagcgatgatgtctgtggtgttgtgcttagtgtccgtttcaatgaagacattctgagcgtctggaaccggaacgcatcagaccatcaggctgtgatggcattgagggattctatcaagaggcacctcaagctgccgcacagctatctgatggagtacaaaccccatgatgcttcgcggcgtgacaactcgtcctacaggaacacatggctgagaggatagataaacctcatgatactcggcagcttcactgcgacggttctgaagcaaagagactcttttatgtaccaagaacgcagactattatgcaatgtagtactactactactactactcaaaagcccctacaatgtgacgcgcaacaattttactatctaatgtgttttttttgcaaaagc

SEQ ID NO: 11069 - protein, 229 aa, Zea mays subsp. mays
  peptide (1)..(229): Ceres Seq. ID no. 12414421
MEAAAENKEAEQEEQQLPHAQKDNAPAAAEEDEADSEETERRNRDLKSGLHPLRHKLVLWYTRRTPGARSQSYEDNIKKIIDFSTVESFWVCYCHLARPSSLPSPTDLHLFKDGIRPLWEDPANQNGGKWIIRFKKAVSGRFWEDLVLVVVGDQLEYSDDVCGVVLSVRFNEDILSVWNRNASDHQAVMALRDSIKRHLKLPHSYLMEYKPHDASRRDNSSYRNTWLRG

SEQ ID NO: 11070 - protein, 168 aa, Zea mays subsp. mays
  peptide (1)..(168): Ceres Seq. ID no. 12414422
YTLLLSPSLRSPPRLLAILLYCPRVLTSHIQSSSKGAPWRRRRRIRRPSRRSSSYRTRRRITRPPPPRKTKRIRRRPSAATATSSPAFTPLGTNSCSGTLAGRLERGRSRTRTTSRRSSISAQSNRSGFATATLRALLPCRAPLTFISSRMASVPSGRILQTRMVASG

SEQ ID NO: 11071 - DNA, 1357 bp, Zea mays subsp. mays
  misc_feature (1)..(1357): Ceres Seq. ID no. 12345592
  misc_feature (1)..(1357): Ortholog of  Ceres SEQ ID NO 15169248 as cited in SEQ ID NO 55022
  misc_feature (1)..(1357): Ortholog of  Ceres SEQ ID NO 12608620 as cited in SEQ ID NO 60192
  misc_feature (1)..(1357): Ortholog of  Ceres SEQ ID NO 13662898 as cited in SEQ ID NO 66199
  misc_feature (1)..(1357): Ortholog of  Ceres SEQ ID NO 14313358 as cited in SEQ ID NO 67347
  misc_feature (1)..(1357): Ortholog of  Ceres SEQ ID NO 13654314 as cited in SEQ ID NO 67914
accatcaagctttcaggcagggcaagcaactcgagtagtagttgccagccacacctcctgtcttcctttttccttctcgcattgtggaggagaaggatcaagtgctcataagcaagctagcttgacgaagtataggaaattaggaatacaaataaactcatcctcctcatatataaacgctcgatctccagatatggccggcctgtccctgctgcatcccatggccttcgccttcggcctcctcggcaacatcatctccttcatgacctacctggccccactgccgacgttctaccggatctacaagaacaagtcgacggaggggttccagtcggtgccgtacgtggtggccctcttcagcgccatgctgtggatctactacgcgctgctcaagtccaacgagctcctgctcatcaccatcaactccgccggctgcgtcatcgagaccctctacatcgccatgtacctcctctacgcgcccaagaaggcaaagctgttcacggccaagatcctcctcctcctcaacgtgggcgtgttcgggctcatcctcctcctcacgctgctgctctccgccggacagcgccgcgtcgtcgtcctcggctgggtctgcgtcgccttctccgttagcgtcttcgtcgcgccgctcagcatcatccgccaggtggtgagaacaaggagcgtcgagttcatgcccttctcgctctccctctccctcaccgtcagcgccgtcgtctggttcctctacggcctcctcatcaaggacaaatacgtcgctctgccaaacgtcatcggcttcagcttcggcgtggtccagatgggtctctacgcgctctaccgcaacgcgacgcccagggtgcctgccaaggacgtggccgacgacgccagcaaggacaaggcgcccggcgaacatgtggtggtcaccattgccaagctgaccgcggcgacgacggcacctgcagctgccgtggcagaggatcttgtcaaggtccacgacggccacccggaggaagcagccaagggcgccgccaagccggcggagaacggcgcgggacgcagcgacgccgagcaagtctagattcctcgctcgatcagatcagaattcatgaagaagaacatgcgtatgtatgtgtatccggtaggtcgtaacataacataaattaagtgcgcatgcagtttggcaactcatgttgtttcatttcgttctcgcgcaatatgcgcatgtattaattttagattgtcattgttgtagttcttgcctccgattattattagtgtgtccgtcaccttccatgtaataacaaaaaaaatatatataaatggtcctattaaagcaaaagctaaagttcgtttttatgcc

SEQ ID NO: 11072 - protein, 357 aa, Zea mays subsp. mays
  peptide (1)..(357): Ceres Seq. ID no. 12345593
PSSFQAGQATRVVVASHTSCLPFSFSHCGGEGSSAHKQASLTKYRKLGIQINSSSSYINARSPDMAGLSLLHPMAFAFGLLGNIISFMTYLAPLPTFYRIYKNKSTEGFQSVPYVVALFSAMLWIYYALLKSNELLLITINSAGCVIETLYIAMYLLYAPKKAKLFTAKILLLLNVGVFGLILLLTLLLSAGQRRVVVLGWVCVAFSVSVFVAPLSIIRQVVRTRSVEFMPFSLSLSLTVSAVVWFLYGLLIKDKYVALPNVIGFSFGVVQMGLYALYRNATPRVPAKDVADDASKDKAPGEHVVVTIAKLTAATTAPAAAVAEDLVKVHDGHPEEAAKGAAKPAENGAGRSDAEQV

SEQ ID NO: 11073 - protein, 293 aa, Zea mays subsp. mays
  peptide (1)..(293): Ceres Seq. ID no. 12345594
MAGLSLLHPMAFAFGLLGNIISFMTYLAPLPTFYRIYKNKSTEGFQSVPYVVALFSAMLWIYYALLKSNELLLITINSAGCVIETLYIAMYLLYAPKKAKLFTAKILLLLNVGVFGLILLLTLLLSAGQRRVVVLGWVCVAFSVSVFVAPLSIIRQVVRTRSVEFMPFSLSLSLTVSAVVWFLYGLLIKDKYVALPNVIGFSFGVVQMGLYALYRNATPRVPAKDVADDASKDKAPGEHVVVTIAKLTAATTAPAAAVAEDLVKVHDGHPEEAAKGAAKPAENGAGRSDAEQV

SEQ ID NO: 11074 - protein, 284 aa, Zea mays subsp. mays
  peptide (1)..(284): Ceres Seq. ID no. 12345595
MAFAFGLLGNIISFMTYLAPLPTFYRIYKNKSTEGFQSVPYVVALFSAMLWIYYALLKSNELLLITINSAGCVIETLYIAMYLLYAPKKAKLFTAKILLLLNVGVFGLILLLTLLLSAGQRRVVVLGWVCVAFSVSVFVAPLSIIRQVVRTRSVEFMPFSLSLSLTVSAVVWFLYGLLIKDKYVALPNVIGFSFGVVQMGLYALYRNATPRVPAKDVADDASKDKAPGEHVVVTIAKLTAATTAPAAAVAEDLVKVHDGHPEEAAKGAAKPAENGAGRSDAEQV

SEQ ID NO: 11075 - DNA, 1177 bp, Zea mays subsp. mays
  misc_feature (1)..(1177): Ceres Seq. ID no. 12374151
  misc_feature (1)..(1177): Ortholog of  Ceres SEQ ID NO 12609045 as cited in SEQ ID NO 51314
  misc_feature (1)..(1177): Ortholog of  Ceres SEQ ID NO 14314252 as cited in SEQ ID NO 57492
  misc_feature (1)..(1177): Ortholog of  Ceres SEQ ID NO 12608276 as cited in SEQ ID NO 57871
  misc_feature (1)..(1177): Ortholog of  Ceres SEQ ID NO 13598492 as cited in SEQ ID NO 63882
  misc_feature (1)..(1177): Ortholog of  Ceres SEQ ID NO 13657914 as cited in SEQ ID NO 66230
  misc_feature (1)..(1177): Ortholog of  Ceres SEQ ID NO 13595877 as cited in SEQ ID NO 67702
  misc_feature (1)..(1177): Ortholog of  Ceres SEQ ID NO 13654367 as cited in SEQ ID NO 67993
  misc_feature (1)..(1177): Ortholog of  Ceres SEQ ID NO 13622667 as cited in SEQ ID NO 0
atcagatctccagctagcttccttgctacttactcccctacccgctgcaccctcgccatggatccgccgagctccgatatcgtagtcgacactccatacttccgcatctacagtgaccggcgcatcgaccgcttggtcggcaccgataccgtgccggcgggctttgatcccaccaccggcgtcacctccaaagacgtcgttgtagacagcgacgccggcgtctacgttcgcctgtacctcccggacacggctacggggtccgatgattccaagaagctcccggtgctagtctacttccacggcggcggctttgtcacccactcggcagcgtctccgccctatcagtccttcctcaacaccctggccgcgaaggccggcctgctcatcgtctccgtgaactaccgcctcgcgccagagcacccgctgcctgcaggctacgaggactccttccgcgcgctcaggtggacggcctctggtagcggggacccctggctgtcacatcacggcgacctgggccgcatcttcctggccggcgacagcgccggtgggaacttcgtccacaacatcgctgtgatggcagccgcgtcggaggtgccagtgcgaatcaggggtgcggtcctcctgcacgcggggttcggtggcagggagcgcatcgacggagagacgccggagactgtggcgctgatggagaagctgtggggggtcgtgtgcctcgaggcgacggacggcctgaacgacccgcggataaatccgttggctgccgccgcggcgccgagcctgcggaacctgccgtgtgagagggtgctcgtctgcgcggcagagttggacttcctgcggccgaggaacagggcgtactacgaggccctcgcagcaagctggcggggcggcacggtggagtggttcgagtcgaagggcaaggagcacgtcttcttcctctacaaccccggctgcggcgaggccgtggagctcatggatcgtctggtcgcgttctttgctgggaactgaaattcgtcatgtgtggatgtgaccgcgaccacatccacatgcagtgagacggatggatcaaacgaagatgcagctcatcgccgaatcgaatggttgagctgtgtccaggaaaagaaaactaaaagtgactagaataattgagctcggagccttggattgatcagtttgtgct

SEQ ID NO: 11076 - protein, 334 aa, Zea mays subsp. mays
  peptide (1)..(334): Ceres Seq. ID no. 12374152
IRSPASFLATYSPTRCTLAMDPPSSDIVVDTPYFRIYSDRRIDRLVGTDTVPAGFDPTTGVTSKDVVVDSDAGVYVRLYLPDTATGSDDSKKLPVLVYFHGGGFVTHSAASPPYQSFLNTLAAKAGLLIVSVNYRLAPEHPLPAGYEDSFRALRWTASGSGDPWLSHHGDLGRIFLAGDSAGGNFVHNIAVMAAASEVPVRIRGAVLLHAGFGGRERIDGETPETVALMEKLWGVVCLEATDGLNDPRINPLAAAAAPSLRNLPCERVLVCAAELDFLRPRNRAYYEALAASWRGGTVEWFESKGKEHVFFLYNPGCGEAVELMDRLVAFFAGN

SEQ ID NO: 11077 - protein, 315 aa, Zea mays subsp. mays
  peptide (1)..(315): Ceres Seq. ID no. 12374153
MDPPSSDIVVDTPYFRIYSDRRIDRLVGTDTVPAGFDPTTGVTSKDVVVDSDAGVYVRLYLPDTATGSDDSKKLPVLVYFHGGGFVTHSAASPPYQSFLNTLAAKAGLLIVSVNYRLAPEHPLPAGYEDSFRALRWTASGSGDPWLSHHGDLGRIFLAGDSAGGNFVHNIAVMAAASEVPVRIRGAVLLHAGFGGRERIDGETPETVALMEKLWGVVCLEATDGLNDPRINPLAAAAAPSLRNLPCERVLVCAAELDFLRPRNRAYYEALAASWRGGTVEWFESKGKEHVFFLYNPGCGEAVELMDRLVAFFAGN

SEQ ID NO: 11078 - DNA, 1749 bp, Zea mays subsp. mays
  misc_feature (1)..(1749): Ceres Seq. ID no. 12390530
  misc_feature (1)..(1749): Ortholog of  Ceres SEQ ID NO 13658584 as cited in SEQ ID NO 66428
  misc_feature (1)..(1749): Ortholog of  Ceres SEQ ID NO 14303259 as cited in SEQ ID NO 0
agttcccatccattggtgtggacgtgtggtggttgcgttgcgttgcttcgagttggaggttggttggagttggagtgggccgcgtgccgcgtgcgagatgatctgagtggagaggccatggagtggtgtgattagcggttgctgggtcaggagaaggcggcgtgtgttttgatcctactcgcgtttgaggggccccgatttcgagcgggtgttcaattttggtgccggatttttaaggaggatccaatttaggaagaattttggttttggggacaatggttttggactgcctgatattcgattcataggttggtcaaacgcttaggagtagagaatttttttttcccggaaaacaagagccatttttctaattgtgctactcgtcaatcaatccatggaagctgaactctggaagaagaaactttcctaattagacccggtatttcgtggttggccgttggcgtctaaagcgcgttttagtttaaatatgaacacattttcctgtttactccgcccaaaatctttccgctggatctacttgtgaatcgggtttgtttgttttttacctgagctattcttgtcgatttaggatttcaagtcggcagatccaagggaacgccgaattttgcctgatttcttcgcaatttttggtccgaccaagaggttcctagcctatttttttcctcgcgagaagcaagggctctcccttttcttctttcgccatgtccatggcgttgagccgcttcacgcaatggctgtggccggggggcgccgcggcgcgggtggacacccacgagcaccccagcggggggctaacgagctcctccttccctgacttcccctccgggttccgggagcccgacaccgtcacgttctacaccggccgccagcgcgcgcgcccgaggagggtcaggaatcgtcgccgcagccgcggggaggcccgtgtcgaccgggagtacgacatggtcatcgtcccgtccgacggcggtggctgcctgtctggctccgactccgacgactccgactggtccatcggctggctcgagccacaggcgccggagcttcagacggacggcgaccccgagaactgcttcgccgtcctcgtgccgtgttaccgccacggccgccaagagcagcagccccggaggcaggagggcaggtttcttggcgccggcgccctcaccgatggtggtccctctgatggaaagaattttgtagagcagtggctttcttctttccagaactaatatcgtcagacctcgcctaagctaccctgtaaatagtatcactctgttttagttctactacgtttgtcctagtcgcacaacgtatcgatgaaggaagacatgaaaaagccctaaaaaaagaaggaaatctaaaaagaaaaatgaggagcagtgggattctgaagcggcaccaaatgggtatgtccttcctgaggtgttcccaggccattctactcttgcaaagcaatgcgaaagctgaactacacaaactgcacgccatcaaaaatgattttgccgtcctgatatgtgcggagtgctaacctgatgattgataacacgtagagatgaactgctattccattgttaatttgtcccacttgctcgtggacctcgaattctactgcatgtacattatgttcttgcagtgtatatatatagtcttgcccagagctgcagtggcgtgattgttcagtctgcctgtatatagtgttcttgcagtgtatataagccttgcgcagagctg

SEQ ID NO: 11079 - protein, 174 aa, Zea mays subsp. mays
  peptide (1)..(174): Ceres Seq. ID no. 12390531
MSMALSRFTQWLWPGGAAARVDTHEHPSGGLTSSSFPDFPSGFREPDTVTFYTGRQRARPRRVRNRRRSRGEARVDREYDMVIVPSDGGGCLSGSDSDDSDWSIGWLEPQAPELQTDGDPENCFAVLVPCYRHGRQEQQPRRQEGRFLGAGALTDGGPSDGKNFVEQWLSSFQN

SEQ ID NO: 11080 - protein, 172 aa, Zea mays subsp. mays
  peptide (1)..(172): Ceres Seq. ID no. 12390532
MALSRFTQWLWPGGAAARVDTHEHPSGGLTSSSFPDFPSGFREPDTVTFYTGRQRARPRRVRNRRRSRGEARVDREYDMVIVPSDGGGCLSGSDSDDSDWSIGWLEPQAPELQTDGDPENCFAVLVPCYRHGRQEQQPRRQEGRFLGAGALTDGGPSDGKNFVEQWLSSFQN

SEQ ID NO: 11081 - protein, 94 aa, Zea mays subsp. mays
  peptide (1)..(94): Ceres Seq. ID no. 12390533
MVIVPSDGGGCLSGSDSDDSDWSIGWLEPQAPELQTDGDPENCFAVLVPCYRHGRQEQQPRRQEGRFLGAGALTDGGPSDGKNFVEQWLSSFQN

SEQ ID NO: 11082 - DNA, 1652 bp, Zea mays subsp. mays
  misc_feature (1)..(1652): Ceres Seq. ID no. 12411954
  misc_feature (1)..(1652): Ortholog of  Ceres SEQ ID NO 13655375 as cited in SEQ ID NO 63347
  misc_feature (1)..(1652): Ortholog of  Ceres SEQ ID NO 12626166 as cited in SEQ ID NO 64505
  misc_feature (1)..(1652): Ortholog of  Ceres SEQ ID NO 13654415 as cited in SEQ ID NO 68820
aggtttgtgtgaccgttgcaacgaaacaaaaaaagccaaagggatcccaaacgaaaacgagccagctgagcaaacacaacactcgcatcggcacccacactgccactcatcacattggcacccctccgacacgggccgggacttctcggactgcaggcagccaggcacgcaccagcaacaccccccacccgccggctcggagcggggccccacccgaatcacacagatcgggacgccggaggaggagcaacgccgtcccgcatcaccggagcaacgcgggcgcggagaggccagccagcgcaggcgcagttcaagctttggattcccggatcccacaccaccggtctctctcggggagtgtaatccagcgagcgttgagttgaaagccgcgcaagtggagatgagtactctgaagaaatccgacaagaaggctgccctcgacttcgcagcatggagtttcaatgtcaccacatcggttggactcatcatggtcaacaaggccttgatggctacgtatgggttcagtttcgccacaacattaaccgggcttcattttgtgactactaccttgatgactatcttatttcgttggttaggcctgagtcagccatcccacttacccctagcagatctagttaaatttgtgatattttcgaacttgtcaattgttgggatgaatgtgagcttgatgtggaactctgttggcttttatcagatagcaaagctgtgcatgatacctgcatcatgtcttctggaggttgtttttgatcatgtacattattcccgggacacaaagctgagcataatggtcgtgcttataggagttgcagtctgcacggttactgatgtcagtgtgaatgcaagaggtctaattgctgctgttatagctgtctggagcacagctttgcaacaatactatgtccattttctccaacgcaagtactccctgaactcattcaacctcctgggccacacagctccagcccaagctgggtcactgctgctagtgggaccatttgcggattacttgttgacaggcaaaagggtggatcagttcagtttgtcatcgcttgctctgtttttcctggcactctcatgcttcatcgccattggtgttaatctgagccaattcatctgcatcgggcggttctccgccgtatccttccaagtcctaggccatatgaagaccgtacttgttctgtcccttgggttccttttctttggcaaggagggcctgaaccttcaggtagtccttgggatggtcctggccgttctcggaatgatatggtacgggaacgcgtctgctaaaccaggtggcaaagagcggcgcagcatcctgccggtgaggtctgcgagtctcaagggaagttccgaagaaaaggccggtgccgagaaatagtcttgctatatctgactgcaaacattttattagatggggaatttttcgttccgaaggttaaatctctggtgaggtgacgcgagtatcacagattggaagctctgcattatgtctgacgcgcacaaaacaaacgcgtcccttgtagagactctggattgttatagttacaggtatactgtaaagcttcattttttttggcgctctgaatcgtttgcagtgagggggaaagacggacatggtttacggagggttc

SEQ ID NO: 11083 - protein, 465 aa, Zea mays subsp. mays
  peptide (1)..(465): Ceres Seq. ID no. 12411955
GLCDRCNETKKAKGIPNENEPAEQTQHSHRHPHCHSSHWHPSDTGRDFSDCRQPGTHQQHPPPAGSERGPTRITQIGTPEEEQRRPASPEQRGRGEASQRRRSSSFGFPDPTPPVSLGECNPASVELKAAQVEMSTLKKSDKKAALDFAAWSFNVTTSVGLIMVNKALMATYGFSFATTLTGLHFVTTTLMTILFRWLGLSQPSHLPLADLVKFVIFSNLSIVGMNVSLMWNSVGFYQIAKLCMIPASCLLEVVFDHVHYSRDTKLSIMVVLIGVAVCTVTDVSVNARGLIAAVIAVWSTALQQYYVHFLQRKYSLNSFNLLGHTAPAQAGSLLLVGPFADYLLTGKRVDQFSLSSLALFFLALSCFIAIGVNLSQFICIGRFSAVSFQVLGHMKTVLVLSLGFLFFGKEGLNLQVVLGMVLAVLGMIWYGNASAKPGGKERRSILPVRSASLKGSSEEKAGAEK

SEQ ID NO: 11084 - protein, 332 aa, Zea mays subsp. mays
  peptide (1)..(332): Ceres Seq. ID no. 12411956
MSTLKKSDKKAALDFAAWSFNVTTSVGLIMVNKALMATYGFSFATTLTGLHFVTTTLMTILFRWLGLSQPSHLPLADLVKFVIFSNLSIVGMNVSLMWNSVGFYQIAKLCMIPASCLLEVVFDHVHYSRDTKLSIMVVLIGVAVCTVTDVSVNARGLIAAVIAVWSTALQQYYVHFLQRKYSLNSFNLLGHTAPAQAGSLLLVGPFADYLLTGKRVDQFSLSSLALFFLALSCFIAIGVNLSQFICIGRFSAVSFQVLGHMKTVLVLSLGFLFFGKEGLNLQVVLGMVLAVLGMIWYGNASAKPGGKERRSILPVRSASLKGSSEEKAGAEK

SEQ ID NO: 11085 - protein, 303 aa, Zea mays subsp. mays
  peptide (1)..(303): Ceres Seq. ID no. 12411957
MVNKALMATYGFSFATTLTGLHFVTTTLMTILFRWLGLSQPSHLPLADLVKFVIFSNLSIVGMNVSLMWNSVGFYQIAKLCMIPASCLLEVVFDHVHYSRDTKLSIMVVLIGVAVCTVTDVSVNARGLIAAVIAVWSTALQQYYVHFLQRKYSLNSFNLLGHTAPAQAGSLLLVGPFADYLLTGKRVDQFSLSSLALFFLALSCFIAIGVNLSQFICIGRFSAVSFQVLGHMKTVLVLSLGFLFFGKEGLNLQVVLGMVLAVLGMIWYGNASAKPGGKERRSILPVRSASLKGSSEEKAGAEK

SEQ ID NO: 11086 - DNA, 1032 bp, Zea mays subsp. mays
  misc_feature (1)..(1032): Ceres Seq. ID no. 12413807
  misc_feature (1)..(1032): Ortholog of  Ceres SEQ ID NO 13663630 as cited in SEQ ID NO 67065
attctcacgggcagcagttctgccactctgcaagttcaacttgatccgcgcttctcgtgtcccctgccccttctgtcctcgccaccgcccagcttctcctcagtcctcaccctcgtgtgccttcggatccgcggttctcggagtcggagagagttgcaggtggtggctggtcgcttgcggtagccggtaggcgggttcgctgcgggtggtcggcggcgcgatggtttccttcgagatgaacgacctcaagaagattgggctgggcttgactggatttggagttctattcacattgctcgggatcattatgttgtttgacaagggattcctggcgatggggaatattctcttcgtttctggtgtcttactgaccattgggttgaagccaactgtgcagttcttcaccaagcctaagaatcacaagggttcaatatttttcgggtttggctttttcctggttctcattggatggcctgtctcaggaatgctggtggagtcgtatggcttcatcacgctcttcagcggcttctggccaacagctgctgtttacctgcaaaagagcccttccttcggttggatattccaccaccctcttgtgacttcgctgatcactcggttcagaggaagacgggtcccggtgtgagtggataggatcaccccgagggcatgcgaaatcgcctctactgtacagaagtaggccaattgacatatgcactttattcgtttatgttcgtcgattctacctggtttaaagagagacaaggtggccgctgttgctggtattggatcttcctacgctgctaccagtagtctgtccatagcgtaactacattgattgcaagtgagcatctgtcggttgttaataaataggcagatgtatcgatggtgataacatggtggtttctctgaatgacgatggctgagggagctgtgaactggtttggaaaccagccagcttgtgagagacagttgtgttacactgctactgctatattgttaactagttaaaaaaaaaaaaaaaaaaaaaaagaa

SEQ ID NO: 11087 - protein, 140 aa, Zea mays subsp. mays
  peptide (1)..(140): Ceres Seq. ID no. 12413808
MVSFEMNDLKKIGLGLTGFGVLFTLLGIIMLFDKGFLAMGNILFVSGVLLTIGLKPTVQFFTKPKNHKGSIFFGFGFFLVLIGWPVSGMLVESYGFITLFSGFWPTAAVYLQKSPSFGWIFHHPLVTSLITRFRGRRVPV

SEQ ID NO: 11088 - protein, 135 aa, Zea mays subsp. mays
  peptide (1)..(135): Ceres Seq. ID no. 12413809
MNDLKKIGLGLTGFGVLFTLLGIIMLFDKGFLAMGNILFVSGVLLTIGLKPTVQFFTKPKNHKGSIFFGFGFFLVLIGWPVSGMLVESYGFITLFSGFWPTAAVYLQKSPSFGWIFHHPLVTSLITRFRGRRVPV

SEQ ID NO: 11089 - protein, 111 aa, Zea mays subsp. mays
  peptide (1)..(111): Ceres Seq. ID no. 12413810
MLFDKGFLAMGNILFVSGVLLTIGLKPTVQFFTKPKNHKGSIFFGFGFFLVLIGWPVSGMLVESYGFITLFSGFWPTAAVYLQKSPSFGWIFHHPLVTSLITRFRGRRVPV

SEQ ID NO: 11090 - DNA, 1300 bp, Zea mays subsp. mays
  misc_feature (1)..(1300): Ceres Seq. ID no. 12342524
  misc_feature (1)..(1300): Ortholog of  Ceres SEQ ID NO 15176130 as cited in SEQ ID NO 1136
  misc_feature (1)..(1300): Ortholog of  Ceres SEQ ID NO 15171728 as cited in SEQ ID NO 57131
  misc_feature (1)..(1300): Ortholog of  Ceres SEQ ID NO 14308198 as cited in SEQ ID NO 59072
  misc_feature (1)..(1300): Ortholog of  Ceres SEQ ID NO 13654213 as cited in SEQ ID NO 60614
  misc_feature (1)..(1300): Ortholog of  Ceres SEQ ID NO 12617527 as cited in SEQ ID NO 64697
aaataagcacttgttcatcatcatcagagtaaacacagcagaaccctagcgcgccgttcctccgacgactcacatcccacccactcacccaccccatggcggccaagctctccaccagcgccgacgccccggcctcggtgcggctctccgcagcagcgcaggcggctgcgatccagccctcctctccgcgcttcttcttctcctcgctggccgggaccaacccggcctccccgcatcgccgcatcgccattgccgtcgatctctccgacgagtccgccttcgccgtcaagtgggccgtgcagaactacctccgccccggggacgccgtcgtgctgctccacgtgcgccccacctccgttctctacggcgccgactggggttccatcccggtctccgtcgctgacgaggccgacgctgccgaggacgccgccgccgccgccgagggcggcccctccgaggaggagctgcagaagaagcgggaggaggaatacgacgccttcacctctaccaaggcgcaggacctcgcgcagccgcttgtcgatgcccagatccccttcaagatccatgtcgtcaaggaccacgacatgaaggagcgcctctgcctcgaggctgagcgccttggcctgtccgctatgatcatggggagccgcggttttggggcctctcggaaaggcggcaaggggaggcttgggagtgttagtgattactgtgtacaccactgtgtatgccccgttgtggttgttcgctaccctgatgatgctgcagatgccagtggagatgcatcaggggcgacagatgagttgcacactgtaccagaggacgaacctgtttatcacgatgcgcctgaggtgcagaaagaaaactgaggcaatggccgcaagcagctgaagaacgaaggaaaacatggggcctgtagtgactagtgaggcgattctgtgtatctgaaagatgggactggctgtttatcttcgcttctgtatatcaactgcgtgtcatgatcagtggctgcttcgcgtttgagtttcatatcggagtcctagatcatcgaagtctttgttggtttgcttgtgagatgtttatgttgtgaacaccatgtagagtactcttctcgtaggtagaagctgccttgaagatgcttatgcagttatgctggggtctgggctctcttgtcttgttttgcggagccggtgatgagctttatgttctcaaatggtagttatctacacggtattatgtgctctgttcagcctgtttactgtattgcatattcgtcaatggagaatcactacttattattctc

SEQ ID NO: 11091 - protein, 256 aa, Zea mays subsp. mays; identical to SEQ ID NO: 1536
  peptide (1)..(256): Ceres Seq. ID no. 12342525

SEQ ID NO: 11092 - DNA, 1361 bp, Zea mays subsp. mays
  misc_feature (1)..(1361): Ceres Seq. ID no. 12379398
  misc_feature (1)..(1361): Ortholog of  Ceres SEQ ID NO 13596816 as cited in SEQ ID NO 62287
accggtcccgagggctatcgaacgtaactaccgtcctctgtctcggcgtcggcgagcaacagaacagacagaggaggggaggcgaggcgaggcggaaatggggctccgcgtccgcgcttcctcgcttctgctatccctcgccatcgagctcgcggccgtgctcgtctcagtgtcggcgcagcagaagttcgggatcaactacgggcagatcgcgaacaatctcccggacccgacgcaggtggcgaccctcctccgatcgatgaacgtgaacaaggtgaagctctacgacgcggacccccgggtgctgacggcgttcgcgaacacgggcgtggagttcatcatcgccgtgggcaacgagaacctgcagaccatggccggcagccccgccgcggcgcggcagtgggtggcggcgaacgtgcggccctacatcccggccacgcgcatcacctgcgtcaccgtgggcaacgaggtcttctccggcaacgacacggccacgatggccagcctcctccccgctatgaaggccgtccacgcggcgctcgcggacctgggcctcggcggccaggccaccgtctcgtcggcgcactccgtgaacgtgctcgccgccagcttcccgccgtcgtcgggcgcgttccgggaggacctggcggagtacatgaagcccatcctggacttccacgcccagacggggtcgccgttcctcatcaacgcctacccgttcttcgcgtacaaggcgagcccgggcagcgtgtcgctgccgtacgtgctgttcgagcccaacccgggggtgcgcgaccccagcaccggcctcagctacgacaacatgctgtacgcccagatcgacgccgtgtacgccgccatgaaggccatggggcacacggacgtgggcgtccggatctcggagaccgggtggccgtccaggggcgacgaggacgagaccggggccacggtgcagaacgccgccgcgtacaacggcaacctcatgcagagggtcgccatgagccaggggacgccgctcaagcccaacgtgcccgtcgacgtctacgtgttcgcgctcttcaacgagaacatgaagccagggcccacgtcggagcgcaactacgggctgttctaccccaacggctcgccggtgtacgcgctcagcgccggctccggcggcggttcaggtccgggcgggtcgctcaacccgtactacacatccatgttctcctcctcgtccagatccgcggtgagcgcgaccttcttgacagagagagtgatgctgttactgctgctgcaagcaactgtaatactccgacactactgctagtcagtgaataccttgtaatcttgtatacgaaaaaaaaaatgcatctcaattc

SEQ ID NO: 11093 - protein, 435 aa, Zea mays subsp. mays
  peptide (1)..(435): Ceres Seq. ID no. 12379399
PVPRAIERNYRPLSRRRRATEQTEEGRRGEAEMGLRVRASSLLLSLAIELAAVLVSVSAQQKFGINYGQIANNLPDPTQVATLLRSMNVNKVKLYDADPRVLTAFANTGVEFIIAVGNENLQTMAGSPAAARQWVAANVRPYIPATRITCVTVGNEVFSGNDTATMASLLPAMKAVHAALADLGLGGQATVSSAHSVNVLAASFPPSSGAFREDLAEYMKPILDFHAQTGSPFLINAYPFFAYKASPGSVSLPYVLFEPNPGVRDPSTGLSYDNMLYAQIDAVYAAMKAMGHTDVGVRISETGWPSRGDEDETGATVQNAAAYNGNLMQRVAMSQGTPLKPNVPVDVYVFALFNENMKPGPTSERNYGLFYPNGSPVYALSAGSGGGSGPGGSLNPYYTSMFSSSSRSAVSATFLTERVMLLLLLQATVILRHYC

SEQ ID NO: 11094 - protein, 403 aa, Zea mays subsp. mays
  peptide (1)..(403): Ceres Seq. ID no. 12379400
MGLRVRASSLLLSLAIELAAVLVSVSAQQKFGINYGQIANNLPDPTQVATLLRSMNVNKVKLYDADPRVLTAFANTGVEFIIAVGNENLQTMAGSPAAARQWVAANVRPYIPATRITCVTVGNEVFSGNDTATMASLLPAMKAVHAALADLGLGGQATVSSAHSVNVLAASFPPSSGAFREDLAEYMKPILDFHAQTGSPFLINAYPFFAYKASPGSVSLPYVLFEPNPGVRDPSTGLSYDNMLYAQIDAVYAAMKAMGHTDVGVRISETGWPSRGDEDETGATVQNAAAYNGNLMQRVAMSQGTPLKPNVPVDVYVFALFNENMKPGPTSERNYGLFYPNGSPVYALSAGSGGGSGPGGSLNPYYTSMFSSSSRSAVSATFLTERVMLLLLLQATVILRHYC

SEQ ID NO: 11095 - protein, 349 aa, Zea mays subsp. mays
  peptide (1)..(349): Ceres Seq. ID no. 12379401
MNVNKVKLYDADPRVLTAFANTGVEFIIAVGNENLQTMAGSPAAARQWVAANVRPYIPATRITCVTVGNEVFSGNDTATMASLLPAMKAVHAALADLGLGGQATVSSAHSVNVLAASFPPSSGAFREDLAEYMKPILDFHAQTGSPFLINAYPFFAYKASPGSVSLPYVLFEPNPGVRDPSTGLSYDNMLYAQIDAVYAAMKAMGHTDVGVRISETGWPSRGDEDETGATVQNAAAYNGNLMQRVAMSQGTPLKPNVPVDVYVFALFNENMKPGPTSERNYGLFYPNGSPVYALSAGSGGGSGPGGSLNPYYTSMFSSSSRSAVSATFLTERVMLLLLLQATVILRHYC

SEQ ID NO: 11096 - DNA, 1546 bp, Zea mays subsp. mays
  misc_feature (1)..(1546): Ceres Seq. ID no. 12342194
  misc_feature (1)..(1546): Ortholog of  Ceres SEQ ID NO 13592852 as cited in SEQ ID NO 20709
  misc_feature (1)..(1546): Ortholog of  Ceres SEQ ID NO 13532807 as cited in SEQ ID NO 53012
  misc_feature (1)..(1546): Ortholog of  Ceres SEQ ID NO 14313425 as cited in SEQ ID NO 54973
  misc_feature (1)..(1546): Ortholog of  Ceres SEQ ID NO 13663060 as cited in SEQ ID NO 60964
  misc_feature (1)..(1546): Ortholog of  Ceres SEQ ID NO 13598532 as cited in SEQ ID NO 65204
  misc_feature (1)..(1546): Ortholog of  Ceres SEQ ID NO 13656849 as cited in SEQ ID NO 65764
  misc_feature (1)..(1546): Ortholog of  Ceres SEQ ID NO 13500573 as cited in SEQ ID NO 67431
  misc_feature (1)..(1546): Ortholog of  Ceres SEQ ID NO 13656501 as cited in SEQ ID NO 69206
agggaagcttcttccactacagtccttgaggccgcccatcaacgactagacgctggtcaagctgcaccaaccctagccccataaccctaggtccctcctccacgcccccttccagagaggcgaggaaggaggcgaaaggaaccatggattcctccggcggcggcggtggagcgcagatcaagggtatggcgacgcacgggggccgctacgtgctgtacaacgtgtacggaaacctcttcgaggtctcctccaagtacgccccacccatccgccccatcggtcgcggcgcctacggcattgtctgcgcggctgtcaactcgcagtcaggggaggaggttgcgatcaagaaggttggcaatgcgttcgacaaccacatcgacgccaagcggacgctcagggaaatcaagctgctgcgccacatggaccatgagaacatccttgccttaaaggatgtaattcggcccccaactagagagaactttaatgacgtgtacattgttactgagttaatggatacagatctccatcagatcgtacgctcaaatcagccattgactgatgatcattgccagtacttcttgtatcagttgttacgagggctaaaatatgtgcactcagcaaatatattgcaccgcgatctgaagccgagcaatttgttcctaaatgcaaattgtgacctcaagattgcagactttgggcttgcaaggaccacttcagagacagatctcatgacagagtatgtggtcactcgttggtaccgggcaccagagctgctgttgaactgttcacagtatactgctgccattgatgtctggtcagttggatgcatactaggtgaaatcgttactcgtcaacccctgtttcctggacgggattacatccagcaattaaaattgatcactgagctcataggctctccagatgatgcaagcctgggatttcttcgaagtgataatgcaaaaagatacatgaaacaactaccacagtttccaagacaggacttccgcctgcgtttccgcaacatgtctcctggcgcagtcgatttgttggaaaggatgcttgtgtttgatccaagcagacggattacagttgatgaggctctgcatcatccatacttggcttcacttcatgagatcaatgatgaacctacctgccctgcacctttcagctttgattttgagcaaccatcctttacagaagcgcatataaaagaactcatctggagggaatctttagcatttaacccagagcctccctactaatatcaaaaggatgatgagttatctgctagaggcatatgaagatctctaggtccagcggacgcaagaacttatgtctgtgtcagtgtgcgttgattatttacgtgctgtttgttgggcatacgggcatgggttggtgctgcaattgcaactctattatggcttgtgagagcaaacaaacgtctgtattcattttcagatgcctgaacccaggcttgtattataccgcttgactccataaattattcttgtgtatctatgcttgtaattttgcagacaattactcg

SEQ ID NO: 11097 - protein, 372 aa, Zea mays subsp. mays
  peptide (1)..(372): Ceres Seq. ID no. 12342195
MDSSGGGGGAQIKGMATHGGRYVLYNVYGNLFEVSSKYAPPIRPIGRGAYGIVCAAVNSQSGEEVAIKKVGNAFDNHIDAKRTLREIKLLRHMDHENILALKDVIRPPTRENFNDVYIVTELMDTDLHQIVRSNQPLTDDHCQYFLYQLLRGLKYVHSANILHRDLKPSNLFLNANCDLKIADFGLARTTSETDLMTEYVVTRWYRAPELLLNCSQYTAAIDVWSVGCILGEIVTRQPLFPGRDYIQQLKLITELIGSPDDASLGFLRSDNAKRYMKQLPQFPRQDFRLRFRNMSPGAVDLLERMLVFDPSRRITVDEALHHPYLASLHEINDEPTCPAPFSFDFEQPSFTEAHIKELIWRESLAFNPEPPY

SEQ ID NO: 11098 - protein, 358 aa, Zea mays subsp. mays
  peptide (1)..(358): Ceres Seq. ID no. 12342196
MATHGGRYVLYNVYGNLFEVSSKYAPPIRPIGRGAYGIVCAAVNSQSGEEVAIKKVGNAFDNHIDAKRTLREIKLLRHMDHENILALKDVIRPPTRENFNDVYIVTELMDTDLHQIVRSNQPLTDDHCQYFLYQLLRGLKYVHSANILHRDLKPSNLFLNANCDLKIADFGLARTTSETDLMTEYVVTRWYRAPELLLNCSQYTAAIDVWSVGCILGEIVTRQPLFPGRDYIQQLKLITELIGSPDDASLGFLRSDNAKRYMKQLPQFPRQDFRLRFRNMSPGAVDLLERMLVFDPSRRITVDEALHHPYLASLHEINDEPTCPAPFSFDFEQPSFTEAHIKELIWRESLAFNPEPPY

SEQ ID NO: 11099 - protein, 280 aa, Zea mays subsp. mays
  peptide (1)..(280): Ceres Seq. ID no. 12342197
MDHENILALKDVIRPPTRENFNDVYIVTELMDTDLHQIVRSNQPLTDDHCQYFLYQLLRGLKYVHSANILHRDLKPSNLFLNANCDLKIADFGLARTTSETDLMTEYVVTRWYRAPELLLNCSQYTAAIDVWSVGCILGEIVTRQPLFPGRDYIQQLKLITELIGSPDDASLGFLRSDNAKRYMKQLPQFPRQDFRLRFRNMSPGAVDLLERMLVFDPSRRITVDEALHHPYLASLHEINDEPTCPAPFSFDFEQPSFTEAHIKELIWRESLAFNPEPPY

SEQ ID NO: 11100 - DNA, 1621 bp, Zea mays subsp. mays
  misc_feature (1)..(1621): Ceres Seq. ID no. 12357943
  misc_feature (1)..(1621): Ortholog of  Ceres SEQ ID NO 13595861 as cited in SEQ ID NO 58153
  misc_feature (1)..(1621): Ortholog of  Ceres SEQ ID NO 13584292 as cited in SEQ ID NO 63687
atactcgatttctatttctctcaatcggttctctcgttctcctacctcccttgcgctctgcgactctcttcttgtctctggtggcgacgagctgacgattgggcggccgccgccgccgacctacgccaggtgcccgagtctccacctttggaccttcaccggcgacgaacacccaccagttgacttggacagccagaactttggaaatggcaagatcaccaaaaggtaggaacctccaagctcgtcaacgtaggtcagcttcttcagatgtgcccttgaggtcctgtgagacgaaaggaacaagcaaaggaaatgatgtgtcagtgacatctgagaagaatgaatggaaaggagcaacttgcccagtttgcttggagcatccacatgatgctgttctcctcctgtgtacctctcaccacaagggctgccggccatatatgtgtggtaccaactaccgtcattccaactgccttgaacactttaaaggagcttatgcaaaggaaaaaatggctcttggtgtttcagctgagtctgcatctggccttccattatcctcaaacacactgccatcaagcaaccagccatgtgtaatggaacttgcctgccctctgtgccgtggagaggttaaaggatggactgtggttgagcctgctcgtcagtatctgaaccggaaaaggagaaattgcatgcatgatgggtgctcattccatggctcgtataaggagctttgcaagcatgtgaaatcgaagcaccctacagcaaaacctcgtgaagttgatcctgctactgcagatgagtggaaaaggtttgaatgtgagagagagcggcaggatgccatcagcactatcaggtccatgaacccaggatctgtgatcatgggggattatgtccttgagttgaatggtggtggcaacaaccatttgctctcagatggagataactttgacttaggggaaaggctcaacttcttcacatccttagatcgtactttgaatgagagaattgacctgtacgactcgtcagatggtttggatgaggggtttgacttcttggcatccctgtttacccatggcaggagaatctctactggaggctcattgagcagggcttatagaagacacagggacaggcctagacgttcaacgaattctgctgatgcttctgacattcagcatgagtcagctagcactcaaaggggacagcgtgctgttcgggctacaggcaggacttcacggcgccaccaccacctacgcgaggcagctgagagatgaaatcatttttagaggcggggtgctttttcatgctatccatgtgcaggggacgcaaaataacacaccatggtatgttgctgctctagtggtcggaggtccgtcagattcttccttttttttgtcccattgttgagacagcaaccgaggatataagattggatggagatgaggtctctgtttggcttgtgctgatgcctgcatgatgtgctctgcgatgtgcatccagttttgggatcaagcagctccacttttccggtgctgcctttgcatggattttgtgaatgcccttgccttgagtttcctttccctttctgttgatcaaaggaaacttcaaacagattgttttggcc

SEQ ID NO: 11101 - protein, 354 aa, Zea mays subsp. mays
  peptide (1)..(354): Ceres Seq. ID no. 12357944
MARSPKGRNLQARQRRSASSDVPLRSCETKGTSKGNDVSVTSEKNEWKGATCPVCLEHPHDAVLLLCTSHHKGCRPYMCGTNYRHSNCLEHFKGAYAKEKMALGVSAESASGLPLSSNTLPSSNQPCVMELACPLCRGEVKGWTVVEPARQYLNRKRRNCMHDGCSFHGSYKELCKHVKSKHPTAKPREVDPATADEWKRFECERERQDAISTIRSMNPGSVIMGDYVLELNGGGNNHLLSDGDNFDLGERLNFFTSLDRTLNERIDLYDSSDGLDEGFDFLASLFTHGRRISTGGSLSRAYRRHRDRPRRSTNSADASDIQHESASTQRGQRAVRATGRTSRRHHHLREAAER

SEQ ID NO: 11102 - protein, 277 aa, Zea mays subsp. mays
  peptide (1)..(277): Ceres Seq. ID no. 12357945
MCGTNYRHSNCLEHFKGAYAKEKMALGVSAESASGLPLSSNTLPSSNQPCVMELACPLCRGEVKGWTVVEPARQYLNRKRRNCMHDGCSFHGSYKELCKHVKSKHPTAKPREVDPATADEWKRFECERERQDAISTIRSMNPGSVIMGDYVLELNGGGNNHLLSDGDNFDLGERLNFFTSLDRTLNERIDLYDSSDGLDEGFDFLASLFTHGRRISTGGSLSRAYRRHRDRPRRSTNSADASDIQHESASTQRGQRAVRATGRTSRRHHHLREAAER

SEQ ID NO: 11103 - protein, 254 aa, Zea mays subsp. mays
  peptide (1)..(254): Ceres Seq. ID no. 12357946
MALGVSAESASGLPLSSNTLPSSNQPCVMELACPLCRGEVKGWTVVEPARQYLNRKRRNCMHDGCSFHGSYKELCKHVKSKHPTAKPREVDPATADEWKRFECERERQDAISTIRSMNPGSVIMGDYVLELNGGGNNHLLSDGDNFDLGERLNFFTSLDRTLNERIDLYDSSDGLDEGFDFLASLFTHGRRISTGGSLSRAYRRHRDRPRRSTNSADASDIQHESASTQRGQRAVRATGRTSRRHHHLREAAER

SEQ ID NO: 11104 - DNA, 672 bp, Zea mays subsp. mays
  misc_feature (1)..(672): Ceres Seq. ID no. 12386635
  misc_feature (1)..(672): Ortholog of  Ceres SEQ ID NO 13623723 as cited in SEQ ID NO 0
gagcctcgaaccctaacccccaccacgtaactccttggaattaccgaaatgccactcttcttctccaaattcgcaccattggtcccccgcgtccgccgcctttccatcgccgcggcgacagccgccggcgaggaccctaagctgtctcgaatcgcggatgagctcctcgccctatcccccgccgagctggacgactatgcggcgctcctgcgcctcaagctccgcctgtcgctcacctccagcgcagctgctggagcctcctccggccggggccggggacgccgcggctgcagccgtggaggccgccgcggcggtgaagacggcgttcgacttgaagatcgagaagtacgaggccgcggcgaagattaagatcatcaaggaggtgcgcgcgatgacggacctgggtctgaaggaggcaaaggagctcgtggagaaggcgcccatagtggtgcgcgcggggttgcctaaagaggaggccgaggcgctcgccgctaagctcaaggccgccggtgccgctgttgcactcgagtgatcccacgaaggtgtcgcctcttttttttttgttcctagtgttcttagacgatgcaacgtatctttgcgccttaatttgtttgtaatggaattcaatagattggatatgggtataaagaggatgcaacgtctaagaacact

SEQ ID NO: 11105 - protein, 124 aa, Zea mays subsp. mays
  peptide (1)..(124): Ceres Seq. ID no. 12386636
MSSSPYPPPSWTTMRRSCASSSACRSPPAQLLEPPPAGAGDAAAAAVEAAAAVKTAFDLKIEKYEAAAKIKIIKEVRAMTDLGLKEAKELVEKAPIVVRAGLPKEEAEALAAKLKAAGAAVALE

SEQ ID NO: 11106 - protein, 111 aa, Zea mays subsp. mays
  peptide (1)..(111): Ceres Seq. ID no. 12386637
MRRSCASSSACRSPPAQLLEPPPAGAGDAAAAAVEAAAAVKTAFDLKIEKYEAAAKIKIIKEVRAMTDLGLKEAKELVEKAPIVVRAGLPKEEAEALAAKLKAAGAAVALE

SEQ ID NO: 11107 - protein, 106 aa, Zea mays subsp. mays
  peptide (1)..(106): Ceres Seq. ID no. 12386638
MPLFFSKFAPLVPRVRRLSIAAATAAGEDPKLSRIADELLALSPAELDDYAALLRLKLRLSLTSSAAAGASSGRGRGRRGCSRGGRRGGEDGVRLEDREVRGRGED

SEQ ID NO: 11108 - DNA, 1244 bp, Zea mays subsp. mays
  misc_feature (1)..(1244): Ceres Seq. ID no. 12342112
  misc_feature (1)..(1244): Ortholog of  Ceres SEQ ID NO 14301727 as cited in SEQ ID NO 61209
gttcgccgctcttcgctcctcggtcctcagccctcacacgccgcccgcccgcgacgaagcccgcatagccgccgccaagcgccggagttgccacctaccgcgcgcccatctgccgccgatgctgcgcactcatctgctacccgaggcttggcggcggccactgccccaggaggcaggagcgcgacaccaaagtccgcgcatttccttccaccgagccgcaccaagatccgggatccaaggtggccaagttcgttgcggcggccctgaacttcgatggctgtcctcgtcacggaattcgtcctcagattcacagccatggactacaatgtgcgtgaatgcagactataccactcctgctgattctgtcgccacctcggagcaagcaggtggtgaagctgaggccaccttagaaacaggtggtgaagctgcggccaccttggagcaaacaggtggcgaaaccgaagagccgaccattgtagcacctgctaatgaatatacagtgcaggaggctgctcctcagcagaagtgtgcaaagatacacgacttttgcctagggataccttttggtggacttttactctccatgggccttattggatttctcttctggaggagccctgcgagtcttacctttggtgttgcacctggccttgccatattggccctggctgtacttagcctcaatgtctggaggagcgggaagtccagcttaccgttcatactggcgcaagcaggcattgccgctgcggtagcatggaagcacggccaggcgtacaccactacgaggaagctgcttccgtggggcttctacgtcgcgctaagtgccgcaatgatctgcttctactcctacgttcttcttgccggagggaatccgcctcctaagaaggcgaaggcgaaggctgctgcttgatttgatgttgaaggcattcaccggagcgtctcataattgcactacctttctctggtaaatagggttgtggtatggcctctgtttacttagtaaaagactgaggagataagactgtcccccctatgctgcataactgttgttgtttcctttatatatacatgatcaataagggctgggttggttccattccatcccactacccatctcatttatggtggtaaatagggttggcctttcttttttggctttggtttgaagtgtttgacgagattttgtacatttcctttttagagagaagcacattctatcacaagaggctcgacatgctattgcc

SEQ ID NO: 11109 - protein, 302 aa, Zea mays subsp. mays
  peptide (1)..(302): Ceres Seq. ID no. 12342113
FAALRSSVLSPHTPPARDEARIAAAKRRSCHLPRAHLPPMLRTHLLPEAWRRPLPQEAGARHQSPRISFHRAAPRSGIQGGQVRCGGPELRWLSSSRNSSSDSQPWTTMCVNADYTTPADSVATSEQAGGEAEATLETGGEAAATLEQTGGETEEPTIVAPANEYTVQEAAPQQKCAKIHDFCLGIPFGGLLLSMGLIGFLFWRSPASLTFGVAPGLAILALAVLSLNVWRSGKSSLPFILAQAGIAAAVAWKHGQAYTTTRKLLPWGFYVALSAAMICFYSYVLLAGGNPPPKKAKAKAAA

SEQ ID NO: 11110 - protein, 263 aa, Zea mays subsp. mays
  peptide (1)..(263): Ceres Seq. ID no. 12342114
MLRTHLLPEAWRRPLPQEAGARHQSPRISFHRAAPRSGIQGGQVRCGGPELRWLSSSRNSSSDSQPWTTMCVNADYTTPADSVATSEQAGGEAEATLETGGEAAATLEQTGGETEEPTIVAPANEYTVQEAAPQQKCAKIHDFCLGIPFGGLLLSMGLIGFLFWRSPASLTFGVAPGLAILALAVLSLNVWRSGKSSLPFILAQAGIAAAVAWKHGQAYTTTRKLLPWGFYVALSAAMICFYSYVLLAGGNPPPKKAKAKAAA

SEQ ID NO: 11111 - protein, 194 aa, Zea mays subsp. mays
  peptide (1)..(194): Ceres Seq. ID no. 12342115
MCVNADYTTPADSVATSEQAGGEAEATLETGGEAAATLEQTGGETEEPTIVAPANEYTVQEAAPQQKCAKIHDFCLGIPFGGLLLSMGLIGFLFWRSPASLTFGVAPGLAILALAVLSLNVWRSGKSSLPFILAQAGIAAAVAWKHGQAYTTTRKLLPWGFYVALSAAMICFYSYVLLAGGNPPPKKAKAKAAA

SEQ ID NO: 11112 - DNA, 757 bp, Zea mays subsp. mays
  misc_feature (1)..(757): Ceres Seq. ID no. 12355612
  misc_feature (1)..(757): Ortholog of  Ceres SEQ ID NO 12626108 as cited in SEQ ID NO 64252
aagccaaacactccggcagctgtggtggagacgcctccgcctcccaaacacccgaatcaaactaacagccaccgatggcgtcgccatcgcggttgctcccgcccacgcctccttcggccgcccagccccgcggcccgcgggatcgcctcgccttgccgcgcctccggtgcctcgccgccgccgcagcctccgcctcgcccactgatggcgctgtgctgctggagcgtggcgggttccgcggcggtggccgtgcgggagttcgtcacgcttgacgagctccgcgctgccgtgcgcctccgcgtccgcaccttccacgagtacgcagacgactccgtcggaaccgaggatcacagaaaggctcttgcagatagggagtttgaagcattacaggataggatttctgggaagatgataaattttcgaagagtttcttgcataaacgggactgttccactgtccccatcattaatgtcagctgaggaactttgttctatgtgcaagtttgtggaggatggaaaagagagattagtagttggtagtttagaccttaatcagtgtctttggctaccagatgaattgactggaaagaggcctggggtacgaccgttgtttcctctttctacgctattgcagaatacttatgatcaaaacatatttttgatagttgttattggtatttttgaacttgctttggtcatcgctttgttgttgttttggcaataaagatagactcactacatctaacttctttcttgtc

SEQ ID NO: 11113 - protein, 240 aa, Zea mays subsp. mays
  peptide (1)..(240): Ceres Seq. ID no. 12355613
KPNTPAAVVETPPPPKHPNQTNSHRWRRHRGCSRPRLLRPPSPAARGIASPCRASGASPPPQPPPRPLMALCCWSVAGSAAVAVREFVTLDELRAAVRLRVRTFHEYADDSVGTEDHRKALADREFEALQDRISGKMINFRRVSCINGTVPLSPSLMSAEELCSMCKFVEDGKERLVVGSLDLNQCLWLPDELTGKRPGVRPLFPLSTLLQNTYDQNIFLIVVIGIFELALVIALLLFWQ

SEQ ID NO: 11114 - protein, 172 aa, Zea mays subsp. mays
  peptide (1)..(172): Ceres Seq. ID no. 12355614
MALCCWSVAGSAAVAVREFVTLDELRAAVRLRVRTFHEYADDSVGTEDHRKALADREFEALQDRISGKMINFRRVSCINGTVPLSPSLMSAEELCSMCKFVEDGKERLVVGSLDLNQCLWLPDELTGKRPGVRPLFPLSTLLQNTYDQNIFLIVVIGIFELALVIALLLFWQ

SEQ ID NO: 11115 - DNA, 1426 bp, Zea mays subsp. mays
  misc_feature (1)..(1426): Ceres Seq. ID no. 12441479
  misc_feature (1)..(1426): Ortholog of  Ceres SEQ ID NO 13639243 as cited in SEQ ID NO 56820
  misc_feature (1)..(1426): Ortholog of  Ceres SEQ ID NO 13496409 as cited in SEQ ID NO 65697
gcacgagaccattacctagaacatcctaatcgaaaacacaccttccctcggtcccttccatctcctagccgccgccgccgccgccgctgcccaaaaccctacctaccctcttcttcccctcactctcctttcatctccattctaatggcggcccaacccgtccggcggcggctgctgctcagaaagccgagacgaagaagtccgccgtggcgcctgctgggaaggctgcccagcctgcggcgaccaccaagttcccgaccaagcccgctcctccctcgcagacggttcgggatgcacgcggcggtggctcatcagctcgtggaggctttggccgtggtgaacgtggccgtggcagaggtggacggggatatggccagaaccgtggcttcagtggtgacaatggcaatgacttccagggaggttatggtggcggaggctatggggatggtgctgtaactggtggatctgaaggagaaagggagagagacactcgtcccccgtaccgtggcggaggcagacgtggtggttacaggaatgttgagtttgctgatgactctgagaggccaccacggagaaactatgagcgccacagcgggactggccatggctatgagatgaagcgtgatggcgcagggcgagggaactggggcactgccactgatgaacttattgcccaggatgcagaggactctccgaagatggaggaggctgctcctgttgctgagaaacaaggtgagcagaatgatgccccagcagcagatgagaacaaaggtaacaaggatgctactgcaaatgaggaggaagaaaaggaagaggacaaggagatgactctggaggaatttgagaaaataagagaggagaagaggaaagcactacttgcattgaaggctgaggagaggaaagttgaagttgacaaggatttgcagtctctgcagccactttcaaacaagaaagaaaatgatgaagttttcattaagctgggttctgacaaggataagaagaaggaaaatgctgagcgtgatgagcgtgccaagaagtcggtgagcatcaacgagttcctgaaacctgctgaaggagaaaggtactatggcggccgtggccgtggaaggggccgtggggagcgtggtggttttagaggcggatacggagggggatacagtcgtggcccagctgctgctgctccatccattgaagatcaagctcagttcccaagccttggtgggaagtgaagggcgcccagctgctgctgtcaccgagcgttgtgttgtctgctgttgtcatatttaaattttgtccgacgttaaatttctgtgccacggtttaaacggaacaaataatgatgttgcatgtggctatctttagttatgtggtacttgacgttgaataccggagttgttgtttatcagaattaacctccaatttttgt

SEQ ID NO: 11116 - protein, 204 aa, Zea mays subsp. mays
  peptide (1)..(204): Ceres Seq. ID no. 12441480
MKRDGAGRGNWGTATDELIAQDAEDSPKMEEAAPVAEKQGEQNDAPAADENKGNKDATANEEEEKEEDKEMTLEEFEKIREEKRKALLALKAEERKVEVDKDLQSLQPLSNKKENDEVFIKLGSDKDKKKENAERDERAKKSVSINEFLKPAEGERYYGGRGRGRGRGERGGFRGGYGGGYSRGPAAAAPSIEDQAQFPSLGGK

SEQ ID NO: 11117 - protein, 176 aa, Zea mays subsp. mays
  peptide (1)..(176): Ceres Seq. ID no. 12441481
MEEAAPVAEKQGEQNDAPAADENKGNKDATANEEEEKEEDKEMTLEEFEKIREEKRKALLALKAEERKVEVDKDLQSLQPLSNKKENDEVFIKLGSDKDKKKENAERDERAKKSVSINEFLKPAEGERYYGGRGRGRGRGERGGFRGGYGGGYSRGPAAAAPSIEDQAQFPSLGGK

SEQ ID NO: 11118 - protein, 151 aa, Zea mays subsp. mays
  peptide (1)..(151): Ceres Seq. ID no. 12441482
ARDHYLEHPNRKHTFPRSLPSPSRRRRRRCPKPYLPSSSPHSPFISILMAAQPVRRRLLLRKPRRRSPPWRLLGRLPSLRRPPSSRPSPLLPRRRFGMHAAVAHQLVEALAVVNVAVAEVDGDMARTVASVVTMAMTSREVMVAEAMGMVL

SEQ ID NO: 11119 - DNA, 1511 bp, Zea mays subsp. mays
  misc_feature (1)..(1511): Ceres Seq. ID no. 12351690
  misc_feature (1)..(1511): Ortholog of  Ceres SEQ ID NO 14304000 as cited in SEQ ID NO 53798
  misc_feature (1)..(1511): Ortholog of  Ceres SEQ ID NO 14314782 as cited in SEQ ID NO 56830
  misc_feature (1)..(1511): Ortholog of  Ceres SEQ ID NO 14303568 as cited in SEQ ID NO 65364
agcccggcacaccgagccgcggcgtcaaggacgacatatccgagctcaccgaaacgctcactcgccgcctctggggcgtcgcatccttcctcgcaccgcccccgaccccgccggaggcctccaccccgcgcgccgcgactccggcacaaggggaagatgaggggattgaggatggggaggaggccgcggtgctgtccccccggactgcggggatccgcagcgatctagccgagataggcggaaggatgtggagcggtttctcgatgctgcagaacaacttggccgtggccgagatctccaagatcgcctcgtcgctcctgccgttcgggcaaggggaggcggacgagggggagtccgtgcccggcatcaccgaagaggtggtggtgttcgtcaggcacatctccacgcggcccgagacatggctcgattttcccctcttcatcagcgagcgctacgcggatgatttcgaactgtcagatgctcagtacgtgcatgctctgtctgtagagcaccttgtgccaggattatcagatttaaaggctcagatttgctctactgacatgactgaagcatgtttctggaagatctactttgtgcttttgcactcgaaactcaataagcaagatgctgaggttctttcgacgccacagatcctagaagcaagggagcagttgttgcaaagtttagggtctgagaaaaagcggggatccaagtttcccgacgagtcatccgccgagagctcgaacgcatcctccgctcctgctgaagagaaggtgattcaacctccagtcatccaagacaaagcagacgcttgggagaaatcatcgtccgaagaaccttctgaaaccgtgtccgagaaattcccagtctcaaccaccgaagtggaaatggtggacaaatcagtggttgaggaagagctgactgtggcaaatgagagcaagacctcaccggtgaagtccaagcttccctacgaggctgatgaagaggaggaagtcgacgagtggcccgatgacgatgacgaccccaccgatgaggctggccaggcggcgggtgacaggactttgctagggcgggaggaggaggacgtatcgttcagtgatctggaggacgacgaggacgatgataggaggtagaaggggatgatgggcagtagccaagttggctaggggaagctcgtactatggtcccggcgcaaccacatgctggcttcattggagtagggccgagaacgcactcacacccaaggatcaatgtttcgttagttattattattattagagtccggaagtaatgagtcccaagcagtagcaataagcatgtatgtatctgccgcgcgtgttagtgctaatggcaagtcctgctgcttctgtattattggccccgtcctgtagcttgtacatagagcgctcacggctgggttgggcctttgtgtaataaacctaccgtccgggaacttgagcttgtgtttaaaaggacctgttcattagggagggacctggggttccagttcc

SEQ ID NO: 11120 - protein, 376 aa, Zea mays subsp. mays
  peptide (1)..(376): Ceres Seq. ID no. 12351691
PGTPSRGVKDDISELTETLTRRLWGVASFLAPPPTPPEASTPRAATPAQGEDEGIEDGEEAAVLSPRTAGIRSDLAEIGGRMWSGFSMLQNNLAVAEISKIASSLLPFGQGEADEGESVPGITEEVVVFVRHISTRPETWLDFPLFISERYADDFELSDAQYVHALSVEHLVPGLSDLKAQICSTDMTEACFWKIYFVLLHSKLNKQDAEVLSTPQILEAREQLLQSLGSEKKRGSKFPDESSAESSNASSAPAEEKVIQPPVIQDKADAWEKSSSEEPSETVSEKFPVSTTEVEMVDKSVVEEELTVANESKTSPVKSKLPYEADEEEEVDEWPDDDDDPTDEAGQAAGDRTLLGREEEDVSFSDLEDDEDDDRR

SEQ ID NO: 11121 - protein, 295 aa, Zea mays subsp. mays
  peptide (1)..(295): Ceres Seq. ID no. 12351692
MWSGFSMLQNNLAVAEISKIASSLLPFGQGEADEGESVPGITEEVVVFVRHISTRPETWLDFPLFISERYADDFELSDAQYVHALSVEHLVPGLSDLKAQICSTDMTEACFWKIYFVLLHSKLNKQDAEVLSTPQILEAREQLLQSLGSEKKRGSKFPDESSAESSNASSAPAEEKVIQPPVIQDKADAWEKSSSEEPSETVSEKFPVSTTEVEMVDKSVVEEELTVANESKTSPVKSKLPYEADEEEEVDEWPDDDDDPTDEAGQAAGDRTLLGREEEDVSFSDLEDDEDDDRR

SEQ ID NO: 11122 - protein, 289 aa, Zea mays subsp. mays
  peptide (1)..(289): Ceres Seq. ID no. 12351693
MLQNNLAVAEISKIASSLLPFGQGEADEGESVPGITEEVVVFVRHISTRPETWLDFPLFISERYADDFELSDAQYVHALSVEHLVPGLSDLKAQICSTDMTEACFWKIYFVLLHSKLNKQDAEVLSTPQILEAREQLLQSLGSEKKRGSKFPDESSAESSNASSAPAEEKVIQPPVIQDKADAWEKSSSEEPSETVSEKFPVSTTEVEMVDKSVVEEELTVANESKTSPVKSKLPYEADEEEEVDEWPDDDDDPTDEAGQAAGDRTLLGREEEDVSFSDLEDDEDDDRR

SEQ ID NO: 11123 - DNA, 1018 bp, Zea mays subsp. mays
  misc_feature (1)..(1018): Ceres Seq. ID no. 12342116
  misc_feature (1)..(1018): Ortholog of  Ceres SEQ ID NO 14301680 as cited in SEQ ID NO 67267
  misc_feature (1)..(1018): Ortholog of  Ceres SEQ ID NO 13589109 as cited in SEQ ID NO 0
accagaacacttgagcagactagcaaggccttcagaccgggagggctccctgtcctgtcccccgcgccgccgcggatggccggagccaccacgccggcatcaggcgccctcgtcaggctctgcctgccttcgctcctcctctttctgtaccggtgctgcagatgtgaggctgttgagatggagagaacccttgcgatgatcaagcccgatggtttgtcaggtaagtacacagaagcaatcaaggaggtcatcttggattctggatttcatatcgtcaaagaaaccgaggtccagcttgatgctgagagggcatctgtcttctatgcggagcattcccagagaagcttctttgacagcctagtcaagtacataacaagtggtccagttcttgctatggttctggaaagacctgacgccgttgcgcaatggcgcactttgattggaccaactgatgcaaaaaaggccaaaacctctcatccaaacagcattagagcaatgtgtgggctggactctgagaaaaattgcgtgcatggttcggattcaccagaatctgcagacagagagatctcatttttcttcggagaagctgaatccgtaactgtggaacatgatgagctatagacgccacactggtatcagtggcaatattggccggctcattggacaacgtgggagagtatcgactctgctgcttctagtgttcgtcatgcttcttttatgaactaaacccgaagacgctgcaatttgaggaggggatgtcagttgtcacagaggagagagtcatttttagggctagtttggaaatctcatttttttcaagagatttttattttcctaaaggaaattagtttatttttctttgagaaaatagaattcccttgggaaattagagtttctaaacgagcccttaatttcgtaaaattatgtccggagtccatatttcctatcggagcaccatggtccttgaacttgcaaaactatatggtgcaaaccaaatattgttttttcatccgtgttg

SEQ ID NO: 11124 - protein, 206 aa, Zea mays subsp. mays
  peptide (1)..(206): Ceres Seq. ID no. 12342117
TRTLEQTSKAFRPGGLPVLSPAPPRMAGATTPASGALVRLCLPSLLLFLYRCCRCEAVEMERTLAMIKPDGLSGKYTEAIKEVILDSGFHIVKETEVQLDAERASVFYAEHSQRSFFDSLVKYITSGPVLAMVLERPDAVAQWRTLIGPTDAKKAKTSHPNSIRAMCGLDSEKNCVHGSDSPESADREISFFFGEAESVTVEHDEL

SEQ ID NO: 11125 - protein, 181 aa, Zea mays subsp. mays
  peptide (1)..(181): Ceres Seq. ID no. 12342118
MAGATTPASGALVRLCLPSLLLFLYRCCRCEAVEMERTLAMIKPDGLSGKYTEAIKEVILDSGFHIVKETEVQLDAERASVFYAEHSQRSFFDSLVKYITSGPVLAMVLERPDAVAQWRTLIGPTDAKKAKTSHPNSIRAMCGLDSEKNCVHGSDSPESADREISFFFGEAESVTVEHDEL

SEQ ID NO: 11126 - protein, 147 aa, Zea mays subsp. mays
  peptide (1)..(147): Ceres Seq. ID no. 12342119
MERTLAMIKPDGLSGKYTEAIKEVILDSGFHIVKETEVQLDAERASVFYAEHSQRSFFDSLVKYITSGPVLAMVLERPDAVAQWRTLIGPTDAKKAKTSHPNSIRAMCGLDSEKNCVHGSDSPESADREISFFFGEAESVTVEHDEL

SEQ ID NO: 11127 - DNA, 1584 bp, Zea mays subsp. mays
  misc_feature (1)..(1584): Ceres Seq. ID no. 13494719
  misc_feature (1)..(1584): Ortholog of  Ceres SEQ ID NO 13598353 as cited in SEQ ID NO 68742
gaaaccccagagctttaaagcttttccgattccgcaatgctcaccgttcggttccttctcgtaccgagccgcgggtagccagccaaccgccgacgcagtccacaagcgatgaagcgcttcttccagccagtgcccaaggacggctccccgtccaagaagcggctagcgggtgctgctgaaccgggcgacggccccacatcagccggtgccgccaccggcgctggcggggatgtagaggggaggcccaccgaggagccgttcaagttcctgacgtggaacgccaacagcctgctcctccggatgaagagcgactggcctgctttctcgcagctcgtcgcccgccttgaccccgacgtcatttgtgtccaggaagtgcggatgccggcagctggttccaaaggggcacctaaaaaccccagtgaactaaaagatgacacaagcttgtcacgggatgaaaagcaggtagttctacgtgctttgtcagcttcacctttcaaagactaccgtgtctggtggtctctttcagattcaaaatatgctgggacagctatgtttataaagaaaaagtttgagcctaagaaggtgtctttcaacttggatagaacatcttctaagcatgaagccgatgggcgtgttataattgcggaatttgaatcattcctttttactgaacacttattctccaaacaatggatggaaggaggaggaaaatgcatttcaaagaagacgtaagtgggacaagaggatgctagaatttgttcaacacgtggataaacccttaatctggtgtggggacttgaatgtcagtcatgaagaaatcgacgtcagccatcctgatttctttagcagcgctaagctgaatggatacaccccacccaataaagaggactgtggacagccaggattcaccccagcagagagacggcgttttggcaacatattattccaaggaaagctggtagatgcttacaggcacctgcacaaagaaaaggacatagacggtggcttctcttggtccggtcatccaattggcaagtaccgaggaaagagaatgaggatcgactacttccttgtttcggaacagttaaaggacagaatagtttcatgtgaaatgcatggccgtggcattgaattggatggattttatggaagtgaccactgccctgtttcgcttgagctttccgaagctgtagcagaagaagcaccaggacagcccaagccatccatntaaatataccnccatggtggtcattgttgagacatttccggtccttcattaaacctgactgttccatgcattgcctactntaggtagctgaggtttgattgtaggtattattatgatcccagtaggttaccagttcctgtggtcagggctggtatagtttagggatcattgccatttaagcagtgcaatttggacatctcattctgcttgaaatgttgtttgtntaagagcagccatggactacctaatacctcatggggatcgaagagattaatcccttcgtatccaattttaactagcaagggatttaatccacccctaacaagcacaataaaatcttgttcgttttttctacc

SEQ ID NO: 11128 - protein, 207 aa, Zea mays subsp. mays
  peptide (1)..(207): Ceres Seq. ID no. 13494720
MKRFFQPVPKDGSPSKKRLAGAAEPGDGPTSAGAATGAGGDVEGRPTEEPFKFLTWNANSLLLRMKSDWPAFSQLVARLDPDVICVQEVRMPAAGSKGAPKNPSELKDDTSLSRDEKQVVLRALSASPFKDYRVWWSLSDSKYAGTAMFIKKKFEPKKVSFNLDRTSSKHEADGRVIIAEFESFLFTEHLFSKQWMEGGGKCISKKT

SEQ ID NO: 11129 - protein, 161 aa, Zea mays subsp. mays
  peptide (1)..(161): Ceres Seq. ID no. 13494721
  misc_feature (161)..(161): Xaa is any aa, unknown or other
MLEFVQHVDKPLIWCGDLNVSHEEIDVSHPDFFSSAKLNGYTPPNKEDCGQPGFTPAERRRFGNILFQGKLVDAYRHLHKEKDIDGGFSWSGHPIGKYRGKRMRIDYFLVSEQLKDRIVSCEMHGRGIELDGFYGSDHCPVSLELSEAVAEEAPGQPKPSX

SEQ ID NO: 11130 - protein, 143 aa, Zea mays subsp. mays
  peptide (1)..(143): Ceres Seq. ID no. 13494722
MKSDWPAFSQLVARLDPDVICVQEVRMPAAGSKGAPKNPSELKDDTSLSRDEKQVVLRALSASPFKDYRVWWSLSDSKYAGTAMFIKKKFEPKKVSFNLDRTSSKHEADGRVIIAEFESFLFTEHLFSKQWMEGGGKCISKKT

SEQ ID NO: 11131 - DNA, 1090 bp, Zea mays subsp. mays
  misc_feature (1)..(1090): Ceres Seq. ID no. 12413685
  misc_feature (1)..(1090): Ortholog of  Ceres SEQ ID NO 13595304 as cited in SEQ ID NO 56080
  misc_feature (1)..(1090): Ortholog of  Ceres SEQ ID NO 13597171 as cited in SEQ ID NO 63630
aattttacctccaaggtttgggtcttcttcctcccgcattagccgcaggtttggttgcttagcatcagggggaaacatcgcaggttgttgttttgtttgaacactatcgagaggaagaggaagaagaggaggaggcggagttttgggttgagagcggcagaatagataatcggacttccggctggataagtgatccttttttttgaatcgccagacgcggagagcaggagggattatagctagcaacaggtgaaatggcaattggacagggcgacgagaagaagggctcccttgccaggagcttgagctgctcaaactgcgggagcggcgcaataatttttgggcggaagagagtcgccgtctcgccgactccgggctcccggagcccgcactcgccgacgcgcaccctgcgcaagcagcgcagcgtccggttccacatggaggacgacggcgtcaacctcttcaaccagctgtcgctagatgtactggttatgatcttttacaaggtgaaccacagtgatctgaggaacctcctcctgatatcgaaatcggtcaaagatgcgaccatccttgctagggagcagcatttcaagttctcgacgccgccggcgaagtccggttttagagacgaggaaaccgccggcggcgacgacgacgacgagggccccggcgcgcccaagcaacacagggttgcgaggtcgcacctgggggacacgaacctgtcgagcatcgccgtcaacctgtcggcgtcgttcgatcagatgtaaagtatatatatatatggcgccacaggttttcagttcgcgcttctgttggcgcgcgtgtatctagtagcttcaggttagaaggttttaagtgcctctcgtagcgcacgccatagagattaggtagtgagaaacagtatactcgtatgcgtcattactagtcctaagttaagtataatgtataaagtttttcaatgctgtggttgaagaacacacgccatgtcgtcttctccgatctgtaagttatttggcatagaagagatgtcttctctcttatgtgtatgctctaagtctatgatgctggatgcttcttctgttttgaagtc

SEQ ID NO: 11132 - protein, 170 aa, Zea mays subsp. mays
  peptide (1)..(170): Ceres Seq. ID no. 12413686
MAIGQGDEKKGSLARSLSCSNCGSGAIIFGRKRVAVSPTPGSRSPHSPTRTLRKQRSVRFHMEDDGVNLFNQLSLDVLVMIFYKVNHSDLRNLLLISKSVKDATILAREQHFKFSTPPAKSGFRDEETAGGDDDDEGPGAPKQHRVARSHLGDTNLSSIAVNLSASFDQM

SEQ ID NO: 11133 - protein, 109 aa, Zea mays subsp. mays
  peptide (1)..(109): Ceres Seq. ID no. 12413687
MEDDGVNLFNQLSLDVLVMIFYKVNHSDLRNLLLISKSVKDATILAREQHFKFSTPPAKSGFRDEETAGGDDDDEGPGAPKQHRVARSHLGDTNLSSIAVNLSASFDQM

SEQ ID NO: 11134 - protein, 91 aa, Zea mays subsp. mays
  peptide (1)..(91): Ceres Seq. ID no. 12413688
MIFYKVNHSDLRNLLLISKSVKDATILAREQHFKFSTPPAKSGFRDEETAGGDDDDEGPGAPKQHRVARSHLGDTNLSSIAVNLSASFDQM

SEQ ID NO: 11135 - DNA, 1674 bp, Zea mays subsp. mays
  misc_feature (1)..(1674): Ceres Seq. ID no. 13573191
  misc_feature (1)..(1674): Ortholog of  Ceres SEQ ID NO 14303487 as cited in SEQ ID NO 54521
  misc_feature (1)..(1674): Ortholog of  Ceres SEQ ID NO 14316302 as cited in SEQ ID NO 55232
  misc_feature (1)..(1674): Ortholog of  Ceres SEQ ID NO 14308274 as cited in SEQ ID NO 55597
  misc_feature (1)..(1674): Ortholog of  Ceres SEQ ID NO 13659710 as cited in SEQ ID NO 60808
aaatcgcggtcactgctccgaagtccgaaccttcatacacatcgtctcgtttccgatttccccaaattcaggccacaggcgctacaggacccaggcaccactcggtcggcggccaccgcgtcgccccgcctgctcgattggggtcgcgtgtgcgataggaagtattgtgttgtgtttgcaacgtgatagcttgtactgggaacaaaggtcaagatgggcgccttggacctacaccttgactttgcttctgctcaacatggacaagccaagttaaaggaatatgccaagagctctctgttgtctgatggaaactacaatacagacaagatcaatggttcaaaccctgatgactatgagaaatttgagaaagggataatgcactatgggtgtccacattatagaaggagatgccgcataagagctccttgctgcaatgaaatttttgattgccgacactgccacaatgaaactaagaattccattaaaattgataaaatgaagaggcatgaacttccacgccatgaagtgcagcaggttgtatgctcattgtgtggcactgaacaggaggtgcgacaagtatgtatcaattgcggtgtttgcatggggaagtacttctgtggtttgtgcaaactcttcgacgatgatgtctctaaacagcagtatcactgcaacggatgtggaatatgtagaatcggagggagggagaatttcttccactgttcaaaatgtggatgttgctattcaattgcgctgaagaatagtcatgcatgtgttgaaggggcgatgcatcatgactgtccaatctgcttcgagtacttgttcgattcgacaaatgatgtttccgtcctgccttgtggtcataccattcatgtaaagtgcctgaaagaaatggaagagcactgccagtttgcatgccccctttgctccaagtcggtttgtgacatgtcgaaggcatgggaaaggctcgacatggagctggcaactctgtctgactcctgtgatcacaaaatggtccgcatattatgcaacgactgcggggcaatatcagatgtgcagttccatttgattgcgcacaagtgccagaattgcaagtcatacaacacccgccagatttgaagtaagaatcgcaagtcacacaacaccgtcagatctgaaatagcaaatcctgtgggggtttctgcatttcttcaagaagcgtgatggactgatggccccttcccgtgagctgctgagcaccgggatgtctggcaagacactcatcactgtatccactccactgggtcctgcggaggcaaacagctcgagattgtatatctgctgctagctgccgcccttcgttatgcataagcctactcttgccgttttactcctgtcgctccgtgattctagtgtaataatgttatatttagtgctgcttcaagcgtacggctgcggttgaacggcggcggcggctgctgagccacagtaccttgctgttgctgagactgcacccagccacagtgcgccgccgccgcagcagcttgtagctggactttatgaaggtgcctttgttccgcaaggaagagttcttggttgcgggtagctattaaggccatctccaatagatgtcctattatatcccttatttcatcctctatttcaaactttatataaatagtattaaatatctcatct

SEQ ID NO: 11136 - protein, 300 aa, Zea mays subsp. mays
  peptide (1)..(300): Ceres Seq. ID no. 13573192
MGALDLHLDFASAQHGQAKLKEYAKSSLLSDGNYNTDKINGSNPDDYEKFEKGIMHYGCPHYRRRCRIRAPCCNEIFDCRHCHNETKNSIKIDKMKRHELPRHEVQQVVCSLCGTEQEVRQVCINCGVCMGKYFCGLCKLFDDDVSKQQYHCNGCGICRIGGRENFFHCSKCGCCYSIALKNSHACVEGAMHHDCPICFEYLFDSTNDVSVLPCGHTIHVKCLKEMEEHCQFACPLCSKSVCDMSKAWERLDMELATLSDSCDHKMVRILCNDCGAISDVQFHLIAHKCQNCKSYNTRQI

SEQ ID NO: 11137 - protein, 246 aa, Zea mays subsp. mays
  peptide (1)..(246): Ceres Seq. ID no. 13573193
MHYGCPHYRRRCRIRAPCCNEIFDCRHCHNETKNSIKIDKMKRHELPRHEVQQVVCSLCGTEQEVRQVCINCGVCMGKYFCGLCKLFDDDVSKQQYHCNGCGICRIGGRENFFHCSKCGCCYSIALKNSHACVEGAMHHDCPICFEYLFDSTNDVSVLPCGHTIHVKCLKEMEEHCQFACPLCSKSVCDMSKAWERLDMELATLSDSCDHKMVRILCNDCGAISDVQFHLIAHKCQNCKSYNTRQI

SEQ ID NO: 11138 - protein, 206 aa, Zea mays subsp. mays
  peptide (1)..(206): Ceres Seq. ID no. 13573194
MKRHELPRHEVQQVVCSLCGTEQEVRQVCINCGVCMGKYFCGLCKLFDDDVSKQQYHCNGCGICRIGGRENFFHCSKCGCCYSIALKNSHACVEGAMHHDCPICFEYLFDSTNDVSVLPCGHTIHVKCLKEMEEHCQFACPLCSKSVCDMSKAWERLDMELATLSDSCDHKMVRILCNDCGAISDVQFHLIAHKCQNCKSYNTRQI

SEQ ID NO: 11139 - DNA, 691 bp, Zea mays subsp. mays
  misc_feature (1)..(691): Ceres Seq. ID no. 12358105
  misc_feature (1)..(691): Ortholog of  Ceres SEQ ID NO 12585656 as cited in SEQ ID NO 68874
gtttgctccccctccctcacccgcctccactcccccctcccaggcgctgcccaggtaagtcggcggcggcgatgacaacgcgcttcaagaagaaccgcaagaagcgcggccacgtgtccgccgggcacggccgcatcggcaagcacaggaagcacccgggaggtcgcggtaacgccggtggcatgcaccaccaccgtatcctcttcgacaagtaccatccgggctacttcggcaaggttggcatgcgttacttccataagctccgcaacaagttctactgccccgcggtcaacatcgagcgcctctggtcgatggtgcccgccgacaaggcggcggaggccggcctcgacaaggccccgcagatcgacgtcacgcagttcggctacttcaaggtgctcgggaagggggtgctgccgcccaagcccattgtcgtcaaggccaagctcatctccaaggtcgccgagaagaagatcaaggcagcaggcggggccgtcgtgctcaccgcctaggtttcagtccttgttcgcctcctggttttgaaatctatatctgaactgatagtgctttcctgtctcagcaatttgtgttaagaaaacctgtagttttaaaatatgtggttcctgcctgttgggcagtgcttatgcggtttttgatgccagttcatatcaaatatttcacatcaattaaatcc

SEQ ID NO: 11140 - protein, 168 aa, Zea mays subsp. mays
  peptide (1)..(168): Ceres Seq. ID no. 12358106
LLPLPHPPPLPPPRRCPGKSAAAMTTRFKKNRKKRGHVSAGHGRIGKHRKHPGGRGNAGGMHHHRILFDKYHPGYFGKVGMRYFHKLRNKFYCPAVNIERLWSMVPADKAAEAGLDKAPQIDVTQFGYFKVLGKGVLPPKPIVVKAKLISKVAEKKIKAAGGAVVLTA

SEQ ID NO: 11141 - protein, 145 aa, Zea mays subsp. mays
  peptide (1)..(145): Ceres Seq. ID no. 12358107
MTTRFKKNRKKRGHVSAGHGRIGKHRKHPGGRGNAGGMHHHRILFDKYHPGYFGKVGMRYFHKLRNKFYCPAVNIERLWSMVPADKAAEAGLDKAPQIDVTQFGYFKVLGKGVLPPKPIVVKAKLISKVAEKKIKAAGGAVVLTA

SEQ ID NO: 11142 - protein, 108 aa, Zea mays subsp. mays
  peptide (1)..(108): Ceres Seq. ID no. 12358108
MHHHRILFDKYHPGYFGKVGMRYFHKLRNKFYCPAVNIERLWSMVPADKAAEAGLDKAPQIDVTQFGYFKVLGKGVLPPKPIVVKAKLISKVAEKKIKAAGGAVVLTA

SEQ ID NO: 11143 - DNA, 683 bp, Zea mays subsp. mays
  misc_feature (1)..(683): Ceres Seq. ID no. 12403959
  misc_feature (1)..(683): Ortholog of  Ceres SEQ ID NO 14309152 as cited in SEQ ID NO 0
acctgagacctagaaccctcttccccctcgatggccgtagggagcggcggcggctcgcggcgcgcgcgtccgaacgtgctagtgacggggacgccggggacggggaagacgacaacgtgctcgctccttgccgacgccgcaggcctccgccacgtcaacatcggcgacctcgtccgcgagaagagcctccacgacggctgggacgccgacctcgagtgccatgtcatcaacgaggacctggtgtgcgacgagcttgaggacatgatggaagaaggtggcatactagtagattaccacggatgtgatttctttccagaacgttggtttgacctcgtagttgtgctccagactgacaactcaattctgcatgatcgcctgacggaggttacatgggttccaaactcgccaacaacatagagtgcgaaatcttccaagtgctcctcgaggaggcgagggagagctacagagaggacatcgtgatgccattgcgaagtgacaacgtggaggatattagtaggaacgtaggtgcactgacagactgggtaaacaattggagacctagttagacctgtcaaaagaaatgttgccttatgtgttgtatttggatatgtattgggtggaccagctgccatgtttgtaatgtacggggtgttttggttaaagaaacgaagtcgttcatcctt

SEQ ID NO: 11144 - protein, 128 aa, Zea mays subsp. mays
  peptide (1)..(128): Ceres Seq. ID no. 12403960
MAVGSGGGSRRARPNVLVTGTPGTGKTTTCSLLADAAGLRHVNIGDLVREKSLHDGWDADLECHVINEDLVCDELEDMMEEGGILVDYHGCDFFPERWFDLVVVLQTDNSILHDRLTEVTWVPNSPTT

SEQ ID NO: 11145 - protein, 84 aa, Zea mays subsp. mays
  peptide (1)..(84): Ceres Seq. ID no. 12403961
LRPRTLFPLDGRRERRRLAARASERASDGDAGDGEDDNVLAPCRRRRPPPRQHRRPRPREEPPRRLGRRPRVPCHQRGPGVRRA

SEQ ID NO: 11146 - DNA, 1055 bp, Zea mays subsp. mays
  misc_feature (1)..(1055): Ceres Seq. ID no. 12351694
  misc_feature (1)..(1055): Ortholog of  Ceres SEQ ID NO 14304561 as cited in SEQ ID NO 53886
  misc_feature (1)..(1055): Ortholog of  Ceres SEQ ID NO 14307186 as cited in SEQ ID NO 54806
  misc_feature (1)..(1055): Ortholog of  Ceres SEQ ID NO 15179828 as cited in SEQ ID NO 66338
attctccactgcctccagcaagtgttctaaaatctgaatggcatcttgctcctctgtccacgccgcaccatcgctcctcgtctcggcgccgcctagtaggcggcgcacaagtacggccgtatgtcttcagggtgttcgccgcggcagggtcgcgtcctgccgcgtgcggtgtagcgccggggccgggcagggcggggtcaaggtccctgcgaagctggcggagctgtggtcggcggcgaagagcgcgcctcccctggccgtgctcgcgggtgtggcggcggcggtggcgatatacaaggtcgggtccagtctccttgcgccgcgccatcccccgccccgtcggctggaggcccagacggccccgccgcctccagtcccggagccggtgcaggtgggcgagataacggaggaggaactacggcagtacgacggggtccgaccccgagaaaccgctgctgatggccatcaaggggcagatctatgacgtctcagagagcaggatgttctatggacctggcgcagcttatgctctgtttgctggtaaagatgccagtagggcattggctaagatgtcctttgaatcacaggatctgaatggtgatatatctggtctaacgccaatggagctcggcgccttgaatgactgggagtacaagttcgccaccaagtatgcgaaggtaggaaccataagaagagcagcgcccgtcgaagtggtttatggcaacatttcgcctgaaatgagggaagaagttagtgaacctgtggttgaacctgagcttgagcctgagcccgagcctgagccgcatgacgacgatgcaccatgaataggaaaaacacaaagacatcagttcgggtaggaagatgaaatggagggcggcacactgcttataatgttccagaggtagtcagaatttcgaaataatgaaaagcctcataggctcgtacttgttgcgtggatattcagaaagaatagtgtctaaatttaaaccaatagtagatgtgtactctgtagtaggattgaattgttggatatgtacatgtcattcttctatttt

SEQ ID NO: 11147 - protein, 148 aa, Zea mays subsp. mays
  peptide (1)..(148): Ceres Seq. ID no. 12351695
MASCSSVHAAPSLLVSAPPSRRRTSTAVCLQGVRRGRVASCRVRCSAGAGQGGVKVPAKLAELWSAAKSAPPLAVLAGVAAAVAIYKVGSSLLAPRHPPPRRLEAQTAPPPPVPEPVQVGEITEEELRQYDGVRPRETAADGHQGADL

SEQ ID NO: 11148 - protein, 133 aa, Zea mays subsp. mays
  peptide (1)..(133): Ceres Seq. ID no. 12351696
SPLPPASVLKSEWHLAPLSTPHHRSSSRRRLVGGAQVRPYVFRVFAAAGSRPAACGVAPGPGRAGSRSLRSWRSCGRRRRARLPWPCSRVWRRRWRYTRSGPVSLRRAIPRPVGWRPRRPRRLQSRSRCRWAR

SEQ ID NO: 11149 - protein, 121 aa, Zea mays subsp. mays
  peptide (1)..(121): Ceres Seq. ID no. 12351697
MAIKGQIYDVSESRMFYGPGAAYALFAGKDASRALAKMSFESQDLNGDISGLTPMELGALNDWEYKFATKYAKVGTIRRAAPVEVVYGNISPEMREEVSEPVVEPELEPEPEPEPHDDDAP

SEQ ID NO: 11150 - DNA, 648 bp, Zea mays subsp. mays
  misc_feature (1)..(648): Ceres Seq. ID no. 12340573
  misc_feature (1)..(648): Ortholog of  Ceres SEQ ID NO 13598930 as cited in SEQ ID NO 0
cttcttcgcattgcctttcccttcagttgcaccgacctccagacgaaaccacccaagacgcgtgcttccattcctagcccaacagaagcgaagcacgccaccgaccaccggcctcgaagggatcatcttctctacaactcgtcctcgtggccttgttcctcctcttgtataggggactgcggcggagtggagatccgtgccgacatagtccgacttcttcgctcgctgcctacgattgatggcctcaccttcaccaaccgaagagttcagcagggaagcagctcgtcagtctctgatcgcgatctccgagtccactccggagacaccttcaccgcagacggtgaggacaccgccgatctccagcgcagagaacgggaagccgggcgatggggcggacaagttcagatcgaagctgatgtccatcacagacctgtcttctgatgcccaacctgcgcagtgccctcccgaggatgtcgctgcttaatcaatcgtgtgattctctgctcgacttgcggacacgatgtatcagtgcttgccgatcctctgaactggacatttggctgtcgtgctttaaactggacgtccttatggcttatgttattactggtcgtttttatttgataaataaatattcaggggaacgggtgc

SEQ ID NO: 11151 - protein, 146 aa, Zea mays subsp. mays
  peptide (1)..(146): Ceres Seq. ID no. 12340574
LLRIAFPFSCTDLQTKPPKTRASIPSPTEAKHATDHRPRRDHLLYNSSSWPCSSSCIGDCGGVEIRADIVRLLRSLPTIDGLTFTNRRVQQGSSSSVSDRDLRVHSGDTFTADGEDTADLQRREREAGRWGGQVQIEADVHHRPVF

SEQ ID NO: 11152 - protein, 81 aa, Zea mays subsp. mays; identical to SEQ ID NO: 10489
  peptide (1)..(81): Ceres Seq. ID no. 12340575

SEQ ID NO: 11153 - DNA, 1784 bp, Zea mays subsp. mays; identical to SEQ ID NO: 9530
  misc_feature (1)..(1784): Ceres Seq. ID no. 12414416
  misc_feature (1)..(1784): Ortholog of  Ceres SEQ ID NO 14307273 as cited in SEQ ID NO 54302
  misc_feature (1)..(1784): Ortholog of  Ceres SEQ ID NO 14315317 as cited in SEQ ID NO 58242
  misc_feature (1)..(1784): Ortholog of  Ceres SEQ ID NO 13655375 as cited in SEQ ID NO 63347
  misc_feature (1)..(1784): Ortholog of  Ceres SEQ ID NO 12626166 as cited in SEQ ID NO 64505
  misc_feature (1)..(1784): Ortholog of  Ceres SEQ ID NO 14301599 as cited in SEQ ID NO 65699
  misc_feature (1)..(1784): Ortholog of  Ceres SEQ ID NO 14301978 as cited in SEQ ID NO 0
  misc_feature (1)..(1784): Ortholog of  Ceres SEQ ID NO 14303290 as cited in SEQ ID NO 0

SEQ ID NO: 11154 - protein, 354 aa, Zea mays subsp. mays; identical to SEQ ID NO: 9531
  peptide (1)..(354): Ceres Seq. ID no. 12414417

SEQ ID NO: 11155 - protein, 321 aa, Zea mays subsp. mays; identical to SEQ ID NO: 9532
  peptide (1)..(321): Ceres Seq. ID no. 12414418

SEQ ID NO: 11156 - protein, 292 aa, Zea mays subsp. mays; identical to SEQ ID NO: 9533
  peptide (1)..(292): Ceres Seq. ID no. 12414419

SEQ ID NO: 11157 - DNA, 1084 bp, Zea mays subsp. mays
  misc_feature (1)..(1084): Ceres Seq. ID no. 12355615
  misc_feature (1)..(1084): Ortholog of  Ceres SEQ ID NO 15178931 as cited in SEQ ID NO 1125
  misc_feature (1)..(1084): Ortholog of  Ceres SEQ ID NO 13596648 as cited in SEQ ID NO 63080
aagttcaggcagtttcgtgcccttttcttctccaccagctcaaagctgaacgcggcatccttcctttcacaccggggaccggcgagcagagccgcgcacagcagaacgcggaagcaagaggaggcgatcgactactcgaccagccctctccgtgtctccgatggcggctcgcgtcctcgcggccctcgcccttgccctcgccctcgccctcgtcgccgtacccgctcccacgcgggcgtccaacgacgagggggacgcgctctacgcgctgcggcagcggctgtcggaccccaacggcgtgctgcagagctgggatcccacgctcgtcaccccctgcacctggttccacatctcctgcgaccaggtcggccgcgtcgtccgcctggacttgggcaactccaacgtctccggctccatcggccctgagctcggccgccttgtcaacctcaagtacctggagctgtacaggaacaaccttgacggcgagatccccaaggaattgggcaacctcaagaacctgatcagcttggatctgtatgccaacaagctcacgggaggaatccccaagtcactctccaagctcgactcactcagattcatgcgcttgaacaacaacaagcttacaggatcaattccaagggagtttgccaagctctccaacctgaaagtcatcgatttgtctaacaatgatctctgtggaactatccctgttgatgggcctttctcaacctttcctctccgaagctttgagaacaacagcaggctcaacggtccagagctacaaggattggttccttatgattttggatgttagatgccgatcaacaatgtaccaccttccccagttgaaagggggaaagacaagatagtattatcaatagaaacctagcttcaagaatgtcgtgactatatatatgtatgatattaagactagatttgataagggtggcatagcaagtcctgatattctgtgtgcattcagaatagctgcttttatgccccttgtgttgatattttgcaaaccaaaacaaactgttctgaaacgagggcacatattgttcatgaataaatttgagcctccaat

SEQ ID NO: 11158 - protein, 217 aa, Zea mays subsp. mays
  peptide (1)..(217): Ceres Seq. ID no. 12355616
MAARVLAALALALALALVAVPAPTRASNDEGDALYALRQRLSDPNGVLQSWDPTLVTPCTWFHISCDQVGRVVRLDLGNSNVSGSIGPELGRLVNLKYLELYRNNLDGEIPKELGNLKNLISLDLYANKLTGGIPKSLSKLDSLRFMRLNNNKLTGSIPREFAKLSNLKVIDLSNNDLCGTIPVDGPFSTFPLRSFENNSRLNGPELQGLVPYDFGC

SEQ ID NO: 11159 - protein, 172 aa, Zea mays subsp. mays
  peptide (1)..(172): Ceres Seq. ID no. 12355617
VQAVSCPFLLHQLKAERGILPFTPGTGEQSRAQQNAEARGGDRLLDQPSPCLRWRLASSRPSPLPSPSPSSPYPLPRGRPTTRGTRSTRCGSGCRTPTACCRAGIPRSSPPAPGSTSPATRSAASSAWTWATPTSPAPSALSSAALSTSSTWSCTGTTLTARSPRNWATSRT

SEQ ID NO: 11160 - protein, 141 aa, Zea mays subsp. mays
  peptide (1)..(141): Ceres Seq. ID no. 12355618
KFRQFRALFFSTSSKLNAASFLSHRGPASRAAHSRTRKQEEAIDYSTSPLRVSDGGSRPRGPRPCPRPRPRRRTRSHAGVQRRGGRALRAAAAAVGPQRRAAELGSHARHPLHLVPHLLRPGRPRRPPGLGQLQRLRLHRP

SEQ ID NO: 11161 - DNA, 1483 bp, Zea mays subsp. mays
  misc_feature (1)..(1483): Ceres Seq. ID no. 13492502
  misc_feature (1)..(1483): Ortholog of  Ceres SEQ ID NO 14307682 as cited in SEQ ID NO 54529
tgaagagttcagctaccctaccatccacactttattcatctcagggcagtagccagtagctagctgtagagggagttatcggccatgtcggaggaggcgacgctggaggacacgcctacgtggatcgtggcgtccgtgtgctccgtcatcgtcctcatctccttcgtcttcgagcgcgcgctccaccacctcggcaaggcactggagcgcctgaggaagaccctgtacgaggcgctgctaaagctcaaagaagagctcatgctgctgggcttcgtctcgctgctcctcgtcgtctcccaggacttgatacagaagatctgcatcgacgacagcctcatggagcactggatgccgtgccggggtgctagcgccaccgcctcggctcattacggtgtctcctcctcctcctcctcctccgcggtcggtggcgggaggaggatgctcaaaggcggcggggcagctttcgggcactgttcaagcaagggaaaagtcccgttgctatcacttcacgccttggagcaggtacacattttcatcttcgtcctagctatcacgcaagtcgttctcagcgtcgccaccgtcctcctgggacttctgcagatgcggatatggatgcactgggagaacaccattcagcaagagggcagctctgctcccaagatgatcgcccgtgtgcagaaaatcaggttcatccaggaccggtgtaaggggtacgagaaggccgcctgggttataatatggctgcgttctttcttcaaacagttctacggatcagtgtccaacgacgactacattgcgatgagactcggtttcgtcatggagcactttagggggcaccccaagttcaacttttacgactacatgatcaaagctctcgagaaagatttcaagcgagtagttagtataaaatggtattactggatttttgtgatgatctttctgctgctcaatgtcaccgggtggcactcctacttctggatctcattagttccactggctctgctgcttctgattgggacgaagctggagcacatcataaacaggctggcctacgaggtggcctcgaagcacgccgccgggcaaggcgaagggggcatcgtggtgagcccttcggacgagctgttctggttccgcagcccacggctggtgctcgtgctcatccacttcatcctgttccagaacgcgttcgagttcgcgtatttcttctggacactggtaaacatctggcatgcatgcatgcatgcatcatgcatgcgctctctgtctcaaatgcatgcagctacgccgtcgagtcgtcgtcgtcgttcgtcgacccaatctggccactggccagtgacgacctgtgtggcagtattcctgaatcctgatccctgtacgtgttaattgcaacgcaggcgatgttcggcgccaactcctgcatcatggacagtctaggatacagcgtctcgcgaatcatcatatggtactgagaacgtcgctgtcg

SEQ ID NO: 11162 - protein, 432 aa, Zea mays subsp. mays
  peptide (1)..(432): Ceres Seq. ID no. 13492503
MSEEATLEDTPTWIVASVCSVIVLISFVFERALHHLGKALERLRKTLYEALLKLKEELMLLGFVSLLLVVSQDLIQKICIDDSLMEHWMPCRGASATASAHYGVSSSSSSSAVGGGRRMLKGGGAAFGHCSSKGKVPLLSLHALEQVHIFIFVLAITQVVLSVATVLLGLLQMRIWMHWENTIQQEGSSAPKMIARVQKIRFIQDRCKGYEKAAWVIIWLRSFFKQFYGSVSNDDYIAMRLGFVMEHFRGHPKFNFYDYMIKALEKDFKRVVSIKWYYWIFVMIFLLLNVTGWHSYFWISLVPLALLLLIGTKLEHIINRLAYEVASKHAAGQGEGGIVVSPSDELFWFRSPRLVLVLIHFILFQNAFEFAYFFWTLVNIWHACMHASCMRSLSQMHAATPSSRRRRSSTQSGHWPVTTCVAVFLNPDPCTC

SEQ ID NO: 11163 - protein, 374 aa, Zea mays subsp. mays
  peptide (1)..(374): Ceres Seq. ID no. 13492504
MLLGFVSLLLVVSQDLIQKICIDDSLMEHWMPCRGASATASAHYGVSSSSSSSAVGGGRRMLKGGGAAFGHCSSKGKVPLLSLHALEQVHIFIFVLAITQVVLSVATVLLGLLQMRIWMHWENTIQQEGSSAPKMIARVQKIRFIQDRCKGYEKAAWVIIWLRSFFKQFYGSVSNDDYIAMRLGFVMEHFRGHPKFNFYDYMIKALEKDFKRVVSIKWYYWIFVMIFLLLNVTGWHSYFWISLVPLALLLLIGTKLEHIINRLAYEVASKHAAGQGEGGIVVSPSDELFWFRSPRLVLVLIHFILFQNAFEFAYFFWTLVNIWHACMHASCMRSLSQMHAATPSSRRRRSSTQSGHWPVTTCVAVFLNPDPCTC

SEQ ID NO: 11164 - protein, 348 aa, Zea mays subsp. mays
  peptide (1)..(348): Ceres Seq. ID no. 13492505
MEHWMPCRGASATASAHYGVSSSSSSSAVGGGRRMLKGGGAAFGHCSSKGKVPLLSLHALEQVHIFIFVLAITQVVLSVATVLLGLLQMRIWMHWENTIQQEGSSAPKMIARVQKIRFIQDRCKGYEKAAWVIIWLRSFFKQFYGSVSNDDYIAMRLGFVMEHFRGHPKFNFYDYMIKALEKDFKRVVSIKWYYWIFVMIFLLLNVTGWHSYFWISLVPLALLLLIGTKLEHIINRLAYEVASKHAAGQGEGGIVVSPSDELFWFRSPRLVLVLIHFILFQNAFEFAYFFWTLVNIWHACMHASCMRSLSQMHAATPSSRRRRSSTQSGHWPVTTCVAVFLNPDPCTC

SEQ ID NO: 11165 - DNA, 1324 bp, Zea mays subsp. mays
  misc_feature (1)..(1324): Ceres Seq. ID no. 12411942
  misc_feature (1)..(1324): Ortholog of  Ceres SEQ ID NO 15177611 as cited in SEQ ID NO 59034
aatcctttcacccttcagcccgcgtgccctctgtttctctcccggttcttcccctctcctgcgacgacagggttgggtaacgccgctcgccgccgccgccgccgccatacgcaggtgccgaggccttcgtcgatctcttagccgtcgacaagcacccaagagatgcaggatagaatgagacggcaggggcaatatggtgaagcggatattaactccatggttgctgcccagttgcatcactaccaggcacagcaaagggtacagaaacaccctgagaatagctacactggaagagatcctgcacaagcttctgcggagcatcagtacactccccctaaggcaagacagagtcaatgggatcgaggtggaccaaatgcgccaagccaggttccatcatatgcatataacgaagcccaaggtgctggaggtgcgcaatccttttatgatgggcagagatctgatacaaaggttggtctagaaaagcagcccagcaaggagtctagggagcaacctcgtactgaacgaactgaaacaagatacgagaattataatcttcctcggacattcgaaggtcttgaacaaagtttccatgaagacattattttgctatccaaggaactacaggaggcagaggatgctgaaaattctagacacatggagagattgaaggatataaatacacagtaccaggagaaactattagcacttagagctcggcaagcgaactatagagatgagttcctgcgcaaggaatctctagcacgccagcagcaataccagcacgccagcatgagccattacgccagcaattccacggctggggagcagcatggttataacccaacggcagcaggcacgcctcctgttgctgctggaggtgcttatggtgaggctcatcggggttatgcttctggccagtatgaatcatttagcgatcgtccagattatccagagttccatgatgggggcagaggtcgtggtcgtagttctgagcagcgtgctcaataccctggtggtcgtgcttataattccggtggccggcgattctagatatgctttgaactttgaaggacgatctatcactctgtcaagcgagctcatatcacctgatgtcagtgtgctgtaccgtgctatactcgaccgagaaacctaagcgctcataaaacttgttctacaattcaggtgcatcgaactactttatggttttgctagagttcattctggttataattgtagaggaacgaaacgatgagagaacactgacttttccgtttctctgcaattcatgtaatatgatctcggaagcaataacatttcatcttcg

SEQ ID NO: 11166 - protein, 295 aa, Zea mays subsp. mays
  peptide (1)..(295): Ceres Seq. ID no. 12411943
MQDRMRRQGQYGEADINSMVAAQLHHYQAQQRVQKHPENSYTGRDPAQASAEHQYTPPKARQSQWDRGGPNAPSQVPSYAYNEAQGAGGAQSFYDGQRSDTKVGLEKQPSKESREQPRTERTETRYENYNLPRTFEGLEQSFHEDIILLSKELQEAEDAENSRHMERLKDINTQYQEKLLALRARQANYRDEFLRKESLARQQQYQHASMSHYASNSTAGEQHGYNPTAAGTPPVAAGGAYGEAHRGYASGQYESFSDRPDYPEFHDGGRGRGRSSEQRAQYPGGRAYNSGGRRF

SEQ ID NO: 11167 - protein, 291 aa, Zea mays subsp. mays
  peptide (1)..(291): Ceres Seq. ID no. 12411944
MRRQGQYGEADINSMVAAQLHHYQAQQRVQKHPENSYTGRDPAQASAEHQYTPPKARQSQWDRGGPNAPSQVPSYAYNEAQGAGGAQSFYDGQRSDTKVGLEKQPSKESREQPRTERTETRYENYNLPRTFEGLEQSFHEDIILLSKELQEAEDAENSRHMERLKDINTQYQEKLLALRARQANYRDEFLRKESLARQQQYQHASMSHYASNSTAGEQHGYNPTAAGTPPVAAGGAYGEAHRGYASGQYESFSDRPDYPEFHDGGRGRGRSSEQRAQYPGGRAYNSGGRRF

SEQ ID NO: 11168 - protein, 277 aa, Zea mays subsp. mays
  peptide (1)..(277): Ceres Seq. ID no. 12411945
MVAAQLHHYQAQQRVQKHPENSYTGRDPAQASAEHQYTPPKARQSQWDRGGPNAPSQVPSYAYNEAQGAGGAQSFYDGQRSDTKVGLEKQPSKESREQPRTERTETRYENYNLPRTFEGLEQSFHEDIILLSKELQEAEDAENSRHMERLKDINTQYQEKLLALRARQANYRDEFLRKESLARQQQYQHASMSHYASNSTAGEQHGYNPTAAGTPPVAAGGAYGEAHRGYASGQYESFSDRPDYPEFHDGGRGRGRSSEQRAQYPGGRAYNSGGRRF

SEQ ID NO: 11169 - DNA, 1362 bp, Zea mays subsp. mays
  misc_feature (1)..(1362): Ceres Seq. ID no. 12374139
  misc_feature (1)..(1362): Ortholog of  Ceres SEQ ID NO 14307265 as cited in SEQ ID NO 54298
gatcctatcgcatcgaatcgaaactgttccgctcccactccgatcggattcggtgggacggtggcatctatgcgcccgtcgcaccgtcgctcaaactgtataaacctgcgcccgaacacttcgagctcacccgcaacctcctccgggaagcgcgatcgccgtctcgaaggagctgaaatccaagattccaagctcttctgtcacaggttgagggaagttgaagcaaaagtctaagcaaaaatgttttacgggggatatgcttaccatggcaactcgtttgagcaaacataccgttgttatccagcatcgttttttgataagccacacctggaaggcggtgataaagtaataatgccaccttctgcccttgatcgtcttgcttccttgcacatcgagtaccctatgctatttgagctgcacaatgatgcaacccagcggatttcacactgtggtgttttggagtttgttgcagaagaaggcatgatcatcatgccctattggatgatgcaaaacatgctgcttcaagagggtgacactgtccatgtaaaaaatgcgactcttcccaagggcacatatgtgaaattgcaacctcacacaactgattttctggatatttcaaacccgaaagccatcttggaaaaaactttaagaaatttctcctgcttaaccacgggagacagcatcatggtagcctacaacaacaaacaatattatattgatattgttgaaacaaagcctgcttctgcggttagcattattgagacagactgtgaagtggactttgcgcctcctcttgattataaagaacctgagaaaccacgacaaccaacagttcctgcaagcaaggcacctgctgaagatggcaacactgcagtggaggatgaaccaaaattcaaaccatttactggttttggaaagcggttggatggaaaagcctcaaaactgcaagcatcagaggttccttccactgcactttctgcaccttcagattcaaacaaaagagcaaatcagcaaatctcagcacccgcagcttcaggagctagcaattacagtcgacagaaaactgggaaacttgtttttggttcaagtgcaagcaacaataaggaaccacaaaaggctcctgctaaagaggagcaacccgcaaagaaggacgacgagctgaggttccaagcgttcagcgggaagagctactcattgaaacgttagctgcttcagttaaccttcaaattcgccgctactctttcgtttcgtgcatggtgggtgttctggcacctggtcaccaccatgtagatatgaattgaagtatgtatatgcttatcttgatggaaacatgacagtctgtttatttaagcccaaaagttc

SEQ ID NO: 11170 - protein, 321 aa, Zea mays subsp. mays
  peptide (1)..(321): Ceres Seq. ID no. 12374140
MFYGGYAYHGNSFEQTYRCYPASFFDKPHLEGGDKVIMPPSALDRLASLHIEYPMLFELHNDATQRISHCGVLEFVAEEGMIIMPYWMMQNMLLQEGDTVHVKNATLPKGTYVKLQPHTTDFLDISNPKAILEKTLRNFSCLTTGDSIMVAYNNKQYYIDIVETKPASAVSIIETDCEVDFAPPLDYKEPEKPRQPTVPASKAPAEDGNTAVEDEPKFKPFTGFGKRLDGKASKLQASEVPSTALSAPSDSNKRANQQISAPAASGASNYSRQKTGKLVFGSSASNNKEPQKAPAKEEQPAKKDDELRFQAFSGKSYSLKR

SEQ ID NO: 11171 - protein, 284 aa, Zea mays subsp. mays
  peptide (1)..(284): Ceres Seq. ID no. 12374141
MPPSALDRLASLHIEYPMLFELHNDATQRISHCGVLEFVAEEGMIIMPYWMMQNMLLQEGDTVHVKNATLPKGTYVKLQPHTTDFLDISNPKAILEKTLRNFSCLTTGDSIMVAYNNKQYYIDIVETKPASAVSIIETDCEVDFAPPLDYKEPEKPRQPTVPASKAPAEDGNTAVEDEPKFKPFTGFGKRLDGKASKLQASEVPSTALSAPSDSNKRANQQISAPAASGASNYSRQKTGKLVFGSSASNNKEPQKAPAKEEQPAKKDDELRFQAFSGKSYSLKR

SEQ ID NO: 11172 - protein, 267 aa, Zea mays subsp. mays
  peptide (1)..(267): Ceres Seq. ID no. 12374142
MLFELHNDATQRISHCGVLEFVAEEGMIIMPYWMMQNMLLQEGDTVHVKNATLPKGTYVKLQPHTTDFLDISNPKAILEKTLRNFSCLTTGDSIMVAYNNKQYYIDIVETKPASAVSIIETDCEVDFAPPLDYKEPEKPRQPTVPASKAPAEDGNTAVEDEPKFKPFTGFGKRLDGKASKLQASEVPSTALSAPSDSNKRANQQISAPAASGASNYSRQKTGKLVFGSSASNNKEPQKAPAKEEQPAKKDDELRFQAFSGKSYSLKR

SEQ ID NO: 11173 - DNA, 1710 bp, Zea mays subsp. mays
  misc_feature (1)..(1710): Ceres Seq. ID no. 12413551
  misc_feature (1)..(1710): Ortholog of  Ceres SEQ ID NO 15172495 as cited in SEQ ID NO 60316
tgaataccagtatccgcagtgtaaaagcttcattttattacaaaaaaaaaatcttcgtcctccccgcgaagacgcttcccgagcttctccttcgttcctcctcttccccgcggctctcctctgccccgcaccggcaccgctagggttttgccgccgacctctcgctcgcttccgggctccgcgaggcaaccgtccggaccggccggtcgaaatggtggatgtggaggaggtcgggaacaagatgcaatcgcagatgcgcctgcacgcggaccggatgacgccgccgccgacctccccctcccggcgctcttcgacagggcgtcgcggcttcacgccctggcctccagctccgccctcgaccaggatgggatccgcaccggggttgagctgctgcggacgctgcgacgagatggtcggcaggctcggtcttttctcccccaacgagaccaaggacgacgtctccaccgcaaacctcaagtacctactcgtcccatattaccttgcggaaatgaccgagaagatggcgcaggaggatcggatcccggttcttaaggcgtcgcaggaccatttgaaggagttcattgctctatgcgaagtactagagcttattccagaggatgagctagaattgtctaggcagaagcagtctgatactatggcaaacagaagagcacagaaggttgcccggttcaaacgtcaaaaggctgcagaaacaaagctccaagagatcagagagagaaaagaaaggcgtggacgctcattgagagcaactgctttgtctgccccagttgaagctggagaggaagatgacctggaggatgacggggaggaagaaagggaggcttggttagctaccatctcattggctatctgcaaggcttttgatcttctcgacatgttaaagaaggaagaagaaatgcttctagctgtaaaggaaaggaaggcaaaggacgggaatgcatttgctcgtgaaatgctcgacgaacggacaaagaaggctgaagcatggcaccacaaagctgccagtcgtgtggcgtattccaaaccagccgatccgatcacctgtgcaacatttgctcaggatgtcattgaagggagagcgagcgtttcacaggcccacgagcacaaacaccagcccctgatatttggacctgcaagccttgttggcggcggtctgaccagtgaaagggaaagaatggcagcgcaagtttttcagcccagttacaggatgccaacaatgagcatagaagaggctggcttgcgcgagatgaagatgatggagagntggcaagagaggaccnccgagatgatgagagaagcaaactccgcntggcacaagggcggcgacagcagcagcagctcgatnccgcaaggggaggncggggacgaggatgccgaggaggccaaggcacgagcgtgggacgactggaaggacgacaaccctcgcggcgctggcaacaagaagctcacgccctgtggctagactgcaaatcgaagcacgctcgctgtgtgatcgtacggtgtttgactcgaccagtatttagtttgtatctgacgatcagtgtatttattatataggctgcttctgtaacagtgtgtttatacaccatccactgcagcttcttcacacaggtgtttccgaagttaactgggttagacaaactgtgttgtccaagcaagagtatctaacaaatagctacgtaactactt

SEQ ID NO: 11174 - protein, 493 aa, Zea mays subsp. mays
  peptide (1)..(493): Ceres Seq. ID no. 12413552
  misc_feature (428)..(428): Xaa is any aa, unknown or other
  misc_feature (434)..(434): Xaa is any aa, unknown or other
  misc_feature (443)..(443): Xaa is any aa, unknown or other
  misc_feature (455)..(455): Xaa is any aa, unknown or other
  misc_feature (460)..(460): Xaa is any aa, unknown or other
EYQYPQCKSFILLQKKNLRPPREDASRASPSFLLFPAALLCPAPAPLGFCRRPLARFRAPRGNRPDRPVEMVDVEEVGNKMQSQMRLHADRMTPPPTSPSRRSSTGRRGFTPWPPAPPSTRMGSAPGLSCCGRCDEMVGRLGLFSPNETKDDVSTANLKYLLVPYYLAEMTEKMAQEDRIPVLKASQDHLKEFIALCEVLELIPEDELELSRQKQSDTMANRRAQKVARFKRQKAAETKLQEIRERKERRGRSLRATALSAPVEAGEEDDLEDDGEEEREAWLATISLAICKAFDLLDMLKKEEEMLLAVKERKAKDGNAFAREMLDERTKKAEAWHHKAASRVAYSKPADPITCATFAQDVIEGRASVSQAHEHKHQPLIFGPASLVGGGLTSERERMAAQVFQPSYRMPTMSIEEAGLREMKMMEXWQERTXEMMREANSXWHKGGDSSSSSXPQGEXGDEDAEEAKARAWDDWKDDNPRGAGNKKLTPCG

SEQ ID NO: 11175 - protein, 423 aa, Zea mays subsp. mays
  peptide (1)..(423): Ceres Seq. ID no. 12413553
  misc_feature (358)..(358): Xaa is any aa, unknown or other
  misc_feature (364)..(364): Xaa is any aa, unknown or other
  misc_feature (373)..(373): Xaa is any aa, unknown or other
  misc_feature (385)..(385): Xaa is any aa, unknown or other
  misc_feature (390)..(390): Xaa is any aa, unknown or other
MVDVEEVGNKMQSQMRLHADRMTPPPTSPSRRSSTGRRGFTPWPPAPPSTRMGSAPGLSCCGRCDEMVGRLGLFSPNETKDDVSTANLKYLLVPYYLAEMTEKMAQEDRIPVLKASQDHLKEFIALCEVLELIPEDELELSRQKQSDTMANRRAQKVARFKRQKAAETKLQEIRERKERRGRSLRATALSAPVEAGEEDDLEDDGEEEREAWLATISLAICKAFDLLDMLKKEEEMLLAVKERKAKDGNAFAREMLDERTKKAEAWHHKAASRVAYSKPADPITCATFAQDVIEGRASVSQAHEHKHQPLIFGPASLVGGGLTSERERMAAQVFQPSYRMPTMSIEEAGLREMKMMEXWQERTXEMMREANSXWHKGGDSSSSSXPQGEXGDEDAEEAKARAWDDWKDDNPRGAGNKKLTPCG

SEQ ID NO: 11176 - protein, 413 aa, Zea mays subsp. mays
  peptide (1)..(413): Ceres Seq. ID no. 12413554
  misc_feature (348)..(348): Xaa is any aa, unknown or other
  misc_feature (354)..(354): Xaa is any aa, unknown or other
  misc_feature (363)..(363): Xaa is any aa, unknown or other
  misc_feature (375)..(375): Xaa is any aa, unknown or other
  misc_feature (380)..(380): Xaa is any aa, unknown or other
MQSQMRLHADRMTPPPTSPSRRSSTGRRGFTPWPPAPPSTRMGSAPGLSCCGRCDEMVGRLGLFSPNETKDDVSTANLKYLLVPYYLAEMTEKMAQEDRIPVLKASQDHLKEFIALCEVLELIPEDELELSRQKQSDTMANRRAQKVARFKRQKAAETKLQEIRERKERRGRSLRATALSAPVEAGEEDDLEDDGEEEREAWLATISLAICKAFDLLDMLKKEEEMLLAVKERKAKDGNAFAREMLDERTKKAEAWHHKAASRVAYSKPADPITCATFAQDVIEGRASVSQAHEHKHQPLIFGPASLVGGGLTSERERMAAQVFQPSYRMPTMSIEEAGLREMKMMEXWQERTXEMMREANSXWHKGGDSSSSSXPQGEXGDEDAEEAKARAWDDWKDDNPRGAGNKKLTPCG

SEQ ID NO: 11177 - DNA, 1140 bp, Zea mays subsp. mays
  misc_feature (1)..(1140): Ceres Seq. ID no. 12411938
  misc_feature (1)..(1140): Ortholog of  Ceres SEQ ID NO 14314112 as cited in SEQ ID NO 63188
  misc_feature (1)..(1140): Ortholog of  Ceres SEQ ID NO 12625870 as cited in SEQ ID NO 64640
gcccgtcctctcggtctccgaccacgactgtgcgccttcctaagtaaccctagctcggcgccctccctccgcgacatccaagcccggcaatctcatcgtcgcgcttgcaccgttacgcagtgcgacctctgcgtcttcgaatccaggtctctgcaggaaggtagagaggaggaggaggtttgtggcaggatttaaccagcccaatggttccatccgagatggggagcgtcgccaccgccgtcagcacgcctgctgcggacaagctgctccatgggcctatctctggcaagaagtgcaagaaaccaggcccgaggaagattcataaggctgagagggagaagcttaaacgagaccacctaaatgatctctttgttgagctgggtaatatgctagaagcagatagacagaacaatgggaaagcatgcatactgactgacactactcggatactaagagacctgcttgttcaagtagactctcttcgaaaggaacatagcgacctacaaaacgaatctcattatgtaacaatggagagggatgagatgcaggatgaaaacggcgtgctccgcaaagaaatttcagagcttcaaaacgagttgacaatgcgggtttcaggcagtccagcaggttggggccatggcaccgccagatcagatccccctcttcctcactcaaccgcagtgttctcgtcggagcaggcgatgcaaccacccaccattgcaagcgttgtattcccgttgcagcagccactggcaccatcagcaatgaccaaaccacctcatgctgcaccaccactcgaactgaagctctttccagaagtggcatttgccgaaggccatgagccgtgtgaagaccacaaagctcccaaccatgtggcacgaccacaggcaaggtacccaacgcaatcagcctcatggcccgtaaacctgttctctggccttccacgaatggaagatgagcaatgcagtagcagcacaagcggcagcagcagagaggataacacagatatagaatgagtggatcagctcctacaatcaaagagtctctgttttgagtctagtggatgtaaatttgaatctcctttttggatttcagaacgatagattatactctgttggaaataggacccctcccattgct

SEQ ID NO: 11178 - protein, 270 aa, Zea mays subsp. mays
  peptide (1)..(270): Ceres Seq. ID no. 12411939
MVPSEMGSVATAVSTPAADKLLHGPISGKKCKKPGPRKIHKAEREKLKRDHLNDLFVELGNMLEADRQNNGKACILTDTTRILRDLLVQVDSLRKEHSDLQNESHYVTMERDEMQDENGVLRKEISELQNELTMRVSGSPAGWGHGTARSDPPLPHSTAVFSSEQAMQPPTIASVVFPLQQPLAPSAMTKPPHAAPPLELKLFPEVAFAEGHEPCEDHKAPNHVARPQARYPTQSASWPVNLFSGLPRMEDEQCSSSTSGSSREDNTDIE

SEQ ID NO: 11179 - protein, 265 aa, Zea mays subsp. mays
  peptide (1)..(265): Ceres Seq. ID no. 12411940
MGSVATAVSTPAADKLLHGPISGKKCKKPGPRKIHKAEREKLKRDHLNDLFVELGNMLEADRQNNGKACILTDTTRILRDLLVQVDSLRKEHSDLQNESHYVTMERDEMQDENGVLRKEISELQNELTMRVSGSPAGWGHGTARSDPPLPHSTAVFSSEQAMQPPTIASVVFPLQQPLAPSAMTKPPHAAPPLELKLFPEVAFAEGHEPCEDHKAPNHVARPQARYPTQSASWPVNLFSGLPRMEDEQCSSSTSGSSREDNTDIE

SEQ ID NO: 11180 - protein, 209 aa, Zea mays subsp. mays
  peptide (1)..(209): Ceres Seq. ID no. 12411941
MLEADRQNNGKACILTDTTRILRDLLVQVDSLRKEHSDLQNESHYVTMERDEMQDENGVLRKEISELQNELTMRVSGSPAGWGHGTARSDPPLPHSTAVFSSEQAMQPPTIASVVFPLQQPLAPSAMTKPPHAAPPLELKLFPEVAFAEGHEPCEDHKAPNHVARPQARYPTQSASWPVNLFSGLPRMEDEQCSSSTSGSSREDNTDIE

SEQ ID NO: 11181 - DNA, 1762 bp, Zea mays subsp. mays
  misc_feature (1)..(1762): Ceres Seq. ID no. 12411934
  misc_feature (1)..(1762): Ortholog of  Ceres SEQ ID NO 13596299 as cited in SEQ ID NO 68023
actgacaaaaccctggctcgttccccgctctacaggcctaaacctcacctcgccggcggccaaaaatcgaagcaccgaaccagcggctgcggcagcggcggcggcgcggcaagggttgaccatggcggagctaaagcggttgtcggagagccgtgacctgacgcggattgagcgcatcggtgcgcactcccacatccgggggctagggttggactcgtccatggaggcgcgcgatacctcggagggcatggtcgggcagctccacgcgcgccgcgcctcggggctcatactccagctcatccgccagggcaagattgccggccgcgctgtgctccttgcgggccagcccggcaccggcaagaccgcgctcgccatgggtatcgccaagtcgcttggtgcggagacacccttcgcctccgtcgctgcctcggagctcttctcgctcgacctctccaagacggaggctctgacgcaggccttccgccgcgccataggcgtccgcatcaaggaggaggccgagatcattgagggcgaggtcgtggagatctcaatcgaccgccctttgtcggcctctggcgttggcggcagctcagttgctccttctggtgcaactgctgctggtaagtcagggcggctcacgctgaagaccacggacatggagactgtgtacgagctcgggggaaagatgattgaggctcttgggaaggagaaggtgcagagtggagatgtgattgcgcttgacaaggcctccgggaaggtcaccaagcttggccgctccattgggaggtcgcgggattatgatgccgtaggtccacacaccaagtttgtcaagtgtcctgatggtgagctccagaagcgcaaggaggtcgtgcactgtgtcaccttacatgagattgatgtcatcaatagcaggacacagggttttcttgcactgttcactggtgacactggtgaaattcgtgcagaggttcgggagcagattgacacaaaggttgcagagtggagagaggaaggaaaagctgatattgtccctggtgttctgttcatcgatgaagtccacatgctagacatcgagtgcttctccttcctcaaccgcgcattggaaaacgacatggcgccgatcttagtaatcgcaacaaaccgagggatcacgtctatccgtgggacaaactaccgctcgccgcatgggatcccgccagacttccttgaccggctactgattatcacgacgcatccctacacggaggatgagatccggaagatcctggatatccggtgcgacgaggaagacgtggagatgtccgcggacgctaaggttctgctcaccaagatcggtgtggagacctctctgcggtatgccatcaaccttatcacatctgccgcgctagcctgccagaggcgcaaggggaaggtggtcgagatggaggacattagccgggtgtaccagctgttcctggacgtgaagcgatcgacgcagtacctgatggagtaccagagccagtacatgttcaacgaagtgccggggcaagcagatggagaggacgccatgcaatcgtagatgaactttcctttacatggtgtgtgtgggttatagtatgtaccgcgtggcgtatatttatgatgcgtctttcttgttcaggttgctgttaccctgacccaaggcgcggtgtgtgcggtggactgtttgttagcttgatgtaggtgactatgcaactcaatctatcttattaaattcaccccggttggaaaccgtggtttgttt

SEQ ID NO: 11182 - protein, 518 aa, Zea mays subsp. mays
  peptide (1)..(518): Ceres Seq. ID no. 12411935
LTKPWLVPRSTGLNLTSPAAKNRSTEPAAAAAAAARQGLTMAELKRLSESRDLTRIERIGAHSHIRGLGLDSSMEARDTSEGMVGQLHARRASGLILQLIRQGKIAGRAVLLAGQPGTGKTALAMGIAKSLGAETPFASVAASELFSLDLSKTEALTQAFRRAIGVRIKEEAEIIEGEVVEISIDRPLSASGVGGSSVAPSGATAAGKSGRLTLKTTDMETVYELGGKMIEALGKEKVQSGDVIALDKASGKVTKLGRSIGRSRDYDAVGPHTKFVKCPDGELQKRKEVVHCVTLHEIDVINSRTQGFLALFTGDTGEIRAEVREQIDTKVAEWREEGKADIVPGVLFIDEVHMLDIECFSFLNRALENDMAPILVIATNRGITSIRGTNYRSPHGIPPDFLDRLLIITTHPYTEDEIRKILDIRCDEEDVEMSADAKVLLTKIGVETSLRYAINLITSAALACQRRKGKVVEMEDISRVYQLFLDVKRSTQYLMEYQSQYMFNEVPGQADGEDAMQS

SEQ ID NO: 11183 - protein, 478 aa, Zea mays subsp. mays
  peptide (1)..(478): Ceres Seq. ID no. 12411936
MAELKRLSESRDLTRIERIGAHSHIRGLGLDSSMEARDTSEGMVGQLHARRASGLILQLIRQGKIAGRAVLLAGQPGTGKTALAMGIAKSLGAETPFASVAASELFSLDLSKTEALTQAFRRAIGVRIKEEAEIIEGEVVEISIDRPLSASGVGGSSVAPSGATAAGKSGRLTLKTTDMETVYELGGKMIEALGKEKVQSGDVIALDKASGKVTKLGRSIGRSRDYDAVGPHTKFVKCPDGELQKRKEVVHCVTLHEIDVINSRTQGFLALFTGDTGEIRAEVREQIDTKVAEWREEGKADIVPGVLFIDEVHMLDIECFSFLNRALENDMAPILVIATNRGITSIRGTNYRSPHGIPPDFLDRLLIITTHPYTEDEIRKILDIRCDEEDVEMSADAKVLLTKIGVETSLRYAINLITSAALACQRRKGKVVEMEDISRVYQLFLDVKRSTQYLMEYQSQYMFNEVPGQADGEDAMQS

SEQ ID NO: 11184 - protein, 445 aa, Zea mays subsp. mays
  peptide (1)..(445): Ceres Seq. ID no. 12411937
MEARDTSEGMVGQLHARRASGLILQLIRQGKIAGRAVLLAGQPGTGKTALAMGIAKSLGAETPFASVAASELFSLDLSKTEALTQAFRRAIGVRIKEEAEIIEGEVVEISIDRPLSASGVGGSSVAPSGATAAGKSGRLTLKTTDMETVYELGGKMIEALGKEKVQSGDVIALDKASGKVTKLGRSIGRSRDYDAVGPHTKFVKCPDGELQKRKEVVHCVTLHEIDVINSRTQGFLALFTGDTGEIRAEVREQIDTKVAEWREEGKADIVPGVLFIDEVHMLDIECFSFLNRALENDMAPILVIATNRGITSIRGTNYRSPHGIPPDFLDRLLIITTHPYTEDEIRKILDIRCDEEDVEMSADAKVLLTKIGVETSLRYAINLITSAALACQRRKGKVVEMEDISRVYQLFLDVKRSTQYLMEYQSQYMFNEVPGQADGEDAMQS

SEQ ID NO: 11185 - DNA, 1072 bp, Zea mays subsp. mays; identical to SEQ ID NO: 10515
  misc_feature (1)..(1072): Ceres Seq. ID no. 12340576
  misc_feature (1)..(1072): Ortholog of  Ceres SEQ ID NO 14304202 as cited in SEQ ID NO 56346
  misc_feature (1)..(1072): Ortholog of  Ceres SEQ ID NO 14304159 as cited in SEQ ID NO 56494
  misc_feature (1)..(1072): Ortholog of  Ceres SEQ ID NO 12613472 as cited in SEQ ID NO 60611
  misc_feature (1)..(1072): Ortholog of  Ceres SEQ ID NO 12623915 as cited in SEQ ID NO 61013

SEQ ID NO: 11186 - protein, 237 aa, Zea mays subsp. mays; identical to SEQ ID NO: 10516
  peptide (1)..(237): Ceres Seq. ID no. 12340577

SEQ ID NO: 11187 - protein, 194 aa, Zea mays subsp. mays; identical to SEQ ID NO: 10517
  peptide (1)..(194): Ceres Seq. ID no. 12340578

SEQ ID NO: 11188 - protein, 139 aa, Zea mays subsp. mays; identical to SEQ ID NO: 10518
  peptide (1)..(139): Ceres Seq. ID no. 12340579

SEQ ID NO: 11189 - DNA, 600 bp, Zea mays subsp. mays
  misc_feature (1)..(600): Ceres Seq. ID no. 12594988
  misc_feature (1)..(600): Ortholog of  Ceres SEQ ID NO 12329459 as cited in SEQ ID NO 20533
ctaatcgaaaaacctcagcactagtctcctcttcgcacgagcgcaacaccatccacccaccagttcgaagcggaggcgaccggcaacctgcggcggagatgtcaggcaggggcaagggcggcaaggggctcgggaagggcggcgcgaagcgtcaccggaaggtgctgcgcgacaacatccaggggatcacgaagccggcgatccggaggccgaggaggggtggcgtgaagcgcatctccgggctgatctacgaggagacccgcggcgtgctcaagatctttctcgagaatgtcatccgcgacgctgtgacctacacggagcacgcccgtcgcaaaaccgtcaccgctatggacgtcgtgtacgccctcaaacgccagggccgcactctctatggcttcggcggctaggttaggtgtgggtaattgcctgtccaggtgtctcggatctgtggtactagtttggctgccttcctgtgttcgtattgtagtagttgtggtagctggttgctttgtcgtcctgtagtcgtgcttctttgggtctgtaagaaccgctggttcgatgggattggattggacggtgaagtaggaatgttggcatgct

SEQ ID NO: 11190 - protein, 134 aa, Zea mays subsp. mays
  peptide (1)..(134): Ceres Seq. ID no. 12594989
NRKTSALVSSSHERNTIHPPVRSGGDRQPAAEMSGRGKGGKGLGKGGAKRHRKVLRDNIQGITKPAIRRPRRGGVKRISGLIYEETRGVLKIFLENVIRDAVTYTEHARRKTVTAMDVVYALKRQGRTLYGFGG

SEQ ID NO: 11191 - protein, 102 aa, Zea mays subsp. mays
  peptide (1)..(102): Ceres Seq. ID no. 12594990
MSGRGKGGKGLGKGGAKRHRKVLRDNIQGITKPAIRRPRRGGVKRISGLIYEETRGVLKIFLENVIRDAVTYTEHARRKTVTAMDVVYALKRQGRTLYGFGG

SEQ ID NO: 11192 - DNA, 886 bp, Zea mays subsp. mays
  misc_feature (1)..(886): Ceres Seq. ID no. 12413697
  misc_feature (1)..(886): Ortholog of  Ceres SEQ ID NO 15168904 as cited in SEQ ID NO 20611
  misc_feature (1)..(886): Ortholog of  Ceres SEQ ID NO 15172900 as cited in SEQ ID NO 51859
ataaataacttatgaggccaaactaaagagggcagggcaggcgaatcgaaggaaaagtagtcaggagaggcgtttccctcgcaatcgaccatcacagatcaaatcgctgcaactagctagggtttcgtcgcctcatctctcgtcgatccatcgatggcgtccgagggcgaaaacaagaggatgatcacgctcaggagctccgacttagaggagttcgaggtggaggaagcggtggccatggagtcgcagactctccgccacatgatcgaggacgactgcgccgacaacggcatcccgctccccaacgtcaactccaggatcctctctaaggtcatcgagtactgcaacagtcacgtccacgccgccgccaaacccgctgactccgctgcctccgagggcggcgaggacctcaagagctgggacgcgaagttcgtcaaggtggaccaggctacgctcttcgacctcatcctggctgccaactatctgaacatcaagggattgctggacctgacctgccagacggttgctgacatgatcaagggcaagactccggaggagatccgcaagacattcagcatcaagaacgacttcacccaagaggaggaggatgagatccgcatggagaaccagtgggccttcgagtgattgttgtcttcctttccctggtgatggtggtggttcttttacaagaacagatggatgtctgcactgcactctacaatgctagtctatctacttacgaaatagtagtgaaatagtagtataatggtcgtgatggttgtatccttttttggattggatgtatgtcaagctggtgggtgctagttcgtctgtctggacttgttactagttaatatctcataatacatatataaaagtggatctt

SEQ ID NO: 11193 - protein, 163 aa, Zea mays subsp. mays
  peptide (1)..(163): Ceres Seq. ID no. 12413698
MASEGENKRMITLRSSDLEEFEVEEAVAMESQTLRHMIEDDCADNGIPLPNVNSRILSKVIEYCNSHVHAAAKPADSAASEGGEDLKSWDAKFVKVDQATLFDLILAANYLNIKGLLDLTCQTVADMIKGKTPEEIRKTFSIKNDFTQEEEDEIRMENQWAFE

SEQ ID NO: 11194 - protein, 154 aa, Zea mays subsp. mays
  peptide (1)..(154): Ceres Seq. ID no. 12413699
MITLRSSDLEEFEVEEAVAMESQTLRHMIEDDCADNGIPLPNVNSRILSKVIEYCNSHVHAAAKPADSAASEGGEDLKSWDAKFVKVDQATLFDLILAANYLNIKGLLDLTCQTVADMIKGKTPEEIRKTFSIKNDFTQEEEDEIRMENQWAFE

SEQ ID NO: 11195 - protein, 135 aa, Zea mays subsp. mays
  peptide (1)..(135): Ceres Seq. ID no. 12413700
MESQTLRHMIEDDCADNGIPLPNVNSRILSKVIEYCNSHVHAAAKPADSAASEGGEDLKSWDAKFVKVDQATLFDLILAANYLNIKGLLDLTCQTVADMIKGKTPEEIRKTFSIKNDFTQEEEDEIRMENQWAFE

SEQ ID NO: 11196 - DNA, 1103 bp, Zea mays subsp. mays
  misc_feature (1)..(1103): Ceres Seq. ID no. 12345090
  misc_feature (1)..(1103): Ortholog of  Ceres SEQ ID NO 14313893 as cited in SEQ ID NO 54646
  misc_feature (1)..(1103): Ortholog of  Ceres SEQ ID NO 13656797 as cited in SEQ ID NO 65756
  misc_feature (1)..(1103): Ortholog of  Ceres SEQ ID NO 13658498 as cited in SEQ ID NO 66557
  misc_feature (1)..(1103): Ortholog of  Ceres SEQ ID NO 15227053 as cited in SEQ ID NO 0
atgcatactctatcaactaacattgcgctgcattgcattgcaggccccgccgtctccgtggggcgacctggaggaggtgctggcgcgcgcggcgaccaaggaccgcacggtgatcatgacgcagatcaacgcggcgtggacgcgcccgggctcgctgctggacctcttcttcgagagcttccgcacgggggaaggcggcgtggcgcgcctcctggaccacctggtcatcgtcaccatggacccggccgcctacgagggctgcagggccgtgcacagccactgctacttcctccgcacgggcaacgccgtcgactaccgatcagagaaggtgttcatgagcaaggactacctggagatgatgtggggacgcaaccgcttccagcagacggtgctggagctgggatacaacttcctattcacggacgttgacgtgatgtggttccgcgacccgttccgccacatctccatggcggcggacatcgccatctccagcgacgtgtacatgggcgacccctacagcctgcgcaacttccccaacggcggcttcctcttcgtgcgggcgtcggacaagacggtcgccttctaccgggcgtggcagcaggggcggtggcgcttcctggggaagcacgagcaggacgtgttcaacctcatcaagcacgaggaggcgcccaggctggacctcgccatccagttcctcgacacagcctacatcagcggcttctgccagctcagcaaggacctcaacaggatctgcacgctccacgccaactgctgcgtcggcctcggcgccaagctccacgacctccgcggggtcctcgacgtctggaggaactacaccgccggcacacccgaggagcgacgcgcgggaaagttccagtggaagctaccgggcatctgcatccactgatatccattctttctcagccggcctctcgcctccttggtagtaaaagatccattcttttgattccatcatcaacaaattaaaggttatatatatactagtaacagatagttagaatttcatagctataagtatacagtagcagtatatgtttgtaatatatctgcacctgcaaatcaatttcattgtcggtaacccc

SEQ ID NO: 11197 - protein, 301 aa, Zea mays subsp. mays
  peptide (1)..(301): Ceres Seq. ID no. 12345091
CILYQLTLRCIALQAPPSPWGDLEEVLARAATKDRTVIMTQINAAWTRPGSLLDLFFESFRTGEGGVARLLDHLVIVTMDPAAYEGCRAVHSHCYFLRTGNAVDYRSEKVFMSKDYLEMMWGRNRFQQTVLELGYNFLFTDVDVMWFRDPFRHISMAADIAISSDVYMGDPYSLRNFPNGGFLFVRASDKTVAFYRAWQQGRWRFLGKHEQDVFNLIKHEEAPRLDLAIQFLDTAYISGFCQLSKDLNRICTLHANCCVGLGAKLHDLRGVLDVWRNYTAGTPEERRAGKFQWKLPGICIH

SEQ ID NO: 11198 - protein, 263 aa, Zea mays subsp. mays
  peptide (1)..(263): Ceres Seq. ID no. 12345092
MTQINAAWTRPGSLLDLFFESFRTGEGGVARLLDHLVIVTMDPAAYEGCRAVHSHCYFLRTGNAVDYRSEKVFMSKDYLEMMWGRNRFQQTVLELGYNFLFTDVDVMWFRDPFRHISMAADIAISSDVYMGDPYSLRNFPNGGFLFVRASDKTVAFYRAWQQGRWRFLGKHEQDVFNLIKHEEAPRLDLAIQFLDTAYISGFCQLSKDLNRICTLHANCCVGLGAKLHDLRGVLDVWRNYTAGTPEERRAGKFQWKLPGICIH

SEQ ID NO: 11199 - protein, 223 aa, Zea mays subsp. mays
  peptide (1)..(223): Ceres Seq. ID no. 12345093
MDPAAYEGCRAVHSHCYFLRTGNAVDYRSEKVFMSKDYLEMMWGRNRFQQTVLELGYNFLFTDVDVMWFRDPFRHISMAADIAISSDVYMGDPYSLRNFPNGGFLFVRASDKTVAFYRAWQQGRWRFLGKHEQDVFNLIKHEEAPRLDLAIQFLDTAYISGFCQLSKDLNRICTLHANCCVGLGAKLHDLRGVLDVWRNYTAGTPEERRAGKFQWKLPGICIH

SEQ ID NO: 11200 - DNA, 1714 bp, Zea mays subsp. mays
  misc_feature (1)..(1714): Ceres Seq. ID no. 12341046
  misc_feature (1)..(1714): Ortholog of  Ceres SEQ ID NO 15177750 as cited in SEQ ID NO 57772
  misc_feature (1)..(1714): Ortholog of  Ceres SEQ ID NO 13596581 as cited in SEQ ID NO 62420
  misc_feature (1)..(1714): Ortholog of  Ceres SEQ ID NO 13591273 as cited in SEQ ID NO 65904
  misc_feature (1)..(1714): Ortholog of  Ceres SEQ ID NO 13623086 as cited in SEQ ID NO 0
aggcggccaaaccgcaccctccttcccgtcgtttcccatctcttcctcctttagagctaccactatataaatcagggctcattttctcgctcctcacaggctcatctcgctttggatcgattggtttcgtaactggtgaaggactgagggtctcggagtggatcgatttgggattctgttcgaagatttgcggaggggggcaatggcgaccgcggggaaggtgatcaagtgcaaagctgcggtggcatgggaggccggcaagccactgtcgatcgaggaggtggaggtagcgcctccgcaggccatggaggtgcgcgtcaagatcctcttcacctcgctctgccacaccgacgtctacttctgggaggccaaggggcagactcccgtgttccctcggatctttggccacgaggctggaggtatcatagagagtgttggagagggtgtgactgacgtagctccgggcgaccatgtccttcctgtgttcactggggagtgcaaggagtgtgcccactgcaagtcggcagagagcaacatgtgtgatctgctcaggatcaacaccgaccgcggtgtgatgattgccgatggcaagtcgcggttttcaatcaatgggaagcctatctaccactttgttgggacttccaccttcagcgagtacaccgtcatgcatgtgggttgtgttgcaaagatcaaccctcaggctccccttgataaagtttgcgtccttagctgtggtatttctaccggtcttggtgcatcaattaatgttgcaaaacctccgaagggttcgacagtggctgttttcggtttaggagccgttggtcttgccgctgcagaaggtgcaaggattgctggagcgtcaaggatcattggtgtcgacctgaaccccagcagattcgaagaagctaggaagttcggttgcactgaatttgtgaacccaaaagaccacaacaagccagtgcaggaggtacttgctgagatgaccaacggaggggtcgaccgcagtgtggaatgcactggcaacattaatgctatgatccaagctttcgaatgtgttcatgatggctggggtgttgctgtgctggtgggtgtgccacataaggacgctgagttcaagacccacccgatgaacttcctgaacgaaaggaccctgaaggggaccttctttggcaactataagccacgcactgatctgccaaatgtggtggagctgtacatgaaaaaggagctggaggtggagaagttcatcacgcacagcgtcccgttcgccgagatcaacaaggcgttcgacctgatggccaagggggagggcatccgctgcatcatccgcatggagaactagatttcgctgtctagtttgtgatctggcctaggcttggggttaataaaggaggcaatgctagcctgccctttcgatgaggaggtacatacacgctggcgatggaccgcgcttgtgtgtcgcgttcagtttggcttttgccaagcactagggtagcttcccgtgtcggtaattatatggtatgaaccatcaccttttggctctacacggtatgaacgtaagatacaaattccaactacctctagctcgcttgtgtggtatctgtatcagtatacatgtgtttgtttgcttatgtgtttgtttgcttgtatttgctggtgtctgtatcgcgggatgcaatgagttgttgtttggttgtgtcaaccaggctcaaat

SEQ ID NO: 11201 - protein, 379 aa, Zea mays subsp. mays
  peptide (1)..(379): Ceres Seq. ID no. 12341047
MATAGKVIKCKAAVAWEAGKPLSIEEVEVAPPQAMEVRVKILFTSLCHTDVYFWEAKGQTPVFPRIFGHEAGGIIESVGEGVTDVAPGDHVLPVFTGECKECAHCKSAESNMCDLLRINTDRGVMIADGKSRFSINGKPIYHFVGTSTFSEYTVMHVGCVAKINPQAPLDKVCVLSCGISTGLGASINVAKPPKGSTVAVFGLGAVGLAAAEGARIAGASRIIGVDLNPSRFEEARKFGCTEFVNPKDHNKPVQEVLAEMTNGGVDRSVECTGNINAMIQAFECVHDGWGVAVLVGVPHKDAEFKTHPMNFLNERTLKGTFFGNYKPRTDLPNVVELYMKKELEVEKFITHSVPFAEINKAFDLMAKGEGIRCIIRMEN

SEQ ID NO: 11202 - protein, 345 aa, Zea mays subsp. mays
  peptide (1)..(345): Ceres Seq. ID no. 12341048
MEVRVKILFTSLCHTDVYFWEAKGQTPVFPRIFGHEAGGIIESVGEGVTDVAPGDHVLPVFTGECKECAHCKSAESNMCDLLRINTDRGVMIADGKSRFSINGKPIYHFVGTSTFSEYTVMHVGCVAKINPQAPLDKVCVLSCGISTGLGASINVAKPPKGSTVAVFGLGAVGLAAAEGARIAGASRIIGVDLNPSRFEEARKFGCTEFVNPKDHNKPVQEVLAEMTNGGVDRSVECTGNINAMIQAFECVHDGWGVAVLVGVPHKDAEFKTHPMNFLNERTLKGTFFGNYKPRTDLPNVVELYMKKELEVEKFITHSVPFAEINKAFDLMAKGEGIRCIIRMEN

SEQ ID NO: 11203 - protein, 268 aa, Zea mays subsp. mays
  peptide (1)..(268): Ceres Seq. ID no. 12341049
MCDLLRINTDRGVMIADGKSRFSINGKPIYHFVGTSTFSEYTVMHVGCVAKINPQAPLDKVCVLSCGISTGLGASINVAKPPKGSTVAVFGLGAVGLAAAEGARIAGASRIIGVDLNPSRFEEARKFGCTEFVNPKDHNKPVQEVLAEMTNGGVDRSVECTGNINAMIQAFECVHDGWGVAVLVGVPHKDAEFKTHPMNFLNERTLKGTFFGNYKPRTDLPNVVELYMKKELEVEKFITHSVPFAEINKAFDLMAKGEGIRCIIRMEN

SEQ ID NO: 11204 - DNA, 1661 bp, Zea mays subsp. mays
  misc_feature (1)..(1661): Ceres Seq. ID no. 12342131
  misc_feature (1)..(1661): Ortholog of  Ceres SEQ ID NO 14307273 as cited in SEQ ID NO 54302
  misc_feature (1)..(1661): Ortholog of  Ceres SEQ ID NO 14315317 as cited in SEQ ID NO 58242
  misc_feature (1)..(1661): Ortholog of  Ceres SEQ ID NO 13655375 as cited in SEQ ID NO 63347
  misc_feature (1)..(1661): Ortholog of  Ceres SEQ ID NO 12626166 as cited in SEQ ID NO 64505
  misc_feature (1)..(1661): Ortholog of  Ceres SEQ ID NO 14301599 as cited in SEQ ID NO 65699
  misc_feature (1)..(1661): Ortholog of  Ceres SEQ ID NO 14301978 as cited in SEQ ID NO 0
  misc_feature (1)..(1661): Ortholog of  Ceres SEQ ID NO 14303290 as cited in SEQ ID NO 0
aacgagcgccaccgccttgatcccgcccgctcctccccagatctcctcgccattgccgccgccctgccaggattcgcgccctactcgcccagatccgaccgcggctctgattttccaactgacgcaggagcggtgggtctgaccgggcgcgacccgtcttctcatgggcgagacagcgtgatccctgcggctcgattgtaaattcgtgatctttcggggcattccttggtttgtctgtcggtgctggtggtgctgcgtttggagggccgcggagatgggcgtcggcggggagaagttccagctggggacggtgggggcgctgagcctctccgtggtgtcctctgtctccattgtcatctgcaacaaggcgctcatgagctccctcggctttaacttcgccactaccttgacgagctggcatctgctggttacattctgctcccttcatgtagcattatggatgaagttctttgagcataagccttttgattcaagaactgtcatgggatttggagtacttaacggaatctccattgggctcctcaacttgagtcttggcttcaactctgttgggttttaccagatgactaagctggcaatcatcccgtgcactgtcattttagagacacttttcttcaggaagaagttcagtcggagtatccagatgtccctttctgtgcttcttcttggtgttggtgttgcaactgtcactgatctgcaactcaatgctgtgggatccatactgtccttgctggcaattatcacgacttgcattgctcaaattatgacaaacactatccagaagaagttcaaggtctcatcaacccaactgctttaccagtcttgcccttaccaatcactgaccctgtttctcattggccccttccttgatggctttttgactaaccaaaatgtctttgcttttaattatacatctcaagttgtgtttttcatcgtcctgtcatgcttgatatctgtttcagtgaacttcagcactttccttgtgatcggaaagacatctcctgttacttaccaagtcctgggccatcttaaaacatgccttgttcttgcttttggttatgttttgcttcacgatccgtttagctggagaaacatacttggaatcctaattgctgtagttggaatggtcttgtattcatacttctgcacagtggagacccagcaaaaaaatgttgaagtctccccacaacaggtgaaagaaagcgaggcaggccctttgatcgcagactctatgagcaaagttgaaaacgggggtggtggtgttgatgacgagcctttgaaggtacccatgtggagctcaaagtactcgcgggagtgaaaaggtcacgatggcatggcaccatacaggattcaatttagtaggcagatagtagggttggaagccaacccagagtgtaatgaacatttcagttacatttttgggcttctttagtgtcgcagtctactagcagttaaaggatctgtttcttggaaggatcctaccttcagggctctcagacctaccttgaaactagacagcaggtattgtatgattgtatctcgatatgctccacatcctcttactgtaacttccaactggtacatggcgtgcctatatccaaagatagacctcattctttttgtatcaagaagatccgggt

SEQ ID NO: 11205 - protein, 354 aa, Zea mays subsp. mays
  peptide (1)..(354): Ceres Seq. ID no. 12342132
MGVGGEKFQLGTVGALSLSVVSSVSIVICNKALMSSLGFNFATTLTSWHLLVTFCSLHVALWMKFFEHKPFDSRTVMGFGVLNGISIGLLNLSLGFNSVGFYQMTKLAIIPCTVILETLFFRKKFSRSIQMSLSVLLLGVGVATVTDLQLNAVGSILSLLAIITTCIAQIMTNTIQKKFKVSSTQLLYQSCPYQSLTLFLIGPFLDGFLTNQNVFAFNYTSQVVFFIVLSCLISVSVNFSTFLVIGKTSPVTYQVLGHLKTCLVLAFGYVLLHDPFSWRNILGILIAVVGMVLYSYFCTVETQQKNVEVSPQQVKESEAGPLIADSMSKVENGGGGVDDEPLKVPMWSSKYSRE

SEQ ID NO: 11206 - protein, 321 aa, Zea mays subsp. mays
  peptide (1)..(321): Ceres Seq. ID no. 12342133
MSSLGFNFATTLTSWHLLVTFCSLHVALWMKFFEHKPFDSRTVMGFGVLNGISIGLLNLSLGFNSVGFYQMTKLAIIPCTVILETLFFRKKFSRSIQMSLSVLLLGVGVATVTDLQLNAVGSILSLLAIITTCIAQIMTNTIQKKFKVSSTQLLYQSCPYQSLTLFLIGPFLDGFLTNQNVFAFNYTSQVVFFIVLSCLISVSVNFSTFLVIGKTSPVTYQVLGHLKTCLVLAFGYVLLHDPFSWRNILGILIAVVGMVLYSYFCTVETQQKNVEVSPQQVKESEAGPLIADSMSKVENGGGGVDDEPLKVPMWSSKYSRE

SEQ ID NO: 11207 - protein, 292 aa, Zea mays subsp. mays
  peptide (1)..(292): Ceres Seq. ID no. 12342134
MKFFEHKPFDSRTVMGFGVLNGISIGLLNLSLGFNSVGFYQMTKLAIIPCTVILETLFFRKKFSRSIQMSLSVLLLGVGVATVTDLQLNAVGSILSLLAIITTCIAQIMTNTIQKKFKVSSTQLLYQSCPYQSLTLFLIGPFLDGFLTNQNVFAFNYTSQVVFFIVLSCLISVSVNFSTFLVIGKTSPVTYQVLGHLKTCLVLAFGYVLLHDPFSWRNILGILIAVVGMVLYSYFCTVETQQKNVEVSPQQVKESEAGPLIADSMSKVENGGGGVDDEPLKVPMWSSKYSRE

SEQ ID NO: 11208 - DNA, 1674 bp, Zea mays subsp. mays; identical to SEQ ID NO: 11135
  misc_feature (1)..(1674): Ceres Seq. ID no. 13573191
  misc_feature (1)..(1674): Ortholog of  Ceres SEQ ID NO 14303487 as cited in SEQ ID NO 54521
  misc_feature (1)..(1674): Ortholog of  Ceres SEQ ID NO 14316302 as cited in SEQ ID NO 55232
  misc_feature (1)..(1674): Ortholog of  Ceres SEQ ID NO 14308274 as cited in SEQ ID NO 55597
  misc_feature (1)..(1674): Ortholog of  Ceres SEQ ID NO 13659710 as cited in SEQ ID NO 60808

SEQ ID NO: 11209 - protein, 300 aa, Zea mays subsp. mays; identical to SEQ ID NO: 11136
  peptide (1)..(300): Ceres Seq. ID no. 13573192

SEQ ID NO: 11210 - protein, 246 aa, Zea mays subsp. mays; identical to SEQ ID NO: 11137
  peptide (1)..(246): Ceres Seq. ID no. 13573193

SEQ ID NO: 11211 - protein, 206 aa, Zea mays subsp. mays; identical to SEQ ID NO: 11138
  peptide (1)..(206): Ceres Seq. ID no. 13573194

SEQ ID NO: 11212 - DNA, 1179 bp, Zea mays subsp. mays
  misc_feature (1)..(1179): Ceres Seq. ID no. 12355619
  misc_feature (1)..(1179): Ortholog of  Ceres SEQ ID NO 13594252 as cited in SEQ ID NO 57528
  misc_feature (1)..(1179): Ortholog of  Ceres SEQ ID NO 14305682 as cited in SEQ ID NO 59267
  misc_feature (1)..(1179): Ortholog of  Ceres SEQ ID NO 14315060 as cited in SEQ ID NO 60039
  misc_feature (1)..(1179): Ortholog of  Ceres SEQ ID NO 13597809 as cited in SEQ ID NO 64598
  misc_feature (1)..(1179): Ortholog of  Ceres SEQ ID NO 14313544 as cited in SEQ ID NO 68424
  misc_feature (1)..(1179): Ortholog of  Ceres SEQ ID NO 12617960 as cited in SEQ ID NO 69051
  misc_feature (1)..(1179): Ortholog of  Ceres SEQ ID NO 13589401 as cited in SEQ ID NO 0
  misc_feature (1)..(1179): Ortholog of  Ceres SEQ ID NO 15179361 as cited in SEQ ID NO 0
gttgagaatcaattgctagtacgatttcttctctcctccaaaccggccaagccaccaaccagcgccccccaccgccgcctttttatttcatccacgctgctcgtgctcgctgcctgcttctcgcgcgatcgtctcggcctctcgggattctagagtggcggccggctctccgcctgttcttgtcgtcgctgctcctttcccaggatgtcggaacgttctgagagcgcaactgaaaagattatgagcagcatcatggataccattgctgacaaccttcctaagcagaagtctgggaaatttgatccaggttcagtctctgacaaagtgaagaataagctgtttggtcgtcagaagaccttgcatggagttctgggtggtggaaaacctgctgatgtgctgttatggaggaacaaaaagatatcatcgagtgttctggctcttgcaacagctatttgggttttctttgagtggctcgactaccacttactgacaattgtttcatttgcccttgttcttggaatggttgtccagtttgtttggtccaacttctcaaacatgctaagcagcggatcccgttctcaggtgccccgagttgaattgcctgatgagttatttgtgaacattgccgttgcaatcggtgcccaaataaacaagttcctgtgcttccttcaggatgtttcttgtgaaagaaacttgaagcattttgtagtggcgatcgcaggactgtgggctgctgcggtgattggaagttggtgcaatttcctgactgtcatatatgtcgggtttgtttgtgttcacacgcttccggtgctctatgagaagtacgaagaccaagtggacgatttcctctacagccttcttggtctgctgcgagatcaatatcagaagctcgaccaaggcgtcttgagcaagattcccaaggggaacatgaaggctaagaagaacgagtagtttagcaggtggtttctcgtgaatgagatcaatatcgttttgacttgtgtcgattattacctaaggcgtgtgtgccattctgaacctggctgctagttcatcgcccgccgggggtttaaactactaagctgcaatgcacaagtaatgaagtgtgctagttcattgcccacacgggtactagttcttcgactcatttaaatttctgatccgatcatttgcgggatattg

SEQ ID NO: 11213 - protein, 248 aa, Zea mays subsp. mays
  peptide (1)..(248): Ceres Seq. ID no. 12355620
MSERSESATEKIMSSIMDTIADNLPKQKSGKFDPGSVSDKVKNKLFGRQKTLHGVLGGGKPADVLLWRNKKISSSVLALATAIWVFFEWLDYHLLTIVSFALVLGMVVQFVWSNFSNMLSSGSRSQVPRVELPDELFVNIAVAIGAQINKFLCFLQDVSCERNLKHFVVAIAGLWAAAVIGSWCNFLTVIYVGFVCVHTLPVLYEKYEDQVDDFLYSLLGLLRDQYQKLDQGVLSKIPKGNMKAKKNE

SEQ ID NO: 11214 - protein, 236 aa, Zea mays subsp. mays
  peptide (1)..(236): Ceres Seq. ID no. 12355621
MSSIMDTIADNLPKQKSGKFDPGSVSDKVKNKLFGRQKTLHGVLGGGKPADVLLWRNKKISSSVLALATAIWVFFEWLDYHLLTIVSFALVLGMVVQFVWSNFSNMLSSGSRSQVPRVELPDELFVNIAVAIGAQINKFLCFLQDVSCERNLKHFVVAIAGLWAAAVIGSWCNFLTVIYVGFVCVHTLPVLYEKYEDQVDDFLYSLLGLLRDQYQKLDQGVLSKIPKGNMKAKKNE

SEQ ID NO: 11215 - protein, 232 aa, Zea mays subsp. mays
  peptide (1)..(232): Ceres Seq. ID no. 12355622
MDTIADNLPKQKSGKFDPGSVSDKVKNKLFGRQKTLHGVLGGGKPADVLLWRNKKISSSVLALATAIWVFFEWLDYHLLTIVSFALVLGMVVQFVWSNFSNMLSSGSRSQVPRVELPDELFVNIAVAIGAQINKFLCFLQDVSCERNLKHFVVAIAGLWAAAVIGSWCNFLTVIYVGFVCVHTLPVLYEKYEDQVDDFLYSLLGLLRDQYQKLDQGVLSKIPKGNMKAKKNE

SEQ ID NO: 11216 - DNA, 1412 bp, Zea mays subsp. mays
  misc_feature (1)..(1412): Ceres Seq. ID no. 12413439
  misc_feature (1)..(1412): Ortholog of  Ceres SEQ ID NO 14315626 as cited in SEQ ID NO 52943
  misc_feature (1)..(1412): Ortholog of  Ceres SEQ ID NO 14302742 as cited in SEQ ID NO 66899
  misc_feature (1)..(1412): Ortholog of  Ceres SEQ ID NO 14313536 as cited in SEQ ID NO 67925
tctcttttccgcccatggtggccgcgccaccaccgccgccgcagtttgccaagcacttcgctgctgggccgcccccgccgccccaagctggtgctgggcgccgcacgccgaccccgccctcgtctggatccggcgggaacgggtgcgaagaaaataaaaccatttgggtcggtgacctccagtactggatggatgaaaactacctacataactgcttcgggcccagcggcgaggtggttacaataaaagttatccgcaataggcaaacaggacagtcagaggggtatggatttgttgagttcttttctcatgcatcaggcagagaaagctcttcagaattttactggtcatgtgatgccaaacactgaccggccatttaaattgaactgggcatcgtatagcatgggtgaaaagcgatctgaagtggcttctgatcactcgatatttgttggcgatctagctgctgatgtcactgatgaaatgctgctggagcttttctccagcaagtaccgctcggtgaaaggagctaaagttattattgatgcaaacacaggccgttccaggggctatggatttgtcaggtttggagacgacaacgacaaatctcatgccatgtctgaaatgaatggtgtatattgctctacgaggccaattcgtataggacctgcgactcccagaagatcttcaggtgattctggctcctcgactcctggtcattcagatggtgattcttctaacagaacggtatatgttggtgggcttgaccccaatgtcagtgaagatgaactgagaaaagcctttgccaaatatgatcttgcctctgtgaaaattcctctaggaaagcaatgtggctttgttcaatttgttagcagaactgatgctgaagaagcactacaaggattaaatggatcactcattggaaagcaggcagttcgcctttcatgggtccgcagcccatcgcataagcagtctaggggtgactccgtcaacaggaggaacaacatgtactatggcacaccattctacggcggatatggctatgcctccccggtgccacacccaaacatgtacgctgcagcgtatggcacgtacccgctatatggcaaccagcagctagtgagctagagagctcccctccgacgtgtcccctctgacgggaaacaaaggttttggtccggtgagcatagtagcgtcaggtgagaaggtgcctttataaggctgtcctaagaagtgggcgagatatgttgttgcatcgttatcgttatggtgcctgtaactgttgtgtgtgccgtgtgcgtccggaagaattggatggaatggaactcgtggcttgttgtagtacatcagagagtcatgttattctttcaagaaattttgacttggtaataaattaaactattgtttgtgcgtcc

SEQ ID NO: 11217 - protein, 279 aa, Zea mays subsp. mays
  peptide (1)..(279): Ceres Seq. ID no. 12413440
MDLLSSFLMHQAEKALQNFTGHVMPNTDRPFKLNWASYSMGEKRSEVASDHSIFVGDLAADVTDEMLLELFSSKYRSVKGAKVIIDANTGRSRGYGFVRFGDDNDKSHAMSEMNGVYCSTRPIRIGPATPRRSSGDSGSSTPGHSDGDSSNRTVYVGGLDPNVSEDELRKAFAKYDLASVKIPLGKQCGFVQFVSRTDAEEALQGLNGSLIGKQAVRLSWVRSPSHKQSRGDSVNRRNNMYYGTPFYGGYGYASPVPHPNMYAAAYGTYPLYGNQQLVS

SEQ ID NO: 11218 - protein, 271 aa, Zea mays subsp. mays
  peptide (1)..(271): Ceres Seq. ID no. 12413441
MHQAEKALQNFTGHVMPNTDRPFKLNWASYSMGEKRSEVASDHSIFVGDLAADVTDEMLLELFSSKYRSVKGAKVIIDANTGRSRGYGFVRFGDDNDKSHAMSEMNGVYCSTRPIRIGPATPRRSSGDSGSSTPGHSDGDSSNRTVYVGGLDPNVSEDELRKAFAKYDLASVKIPLGKQCGFVQFVSRTDAEEALQGLNGSLIGKQAVRLSWVRSPSHKQSRGDSVNRRNNMYYGTPFYGGYGYASPVPHPNMYAAAYGTYPLYGNQQLVS

SEQ ID NO: 11219 - protein, 256 aa, Zea mays subsp. mays
  peptide (1)..(256): Ceres Seq. ID no. 12413442
MPNTDRPFKLNWASYSMGEKRSEVASDHSIFVGDLAADVTDEMLLELFSSKYRSVKGAKVIIDANTGRSRGYGFVRFGDDNDKSHAMSEMNGVYCSTRPIRIGPATPRRSSGDSGSSTPGHSDGDSSNRTVYVGGLDPNVSEDELRKAFAKYDLASVKIPLGKQCGFVQFVSRTDAEEALQGLNGSLIGKQAVRLSWVRSPSHKQSRGDSVNRRNNMYYGTPFYGGYGYASPVPHPNMYAAAYGTYPLYGNQQLVS

SEQ ID NO: 11220 - DNA, 1554 bp, Zea mays subsp. mays
  misc_feature (1)..(1554): Ceres Seq. ID no. 12411930
  misc_feature (1)..(1554): Ortholog of  Ceres SEQ ID NO 14315257 as cited in SEQ ID NO 52552
  misc_feature (1)..(1554): Ortholog of  Ceres SEQ ID NO 14314636 as cited in SEQ ID NO 56924
  misc_feature (1)..(1554): Ortholog of  Ceres SEQ ID NO 14314755 as cited in SEQ ID NO 59919
  misc_feature (1)..(1554): Ortholog of  Ceres SEQ ID NO 15171614 as cited in SEQ ID NO 60106
  misc_feature (1)..(1554): Ortholog of  Ceres SEQ ID NO 15168421 as cited in SEQ ID NO 60131
  misc_feature (1)..(1554): Ortholog of  Ceres SEQ ID NO 13597574 as cited in SEQ ID NO 64677
  misc_feature (1)..(1554): Ortholog of  Ceres SEQ ID NO 13597843 as cited in SEQ ID NO 64850
  misc_feature (1)..(1554): Ortholog of  Ceres SEQ ID NO 12617417 as cited in SEQ ID NO 65089
  misc_feature (1)..(1554): Ortholog of  Ceres SEQ ID NO 13597678 as cited in SEQ ID NO 65375
  misc_feature (1)..(1554): Ortholog of  Ceres SEQ ID NO 15176787 as cited in SEQ ID NO 66468
  misc_feature (1)..(1554): Ortholog of  Ceres SEQ ID NO 13596180 as cited in SEQ ID NO 67941
  misc_feature (1)..(1554): Ortholog of  Ceres SEQ ID NO 13591190 as cited in SEQ ID NO 68044
  misc_feature (1)..(1554): Ortholog of  Ceres SEQ ID NO 13595961 as cited in SEQ ID NO 68223
  misc_feature (1)..(1554): Ortholog of  Ceres SEQ ID NO 14313563 as cited in SEQ ID NO 68700
atttcgactcgtgtgttcgtgagctctgtgagaaacaaagaccatgacgcaggagaagacggtggtgctgtacccctccctgggcgttggccatctgaaccccatggcgcagctggccaaggccatcctccgccacggcagcgtcgccgtcaccatcgccgtcgtcgacccgcccgagaagcacgccgtgctagctgctgcgctggcccgcctggcagcggtcagtccctccatcacggtccacctcctccccatcccgccctgcgccaccagcaagcagcattcccaccccatcatgcccatcctggatgcgctccgcgccgcgaaccccgcgctccgggcgttccttgccgcgcgagtccctgccgtcgccgccctcgtggtcgacatgttctgcaccgacgcgctcgacgtcgccgcggagctcgcgatccccgcgcacttcttctacccgtccgcggcccggcgacctcgcggtctacctccaggttccagatctctgccgcgccgcgccgtccccgctaagggacatgggcaaggcggcgctgaacttcgccggcgtgccggcggtccgcgctctcgacatgcccgacaccatgcacgactgggagagcgacgtgggcagcgtacggctgcggcagctcgcccggatgccggaggccgcgggcattctggtgaacagcttcgagtggctggagtcgagggcgctggaagcgctacgtggcggccactgcctgcccggccgctcgacgccgaaaatctactgcgtcgggccgctggtcgacggtggcggcagtggcaccgaggggaacggcgagaggcacgcgtgcctcgcgtggatggacgggcagcccaggcagagcgtggtgttcctctgcttcggaagcctgggcgccttctcggcggcgcagctgaaggagacggcgcgcgggctagagcgttcaggacacaggttcttgtgggccgtgcgaagcccaagcgaggatcaggactctggcgagcctgatctggaggcgttgcttccggatgggttcttggagagaaccagaggcagaggactggttctgaagaactgggcgccccagacacaggtgctgcggcacgaggccgtgggtgcctttgtaactcactgcggctggaactcggtgctggaggcggccatgtccggcgtgccgatgatctgctggccgctgtacgcggagcagaggctgaataaggtgcacgtggtggaggagatgaaggttggggtggtgatggaaggctacgacgaggagttggtgacggctgacgaggtggaggccaaggtacgactagtgatggagtcggaggaagggaagaagctcagggagaggacagcgacggcgaaggaaatggctgctgatgccatcaaacaaggcgggtcgtcttacgtcgaacttggtgagtttttgaagggtttaggacgcaagtgatggatagctatgcgtatgaatgataataatctgtctgtatatcagtataagatgaatgcttaacgcagtctggaagataagtattatatggctacttatcatt

SEQ ID NO: 11221 - protein, 380 aa, Zea mays subsp. mays
  peptide (1)..(380): Ceres Seq. ID no. 12411931
MRSAPRTPRSGRSLPRESLPSPPSWSTCSAPTRSTSPRSSRSPRTSSTRPRPGDLAVYLQVPDLCRAAPSPLRDMGKAALNFAGVPAVRALDMPDTMHDWESDVGSVRLRQLARMPEAAGILVNSFEWLESRALEALRGGHCLPGRSTPKIYCVGPLVDGGGSGTEGNGERHACLAWMDGQPRQSVVFLCFGSLGAFSAAQLKETARGLERSGHRFLWAVRSPSEDQDSGEPDLEALLPDGFLERTRGRGLVLKNWAPQTQVLRHEAVGAFVTHCGWNSVLEAAMSGVPMICWPLYAEQRLNKVHVVEEMKVGVVMEGYDEELVTADEVEAKVRLVMESEEGKKLRERTATAKEMAADAIKQGGSSYVELGEFLKGLGRK

SEQ ID NO: 11222 - protein, 320 aa, Zea mays subsp. mays
  peptide (1)..(320): Ceres Seq. ID no. 12411932
MTQEKTVVLYPSLGVGHLNPMAQLAKAILRHGSVAVTIAVVDPPEKHAVLAAALARLAAVSPSITVHLLPIPPCATSKQHSHPIMPILDALRAANPALRAFLAARVPAVAALVVDMFCTDALDVAAELAIPAHFFYPSAARRPRGLPPGSRSLPRRAVPAKGHGQGGAELRRRAGGPRSRHARHHARLGERRGQRTAAAARPDAGGRGHSGEQLRVAGVEGAGSATWRPLPARPLDAENLLRRAAGRRWRQWHRGERREARVPRVDGRAAQAERGVPLLRKPGRLLGGAAEGDGARARAFRTQVLVGRAKPKRGSGLWRA

SEQ ID NO: 11223 - protein, 306 aa, Zea mays subsp. mays
  peptide (1)..(306): Ceres Seq. ID no. 12411933
MGKAALNFAGVPAVRALDMPDTMHDWESDVGSVRLRQLARMPEAAGILVNSFEWLESRALEALRGGHCLPGRSTPKIYCVGPLVDGGGSGTEGNGERHACLAWMDGQPRQSVVFLCFGSLGAFSAAQLKETARGLERSGHRFLWAVRSPSEDQDSGEPDLEALLPDGFLERTRGRGLVLKNWAPQTQVLRHEAVGAFVTHCGWNSVLEAAMSGVPMICWPLYAEQRLNKVHVVEEMKVGVVMEGYDEELVTADEVEAKVRLVMESEEGKKLRERTATAKEMAADAIKQGGSSYVELGEFLKGLGRK

SEQ ID NO: 11224 - DNA, 1514 bp, Zea mays subsp. mays
  misc_feature (1)..(1514): Ceres Seq. ID no. 12374131
  misc_feature (1)..(1514): Ortholog of  Ceres SEQ ID NO 13662367 as cited in SEQ ID NO 67774
aatcgcaagctcaagcaaaaacacaaagcgcttaaaccacactcaaaccaaccgccaacaaacaggcctcctagtcccgaccagaacttgctcgtagccccgcccccgagaacccgacagcgcgagatggctcccgagctgatgacagccaagatgaccgccaaggccgcggcggcggcggcggcggtgaagcctgccacgagggcgtacgtgacgttccttgcgggcgncggcgactactggaagggcgtggtggggctggccaagggcctgcgcaaggtccgctcggcctaccccctggtggtggcggtgctgcccgacgtgcccgagtcccaccgccgcatcctcgtctcgcagggctgcgtcgtccgcgagatcgagcccgtgtacccgcctgagaaccagacgcagttcgccatggcgtactacgtcatcaactactccaagctccgcatctgggagttcgtggagtacgagaggatggtgtacctggacgcggacatccaggtgttcgagaacatcgacggcctgttcgagctcgagaaggggtacttctacgcggtgatggactgcttctgcgagaagacgtggagccacaccccgcagtacaggatcggctactgccagcagtgcccggacaaggtggcgtggccagcggcgaccgccgagctgggccctccgccgtcgctctacttcaacgccggcatgttcgtgcacgagcccagcgtggccaccgccaaggcgctcctcgacaccctccgcgtgactccgcccacccccttcgcagagcaggacttcctgaacatgttcttcagggatcagtacaggccgatccccaacgtgtacaacctcgtgctggccatgctctggaggcaccccgagaacgtgcagctggagaaggtgaaggtcgtgcactactgcgcggcggggtccaagccgtggaggttcacgggcaaggaggcgaacatggacagggaggacatcaacgccctggtgaacaagtggtgggacatctacaacgacgagacgctggacttgaagggcctgccctcgctctcgcccgacgacgacgacgaggtggaggcggtggccaagaagccgcttcgcgcggccctggcggaggccggcacggtcaagtacgtcaccgcgccctcggccgcgtgatcccgtgctctggccttcccccaccgcgcaccgtaccggtggccgcgcgctatagcttgtgtgtgtgtggccatcgcggaacataagaagaatctctcactataaaggccttcgttctgtgtttgcattttggttttggattagggtgtctaatttttcaccagttccttttccccttgtgtaagtgtggagcttactatatagctagcgcccatttcaaggtgctgcaagcgttggtcaggaattgggctagagtgtttgtcctgtaccgagggattatgtgtatttttgctatttcgctcggtaaattaatacaataataaaaaatagggagccgcaaaattatggcc

SEQ ID NO: 11225 - protein, 387 aa, Zea mays subsp. mays
  peptide (1)..(387): Ceres Seq. ID no. 12374132
  misc_feature (77)..(77): Xaa is any aa, unknown or other
NRKLKQKHKALKPHSNQPPTNRPPSPDQNLLVAPPPRTRQREMAPELMTAKMTAKAAAAAAAVKPATRAYVTFLAGXGDYWKGVVGLAKGLRKVRSAYPLVVAVLPDVPESHRRILVSQGCVVREIEPVYPPENQTQFAMAYYVINYSKLRIWEFVEYERMVYLDADIQVFENIDGLFELEKGYFYAVMDCFCEKTWSHTPQYRIGYCQQCPDKVAWPAATAELGPPPSLYFNAGMFVHEPSVATAKALLDTLRVTPPTPFAEQDFLNMFFRDQYRPIPNVYNLVLAMLWRHPENVQLEKVKVVHYCAAGSKPWRFTGKEANMDREDINALVNKWWDIYNDETLDLKGLPSLSPDDDDEVEAVAKKPLRAALAEAGTVKYVTAPSAA

SEQ ID NO: 11226 - protein, 345 aa, Zea mays subsp. mays
  peptide (1)..(345): Ceres Seq. ID no. 12374133
  misc_feature (35)..(35): Xaa is any aa, unknown or other
MAPELMTAKMTAKAAAAAAAVKPATRAYVTFLAGXGDYWKGVVGLAKGLRKVRSAYPLVVAVLPDVPESHRRILVSQGCVVREIEPVYPPENQTQFAMAYYVINYSKLRIWEFVEYERMVYLDADIQVFENIDGLFELEKGYFYAVMDCFCEKTWSHTPQYRIGYCQQCPDKVAWPAATAELGPPPSLYFNAGMFVHEPSVATAKALLDTLRVTPPTPFAEQDFLNMFFRDQYRPIPNVYNLVLAMLWRHPENVQLEKVKVVHYCAAGSKPWRFTGKEANMDREDINALVNKWWDIYNDETLDLKGLPSLSPDDDDEVEAVAKKPLRAALAEAGTVKYVTAPSAA

SEQ ID NO: 11227 - protein, 340 aa, Zea mays subsp. mays
  peptide (1)..(340): Ceres Seq. ID no. 12374134
  misc_feature (30)..(30): Xaa is any aa, unknown or other
MTAKMTAKAAAAAAAVKPATRAYVTFLAGXGDYWKGVVGLAKGLRKVRSAYPLVVAVLPDVPESHRRILVSQGCVVREIEPVYPPENQTQFAMAYYVINYSKLRIWEFVEYERMVYLDADIQVFENIDGLFELEKGYFYAVMDCFCEKTWSHTPQYRIGYCQQCPDKVAWPAATAELGPPPSLYFNAGMFVHEPSVATAKALLDTLRVTPPTPFAEQDFLNMFFRDQYRPIPNVYNLVLAMLWRHPENVQLEKVKVVHYCAAGSKPWRFTGKEANMDREDINALVNKWWDIYNDETLDLKGLPSLSPDDDDEVEAVAKKPLRAALAEAGTVKYVTAPSAA

SEQ ID NO: 11228 - DNA, 1534 bp, Zea mays subsp. mays
  misc_feature (1)..(1534): Ceres Seq. ID no. 13492041
  misc_feature (1)..(1534): Ortholog of  Ceres SEQ ID NO 13656138 as cited in SEQ ID NO 65492
  misc_feature (1)..(1534): Ortholog of  Ceres SEQ ID NO 13656435 as cited in SEQ ID NO 65853
tccaaattccccggtcacctacctcctctgccctctcactctcagatccgcgtcctcggctcctcctcctcctcctcctcctcccttccttcgttccttccagatctccctcccagtcgagagtcgagatccaccgcctccgcgccccctcaccggtgcagcgcgaggaagcggggggccagaggccagccatgggcaaggaaggggccagcgacggcggcatgtcggagtcggtgatccgcaaggtcctggtctcgtacatgtacgtggcggtgtggatcttcctctccttctccgtgatcgtctacaacaagtacatcctcgaccccaagatgtacaactggcccttccccatctccctcaccatggtgcacatggccttctgctcctccctcgccgtggcgctcgtccgcgtcctccgcgtcgtcgacctcccgtcctcgcccgccatgacgtcgcagctctacgtctcctccgtgctccctatcggcgcgctctactcgctctcgctctggttctccaactccgcctacatctacctctccgtctccttcatccagatgctcaaggcgctcatgcccgtcgccgtctactccatcggggtcctcttcaagaaggagaccttcaagtcctccgccatgctcaacatgctctccatctcgttcggcgtcgccatcgccgcctacggagaggcccgcttcgacgcccgcggcgtcgccctgcagctcgccgccgtcgccttcgaggccacgcgcctcgtcctcatccagatcctcctcacctccaagggcatctccctcaaccccatcacctcgctctactacgtcgcgccctgctgcctcgctttcctcgtcgtgccctgggtcttcgtcgagctgcccaggctgcgcgccgtcggcatcttccagccggacctcttcgtcttcggcaccaactccctctgcgccttcgcgctcaacctcgccgtcttcctgctcgtcggcaagacgtcggctctcaccatgaacgtcgccggcgtcgtcaaggactggctgctcatcgccttctcctggtccgtcatccgcgacaccgtcacccccatcaacctcttcggctacgggatcgccttcctcggggtgggatactacaaccacgtcaagctgcaggcgctcaaggccaaggaggcgcagaagaaggcgacgcaggccgacgaggaggccgggtcgctgctgcaggagcgcgactcgcacggcgaccgcaagactgacaaccaggcctagcgagtgtgccggatctcatgatccaattcgctcggttctgaacccagtgtactccaaatatgtgatccaacccttacacgtttgatgcaaaatttgttcatttcttgtctttgacttgatctggtggtaccaaggaaataagcacgggaaagatgcaagctttgtgtcgaacatgtgaaaaaaaatatatatgtatgagcaattttttgtcttttttttggggccagttgtagctgttactaccattaaacagtaagcaaaactgtttgcatttt

SEQ ID NO: 11229 - protein, 418 aa, Zea mays subsp. mays
  peptide (1)..(418): Ceres Seq. ID no. 13492042
QIPRSPTSSALSLSDPRPRLLLLLLLLPSFVPSRSPSQSRVEIHRLRAPSPVQREEAGGQRPAMGKEGASDGGMSESVIRKVLVSYMYVAVWIFLSFSVIVYNKYILDPKMYNWPFPISLTMVHMAFCSSLAVALVRVLRVVDLPSSPAMTSQLYVSSVLPIGALYSLSLWFSNSAYIYLSVSFIQMLKALMPVAVYSIGVLFKKETFKSSAMLNMLSISFGVAIAAYGEARFDARGVALQLAAVAFEATRLVLIQILLTSKGISLNPITSLYYVAPCCLAFLVVPWVFVELPRLRAVGIFQPDLFVFGTNSLCAFALNLAVFLLVGKTSALTMNVAGVVKDWLLIAFSWSVIRDTVTPINLFGYGIAFLGVGYYNHVKLQALKAKEAQKKATQADEEAGSLLQERDSHGDRKTDNQA

SEQ ID NO: 11230 - protein, 414 aa, Zea mays subsp. mays
  peptide (1)..(414): Ceres Seq. ID no. 13492043
PNSPVTYLLCPLTLRSASSAPPPPPPPPFLRSFQISLPVESRDPPPPRPLTGAARGSGGPEASHGQGRGQRRRHVGVGDPQGPGLVHVRGGVDLPLLLRDRLQQVHPRPQDVQLALPHLPHHGAHGLLLLPRRGARPRPPRRRPPVLARHDVAALRLLRAPYRRALLALALVLQLRLHLPLRLLHPDAQGAHARRRLLHRGPLQEGDLQVLRHAQHALHLVRRRHRRLRRGPLRRPRRRPAARRRRLRGHAPRPHPDPPHLQGHLPQPHHLALLRRALLPRFPRRALGLRRAAQAARRRHLPAGPLRLRHQLPLRLRAQPRRLPARRQDVGSHHERRRRRQGLAAHRLLLVRHPRHRHPHQPLRLRDRLPRGGILQPRQAAGAQGQGGAEEGDAGRRGGRVAAAGARLARRPQD

SEQ ID NO: 11231 - protein, 355 aa, Zea mays subsp. mays
  peptide (1)..(355): Ceres Seq. ID no. 13492044
MGKEGASDGGMSESVIRKVLVSYMYVAVWIFLSFSVIVYNKYILDPKMYNWPFPISLTMVHMAFCSSLAVALVRVLRVVDLPSSPAMTSQLYVSSVLPIGALYSLSLWFSNSAYIYLSVSFIQMLKALMPVAVYSIGVLFKKETFKSSAMLNMLSISFGVAIAAYGEARFDARGVALQLAAVAFEATRLVLIQILLTSKGISLNPITSLYYVAPCCLAFLVVPWVFVELPRLRAVGIFQPDLFVFGTNSLCAFALNLAVFLLVGKTSALTMNVAGVVKDWLLIAFSWSVIRDTVTPINLFGYGIAFLGVGYYNHVKLQALKAKEAQKKATQADEEAGSLLQERDSHGDRKTDNQA

SEQ ID NO: 11232 - DNA, 1276 bp, Zea mays subsp. mays
  misc_feature (1)..(1276): Ceres Seq. ID no. 12411915
  misc_feature (1)..(1276): Ortholog of  Ceres SEQ ID NO 14312166 as cited in SEQ ID NO 59253
aacgatcaaaatgaaaattactgagatgtcccctcggacacacagtggtcaaccgacgccgccggtgggtgcccggaatcccggatccttgtccgccctcctgctcactccactcgcctgccagccgcacaccaatcacctctgcggccggcggcgtctgcaacgccagtctctgatccgaccccgatcggcacacacgttctccatggcggagcagctcgcatcccaagatgctcccaatccccctgctccggcacagagggtactggtgacgaacacgcatggggagaaactcgtcggcctgctgcaccacatggggtctgacaaggttgtagttctctgccatggctttacgggctccaaggactatagcctcatcactgaccttgcggccgcactaacaaagcaagggattagtgtgtttcgctttgattttagtggaaatggagaaagtgaaggtgaattccagtacggcaactacaagaaggaggctgctgacttgcactctgttgtcttgtatcttcgccaggagaagtacgacgtagcagcaattgttggtcacagcaaaggtggagatgtggtcgttctatatgcctctatctacaaggatgtccccatggtggttaacctctctggccggtttcatttggagaaaggcattgaggagcgcctaggcaaagagtttatggatagaataaacaaggaaggctacatcgatgtcaaagacaaatcaggaaatgttttgtacagagtaaccaaggagagcttgatggaacggctgagccatgatatgcacgcaacgagcctttccatcagcaaagagtgcaggttctttacaattcacggttcagctgacgagatcatacccgtggaagatgcgtatgagtttgcaaggcttataccaaaccacaagctgcgtgtcatcgagggagcaaatcactgctacactgctcaccgtagagaactttctgatgccgtagtagaagccatcacatccagtgaggcaggggagaccacaacctagatctgatgcagaacggcagcctgcctttccaatcctgcaatgccgctcttccatctcagtcacattgccttatcacaatttttaaaagaaaacgagttctttgaaaatatcgtttgaatctagacgttgttaactcgttgtatcatgacatccttaatgctacgtttggacgttgatattggagagtataaaattgaattgggttgaatatcaaatcagacatgatagtgaaataagatgtaatttcaatcc

SEQ ID NO: 11233 - protein, 340 aa, Zea mays subsp. mays
  peptide (1)..(340): Ceres Seq. ID no. 12411916
TIKMKITEMSPRTHSGQPTPPVGARNPGSLSALLLTPLACQPHTNHLCGRRRLQRQSLIRPRSAHTFSMAEQLASQDAPNPPAPAQRVLVTNTHGEKLVGLLHHMGSDKVVVLCHGFTGSKDYSLITDLAAALTKQGISVFRFDFSGNGESEGEFQYGNYKKEAADLHSVVLYLRQEKYDVAAIVGHSKGGDVVVLYASIYKDVPMVVNLSGRFHLEKGIEERLGKEFMDRINKEGYIDVKDKSGNVLYRVTKESLMERLSHDMHATSLSISKECRFFTIHGSADEIIPVEDAYEFARLIPNHKLRVIEGANHCYTAHRRELSDAVVEAITSSEAGETTT

SEQ ID NO: 11234 - protein, 337 aa, Zea mays subsp. mays
  peptide (1)..(337): Ceres Seq. ID no. 12411917
MKITEMSPRTHSGQPTPPVGARNPGSLSALLLTPLACQPHTNHLCGRRRLQRQSLIRPRSAHTFSMAEQLASQDAPNPPAPAQRVLVTNTHGEKLVGLLHHMGSDKVVVLCHGFTGSKDYSLITDLAAALTKQGISVFRFDFSGNGESEGEFQYGNYKKEAADLHSVVLYLRQEKYDVAAIVGHSKGGDVVVLYASIYKDVPMVVNLSGRFHLEKGIEERLGKEFMDRINKEGYIDVKDKSGNVLYRVTKESLMERLSHDMHATSLSISKECRFFTIHGSADEIIPVEDAYEFARLIPNHKLRVIEGANHCYTAHRRELSDAVVEAITSSEAGETTT

SEQ ID NO: 11235 - protein, 332 aa, Zea mays subsp. mays
  peptide (1)..(332): Ceres Seq. ID no. 12411918
MSPRTHSGQPTPPVGARNPGSLSALLLTPLACQPHTNHLCGRRRLQRQSLIRPRSAHTFSMAEQLASQDAPNPPAPAQRVLVTNTHGEKLVGLLHHMGSDKVVVLCHGFTGSKDYSLITDLAAALTKQGISVFRFDFSGNGESEGEFQYGNYKKEAADLHSVVLYLRQEKYDVAAIVGHSKGGDVVVLYASIYKDVPMVVNLSGRFHLEKGIEERLGKEFMDRINKEGYIDVKDKSGNVLYRVTKESLMERLSHDMHATSLSISKECRFFTIHGSADEIIPVEDAYEFARLIPNHKLRVIEGANHCYTAHRRELSDAVVEAITSSEAGETTT

SEQ ID NO: 11236 - DNA, 1461 bp, Zea mays subsp. mays
  misc_feature (1)..(1461): Ceres Seq. ID no. 12411908
  misc_feature (1)..(1461): Ortholog of  Ceres SEQ ID NO 13639243 as cited in SEQ ID NO 56820
  misc_feature (1)..(1461): Ortholog of  Ceres SEQ ID NO 13496409 as cited in SEQ ID NO 65697
gaaggcgacgcagtggccgtacagtagtgtcacctgcacattgcagaccgcctcagcgcctcaccaagcgaaactcgttggcggctagggttttgctgcctcccgagcccaaaccctagagcacccgcgcccatcccatggcgtgctaggcttcgattgagactggggggattagtaccgcaggctgggattagagcaagcgccgagcggaaatggcatcgagtaaccaattcgatctacttggagacgtcgagaacgacgaccctgcccacctcctcgcagctgccgagaagaaggcggccgcggtgcctaagcccgcgcccgcgccggccaagttgcccaccaagcctccgccgcccgcgcaacctgtgagggaggaaaggaactatggtgctccaccgcgcgatggtccaggacgtggaagaggcggccgcggtggcaggactggcccgaggcgagattttggcgatgctgatgcccacggctttgagggggggtatggtggcggcggcggcggttttggggacggtggagttgctcgcggtgaaaatggtgagggtaggcaggcagagaggggccgtgggccccgccagccttaccgtggaggtgggcgacgtggtgggtacagcgatgggcaggctgggaatgagttcggacgtcctcgccgggcatatgagcgccacagcggcacaggccgtggctacgggatgaagcgtgaaggggctgggcgtggaaattggggaactgcaactgatgaaggccttgaacaggacactgtggatgctgttaatcctgaggagactactgccgtggtggaggatgaaaagaaacctgaagatgcaccacagtctgaggttgagaaggacaaggagggcgcggagaatgaagaagaaaaggaacctgaggataaggagatgactttggaggaatatgaaaaggtactggaggaaaaacgaaaagctttactctcccttaaggctgaggagagaaaagttgaaattgacaaggagctacaggccatgcaacaactgtcagttaaaaaggatggcgatgaagtgtttatcaagctgggctctgacaaggacttgaaaaagaaagaaagtgctgaaagagaagaacggggcaagaagtccctgagcatcaacgagttcttgaagccagctgaaggcgagaggtactataaccctagtggccgtggccgtggtaggggccgtggggggttccgtggtggttacaacggcggttatcggggaccagctgctgctccagcgatcgaagaccaggctcagttccctgccctggcctaagcacagctcgtgttctcgctcaagattgtgtcacttttgcggagtgcgtcagtcagtcctagtgttgttgctcccaagcttgctttccggattatgtgtatccaacattttctgatgttatgtactggtgtgctcgtgattgcatggttttgct

SEQ ID NO: 11237 - protein, 364 aa, Zea mays subsp. mays
  peptide (1)..(364): Ceres Seq. ID no. 12411909
MASSNQFDLLGDVENDDPAHLLAAAEKKAAAVPKPAPAPAKLPTKPPPPAQPVREERNYGAPPRDGPGRGRGGRGGRTGPRRDFGDADAHGFEGGYGGGGGGFGDGGVARGENGEGRQAERGRGPRQPYRGGGRRGGYSDGQAGNEFGRPRRAYERHSGTGRGYGMKREGAGRGNWGTATDEGLEQDTVDAVNPEETTAVVEDEKKPEDAPQSEVEKDKEGAENEEEKEPEDKEMTLEEYEKVLEEKRKALLSLKAEERKVEIDKELQAMQQLSVKKDGDEVFIKLGSDKDLKKKESAEREERGKKSLSINEFLKPAEGERYYNPSGRGRGRGRGGFRGGYNGGYRGPAAAPAIEDQAQFPALA

SEQ ID NO: 11238 - protein, 199 aa, Zea mays subsp. mays
  peptide (1)..(199): Ceres Seq. ID no. 12411910
MKREGAGRGNWGTATDEGLEQDTVDAVNPEETTAVVEDEKKPEDAPQSEVEKDKEGAENEEEKEPEDKEMTLEEYEKVLEEKRKALLSLKAEERKVEIDKELQAMQQLSVKKDGDEVFIKLGSDKDLKKKESAEREERGKKSLSINEFLKPAEGERYYNPSGRGRGRGRGGFRGGYNGGYRGPAAAPAIEDQAQFPALA

SEQ ID NO: 11239 - DNA, 1196 bp, Zea mays subsp. mays
  misc_feature (1)..(1196): Ceres Seq. ID no. 12353396
  misc_feature (1)..(1196): Ortholog of  Ceres SEQ ID NO 13595668 as cited in SEQ ID NO 56792
gctttacaactccccaccccatcccatccacacacacttcacccagcgcggcggccgccggccgccggcaatggaggccgtggcgcacagcggcgactacctttggcggttcgtggcggagacagagtggtacaacgaggttgtcctcagcgccgtggcgccaggcgactggtggcgcggcctgccgcacccggtgcagtcatggatgcgcaactgcgtcggcggttacctcctctatttcatctctggtttcctctggtgcttcgtcatctactactggaagcgccacgcctacatccccaaagatgccatccccacaaatgacgctatgaagaagcaaatagttgtagcatcgaaggctatgcctttttactgcgctcttccaactttatctgaatatatgattgagagcggatggactcagtgctacttcaatatcagcgaaattggtttttctatgtacctctgttatatggctatgtatctcatctttgtggagtttggaatttactggatgcacagggagttgcatgacataaaaccattatacaaatatctgcatgcaacccaccatatttacaacaaggagaataccttgtctccatttgctggacttgcatttcatccactggatggtattctgcaagcaataccacatgtgttcgcgctcttcctctttccaacgcacttcaggacacatattgcactcttgttcctagaggctgtgtggacaacaaacatccacgactgcattcatggcaagatatggccagtcatgggtgctggatatcacaccattcaccatacgacttaccgtcacaactatggccactacaccatctggatggactggatgtttggtacgctcaatgagccagaagatatcctcaagaaggcttgagtttctcggagctgtggtattcctatggtgctgctgctggaactgctcgatctgttcccagtgtttctaatccgttgagcctgttcagcactgtctgtttatgtaggcatcagtgtgttaattactttgctaggttcatatggctttgtgcttattctgtaatttagcgatgtttgtctcatgacgcaacggagttcaggacgaataaaactttgctagacacattctggattccagttgcttgtacaatgttggaactcaactgtcaatataggatgtaaaacggattccttcc

SEQ ID NO: 11240 - protein, 299 aa, Zea mays subsp. mays
  peptide (1)..(299): Ceres Seq. ID no. 12353397
LYNSPPHPIHTHFTQRGGRRPPAMEAVAHSGDYLWRFVAETEWYNEVVLSAVAPGDWWRGLPHPVQSWMRNCVGGYLLYFISGFLWCFVIYYWKRHAYIPKDAIPTNDAMKKQIVVASKAMPFYCALPTLSEYMIESGWTQCYFNISEIGFSMYLCYMAMYLIFVEFGIYWMHRELHDIKPLYKYLHATHHIYNKENTLSPFAGLAFHPLDGILQAIPHVFALFLFPTHFRTHIALLFLEAVWTTNIHDCIHGKIWPVMGAGYHTIHHTTYRHNYGHYTIWMDWMFGTLNEPEDILKKA

SEQ ID NO: 11241 - protein, 276 aa, Zea mays subsp. mays; identical to SEQ ID NO: 6861
  peptide (1)..(276): Ceres Seq. ID no. 12353398

SEQ ID NO: 11242 - protein, 231 aa, Zea mays subsp. mays; identical to SEQ ID NO: 6862
  peptide (1)..(231): Ceres Seq. ID no. 12353399

SEQ ID NO: 11243 - DNA, 1921 bp, Zea mays subsp. mays
  misc_feature (1)..(1921): Ceres Seq. ID no. 12414468
  misc_feature (1)..(1921): Ortholog of  Ceres SEQ ID NO 14302287 as cited in SEQ ID NO 68134
  misc_feature (1)..(1921): Ortholog of  Ceres SEQ ID NO 14309328 as cited in SEQ ID NO 0
gcacgagaccattacctagaacatcctaatcgaaaaattgtcatctctacattgttgccggtgtcggcctcggccgtcgccgacgccgcgcatccagcgtccatgtctacgttaccgactcctcacgctggccggaccacgtgcccccacgtctcgccgtccccggttctcatccaccccgagctcccccaacgcgttttaccacagaccaataagtggccaatccctcgctgccccccacactccagaagtccagaccaaagctccaaagtccaatccctcgctagccacttgccatctgatcaaccagccagccgatctcagcgatccgccatggccaccgcgtattacgagaggccccgtggcggcgccgtcgaggaggcggacgacttcgatgagttcgaccccacgccgtacggcggtgggtacgacctcgccgtcaccttcggtcgcccgctgccaccgaccgaggaaacctgctacccgtgctcggcgccctcgacctcctacgacgcaccgcactacgccgcctccgagccgtccccctacggtcaccacgccaagccaaagcccaactacgggttccgcccccagcaggagcaacagccgtcttacggcagcggctacggatccaggcccgagcccgctgcggaggagggcggtggctatggatctggcttcggatccgggtatgggaggaagaagcaagaggaggagagctacggctctggatatgggaggaaaccgcaggcggaggagagctacgggtccggcgggtacggctctggctacggcggtcagacccggccggaggagagctatgggtcagcagggtatggatctgccaatccgcaggctgagacatacggctctggctacgggaggaagccacaggtagaggagagctacggatcggagtatgggtctgggttcgggaggaagccgcaggttgaggagagctatggatcggggtacgggaggacgccgcaggttgaggagagctatggatctggttacgggaggaagcctcaggttgaggagagctatggatctgggtacggcagcaggccgcagggtggggaggagtatggcagtggtgggtatgggaggaaggctcaggaggagacctatggctcctcggggtatggctatggcaggaagaacgaggagcagagctatggtggttctggctatggttatgagaagaaggcatctgaggaggatgaaggtgcctttggctctagtggttaccggaagccaaaaccctatggcgaggagacacagggttcatacggttatggagaggagcagcccaagtatcagagtggcgggtatgagagaccgagctatggtgggggagaggggtactatggccgcaagaaagatgatgacgactcggatgatgagaagaagcggcgtcattctaagcaccaccaccatggccaccactcaaaaaaaaaaaaaaaaaacggcacgagaagcgcttctcgtgccgttttttttttttttttttgagtnngagtcgggaggaggacgagaagggggagaggggatttttgccgcaagaaagatgatgacgactcggatgatgagaagaagcggcgtcattctaagcaccaccaccatggccaccactacgatgactaagcaccagtgccttctgctgggcgttgccctggttcaccgctactgctactatatccattcgcttgcataaataaagacggctgtgtaccttctggacactggaccaccgttgcgacgttgcctctgcattgttacaggccgagccgtgagtgtgctgtttattatctaatgttcaaatcgttgtgatgaaccaccgtccacgcctgttgatgccgaaccgaatgtctggatttactttgcgcctgttcttgtggtgtttgtcgccttccctgtc

SEQ ID NO: 11244 - protein, 504 aa, Zea mays subsp. mays
  peptide (1)..(504): Ceres Seq. ID no. 12414469
ARDHYLEHPNRKIVISTLLPVSASAVADAAHPASMSTLPTPHAGRTTCPHVSPSPVLIHPELPQRVLPQTNKWPIPRCPPHSRSPDQSSKVQSLASHLPSDQPASRSQRSAMATAYYERPRGGAVEEADDFDEFDPTPYGGGYDLAVTFGRPLPPTEETCYPCSAPSTSYDAPHYAASEPSPYGHHAKPKPNYGFRPQQEQQPSYGSGYGSRPEPAAEEGGGYGSGFGSGYGRKKQEEESYGSGYGRKPQAEESYGSGGYGSGYGGQTRPEESYGSAGYGSANPQAETYGSGYGRKPQVEESYGSEYGSGFGRKPQVEESYGSGYGRTPQVEESYGSGYGRKPQVEESYGSGYGSRPQGGEEYGSGGYGRKAQEETYGSSGYGYGRKNEEQSYGGSGYGYEKKASEEDEGAFGSSGYRKPKPYGEETQGSYGYGEEQPKYQSGGYERPSYGGGEGYYGRKKDDDDSDDEKKRRHSKHHHHGHHSKKKKKNGTRSASRAVFFFFF

SEQ ID NO: 11245 - protein, 470 aa, Zea mays subsp. mays
  peptide (1)..(470): Ceres Seq. ID no. 12414470
MSTLPTPHAGRTTCPHVSPSPVLIHPELPQRVLPQTNKWPIPRCPPHSRSPDQSSKVQSLASHLPSDQPASRSQRSAMATAYYERPRGGAVEEADDFDEFDPTPYGGGYDLAVTFGRPLPPTEETCYPCSAPSTSYDAPHYAASEPSPYGHHAKPKPNYGFRPQQEQQPSYGSGYGSRPEPAAEEGGGYGSGFGSGYGRKKQEEESYGSGYGRKPQAEESYGSGGYGSGYGGQTRPEESYGSAGYGSANPQAETYGSGYGRKPQVEESYGSEYGSGFGRKPQVEESYGSGYGRTPQVEESYGSGYGRKPQVEESYGSGYGSRPQGGEEYGSGGYGRKAQEETYGSSGYGYGRKNEEQSYGGSGYGYEKKASEEDEGAFGSSGYRKPKPYGEETQGSYGYGEEQPKYQSGGYERPSYGGGEGYYGRKKDDDDSDDEKKRRHSKHHHHGHHSKKKKKNGTRSASRAVFFFFF

SEQ ID NO: 11246 - protein, 393 aa, Zea mays subsp. mays
  peptide (1)..(393): Ceres Seq. ID no. 12414471
MATAYYERPRGGAVEEADDFDEFDPTPYGGGYDLAVTFGRPLPPTEETCYPCSAPSTSYDAPHYAASEPSPYGHHAKPKPNYGFRPQQEQQPSYGSGYGSRPEPAAEEGGGYGSGFGSGYGRKKQEEESYGSGYGRKPQAEESYGSGGYGSGYGGQTRPEESYGSAGYGSANPQAETYGSGYGRKPQVEESYGSEYGSGFGRKPQVEESYGSGYGRTPQVEESYGSGYGRKPQVEESYGSGYGSRPQGGEEYGSGGYGRKAQEETYGSSGYGYGRKNEEQSYGGSGYGYEKKASEEDEGAFGSSGYRKPKPYGEETQGSYGYGEEQPKYQSGGYERPSYGGGEGYYGRKKDDDDSDDEKKRRHSKHHHHGHHSKKKKKNGTRSASRAVFFFFF

SEQ ID NO: 11247 - DNA, 1354 bp, Zea mays subsp. mays
  misc_feature (1)..(1354): Ceres Seq. ID no. 12351706
  misc_feature (1)..(1354): Ortholog of  Ceres SEQ ID NO 15179996 as cited in SEQ ID NO 0
acaagcaagtggccacctttgagtggatgttggaagaaatagcagccacaagcaagtagtcacctgtgtcatcttattccgatcctagcccctcccatctccaattcctcgcttcctcctcccttctctagttctctgatcctcagcacttagcatcaagcttagcacaccggcgagatggcctccacctccaccttcctgtccaccctcgccagcaggtccgcggcagccgatagcctgcgcagcgccgtgccgtccttcgccaagatcgtcaggttcttgcccgcgcaggcgcagatcagccgcaggcggcgcgcggcggtgctgcccacgccgagggcggcggtgtcgggcaccgagaaggcgccgtcgagcaagcacgagcgcgtggtcaggggtgcacagcacccaggagttcgacgacgcgctcaaggccgccaagaaccggctggtggtggtggagttcgcggcgagcgacagcgaggacagcagccagatctacccgaccatggtgcagctcagccgcacctgcggcgacgtggacttcctgctggtcctgcgcgacgacgagtcggaggccaccgaggagctgttccgccgggagggcgtcacgaaggtgcctcacttcaacttctacaagggcgccgagaaggtgcacgaggaggaggccatcggccccgagcggctcgcgggcgacgtcctctactacggcgacagccactcggcggtggtgcagctgcactcgcgggaggacgtggaggcgctcatcgacgagcaccgcggcgacaagggcaagctcgtcgtgctggacgtgggcctcaagcactgcgggccctgcgtcaaggtgtaccccaccgtgctgaagctgtcgcggtccatggtcgacaacaccgtcttcgcgcgcatgaacggcgacgagaacgacagctgcatggagttcctcagggccatgaagatcgtggaggtgcccactttcgtcttcatcagggacgtccagatcgtcggccgctacgtcggctccggcaagggggagctcgtcggtgagatcctccgatacaacggcgtcagggtcacctactgaagtgaagtagtgaacaacaaaccagtcagagtcagagcaagcaccagccgacaagcaacgcttcgatacaaaattgaagacgatacaaaattttagattactgcgacgtccatcgacgattggtcgatgtttagactgtttattgtgtaccattaccatacttgcccgttaatcgctactattcaatagtaatagtaggcttttgtagggctagcagctgcttgctgctttgcaactttaatcttgtttggtgatctatcaggttgattgtcc

SEQ ID NO: 11248 - protein, 288 aa, Zea mays subsp. mays
  peptide (1)..(288): Ceres Seq. ID no. 12351707
MASTSTFLSTLASRSAAADSLRSAVPSFAKIVRFLPAQAQISRRRRAAVLPTPRAAVSGTEKAPSSKHERVVRGAQHPGVRRRAQGRQEPAGGGGVRGERQRGQQPDLPDHGAAQPHLRRRGLPAGPARRRVGGHRGAVPPGGRHEGASLQLLQGRREGARGGGHRPRAARGRRPLLRRQPLGGGAAALAGGRGGAHRRAPRRQGQARRAGRGPQALRALRQGVPHRAEAVAVHGRQHRLRAHERRRERQLHGVPQGHEDRGGAHFRLHQGRPDRRPLRRLRQGGARR

SEQ ID NO: 11249 - protein, 190 aa, Zea mays subsp. mays
  peptide (1)..(190): Ceres Seq. ID no. 12351708
MVQLSRTCGDVDFLLVLRDDESEATEELFRREGVTKVPHFNFYKGAEKVHEEEAIGPERLAGDVLYYGDSHSAVVQLHSREDVEALIDEHRGDKGKLVVLDVGLKHCGPCVKVYPTVLKLSRSMVDNTVFARMNGDENDSCMEFLRAMKIVEVPTFVFIRDVQIVGRYVGSGKGELVGEILRYNGVRVTY

SEQ ID NO: 11250 - DNA, 1310 bp, Zea mays subsp. mays
  misc_feature (1)..(1310): Ceres Seq. ID no. 12411905
  misc_feature (1)..(1310): Ortholog of  Ceres SEQ ID NO 13594727 as cited in SEQ ID NO 52169
  misc_feature (1)..(1310): Ortholog of  Ceres SEQ ID NO 14310369 as cited in SEQ ID NO 54765
  misc_feature (1)..(1310): Ortholog of  Ceres SEQ ID NO 13638746 as cited in SEQ ID NO 59296
  misc_feature (1)..(1310): Ortholog of  Ceres SEQ ID NO 13596474 as cited in SEQ ID NO 62169
  misc_feature (1)..(1310): Ortholog of  Ceres SEQ ID NO 13598714 as cited in SEQ ID NO 62656
  misc_feature (1)..(1310): Ortholog of  Ceres SEQ ID NO 13596969 as cited in SEQ ID NO 63375
  misc_feature (1)..(1310): Ortholog of  Ceres SEQ ID NO 14302434 as cited in SEQ ID NO 63410
  misc_feature (1)..(1310): Ortholog of  Ceres SEQ ID NO 14302240 as cited in SEQ ID NO 64162
  misc_feature (1)..(1310): Ortholog of  Ceres SEQ ID NO 15170183 as cited in SEQ ID NO 65667
  misc_feature (1)..(1310): Ortholog of  Ceres SEQ ID NO 13596362 as cited in SEQ ID NO 67877
  misc_feature (1)..(1310): Ortholog of  Ceres SEQ ID NO 13587054 as cited in SEQ ID NO 0
aaaaacaccacacaacacaacacaataatacagcaaaggaggctagcagaagtgcaggattaataagctaagctagtagaaattaagcaaagcataggcacagccatggctacctcctctggttcttgccttattattagcctgttggtggtggtggtggcggcggcgctgtcggcctcaacggcgtcggcacagctgtcgtcgacgttctacgacacgtcgtgccccagcgcgatgtccaccatcagcagcggcgtgaactccgccgtggcgcagcaggctcgtgtgggggcgtcgctgctccggctccacttccacgactgcttcgtccaaggctgcgacgcgtccattctgctgaacgacacgtccggggagcagacccagccgccgaacctaactctgaacccgagggccttcgacgtcgtcaacagcatcaaggcgcaggtggaggcggcgtgcccgggcgtcgtctcctgcgccgacatcctcgccgtcgccgcccgcgacggagttgtcgcgctcggcgggccttcgtggaccgtgcttctgggcagaagggactcgaccggttcgttccctagccagacaagcgacctcccacctccgacgtcgagcctccaagcactgttagccgcgtacagcaagaagaacctcgacgcgaccgacatggtcgctctctcaggcgctcacacaatcgggcaggcccagtgctcgagcttcaacggccacatctacaacgacacgaacatcaacgcggccttcgcgacgtcgctcaaggccaactgccccatgtccggcggcagcagccctggcgccgctggacaccatgaccccgaccgtgttcgacaacgactactacaagaacctgctgtcgcagaaggggctgctgcactcggaccaggagctgttcaacaacggcagcaccgacagcacggtcagcaactttgcgtccagctcggccgccttcaccagcgccttcacggcggccatggtgaagatggggaacctcggcccgctcaccgggaccagtgggcagatcaggctcacctgctggaagctcaactcgtcctaataattaaggacggacgtccgatagacgatcctgcgcaatcgtatcgtacgtgcatgatacgcatacatctggaaactactataccaatgcaaacagagatctatacgtacgagtatgtataacgacgagtgatgtttgtatggatctacgtatgtaacaaggacctctcgtagcgcaaaggcgcgcgttgggagattaattaggtacacaagctattaccacattatatatcactcgc

SEQ ID NO: 11251 - protein, 362 aa, Zea mays subsp. mays
  peptide (1)..(362): Ceres Seq. ID no. 12411906
MATSSGSCLIISLLVVVVAAALSASTASAQLSSTFYDTSCPSAMSTISSGVNSAVAQQARVGASLLRLHFHDCFVQGCDASILLNDTSGEQTQPPNLTLNPRAFDVVNSIKAQVEAACPGVVSCADILAVAARDGVVALGGPSWTVLLGRRDSTGSFPSQTSDLPPPTSSLQALLAAYSKKNLDATDMVALSGAHTIGQAQCSSFNGHIYNDTNINAAFATSLKANCPMSGGSSPGAAGHHDPDRVRQRLLQEPAVAEGAAALGPGAVQQRQHRQHGQQLCVQLGRLHQRLHGGHGEDGEPRPAHRDQWADQAHLLEAQLVLIIKDGRPIDDPAQSYRTCMIRIHLETTIPMQTEIYTYEYV

SEQ ID NO: 11252 - protein, 319 aa, Zea mays subsp. mays
  peptide (1)..(319): Ceres Seq. ID no. 12411907
MSTISSGVNSAVAQQARVGASLLRLHFHDCFVQGCDASILLNDTSGEQTQPPNLTLNPRAFDVVNSIKAQVEAACPGVVSCADILAVAARDGVVALGGPSWTVLLGRRDSTGSFPSQTSDLPPPTSSLQALLAAYSKKNLDATDMVALSGAHTIGQAQCSSFNGHIYNDTNINAAFATSLKANCPMSGGSSPGAAGHHDPDRVRQRLLQEPAVAEGAAALGPGAVQQRQHRQHGQQLCVQLGRLHQRLHGGHGEDGEPRPAHRDQWADQAHLLEAQLVLIIKDGRPIDDPAQSYRTCMIRIHLETTIPMQTEIYTYEYV

SEQ ID NO: 11253 - DNA, 1475 bp, Zea mays subsp. mays
  misc_feature (1)..(1475): Ceres Seq. ID no. 12411901
  misc_feature (1)..(1475): Ortholog of  Ceres SEQ ID NO 15172020 as cited in SEQ ID NO 59739
agcagcgtttcgagcgcgtgacgcgtgacctgaaggtgacgcgggtgttctcgacgctggtggaggagatgaaggcgatcggcatcatagcggcgggcggcggcggcggcgaggcgtcgcagtgcacggacgtgatggcccccgtggcgcactcggagcgcagcccggtgctgctgctgatgggcggcgggatgggcgccggcaagagcacggtgctcaaggagctcaagcaggaggcattctggaccaacgcggaggccaacgccgtggtggtggaggcggacgcgttcaaggaggcggacgtcatctaccgcgccatcagctccatgggccaccacaacgacatgctccagacggcagagctggtccaccagtcgtcgacggatgcggcgtcgtcgctgctggtgacggcgctgaacgaggggcgggacgtcatcctggacggcacgctgtcctgggagcccttcgtggagcagaccatcgccatggcgcgcgccgtgcaccgccagcgctaccgcatgggcgtcggctacaaggtggccgacgacggcaccgtcaccgagaactactgggagcccgcgagcgacgacgccaccgagcaacccccgcggaggccctaccgcatcgaggtggtcggggtcgtctgcgacgcctacctcgccgtggcgaggggcatccggagggccatcatcacccggcgggccgtcagggtcaggtcccagctgcagtcgcacaagcgcttcgccgccgcgttccagcggtacagccgcctcgtggacggcgccaggctctacagcaccaactccatgggctctgccaagctcatcgcgtggaaggacgggatcggaaacagcctgctggtggagccccgggagttcgactgcctggagaaggtgagcgggctcaacgagcacgccacctccgtccacgacctctaccccgacggcaccaccacctgcggctcgcgttccatctgggaggacatgatcgtctcccacggcccgtgccgacacccagcgcgagctcagggaggccatccgctccgtcgagtccggcggcggccaaccggacacaccaccaacaacgccccagcgcgagctcctgggcttcatccgctccctggaggccgccaacgccgagcaagctgcagcaggtcagacaccgacagctacctgttagtggtgaaaatatgggccggatttttttagctagagcacaaccaaaaaacaatagcccacaacatgatccggcacgaaataatatgaaccacggttcgaaggcggatctagaccggaccccaaattctagcccgttgagccccggtatagctcatacatatgggtcgggtttgagccgacacggtccaatgaatcctatattatttgatttctttaatttattaagctacggattttatattgttgtgatatttggactatatatggtcaaattatgatatgattgtttatctcttt

SEQ ID NO: 11254 - protein, 401 aa, Zea mays subsp. mays
  peptide (1)..(401): Ceres Seq. ID no. 12411902
QRFERVTRDLKVTRVFSTLVEEMKAIGIIAAGGGGGEASQCTDVMAPVAHSERSPVLLLMGGGMGAGKSTVLKELKQEAFWTNAEANAVVVEADAFKEADVIYRAISSMGHHNDMLQTAELVHQSSTDAASSLLVTALNEGRDVILDGTLSWEPFVEQTIAMARAVHRQRYRMGVGYKVADDGTVTENYWEPASDDATEQPPRRPYRIEVVGVVCDAYLAVARGIRRAIITRRAVRVRSQLQSHKRFAAAFQRYSRLVDGARLYSTNSMGSAKLIAWKDGIGNSLLVEPREFDCLEKVSGLNEHATSVHDLYPDGTTTCGSRSIWEDMIVSHGPCRHPARAQGGHPLRRVRRRPTGHTTNNAPARAPGLHPLPGGRQRRASCSRSDTDSYLLVVKIWAGFF

SEQ ID NO: 11255 - protein, 379 aa, Zea mays subsp. mays
  peptide (1)..(379): Ceres Seq. ID no. 12411903
MKAIGIIAAGGGGGEASQCTDVMAPVAHSERSPVLLLMGGGMGAGKSTVLKELKQEAFWTNAEANAVVVEADAFKEADVIYRAISSMGHHNDMLQTAELVHQSSTDAASSLLVTALNEGRDVILDGTLSWEPFVEQTIAMARAVHRQRYRMGVGYKVADDGTVTENYWEPASDDATEQPPRRPYRIEVVGVVCDAYLAVARGIRRAIITRRAVRVRSQLQSHKRFAAAFQRYSRLVDGARLYSTNSMGSAKLIAWKDGIGNSLLVEPREFDCLEKVSGLNEHATSVHDLYPDGTTTCGSRSIWEDMIVSHGPCRHPARAQGGHPLRRVRRRPTGHTTNNAPARAPGLHPLPGGRQRRASCSRSDTDSYLLVVKIWAGFF

SEQ ID NO: 11256 - protein, 357 aa, Zea mays subsp. mays
  peptide (1)..(357): Ceres Seq. ID no. 12411904
MAPVAHSERSPVLLLMGGGMGAGKSTVLKELKQEAFWTNAEANAVVVEADAFKEADVIYRAISSMGHHNDMLQTAELVHQSSTDAASSLLVTALNEGRDVILDGTLSWEPFVEQTIAMARAVHRQRYRMGVGYKVADDGTVTENYWEPASDDATEQPPRRPYRIEVVGVVCDAYLAVARGIRRAIITRRAVRVRSQLQSHKRFAAAFQRYSRLVDGARLYSTNSMGSAKLIAWKDGIGNSLLVEPREFDCLEKVSGLNEHATSVHDLYPDGTTTCGSRSIWEDMIVSHGPCRHPARAQGGHPLRRVRRRPTGHTTNNAPARAPGLHPLPGGRQRRASCSRSDTDSYLLVVKIWAGFF

SEQ ID NO: 11257 - DNA, 1676 bp, Zea mays subsp. mays
  misc_feature (1)..(1676): Ceres Seq. ID no. 12411898
  misc_feature (1)..(1676): Ortholog of  Ceres SEQ ID NO 13593889 as cited in SEQ ID NO 53305
  misc_feature (1)..(1676): Ortholog of  Ceres SEQ ID NO 13581959 as cited in SEQ ID NO 56156
  misc_feature (1)..(1676): Ortholog of  Ceres SEQ ID NO 15171809 as cited in SEQ ID NO 57329
ctgttcttccacctgctggctgctcctgcctcccctgcgccccaaacccacccgcctcgccgtccccgcaggccgcagcctgctctcggctcccgccgccgtctaccgcgtcctgcggctgcggtgttgcgtcacctcgggttcgccttaacttccacaatcctcgccgtcctggtgctccgccgcccctccctttgtactcgcgctggagctgcagatccaccgcgacctggcgaccaattcctcctcccgctgaagaattggcgaccttggcctccgcccccgcggcgcggaggagtcaactgtggtagcaaccaccgcggaggctgcaagccttcggtaagggaggaaagttgacttgttggaagccggtccagggccgcgatgacgtcgaccgccgccggcgcgtcgtcgtcggcggcgaagagcgagtcctacctgcgggccgacaagatcgacctcgagagcctggacatccagctggagaagcagctggccaagacctgggagaagcacaaggggtcgtacaaccaggggcccagggaggactgggagatcgacctcgccaagctcgagattcgctacgtcatagcgcagggcacctacggcacggtgtatcgcggcacgtatgatgggcaggacgtcgcagtaaaactattggattggggtgaagatggctttgcgtcagaaactgaaactgccacactgcgagcatcatttaagcaggaggttgctgtctggcatgagctcaaccatccgaatgttacaaagtttgttggtgcatcaatgggtactacagaccttaagattccagccaatagttctaacagtggtgggcgcactgagctgccgccaagagcatgttgtgttgtggtcgaatatctcgctggaggatcactgaagcagtatttaataaagaacaggcgaaggaagcttgcatacaaggttgttgttcagatagcactggatcttgccagaggattgaactatctacattcaagaaagatagtacatcgggatgtaaaaactgaaaatatgctgctcgatacacagcgaaaccttaagattgctgattttggtgttgctcgtgttgaggctcagaatccaaaggacatgacaggcgcgactgggacacttggctacatggccccagaggtgcttgaaggcaagccatacaacagaaagtgtgatgtctacagttttggcatatgcttatgggaaatatactgctgtgacatgccatatccagacctcagttttgcagacgtctcgtccgccgtcgttcaccagaacctgcggcctgacatccctcgctgctgcccaagcccaatggcgaacatcatgcggaagtgctgggacgcaaacccggataagcgccctgacatggacgacgtggtgcggttcctggaggccctcgacacgagcaagggcggtggcatgataccagaaggccaggcaggcgggtgcttgtgtttcttcagagcccgtggtccttagaaccaaccaaccctttccagccatcctctacttgtctctgccctactacagtattggagccagatgtaggcctttgttgttcatcggataggggattgcagataacttgatgacaatctttgtgattggttgacacttgttatacgttctatagtgatgtgaataccagtgaggagtcc

SEQ ID NO: 11258 - protein, 370 aa, Zea mays subsp. mays
  peptide (1)..(370): Ceres Seq. ID no. 12411899
MTSTAAGASSSAAKSESYLRADKIDLESLDIQLEKQLAKTWEKHKGSYNQGPREDWEIDLAKLEIRYVIAQGTYGTVYRGTYDGQDVAVKLLDWGEDGFASETETATLRASFKQEVAVWHELNHPNVTKFVGASMGTTDLKIPANSSNSGGRTELPPRACCVVVEYLAGGSLKQYLIKNRRRKLAYKVVVQIALDLARGLNYLHSRKIVHRDVKTENMLLDTQRNLKIADFGVARVEAQNPKDMTGATGTLGYMAPEVLEGKPYNRKCDVYSFGICLWEIYCCDMPYPDLSFADVSSAVVHQNLRPDIPRCCPSPMANIMRKCWDANPDKRPDMDDVVRFLEALDTSKGGGMIPEGQAGGCLCFFRARGP

SEQ ID NO: 11259 - protein, 236 aa, Zea mays subsp. mays
  peptide (1)..(236): Ceres Seq. ID no. 12411900
MGTTDLKIPANSSNSGGRTELPPRACCVVVEYLAGGSLKQYLIKNRRRKLAYKVVVQIALDLARGLNYLHSRKIVHRDVKTENMLLDTQRNLKIADFGVARVEAQNPKDMTGATGTLGYMAPEVLEGKPYNRKCDVYSFGICLWEIYCCDMPYPDLSFADVSSAVVHQNLRPDIPRCCPSPMANIMRKCWDANPDKRPDMDDVVRFLEALDTSKGGGMIPEGQAGGCLCFFRARGP

SEQ ID NO: 11260 - DNA, 818 bp, Zea mays subsp. mays
  misc_feature (1)..(818): Ceres Seq. ID no. 12381267
  misc_feature (1)..(818): Ortholog of  Ceres SEQ ID NO 13594828 as cited in SEQ ID NO 56431
  misc_feature (1)..(818): Ortholog of  Ceres SEQ ID NO 14316363 as cited in SEQ ID NO 57222
  misc_feature (1)..(818): Ortholog of  Ceres SEQ ID NO 15177754 as cited in SEQ ID NO 57945
  misc_feature (1)..(818): Ortholog of  Ceres SEQ ID NO 13594354 as cited in SEQ ID NO 58082
  misc_feature (1)..(818): Ortholog of  Ceres SEQ ID NO 14316408 as cited in SEQ ID NO 58228
  misc_feature (1)..(818): Ortholog of  Ceres SEQ ID NO 13528075 as cited in SEQ ID NO 60188
  misc_feature (1)..(818): Ortholog of  Ceres SEQ ID NO 13600483 as cited in SEQ ID NO 0
ggactcacgaagcagcacactctgcactctcggcaacaactgacggccggaggaagaaggcgcagacgacaagcagaagcttgtgccatcgatcaatggcggcggtgacaaagatctacgtcgtgtactactcgacgtacggccacgtggcgaggctggcggaggagatcaagaagggcgccgactccgtggacggcgtcgaggcaaccatctggcaggtggcggagacgctgccggaggaggcgctggcgaagatgcgcgcgccggcgaggagcgaggagcacccggtgatctcgggcaagcagctggtggacgcggacggcatcctgttcggcttcccggcgcggttcggcatgatggcggcgcagatgaaggcgctgttcgactccacgggcggcctctggcagcggcaggcgctggcgggcaagcccgcggggttcttcttcgcgctgggcacccagggcggcgggcaggaggagacggcgctcacggccgtgtcgcagctcacgcaccacggcatggtgttcgtgcccgtgggctacacgttcggcgccggcatgttcgacatggacgaggtcaggtgctgcagcccgtacggggccggcacgttcgccggcgccgacgggaggagcaggctgcccagcgacgccgagctgcagatggccgcgcaccagggcagctatttcgccgccttcgccaagaagctcaaggcgggagcggccgtcgtggcctgagcctgcctgagtagtgctctctcctctctgcccatcgatgccagctgctcttgtctgcggaaataaaataaagctccattacgc

SEQ ID NO: 11261 - protein, 243 aa, Zea mays subsp. mays
  peptide (1)..(243): Ceres Seq. ID no. 12381268
THEAAHSALSATTDGRRKKAQTTSRSLCHRSMAAVTKIYVVYYSTYGHVARLAEEIKKGADSVDGVEATIWQVAETLPEEALAKMRAPARSEEHPVISGKQLVDADGILFGFPARFGMMAAQMKALFDSTGGLWQRQALAGKPAGFFFALGTQGGGQEETALTAVSQLTHHGMVFVPVGYTFGAGMFDMDEVRCCSPYGAGTFAGADGRSRLPSDAELQMAAHQGSYFAAFAKKLKAGAAVVA

SEQ ID NO: 11262 - protein, 212 aa, Zea mays subsp. mays
  peptide (1)..(212): Ceres Seq. ID no. 12381269
MAAVTKIYVVYYSTYGHVARLAEEIKKGADSVDGVEATIWQVAETLPEEALAKMRAPARSEEHPVISGKQLVDADGILFGFPARFGMMAAQMKALFDSTGGLWQRQALAGKPAGFFFALGTQGGGQEETALTAVSQLTHHGMVFVPVGYTFGAGMFDMDEVRCCSPYGAGTFAGADGRSRLPSDAELQMAAHQGSYFAAFAKKLKAGAAVVA

SEQ ID NO: 11263 - protein, 159 aa, Zea mays subsp. mays
  peptide (1)..(159): Ceres Seq. ID no. 12381270
MRAPARSEEHPVISGKQLVDADGILFGFPARFGMMAAQMKALFDSTGGLWQRQALAGKPAGFFFALGTQGGGQEETALTAVSQLTHHGMVFVPVGYTFGAGMFDMDEVRCCSPYGAGTFAGADGRSRLPSDAELQMAAHQGSYFAAFAKKLKAGAAVVA

SEQ ID NO: 11264 - DNA, 1175 bp, Zea mays subsp. mays
  misc_feature (1)..(1175): Ceres Seq. ID no. 12359591
  misc_feature (1)..(1175): Ortholog of  Ceres SEQ ID NO 13598313 as cited in SEQ ID NO 68293
taatcgaaaatcacactgtggcaactacggccacaactccaggacctgcgggagagaaaccatgctctgcgaagctggccgacaacggcggccatggcggcctaaggctcttcggagtgcaggtccgtatcggcggcggcggcgcaggctcggcgtccatgaagaagagctacagcatggactgcctgcagctcgcggctcctggttgttccctcgtctcgccgtcgacgtcctcctcgttgtcgtcgctgctgctgatgtcgattgaggagggatcggagaggggggcgccaaatgggtacctttctgacggacctcatggcagagctgtgcaggagaggaaaaaaggagttccatgaagcgaggaggagcacaggcagttcctttccggcctggagaagctgggcaagggcgactggcgaggcatctccaggagctacgtgccgacgaggaccccgacgcaggtcgccagccatgcacagaagttcttcctcaggcagagcagcttggggaagaagaagcgccgctccagcctctttgacatggtgccgatttgcgagaacagtgcgagcatctccgatccgctgggcagcgaaggggcctcaacctctctgtcgctgaacgtgccacgccacggcgtcacctccgtctccgagggggcggccttggacctgaattcgacggaggaagacgacagcagggcggacgcgtcgtcggcatcggcatcaggtgcagggaccagaccaccgttcccggcagcgcagacggagccgctgctgcagccttcgtcgcttggccatgggcgcggtcaccactgctctcctttggacctggagctggccatgtcgctgcctgccccatccatcggaacatgacgcgccgccgccgccgtacttatcgccatggaatcccacgcaggtcgcgccataattcgtcagcgcaggttgccaaggccgaggccgtgcgtgcctcgcacaaacgtctcacgtgtaatcagaatcgggttcctgagtatgactatgccatgttccaggttacgctagttgctagctagcttttttttttaagctctgttaatgatattgttacgaaaaatagattctaacataggttcactgttatatatgttatgtagaccatatatttactttgatattaaatttgttttttatggc

SEQ ID NO: 11265 - protein, 118 aa, Zea mays subsp. mays
  peptide (1)..(118): Ceres Seq. ID no. 12359592
IENHTVATTATTPGPAGEKPCSAKLADNGGHGGLRLFGVQVRIGGGGAGSASMKKSYSMDCLQLAAPGCSLVSPSTSSSLSSLLLMSIEEGSERGAPNGYLSDGPHGRAVQERKKGVP

SEQ ID NO: 11266 - protein, 110 aa, Zea mays subsp. mays
  peptide (1)..(110): Ceres Seq. ID no. 12359593
MVPICENSASISDPLGSEGASTSLSLNVPRHGVTSVSEGAALDLNSTEEDDSRADASSASASGAGTRPPFPAAQTEPLLQPSSLGHGRGHHCSPLDLELAMSLPAPSIGT

SEQ ID NO: 11267 - protein, 108 aa, Zea mays subsp. mays
  peptide (1)..(108): Ceres Seq. ID no. 12359594
MGTFLTDLMAELCRRGKKEFHEARRSTGSSFPAWRSWARATGEASPGATCRRGPRRRSPAMHRSSSSGRAAWGRRSAAPASLTWCRFARTVRASPIRWAAKGPQPLCR

SEQ ID NO: 11268 - protein, 66 aa, Zea mays subsp. mays
  peptide (1)..(66): Ceres Seq. ID no. 12359595
MKKSYSMDCLQLAAPGCSLVSPSTSSSLSSLLLMSIEEGSERGAPNGYLSDGPHGRAVQERKKGVP

SEQ ID NO: 11269 - DNA, 1413 bp, Zea mays subsp. mays
  misc_feature (1)..(1413): Ceres Seq. ID no. 12341043
  misc_feature (1)..(1413): Ortholog of  Ceres SEQ ID NO 12616669 as cited in SEQ ID NO 63669
aagcatttaggtcttacgacgcgcccaaagctcacgccggacctgctcctctccgacggcggcatcggcttcgtgctccgctactttcccaaggcgttcaagccccgcccccgcccaggccacgaggtggacgacctcgccaacctcatcaagctctacgcggactggcactcccgcctgatcccctactactccttcgaacagttcgtgcgcaaactcgagaaattgggtgccggcaaccgcgtcagggacgatggtgggcctctctgaaggggagaaacacttcatccgcggcggcattgcacaagaccttcgcactgatggacgtaggcggctgcagttccggtccctctccgtccaaaccggagtcattccacaggccgaatggctcagcgcgtgttaggttgggggccactgatataatcgctagtgtcaaggctgaactaggaaaaccaagcattcttcaccctgacaaaggaaaagttgccatttttgtcgactgtagtccaaccgctgagcctctgtttgagggtagaggctctgaagaattgtctgctgagctctctgtttccctgcaaagatgcttgttgggtggtaaaagtggtgctggtgctgcaattgatctgtcatccctaattgttgttgatggaaaggtctgctgggatctgtacattgatgggcttgtggtcagttctgatggtaatttgctagatgcgctagctgttgcgataaaggttgctttgagtgatacaggtataccaaaagttaatgtttctgttagtgctgcatctgatgaggaacctgaagttgatgtaagtgatgaggaatttctgcagtttgacacatccggtgtgcctgttattattacattaaccaaggtgggtcggcactacatcgttgatgccacctcagaggaagaatcccagatgagttctgcagtgtcggtgtcagtcaacaggcatggccagatatgcgggcttaccaagaggggaggggcagggctggatccaagcgtcatcttcgacatgatatctgtcgccaagcatgtgagccagcagttcatctccctcttggattcagagattgccgccgccgaagctgaagaagaggctcagtgattgatgaaaaggaaaaaggactggttgcgtaaatgctcgtgtgttccaacttcaaccaaatgctgtagaaatcttcaggaatttggttccatttttatgttattattagtagtagtaaacaccgaggatttggatcctgggaacgaacgacgtcgtgttggctttggctgggctcagaggaacgaatactgaatcttgggtctgatgatctgatcctcttgtgcccccaatccgatgataaatttggcccctctcataccaaaccaaacactatggatttcctccgtccgttttc

SEQ ID NO: 11270 - protein, 371 aa, Zea mays subsp. mays
  peptide (1)..(371): Ceres Seq. ID no. 12341044
AFRSYDAPKAHAGPAPLRRRHRLRAPLLSQGVQAPPPPRPRGGRPRQPHQALRGLALPPDPLLLLRTVRAQTREIGCRQPRQGRWWASLKGRNTSSAAALHKTFALMDVGGCSSGPSPSKPESFHRPNGSARVRLGATDIIASVKAELGKPSILHPDKGKVAIFVDCSPTAEPLFEGRGSEELSAELSVSLQRCLLGGKSGAGAAIDLSSLIVVDGKVCWDLYIDGLVVSSDGNLLDALAVAIKVALSDTGIPKVNVSVSAASDEEPEVDVSDEEFLQFDTSGVPVIITLTKVGRHYIVDATSEEESQMSSAVSVSVNRHGQICGLTKRGGAGLDPSVIFDMISVAKHVSQQFISLLDSEIAAAEAEEEAQ

SEQ ID NO: 11271 - protein, 265 aa, Zea mays subsp. mays
  peptide (1)..(265): Ceres Seq. ID no. 12341045
MDVGGCSSGPSPSKPESFHRPNGSARVRLGATDIIASVKAELGKPSILHPDKGKVAIFVDCSPTAEPLFEGRGSEELSAELSVSLQRCLLGGKSGAGAAIDLSSLIVVDGKVCWDLYIDGLVVSSDGNLLDALAVAIKVALSDTGIPKVNVSVSAASDEEPEVDVSDEEFLQFDTSGVPVIITLTKVGRHYIVDATSEEESQMSSAVSVSVNRHGQICGLTKRGGAGLDPSVIFDMISVAKHVSQQFISLLDSEIAAAEAEEEAQ

SEQ ID NO: 11272 - DNA, 1710 bp, Zea mays subsp. mays
  misc_feature (1)..(1710): Ceres Seq. ID no. 12374127
  misc_feature (1)..(1710): Ortholog of  Ceres SEQ ID NO 15176457 as cited in SEQ ID NO 55547
  misc_feature (1)..(1710): Ortholog of  Ceres SEQ ID NO 13594349 as cited in SEQ ID NO 58161
  misc_feature (1)..(1710): Ortholog of  Ceres SEQ ID NO 13663419 as cited in SEQ ID NO 66561
  misc_feature (1)..(1710): Ortholog of  Ceres SEQ ID NO 15177892 as cited in SEQ ID NO 0
atatggcgacaatggcagggcgtcttgttgcccggacgtcgtcctcctcggccaagcgccagcggttcagctccgctgttctcctcctcgctctcttccagagctcgtggtgctacgacgacgcggcggcgacgacgacggtggattacggttacaacaacgagcacgaggccgaccgggtggcgttcctccccgggcagccgaggagccctccggtgtcgcagttcgccgggtacgtcaccgtgaacgagcgcaacgggagggcgctcttctactggttcttcgaggcccagacgtcgccggcgcacaagcctctcctactctggctcaatggaggacctggttgctcgtccgttgggtacggagctgcttctgagttggggcctctcagagtcaacagacacggggcagggcttgagttcaacaattttgcgtggaacaaagaggccaacttgctcttcctagagtctcctgctggggttggcttctcctacaccaacacatcatccgacctcaccaaactggatgatgctttcgtagctgaagatgcatacagcttcctagtaaattggctcaaaaggtttccgcagtataggagccacgaattttatatctccggggagagctacgcaggtcactatgtgccacaacttgctgaacttgtctatgacaggaacaagggcaacaccaacacacacatcaaccttaaaggtttcatggtcggtaatccactaactgacgactactacgactcaaaggggctggctgaatatgcttggagccactcagtagtgtcagacgaagtttacgagcgcatcaagaaggtctgcgacttcagggtctcaaactggaccgatgactgcgatacagcgatgagcgccgtgttcagccagtaccaggagatcgacatctacaacatctacgcgcccagatgcaacctccctccgtcgtcagctgcacttgcacttgctgttgacaaggcagtcgtagccaacagacaggaacatttcaggcgaaggatcaggatgttctccggatatgacccgtgctactcttcgaacgcggaaaagtacttcaacgatgcaggtgtgcagacggcattccatgcgaatgccagtggagctcggaaatgggaagtttgcagtgattcaattttgaggtcatacaatttctcggtgctttctgtcttaccaatctactctaagctcatcaaagcaggactgagagtgtggctctacagtggggatgcagatggtagggtcccggtgatcggatcgcggtattgcgtggaagccctaggcctgcctgtcaagacgcagtggcaaccatggtacctgaacaaacaggttgcgggcagatttgtggagtaccatggcatgacgatggtgacgatcagaggagcagggcatttggtgcctctcaacaaacctgcagaagggctcgcactcatcgacacattccttcagggcaaacagcttcccacacacagatgacaagagtacttagggttgtgattgtgatgagggttattgttttcaaaaaaaaaatcaaggattggacaaactatgtgccccacacacacgggctaatcagtaaggatttcatttccagtttctgcataaattgggttggctacaaatagagctgcggtctgaaatacaattttcagcttacataaaaaatattaaatgaataagtatgataaaacct

SEQ ID NO: 11273 - protein, 496 aa, Zea mays subsp. mays
  peptide (1)..(496): Ceres Seq. ID no. 12374128
MATMAGRLVARTSSSSAKRQRFSSAVLLLALFQSSWCYDDAAATTTVDYGYNNEHEADRVAFLPGQPRSPPVSQFAGYVTVNERNGRALFYWFFEAQTSPAHKPLLLWLNGGPGCSSVGYGAASELGPLRVNRHGAGLEFNNFAWNKEANLLFLESPAGVGFSYTNTSSDLTKLDDAFVAEDAYSFLVNWLKRFPQYRSHEFYISGESYAGHYVPQLAELVYDRNKGNTNTHINLKGFMVGNPLTDDYYDSKGLAEYAWSHSVVSDEVYERIKKVCDFRVSNWTDDCDTAMSAVFSQYQEIDIYNIYAPRCNLPPSSAALALAVDKAVVANRQEHFRRRIRMFSGYDPCYSSNAEKYFNDAGVQTAFHANASGARKWEVCSDSILRSYNFSVLSVLPIYSKLIKAGLRVWLYSGDADGRVPVIGSRYCVEALGLPVKTQWQPWYLNKQVAGRFVEYHGMTMVTIRGAGHLVPLNKPAEGLALIDTFLQGKQLPTHR

SEQ ID NO: 11274 - protein, 493 aa, Zea mays subsp. mays
  peptide (1)..(493): Ceres Seq. ID no. 12374129
MAGRLVARTSSSSAKRQRFSSAVLLLALFQSSWCYDDAAATTTVDYGYNNEHEADRVAFLPGQPRSPPVSQFAGYVTVNERNGRALFYWFFEAQTSPAHKPLLLWLNGGPGCSSVGYGAASELGPLRVNRHGAGLEFNNFAWNKEANLLFLESPAGVGFSYTNTSSDLTKLDDAFVAEDAYSFLVNWLKRFPQYRSHEFYISGESYAGHYVPQLAELVYDRNKGNTNTHINLKGFMVGNPLTDDYYDSKGLAEYAWSHSVVSDEVYERIKKVCDFRVSNWTDDCDTAMSAVFSQYQEIDIYNIYAPRCNLPPSSAALALAVDKAVVANRQEHFRRRIRMFSGYDPCYSSNAEKYFNDAGVQTAFHANASGARKWEVCSDSILRSYNFSVLSVLPIYSKLIKAGLRVWLYSGDADGRVPVIGSRYCVEALGLPVKTQWQPWYLNKQVAGRFVEYHGMTMVTIRGAGHLVPLNKPAEGLALIDTFLQGKQLPTHR

SEQ ID NO: 11275 - protein, 258 aa, Zea mays subsp. mays
  peptide (1)..(258): Ceres Seq. ID no. 12374130
MVGNPLTDDYYDSKGLAEYAWSHSVVSDEVYERIKKVCDFRVSNWTDDCDTAMSAVFSQYQEIDIYNIYAPRCNLPPSSAALALAVDKAVVANRQEHFRRRIRMFSGYDPCYSSNAEKYFNDAGVQTAFHANASGARKWEVCSDSILRSYNFSVLSVLPIYSKLIKAGLRVWLYSGDADGRVPVIGSRYCVEALGLPVKTQWQPWYLNKQVAGRFVEYHGMTMVTIRGAGHLVPLNKPAEGLALIDTFLQGKQLPTHR

SEQ ID NO: 11276 - DNA, 1371 bp, Zea mays subsp. mays
  misc_feature (1)..(1371): Ceres Seq. ID no. 12340997
  misc_feature (1)..(1371): Ortholog of  Ceres SEQ ID NO 14313159 as cited in SEQ ID NO 54676
  misc_feature (1)..(1371): Ortholog of  Ceres SEQ ID NO 13598547 as cited in SEQ ID NO 65200
  misc_feature (1)..(1371): Ortholog of  Ceres SEQ ID NO 12617920 as cited in SEQ ID NO 65480
gaaaccgtaaaccgtgaatggccatcgaggtccaaaaatccatctggattctggagagaggagaccccaaaatcgcagcgcgcgaaaacgcaggagcaacccgcccactcgccaccaccgcccgcgcgcacggcggcgaccgatggccccgctcgtgccgatgtcgcagccatgggtggagaaataccggccgaggcaggtcaaggatgtggctcaccaggaggaggtgattcgggtgctcaacaacaccctccagaccgccgacctgccgcacatgctgttctacggcccgccggggacgggaaagaccaccaccgcactagccatcgcctaccagctctacggtccagagctgtataagtcaagggttttggagctcaatgctagtgatgatcgtggaattaatgtggtgaggacgaaaatcaagaactttgctgctgttgctgttggtactgcacggaaagctggttatccctgcccaccttacaagattattatacttgacgaagcagattcaatgacagaagatgcccagaatgctttgaggcgtaccacagagacttactccaaagtgaccagattcttttttatatgcaactatatcagcaggataatagaaccacttgcatcaagatgtgcaaagtttaggttcaagcctctttcagaagaagtgatgagtagtcgcattatgcatatatgcaatgaagaaggcctcaatcttaatgctcaggcgatgtccacactgagtgtcatttctcaaggtgatcttcgtcgtgctataacctaccttcagagtgcagctcgcttatttggatcttctatctcttccagtgacctgatcagtgtttcaggggttatccctgaagatgttgtcaagtcactgcttgcagcctgcagatctggtgaatttgacgtggcaaacaaggaagttagcagcattatagcagatgggtatccggtctcacagctgatggcacagtttctagatgtgattgttagcgcggatgatattccagatgatcaaaaggcaaggatatgtaaaaagcttggggaaactgataagtgcttggttgatggggcagatgagtatctacagctgctggatgtcgccagcgagactattcgcgctcttttcaacatgccgcggacgctggtcttctaagagttcataaagaggaatggcggtttcgatccttggcgaaaactttttcctgcctcttagatgccgcccaaggttaatctgcctcccctactgctctgatgttgttagcttcgtgatgggttgaaaaagcgatgaactcagccttaaaatcccgctgaactgtgcctgtggatggatgcccaatatgacaatgaacatttctcatcgtt

SEQ ID NO: 11277 - protein, 339 aa, Zea mays subsp. mays
  peptide (1)..(339): Ceres Seq. ID no. 12340998
MAPLVPMSQPWVEKYRPRQVKDVAHQEEVIRVLNNTLQTADLPHMLFYGPPGTGKTTTALAIAYQLYGPELYKSRVLELNASDDRGINVVRTKIKNFAAVAVGTARKAGYPCPPYKIIILDEADSMTEDAQNALRRTTETYSKVTRFFFICNYISRIIEPLASRCAKFRFKPLSEEVMSSRIMHICNEEGLNLNAQAMSTLSVISQGDLRRAITYLQSAARLFGSSISSSDLISVSGVIPEDVVKSLLAACRSGEFDVANKEVSSIIADGYPVSQLMAQFLDVIVSADDIPDDQKARICKKLGETDKCLVDGADEYLQLLDVASETIRALFNMPRTLVF

SEQ ID NO: 11278 - protein, 333 aa, Zea mays subsp. mays
  peptide (1)..(333): Ceres Seq. ID no. 12340999
MSQPWVEKYRPRQVKDVAHQEEVIRVLNNTLQTADLPHMLFYGPPGTGKTTTALAIAYQLYGPELYKSRVLELNASDDRGINVVRTKIKNFAAVAVGTARKAGYPCPPYKIIILDEADSMTEDAQNALRRTTETYSKVTRFFFICNYISRIIEPLASRCAKFRFKPLSEEVMSSRIMHICNEEGLNLNAQAMSTLSVISQGDLRRAITYLQSAARLFGSSISSSDLISVSGVIPEDVVKSLLAACRSGEFDVANKEVSSIIADGYPVSQLMAQFLDVIVSADDIPDDQKARICKKLGETDKCLVDGADEYLQLLDVASETIRALFNMPRTLVF

SEQ ID NO: 11279 - protein, 295 aa, Zea mays subsp. mays
  peptide (1)..(295): Ceres Seq. ID no. 12341000
MLFYGPPGTGKTTTALAIAYQLYGPELYKSRVLELNASDDRGINVVRTKIKNFAAVAVGTARKAGYPCPPYKIIILDEADSMTEDAQNALRRTTETYSKVTRFFFICNYISRIIEPLASRCAKFRFKPLSEEVMSSRIMHICNEEGLNLNAQAMSTLSVISQGDLRRAITYLQSAARLFGSSISSSDLISVSGVIPEDVVKSLLAACRSGEFDVANKEVSSIIADGYPVSQLMAQFLDVIVSADDIPDDQKARICKKLGETDKCLVDGADEYLQLLDVASETIRALFNMPRTLVF

SEQ ID NO: 11280 - DNA, 1665 bp, Zea mays subsp. mays
  misc_feature (1)..(1665): Ceres Seq. ID no. 13633473
  misc_feature (1)..(1665): Ortholog of  Ceres SEQ ID NO 15171430 as cited in SEQ ID NO 51500
  misc_feature (1)..(1665): Ortholog of  Ceres SEQ ID NO 14304944 as cited in SEQ ID NO 53041
  misc_feature (1)..(1665): Ortholog of  Ceres SEQ ID NO 14307253 as cited in SEQ ID NO 54783
  misc_feature (1)..(1665): Ortholog of  Ceres SEQ ID NO 15172476 as cited in SEQ ID NO 54945
  misc_feature (1)..(1665): Ortholog of  Ceres SEQ ID NO 13594213 as cited in SEQ ID NO 57038
  misc_feature (1)..(1665): Ortholog of  Ceres SEQ ID NO 14312300 as cited in SEQ ID NO 58632
  misc_feature (1)..(1665): Ortholog of  Ceres SEQ ID NO 15176106 as cited in SEQ ID NO 60324
  misc_feature (1)..(1665): Ortholog of  Ceres SEQ ID NO 13654989 as cited in SEQ ID NO 63117
  misc_feature (1)..(1665): Ortholog of  Ceres SEQ ID NO 14313228 as cited in SEQ ID NO 67057
  misc_feature (1)..(1665): Ortholog of  Ceres SEQ ID NO 13584744 as cited in SEQ ID NO 69137
attaaccgcctctccctcgctcctctcgctcgctcggctcactccctctccaaagcggcagcctcacgcagtcacgcgctccaccacgccacctccctctactcactcatgttgttttccgtccatccgcccaccggttcgtagcccgcgccgcaaaaccctagccccgggaggatcgcggggcgcctccgcggtgccagcgacgtggctcgtttgatccgattgctggtcgagccccgcccctcgctgccgcgcttcgctccggctgtgcagcggcgtgagcaccgagcacactcgcgaatggggaactgctggggtgcgcggatcaaggatgggagccctcaccctggcgcctcaggaatgttctcaaagagtagtggcaaggatgggagtaggcttagcggctgtagtagtcgagcctcttcagcttctatgccaccaagtgcgaagactgaatgtgaaatcctgcaatccgccaatgttaagatcttcaccttcaataatctcaaggcagccacaaggaatttccgtcctgatagtgttctaggtgaaggagggtttggatctgtctataaaggatggatagatgagaacacattatcaccttgcagacctggcactggaatcgctgttgctgtgaaaagactcaaccatgagggtttgcaagggcaccgagagtggttggcggaagttaattacctaggtcagttctgtcatcccaaccttgtcaagctgattggatactgcttagaggatgagcaccgactgctagtatacgagttcatgccccgtgggaacatggaaaaccatctgtttaggagaggctcatacttccaacctctgtcatggaaccttagaatgaaggttgcactgggagcagcaaaaggactagcttaccttcatagtgcagaggcaaaagttatttaccgagattttaagacttcgaacatcctccttgacacagattattctgcgaagctttctgattttggattggctaaggatggtcctgtcggtgagaagagccatgtgtccacaagagttatgggaacatatggttatgcagctcctgagtatctttcaacaggtcacctaactgcaaagagcgacatctatagctttggggtagtgcttctggagatgctgtcaggccgccgcgccatcgacaagaaccgcccccagggtgagcacaatcttgtggagtgggctcgaccttacctcacacataagcgcaagatattccggatcctggatacgaggctggaaggtcaatacaatctgaacggtgcacaaacaattgctgcccttgctctcgaatgcctatcctacgaagctaagatgaggccgactatggacgctgtggttgctattctagaagagctccagggctctggtgaagccgagaagaagcttcaagaacccaaggccggaaccaaacaggcacctgctgctgtgagtgctagcatgagcagcagccgcaagcctcgccggaaaagtctgggagacacaaaggagactgttggtggtccagatcccaaaccattggcccattctcgttagcaagggaaagcattgcctggtcattgtcgttagttagactgtagctcgcttgtgaatatgctatggtctgtgtatgtatgttcagagggtaatcgggcttttggc

SEQ ID NO: 11281 - protein, 419 aa, Zea mays subsp. mays
  peptide (1)..(419): Ceres Seq. ID no. 13633474
MGNCWGARIKDGSPHPGASGMFSKSSGKDGSRLSGCSSRASSASMPPSAKTECEILQSANVKIFTFNNLKAATRNFRPDSVLGEGGFGSVYKGWIDENTLSPCRPGTGIAVAVKRLNHEGLQGHREWLAEVNYLGQFCHPNLVKLIGYCLEDEHRLLVYEFMPRGNMENHLFRRGSYFQPLSWNLRMKVALGAAKGLAYLHSAEAKVIYRDFKTSNILLDTDYSAKLSDFGLAKDGPVGEKSHVSTRVMGTYGYAAPEYLSTGHLTAKSDIYSFGVVLLEMLSGRRAIDKNRPQGEHNLVEWARPYLTHKRKIFRILDTRLEGQYNLNGAQTIAALALECLSYEAKMRPTMDAVVAILEELQGSGEAEKKLQEPKAGTKQAPAAVSASMSSSRKPRRKSLGDTKETVGGPDPKPLAHSR

SEQ ID NO: 11282 - protein, 399 aa, Zea mays subsp. mays
  peptide (1)..(399): Ceres Seq. ID no. 13633475
MFSKSSGKDGSRLSGCSSRASSASMPPSAKTECEILQSANVKIFTFNNLKAATRNFRPDSVLGEGGFGSVYKGWIDENTLSPCRPGTGIAVAVKRLNHEGLQGHREWLAEVNYLGQFCHPNLVKLIGYCLEDEHRLLVYEFMPRGNMENHLFRRGSYFQPLSWNLRMKVALGAAKGLAYLHSAEAKVIYRDFKTSNILLDTDYSAKLSDFGLAKDGPVGEKSHVSTRVMGTYGYAAPEYLSTGHLTAKSDIYSFGVVLLEMLSGRRAIDKNRPQGEHNLVEWARPYLTHKRKIFRILDTRLEGQYNLNGAQTIAALALECLSYEAKMRPTMDAVVAILEELQGSGEAEKKLQEPKAGTKQAPAAVSASMSSSRKPRRKSLGDTKETVGGPDPKPLAHSR

SEQ ID NO: 11283 - protein, 375 aa, Zea mays subsp. mays
  peptide (1)..(375): Ceres Seq. ID no. 13633476
MPPSAKTECEILQSANVKIFTFNNLKAATRNFRPDSVLGEGGFGSVYKGWIDENTLSPCRPGTGIAVAVKRLNHEGLQGHREWLAEVNYLGQFCHPNLVKLIGYCLEDEHRLLVYEFMPRGNMENHLFRRGSYFQPLSWNLRMKVALGAAKGLAYLHSAEAKVIYRDFKTSNILLDTDYSAKLSDFGLAKDGPVGEKSHVSTRVMGTYGYAAPEYLSTGHLTAKSDIYSFGVVLLEMLSGRRAIDKNRPQGEHNLVEWARPYLTHKRKIFRILDTRLEGQYNLNGAQTIAALALECLSYEAKMRPTMDAVVAILEELQGSGEAEKKLQEPKAGTKQAPAAVSASMSSSRKPRRKSLGDTKETVGGPDPKPLAHSR

SEQ ID NO: 11284 - DNA, 1474 bp, Zea mays subsp. mays
  misc_feature (1)..(1474): Ceres Seq. ID no. 12411879
  misc_feature (1)..(1474): Ortholog of  Ceres SEQ ID NO 13596523 as cited in SEQ ID NO 62578
gctttccacaaaatctgtggagattattcgaaaccatctcgtcgctcacgaacgcgtcagaggttttgcagaaacggagcgcgtgcggcgttcgtcggcaacgttggcgtccatggagagcaccgcggtccgaggaagaggcagaaggccgcctcggcctctggatccgtggccccgtacttgccccaggagctcgtacggaacatcctcctccgcctgccttccaggtccgtcctccgcttccgcgccgtttgcaaggactggctccggatcgtctccgaccgcgagttcgcgccgaccacaaccgccaccagccggcgatgcccctcgtctccttcctccgcagcgccgccggtagcaagagggggcagacggactgctgcgtcgacgcatttgacctcagcgccgacagtttccggtccgtcgtccggttcgccgacaaggggacgcggtgcagcagcttcgacatccacggctcctgcgacggtctcctccttctcagcttcgatgcccgcttctacgtttgcaacccggcaacgcaccagtggacgcgcctcccggcgcccctccgcgcctcgtggctcgccggcttctaccgccacgagcccaccggagagtaccgggccttgttctaccggggccagtggcccgggacggactactacatcatggtggcggactccaggaaagggaggggaattggcctgccgtcggagaaatatgggtacaagttcaggagacaaccgtatagcctgccggtcctgctccgcggccacctccactggatggcagccattgaaggctacgactacgagatgttggcgttcaacacgacgactgaaaagttcacggttatgtgccctcctgtggttcggtggcacatgtcgctagctgaggtgggcaacgagctcgcgttgttgagctgcggccaccaggtcccgatgctcgagctctggattctgaaggattacgagaacaagagctgggtctgcacgcactggattcggctgccggagttgaagatgagcaccttcgcgttcgatgacttctcgcgaatgattttcgtgtcagaaaagggagttctgatagccaccccggagcagaagctgttgcgctatgacctgaatgggactctgctggaaagcttcccttgcaataatggcagccatctcaagattactccgtacaccttcaaggagagcctcgttcggcatgcattctttgagacaccggattgcaatgccgatggtcatgaagatgaagatgaaccagaaccaccacctttcttcctggggctgtagacccggacccggtggtgatggatctcatgggaacccttggttggagttgatcagcggttcatgcttcagatcggtattacagcctcggtagatgaactgagagtaagctacatttttcttttgtctctcttttatacccatcattccatcaataatgtcactatgtttgtccc

SEQ ID NO: 11285 - protein, 432 aa, Zea mays subsp. mays
  peptide (1)..(432): Ceres Seq. ID no. 12411880
FPQNLWRLFETISSLTNASEVLQKRSACGVRRQRWRPWRAPRSEEEAEGRLGLWIRGPVLAPGARTEHPPPPAFQVRPPLPRRLQGLAPDRLRPRVRADHNRHQPAMPLVSFLRSAAGSKRGQTDCCVDAFDLSADSFRSVVRFADKGTRCSSFDIHGSCDGLLLLSFDARFYVCNPATHQWTRLPAPLRASWLAGFYRHEPTGEYRALFYRGQWPGTDYYIMVADSRKGRGIGLPSEKYGYKFRRQPYSLPVLLRGHLHWMAAIEGYDYEMLAFNTTTEKFTVMCPPVVRWHMSLAEVGNELALLSCGHQVPMLELWILKDYENKSWVCTHWIRLPELKMSTFAFDDFSRMIFVSEKGVLIATPEQKLLRYDLNGTLLESFPCNNGSHLKITPYTFKESLVRHAFFETPDCNADGHEDEDEPEPPPFFLGL

SEQ ID NO: 11286 - protein, 326 aa, Zea mays subsp. mays
  peptide (1)..(326): Ceres Seq. ID no. 12411881
MPLVSFLRSAAGSKRGQTDCCVDAFDLSADSFRSVVRFADKGTRCSSFDIHGSCDGLLLLSFDARFYVCNPATHQWTRLPAPLRASWLAGFYRHEPTGEYRALFYRGQWPGTDYYIMVADSRKGRGIGLPSEKYGYKFRRQPYSLPVLLRGHLHWMAAIEGYDYEMLAFNTTTEKFTVMCPPVVRWHMSLAEVGNELALLSCGHQVPMLELWILKDYENKSWVCTHWIRLPELKMSTFAFDDFSRMIFVSEKGVLIATPEQKLLRYDLNGTLLESFPCNNGSHLKITPYTFKESLVRHAFFETPDCNADGHEDEDEPEPPPFFLGL

SEQ ID NO: 11287 - protein, 296 aa, Zea mays subsp. mays
  peptide (1)..(296): Ceres Seq. ID no. 12411882
AFHKICGDYSKPSRRSRTRQRFCRNGARAAFVGNVGVHGEHRGPRKRQKAASASGSVAPYLPQELVRNILLRLPSRSVLRFRAVCKDWLRIVSDREFAPTTTATSRRCPSSPSSAAPPVARGGRRTAASTHLTSAPTVSGPSSGSPTRGRGAAASTSTAPATVSSFSASMPASTFATRQRTSGRASRRPSAPRGSPASTATSPPESTGPCSTGASGPGRTTTSWWRTPGKGGELACRRRNMGTSSGDNRIACRSCSAATSTGWQPLKATTTRCWRSTRRLKSSRLCALLWFGGTCR

SEQ ID NO: 11288 - DNA, 1545 bp, Zea mays subsp. mays
  misc_feature (1)..(1545): Ceres Seq. ID no. 12413819
  misc_feature (1)..(1545): Ortholog of  Ceres SEQ ID NO 15178909 as cited in SEQ ID NO 0
gcaatcttccggaacatccatcgatctccccccagcggcgaggagagccggcggccacaggaaggagaaatggcttccgcacacaacgctctccgggtgtttttcatcctagccgtggtatgtgccgtatgcacagcgaaaaggacaggagccaagaaggaagaatcggcggcagcccctggtggtgctgctggaggcagcggcgggacgttcgacatctccaagctcggcgcgaccagcgacgggcaagacggactgcacaaaggcagtccaggacgcgtggacgtcagcgtgcgaagcgaccggaagcgccacggtggtgatccccaagggcgactacctggtcggccctctcaacttcactgggccatgcaagggcagcagcatcgccatccagctggatggcaacctgctgggatcaaacgacctgaacaagtacacggcgagctggatcgaattgtctcacgttaacaacatcgggatcaccggctcgggcacgctggacggccaggggaccgccgtttatagcaagagcaagaccgacaacgtgaaggcgatgcccaacacactggtgctgtttcacgtgatcaacgccactgtcgccggaatcaaactactcaactccaagttcttccacatcaacatcgacaactcagagagcatcaccgtgaaggacgtgaacgtcaccgcgcccgccgacgttgagaacacggacggcgtccacgtcggaggctcctccaagatcagcatcctcaactcgaccatcggcaccggcgacgactgcgtctcgattgggcccgggtgcaacggcgtcttggtggacagcatcacctgcggccccgggcagggcatcagcgtcggctgcctaggccgctacaaggacgagaaggacgtgagcgacatcacggtgcggaacctgctcaagaacaccaccaacggcgtgcgcatcaagtcgtacgtggacgccgagtccgtgctgacggcctcccatctcaccttcgagaacatcaggatggaggaggtggccaaccccatcgtcatcgaccagtacttctgcccgcagaaggtatgccctggcaagcggagcaactcctcgcatgtctccgtcaaggacgtcacgttccgcaacatcaccggcacgtcgtccacgcccgaggccatcagcctgctctgctcggagacgcagccatgcagcggcgtctccctcatcgatgtcaacgtggagtacgccggcaagaacaacaaaaccatggccgtctgcagcaacgccaagggcaccgccaagggaagcatcgaggcactggcttgcctggtctgatgatgaccttccttttgcatgcatgcatggtatctcatccttgatgatgatctagctcactagttctttttaatttccgcttcattcgcttttccaaattcgattgtgtttcagccaagttgtttagcgggacatctcttgtctgatcttcctgctaaatagagttggactcctatatatagaggccttccggcacatataatatacgtcggaccaatattattgtg

SEQ ID NO: 11289 - protein, 253 aa, Zea mays subsp. mays
  peptide (1)..(253): Ceres Seq. ID no. 12413820
MPNTLVLFHVINATVAGIKLLNSKFFHINIDNSESITVKDVNVTAPADVENTDGVHVGGSSKISILNSTIGTGDDCVSIGPGCNGVLVDSITCGPGQGISVGCLGRYKDEKDVSDITVRNLLKNTTNGVRIKSYVDAESVLTASHLTFENIRMEEVANPIVIDQYFCPQKVCPGKRSNSSHVSVKDVTFRNITGTSSTPEAISLLCSETQPCSGVSLIDVNVEYAGKNNKTMAVCSNAKGTAKGSIEALACLV

SEQ ID NO: 11290 - protein, 156 aa, Zea mays subsp. mays
  peptide (1)..(156): Ceres Seq. ID no. 12413821
AIFRNIHRSPPSGEESRRPQEGEMASAHNALRVFFILAVVCAVCTAKRTGAKKEESAAAPGGAAGGSGGTFDISKLGATSDGQDGLHKGSPGRVDVSVRSDRKRHGGDPQGRLPGRPSQLHWAMQGQQHRHPAGWQPAGIKRPEQVHGELDRIVSR

SEQ ID NO: 11291 - protein, 133 aa, Zea mays subsp. mays
  peptide (1)..(133): Ceres Seq. ID no. 12413822
MASAHNALRVFFILAVVCAVCTAKRTGAKKEESAAAPGGAAGGSGGTFDISKLGATSDGQDGLHKGSPGRVDVSVRSDRKRHGGDPQGRLPGRPSQLHWAMQGQQHRHPAGWQPAGIKRPEQVHGELDRIVSR

SEQ ID NO: 11292 - DNA, 1101 bp, Zea mays subsp. mays
  misc_feature (1)..(1101): Ceres Seq. ID no. 12411875
  misc_feature (1)..(1101): Ortholog of  Ceres SEQ ID NO 13595752 as cited in SEQ ID NO 57735
  misc_feature (1)..(1101): Ortholog of  Ceres SEQ ID NO 12454684 as cited in SEQ ID NO 66778
aaggagaggcacccacgacggcgacgcattggattgggttgggacagaacgagcgacggcgaggagacggcgataagatttggcacacctcggactgtagctgggagactgcacggacggcggcgtccacgagtcacgaggagcccagaggcttcttcacagcagcagcggcaggtccgctgatgccagactccccccagctccaccaaccgcctccccctcccgcgccgccgccggccagcgcaacaccagccgcgccagcggcagcaaatgcgcaacccaagctgactgccgtgaagctgaggatgatcatcaagggcgtgctcgggcggtaccagcgctggaaccccgtgcacccgacggccggcaccttctggggtgtggggctcggcgtcggctgcggcgttggctggggccccggcttcgggcctgaggtgattgggtacgtaggcgccgggtgcggcgtggggttcagcgttgggttcacgctcgccggcgtcggcatcggcctgccgcagcacagcctcatcaggaaccacgaccacggtggttttgcgagcagcgtccctgttgattcagcgagattctacgccctaaccatcatcagaggtctggtatgggacgccatcagctacgtgggcaatgtagcggctatgaggaaagaatctcgacagaagcttccgagnttccaggacagccntcaggttccagggggagttgatctgccgaagctggggaaggcgtgtcgagcagcatccggtccacggtagaatgcatcagggccttcaccaactgactgatcaactccagcccaggaaccatctctgcctgccatgcctgtccctcactcgatttgtatgtttgtatggcttaggtccttcgattcgtacgttcgtgcgtggtagcaccaataaacatgcgatcgattgagttgtgtgtgcttctccattcattcacttgctctttctgcagctcgtgatcgagttgtgtgtgctccattcccaaattatgtatgatcgattagtagcgttaggggttaaccagtagccgctgtgtacttgtgtcacccttggacaaacaatgagatatttctttgtcgcc

SEQ ID NO: 11293 - protein, 255 aa, Zea mays subsp. mays
  peptide (1)..(255): Ceres Seq. ID no. 12411876
  misc_feature (228)..(228): Xaa is any aa, unknown or other
  misc_feature (233)..(233): Xaa is any aa, unknown or other
GEAPTTATHWIGLGQNERRRGDGDKIWHTSDCSWETARTAASTSHEEPRGFFTAAAAGPLMPDSPQLHQPPPPPAPPPASATPAAPAAANAQPKLTAVKLRMIIKGVLGRYQRWNPVHPTAGTFWGVGLGVGCGVGWGPGFGPEVIGYVGAGCGVGFSVGFTLAGVGIGLPQHSLIRNHDHGGFASSVPVDSARFYALTIIRGLVWDAISYVGNVAAMRKESRQKLPXFQDSXQVPGGVDLPKLGKACRAASGPR

SEQ ID NO: 11294 - protein, 195 aa, Zea mays subsp. mays
  peptide (1)..(195): Ceres Seq. ID no. 12411877
  misc_feature (168)..(168): Xaa is any aa, unknown or other
  misc_feature (173)..(173): Xaa is any aa, unknown or other
MPDSPQLHQPPPPPAPPPASATPAAPAAANAQPKLTAVKLRMIIKGVLGRYQRWNPVHPTAGTFWGVGLGVGCGVGWGPGFGPEVIGYVGAGCGVGFSVGFTLAGVGIGLPQHSLIRNHDHGGFASSVPVDSARFYALTIIRGLVWDAISYVGNVAAMRKESRQKLPXFQDSXQVPGGVDLPKLGKACRAASGPR

SEQ ID NO: 11295 - protein, 154 aa, Zea mays subsp. mays
  peptide (1)..(154): Ceres Seq. ID no. 12411878
  misc_feature (127)..(127): Xaa is any aa, unknown or other
  misc_feature (132)..(132): Xaa is any aa, unknown or other
MIIKGVLGRYQRWNPVHPTAGTFWGVGLGVGCGVGWGPGFGPEVIGYVGAGCGVGFSVGFTLAGVGIGLPQHSLIRNHDHGGFASSVPVDSARFYALTIIRGLVWDAISYVGNVAAMRKESRQKLPXFQDSXQVPGGVDLPKLGKACRAASGPR

SEQ ID NO: 11296 - DNA, 1614 bp, Zea mays subsp. mays
  misc_feature (1)..(1614): Ceres Seq. ID no. 12364958
  misc_feature (1)..(1614): Ortholog of  Ceres SEQ ID NO 14315110 as cited in SEQ ID NO 55462
  misc_feature (1)..(1614): Ortholog of  Ceres SEQ ID NO 13596853 as cited in SEQ ID NO 62978
gccgttctttctccctcagaccctcaccaaccaggcaaccaaaccttctccgatggccgcgcccgtgtcgcagccgccggtgtccgccagggcgtccacacggtttctcccccgcgggataggcgcgctcccggagtccgctcccacgtccctccggttatccgtcggccgccgtcgccgggccgccagcctagaggtgaaggcatcgggaaatgtgttcgggaactacttccaggttgcaacctatggcgaatcccatggagggggtgttggttgcgttatcagtggctgcccacccagaattcctctcactgaggcagacatgcaagtagaactcgataaagacgtccgggtcaaagtagaattacaaccccaagaaaggagactgatacatgcaaaattctatcagggacacatgatgggatgactactggtacaccaattcacgtctttgtcccaaacacagatcaaaggggtggtgattacagtgaaatgtctaaggcgtacagaccatcccatgcagatgcaacctatgacttcaagtatggagttagagctgtgcagggaggtggaaggtcatcagccagagaaaccattggcagggtggctgcaggagctcttgcaaagaaaattctaaagctcaaatcaggagtggagatcttggcatttgtttctaaagtgcaccaagtcgtacttccagaagatgcagttgattatgagactgtaaccttggaacatatagagagcaacatcgttagatgtcctgatccagaatatgcagagaagatgattgctgccattgatacggtacgagttagaggagattcaattggtggggtcgtcacatgcattgcaagaaatgttcctcgtggtcttggctctcctgtttttgacaaacttgaagctgaactggcaaaagccatgctttctcttcctgcaagcaaggggtttgagattggcagtgggttcgctggtacggactttactggaagtgagcataatgatgagttctatatggatgaggctggaaatgtgaggacacgaactaatcgctcaggcggtgttcagggagggatatcaaatggtgaaattatttacttcaaagtggcttttaagccaacagcaactatcggaaagaagcaaaatactgtgtcaagggagcatgaggatgttgaacttttggcaagggggcgccatgacccctgtgttgtccctcgagctgttcctatggtggaatccatggctgcgctggtcctgatggaccagctcatggcgcatattgcccagtgtgagatgtttccgctgaaccttgccctacaagagcccattggctctgctagcagtgcatctgaactgtcaccaaacctatcataatgtttgtcgtggaacatgtcccagctttccttctatcgaaattctggtctttgctaagcagtttgcaattcggaacccccataaaccctcgactattgtacctagagataaagtgaacggatatcaagatagaaatgcattaatgtttttgtgatgtgtagtataactgatatttaccccttttctttttttgagagaggacgcatgatgtcgtttgagcaataaagtttaatttgggag

SEQ ID NO: 11297 - protein, 316 aa, Zea mays subsp. mays
  peptide (1)..(316): Ceres Seq. ID no. 12364959
MTTGTPIHVFVPNTDQRGGDYSEMSKAYRPSHADATYDFKYGVRAVQGGGRSSARETIGRVAAGALAKKILKLKSGVEILAFVSKVHQVVLPEDAVDYETVTLEHIESNIVRCPDPEYAEKMIAAIDTVRVRGDSIGGVVTCIARNVPRGLGSPVFDKLEAELAKAMLSLPASKGFEIGSGFAGTDFTGSEHNDEFYMDEAGNVRTRTNRSGGVQGGISNGEIIYFKVAFKPTATIGKKQNTVSREHEDVELLARGRHDPCVVPRAVPMVESMAALVLMDQLMAHIAQCEMFPLNLALQEPIGSASSASELSPNLS

SEQ ID NO: 11298 - protein, 293 aa, Zea mays subsp. mays
  peptide (1)..(293): Ceres Seq. ID no. 12364960
MSKAYRPSHADATYDFKYGVRAVQGGGRSSARETIGRVAAGALAKKILKLKSGVEILAFVSKVHQVVLPEDAVDYETVTLEHIESNIVRCPDPEYAEKMIAAIDTVRVRGDSIGGVVTCIARNVPRGLGSPVFDKLEAELAKAMLSLPASKGFEIGSGFAGTDFTGSEHNDEFYMDEAGNVRTRTNRSGGVQGGISNGEIIYFKVAFKPTATIGKKQNTVSREHEDVELLARGRHDPCVVPRAVPMVESMAALVLMDQLMAHIAQCEMFPLNLALQEPIGSASSASELSPNLS

SEQ ID NO: 11299 - protein, 195 aa, Zea mays subsp. mays
  peptide (1)..(195): Ceres Seq. ID no. 12364961
MIAAIDTVRVRGDSIGGVVTCIARNVPRGLGSPVFDKLEAELAKAMLSLPASKGFEIGSGFAGTDFTGSEHNDEFYMDEAGNVRTRTNRSGGVQGGISNGEIIYFKVAFKPTATIGKKQNTVSREHEDVELLARGRHDPCVVPRAVPMVESMAALVLMDQLMAHIAQCEMFPLNLALQEPIGSASSASELSPNLS

SEQ ID NO: 11300 - DNA, 1284 bp, Zea mays subsp. mays
  misc_feature (1)..(1284): Ceres Seq. ID no. 12412345
  misc_feature (1)..(1284): Ortholog of  Ceres SEQ ID NO 14313060 as cited in SEQ ID NO 59447
  misc_feature (1)..(1284): Ortholog of  Ceres SEQ ID NO 12624676 as cited in SEQ ID NO 61197
gtttcggttcgcgtagcagaactgctcgtgcaacaagcaaacaacccaagagccgggagagttggtgactgcgaggccgagacagaggggatagattgagagagccagagaggtgggcagatggcgacaccgtcgtcgtcgctttgctccagcttcgcctccctgcggaccgcctccatcggccacccccgcggcatcgcgtcatctacacccaggaaggcgttccaagtgagggcatcagctcgggttgacaagttctcaaagagtgatatcattgtgtccccttcgattctgtctgcaaacttcgccaagcttggtgatcaggtaaaagccgtggaggtggcaggatgtgactggattcatgtcgatgtcatggacgggcgctttgtgccaaatatcacaattggacctttcgttgttgatgctctgcgtcctgtgactgatcttccattggatgtacatctgatgattgtggaacctgagcagcgagtccctgattttatcaaggcaggtgctgatattgttagtgtccactgtgaacaaacatcgaccatccatttgcacagaacagtcaatcagattaaaagtctaggagcaaaggcaggagttgttttgaatccagcgactccactcactgcaattgattacattcttgatgttgttgacctggtgttgattatgtctgtgaatcctgggtttggtggccagagctttatcgagagtcaagtaaggaaaattgcagaattgagaaggttatgtgcagagaagggagtgaacccctggattgaggttgatggtggtgttggtccgaaaaatgcctacaaggttattgaagctggggcgaatgccatcgttgctggctctgcagttttcggggctccagactacgctgaagctatcaaaggaatcaagaccagccaaaggcctgcagctgtacacgcataaggaactggacgtgtgatcgtgctctgttcaggtttagcagtgttgggattcgtatagatagatgtgtcttgttttcgagccatacgttatactggagatgaaaggagacggaggaaatatttctctacgtgggtgaatcaatcatgtggacggtaatcacatgacgacaaagcatatggacgagcgctggctcacgagacagagtaatcaacgggagaggcttctagacagctctgcatgtccattccctctataaacaggagagcagttcagtctccattgtaaaggcacccagatatagaagaaagaaataaagagctctctatttgtctctgtttc

SEQ ID NO: 11301 - protein, 274 aa, Zea mays subsp. mays
  peptide (1)..(274): Ceres Seq. ID no. 12412346
MATPSSSLCSSFASLRTASIGHPRGIASSTPRKAFQVRASARVDKFSKSDIIVSPSILSANFAKLGDQVKAVEVAGCDWIHVDVMDGRFVPNITIGPFVVDALRPVTDLPLDVHLMIVEPEQRVPDFIKAGADIVSVHCEQTSTIHLHRTVNQIKSLGAKAGVVLNPATPLTAIDYILDVVDLVLIMSVNPGFGGQSFIESQVRKIAELRRLCAEKGVNPWIEVDGGVGPKNAYKVIEAGANAIVAGSAVFGAPDYAEAIKGIKTSQRPAAVHA

SEQ ID NO: 11302 - protein, 190 aa, Zea mays subsp. mays
  peptide (1)..(190): Ceres Seq. ID no. 12412347
MDGRFVPNITIGPFVVDALRPVTDLPLDVHLMIVEPEQRVPDFIKAGADIVSVHCEQTSTIHLHRTVNQIKSLGAKAGVVLNPATPLTAIDYILDVVDLVLIMSVNPGFGGQSFIESQVRKIAELRRLCAEKGVNPWIEVDGGVGPKNAYKVIEAGANAIVAGSAVFGAPDYAEAIKGIKTSQRPAAVHA

SEQ ID NO: 11303 - protein, 159 aa, Zea mays subsp. mays
  peptide (1)..(159): Ceres Seq. ID no. 12412348
MIVEPEQRVPDFIKAGADIVSVHCEQTSTIHLHRTVNQIKSLGAKAGVVLNPATPLTAIDYILDVVDLVLIMSVNPGFGGQSFIESQVRKIAELRRLCAEKGVNPWIEVDGGVGPKNAYKVIEAGANAIVAGSAVFGAPDYAEAIKGIKTSQRPAAVHA

SEQ ID NO: 11304 - DNA, 1476 bp, Zea mays subsp. mays
  misc_feature (1)..(1476): Ceres Seq. ID no. 15180582
  misc_feature (1)..(1476): Ortholog of  Ceres SEQ ID NO 15180156 as cited in SEQ ID NO 0
tgtggagcctgggagaaatgagagattctctagttttaatttgaagtatgtagaagttgaataaagacctattggatcagaatattgggaaccgagatttgccggccaccaaagtctgcaagaaagagaggagtcatacaaagcccatgaccaacagttgacatgtgcttttgttaagggtccaaatggtacaagcactggttttgatatatctgatgatgatcgaaagtacatgagtaaatgccacattgctgtatcatcctgcatctttggaaattctgatcgactgaggactccatttagcaaaacgattacaagcctctcaaagaagacagtttgctttgctatgtttttggatgaagtcacattgcaaactttagaatctgaaggccagaaaatggacggcatgggtttcattggtatatggaagatcatattgattaagaatatgccgtataatgacatgcgtagagtggggaaaataccaaaatttttggcacacaggctatttccatcatcgaggttctcaatctggttagacagcaaactgagactacaaactgatcctatccttatcctagagtattttctctggcggcatggttatgaatatgctatttccaatcactatgatcgccattgtgtttgggaggaagtagcacaaaataaaaagctgaacaagttcaaccacacaataattgaccagcaatttgagttttatcaagcggatggactgacaaggttcaacccatcggatcccagcaggcttctaccaagctatgtccctgaaggctcttttatcgcaagagagcacacaccgatgtccaacttattttcctgcctgtggtacaatgaagttgatcgattcacacctcgtgaccagctcagctttgcatatacatacttaaaactgagaaggacaaatcctgacagaccattccgtctcaatatgtttaaggattgtgagagacgatcaatagcgaagctattccatcaccggacagaagagagacacaacagtgcacaattaacaagatgacacatccttcctagtgatggagggcagaagagagaggtcagggattgtattctttgatatagttcagctatccacaagactctccattgaaactttatgcccctgtctaggagtttgtactttatataatgcaagccttctttcctttgtcactccagtcctgcaggccagttcccgcctaacatttttttgcagttgacaaggcggattaggagtttctaactgtttggtttttctttgttctccgtaaatctctgtttattcttttgataatatggcccatggatgatctggggaagctatgagtgatcatggacttttcccagattgcccatgcacaatgtattattaccacaccactgtaggactgtgtagtgaggccattgttctcctgcaattctgactgaaatgtaccatacacaactagtaaattactc

SEQ ID NO: 11305 - protein, 268 aa, Zea mays subsp. mays
  peptide (1)..(268): Ceres Seq. ID no. 15180583
MSKCHIAVSSCIFGNSDRLRTPFSKTITSLSKKTVCFAMFLDEVTLQTLESEGQKMDGMGFIGIWKIILIKNMPYNDMRRVGKIPKFLAHRLFPSSRFSIWLDSKLRLQTDPILILEYFLWRHGYEYAISNHYDRHCVWEEVAQNKKLNKFNHTIIDQQFEFYQADGLTRFNPSDPSRLLPSYVPEGSFIAREHTPMSNLFSCLWYNEVDRFTPRDQLSFAYTYLKLRRTNPDRPFRLNMFKDCERRSIAKLFHHRTEERHNSAQLTR

SEQ ID NO: 11306 - protein, 230 aa, Zea mays subsp. mays
  peptide (1)..(230): Ceres Seq. ID no. 15180584
MFLDEVTLQTLESEGQKMDGMGFIGIWKIILIKNMPYNDMRRVGKIPKFLAHRLFPSSRFSIWLDSKLRLQTDPILILEYFLWRHGYEYAISNHYDRHCVWEEVAQNKKLNKFNHTIIDQQFEFYQADGLTRFNPSDPSRLLPSYVPEGSFIAREHTPMSNLFSCLWYNEVDRFTPRDQLSFAYTYLKLRRTNPDRPFRLNMFKDCERRSIAKLFHHRTEERHNSAQLTR

SEQ ID NO: 11307 - protein, 213 aa, Zea mays subsp. mays
  peptide (1)..(213): Ceres Seq. ID no. 15180585
MDGMGFIGIWKIILIKNMPYNDMRRVGKIPKFLAHRLFPSSRFSIWLDSKLRLQTDPILILEYFLWRHGYEYAISNHYDRHCVWEEVAQNKKLNKFNHTIIDQQFEFYQADGLTRFNPSDPSRLLPSYVPEGSFIAREHTPMSNLFSCLWYNEVDRFTPRDQLSFAYTYLKLRRTNPDRPFRLNMFKDCERRSIAKLFHHRTEERHNSAQLTR

SEQ ID NO: 11308 - DNA, 1552 bp, Zea mays subsp. mays
  misc_feature (1)..(1552): Ceres Seq. ID no. 12355643
  misc_feature (1)..(1552): Ortholog of  Ceres SEQ ID NO 12637422 as cited in SEQ ID NO 1006
ataggccataggttgccctgcgggttttacaaaacaagaagaaaaaaaatcacctgctcaacggcggcatcatcggcaagacggcgggtttctgtaccaatctcagccttcgtgtctatctgattccaggaatcaagcgtattgtggtgaacatgaactccacatcttctcagcgtggttaccctgccaagaggtggtgtgcagcgaacatgagctccacatctatgcgtcactctgcatggaagtctgagccctggactcaccttacccacaaacagagacgaccacaatggattgcttataatccaaggacaatgaggcctccaccacttagcactgataccaattctatgaagattctgtcctggaacgttaatggactgcaagctattgtacagtcagggttttctgcagatgaattggttgccagagagaactttgacgtcttatgtcttcaagagacacacttggaggagcgcaatgttgacctttttaaaaacctggtacatgaatatgattacacctgttggtcatgcagtgttgcaaggcttggttattcaggaactgctgttatatcacgggtacaaccaatctcagttcaatatgggcttggcataccagagcatgatcaggaaggcaggcttattaccttggagtttgatgatttttacttggtcaatgcttatgtcccaaattctggccgtggtttacgtagactgaattacaggatcaatgattgggatccatgctttagcgacttcataaagaaactggaatgttctaaaccagtaattgttgctggggatctaaactgtgctcgtcaaagtattgacattcacaatcctcaagcaaaaaccgaggctgcaggtttcacaattgaagagagagagtcatttgaggtcaacttctcaagaaaaggcctcgttgatacattccgtaaacaacacccgaatgcagtggcctacactttctggggtgaaaaccagcgcattaccaacaaaggctggagactggattactttcttgcgtcagagtctattgccgacaaggtccatgattcttacactctgccagatgtagcgctcagcgatcacagtccaattggccttttgctgaagttgtaggcacttatacatctctcagctatttgacaactaaagcaggaagttttaacatcgtcctagataaaagacttgtagaaagattttgcttatgtaggctgaaaactattcaaactcgggtggtacttcgcgtggtctcctgtcgtctgtggaggttgtggatagactattcacgttgtgttcgagaagttaaaacatagcctagaacaattagctgatgttctatagcttgtgaatacatctgtttagtcggcgtaaccggcgaaagagcatctagccgaggagcatctagtcaagttagttaggtggtctaagtagcacctcttaagtgttgagtttgactctccgtggcaacaaattttaggcttggggtaaaaaaacctcttgtttatcccacgctaaagcatatgtctaagacccggtttccggtc

SEQ ID NO: 11309 - protein, 323 aa, Zea mays subsp. mays
  peptide (1)..(323): Ceres Seq. ID no. 12355644
MNSTSSQRGYPAKRWCAANMSSTSMRHSAWKSEPWTHLTHKQRRPQWIAYNPRTMRPPPLSTDTNSMKILSWNVNGLQAIVQSGFSADELVARENFDVLCLQETHLEERNVDLFKNLVHEYDYTCWSCSVARLGYSGTAVISRVQPISVQYGLGIPEHDQEGRLITLEFDDFYLVNAYVPNSGRGLRRLNYRINDWDPCFSDFIKKLECSKPVIVAGDLNCARQSIDIHNPQAKTEAAGFTIEERESFEVNFSRKGLVDTFRKQHPNAVAYTFWGENQRITNKGWRLDYFLASESIADKVHDSYTLPDVALSDHSPIGLLLKL

SEQ ID NO: 11310 - protein, 304 aa, Zea mays subsp. mays
  peptide (1)..(304): Ceres Seq. ID no. 12355645
MSSTSMRHSAWKSEPWTHLTHKQRRPQWIAYNPRTMRPPPLSTDTNSMKILSWNVNGLQAIVQSGFSADELVARENFDVLCLQETHLEERNVDLFKNLVHEYDYTCWSCSVARLGYSGTAVISRVQPISVQYGLGIPEHDQEGRLITLEFDDFYLVNAYVPNSGRGLRRLNYRINDWDPCFSDFIKKLECSKPVIVAGDLNCARQSIDIHNPQAKTEAAGFTIEERESFEVNFSRKGLVDTFRKQHPNAVAYTFWGENQRITNKGWRLDYFLASESIADKVHDSYTLPDVALSDHSPIGLLLKL

SEQ ID NO: 11311 - protein, 299 aa, Zea mays subsp. mays
  peptide (1)..(299): Ceres Seq. ID no. 12355646
MRHSAWKSEPWTHLTHKQRRPQWIAYNPRTMRPPPLSTDTNSMKILSWNVNGLQAIVQSGFSADELVARENFDVLCLQETHLEERNVDLFKNLVHEYDYTCWSCSVARLGYSGTAVISRVQPISVQYGLGIPEHDQEGRLITLEFDDFYLVNAYVPNSGRGLRRLNYRINDWDPCFSDFIKKLECSKPVIVAGDLNCARQSIDIHNPQAKTEAAGFTIEERESFEVNFSRKGLVDTFRKQHPNAVAYTFWGENQRITNKGWRLDYFLASESIADKVHDSYTLPDVALSDHSPIGLLLKL
